United States Patent Application Publication US 2019/0348154 A1 - sequence listing, part 125

SEQ ID NO: 472297 - DNA, 708 bp, Shigella flexneri
atgcaacagaaaagcgacaacgttgtcagccactatgtctttgaagcaccagttcgtatctggcactggctgacggtgttatgcatggcggtgttgatggtcaccggttactttatcggcaagccgctaccttccgtcagtggcgaggcgacgtatctgttctatatgggttacatcaggttaattcacttcagcgccgggatgatttttaccgtggtcttgctgatgcggatctactgggcttttgttggcaatcgttactcccgcgagctgtttatcgtgccggtatggcgtaaaagctggtggcagggcgtgtggtatgaaatccgctggtatctgtttctggcaaaacgtccgagtgccgatataggccataaccccatcgcccaggcggcgatgttcggctatttcctgatgtcggtctttatgatcatcaccggttttgcgctgtacagcgaacacagccagtacgctatttttgcgccgttccgttatgtggtggaatttttctactggacgggtggcaactcaatggacattcacagctggcatcggctggggatgtggctgattggggcgtttgtgatcggtcatgtctacatggcgctgcgtgaagacatcatgtccgacgacacggtgatctccaccatggtcaacggctaccgtagccacaaatttggcaaaataagtaacaaggagcgttcatga

SEQ ID NO: 472298 - DNA, 1794 bp, Shigella flexneri
atgagcactcagtacgaaactcagggatacaccatcaataatgccggacgccgcctggtggtcgacccgattacgcgcatcgaaggccacatgcgctgtgaagtgaatattaacgatcagaatgtgatcaccaatgccgtctcctgcggcaccatgtttcgcgggctggagatcatcctgcaagggcgcgacccgcgcgatgcgtgggcgttcgttgaacgtatctgcggcgtctgtactggcgtacacgccctggcttcggtttacgccatcgaagatgccatcggtattaaagtgccggacaacgccaatatcatccgcaacattatgctggcaacgctctggtgccacgatcatctggtgcacttctatcagcttgccgggatggactggatcgacgtgttagatgcgctgaaagccgacccgcgaaaaacctccgaactggcgcaaagtctctcctcttggccgaaatcatcccctggctatttcttcgacgtacaaaatcgcctgaagaaattcgttgaaggcgggcagttggggatcttccgcaatggctactgggggcacccgcagtacaaactgccgccagaagccaacctgatgggctttgcccactatctcgaagctctcgatttccaacgtgaaattgtcaaaattcacgcggtctttggcggtaaaaacccgcatccaaactggattgtcggtgggatgccttgcgccattaacattgacgaaagcggcgcggtcggggcggtcaatatggaacgcctgaacctggtgcagtcgattatcacccgcacggcagacttcattaacaacgtgatgatccccgacgccttagccatcggtcagttcaacaaaccgtggagcgaaatcggcacgggtctttctgataaatgtgtcctcagctacggcgcattcccggatattgccaacgactttggtgagaaaagtctgctgatgcctggcggcgcggtgattaacggcgacttcaacaatgtgctgccagtggatttggttgatccgcagcaggtgcaggagtttgtcgatcacgcctggtatcgttatcccaacgatcaggtcgggcgtcatccattcgatggcattaccgacccgtggtacaaccccggcgatgtcaaaggcagcgataccaacattcagcagctgaatgaacaggaacgctactcgtggatcaaagcgccacgctggcgcggtaacgcgatggaagtggggccgctggcacgcacgttaatcgcttatcacaaaggcgatgctgcgaccgttgagtcggtcgatcgcatgatgtcggcgttgaacctgccgctttccggtatccagtcaacgttgggccgcattttgtgccgcgcgcacgaagcgcagtgggccgcaggtaagttgcagtatttcttcgacaagctgatgaccaacctgaaaaacggcaatctcgccactgcttccactgaaaaatgggaacctgcaacctggccgacagagtgccgtggcgtcggctttaccgaagcgccgcgcggagcgttaggccactgggccgccattcgcgatggcaagattgatctctaccagtgcgtggtgccgaccacctggaacgccagtccgcgcgatcccaaagggcagattggcgcttatgaagcggcgctgatgaacaccaaaatggcgatccccgagcaaccgctggagatactgcgtactctgcacagctttgatccgtgcctcgcctgttcaactcatgtgctgggcgacgacggtagcgagctgatctccgtgcaggtgcgttaa

SEQ ID NO: 472299 - DNA, 1119 bp, Shigella flexneri
atgaataacgaggaaacattttaccaggccatgcggcgtcagggcgttacccggcgcagctttctcaaatattgtagtctggctgccacgtcgctgggattaggcgcgggaatggcaccaaagattgcctgggcgctggagaacaaaccgcgcattccggtggtatggatccacggtctggaatgtacctgctgtaccgaatcttttatccgctccgctcacccactggcgaaggacgtcatcctttccctgatttccctcgattacgacgataccctgatggctgccgccggaacccaggcggaagaagtctttgaagacatcatcacgcaatataatggcaaatatatcctcgcagtagaaggtaatccgccgctgggcgagcaggggatgttctgtatcagcagcggtcgaccgtttattgaaaaactcaaacgtgccgctgccggagccagcgcgattatcgcctggggaacctgcgcgtcctggggctgcgtgcaggccgcgcgacctaatccgacacaggcaacgcctatcgacaaagtcatcaccgacaaacccattatcaaagtacctggctgcccgccgatcccggatgtgatgagcgccatcattacttacatggtgacctttgatcgcttgccagatgtcgacagaatgggtcgtccactgatgttttatggtcagcgtatccacgataaatgctatcgccgcgctcacttcgacgccggagagttcgtccagagttgggatgatgacgctgcccgcaaaggttattgcctgtacaaaatgggctgcaaagggcctaccacctataacgcctgttcctccacacgctggaatgatggcgtttctttcccaatccagtctggtcacggctgcctgggctgtgcggaaaatggtttctgggatcgcggttcgttctacagccgcgtggtcgatattccgcaaatgggtactcattccaccgccgataccgtcggtttaaccgcgcttggcgtggtggcagcagctgttggtgtgcacgcagttgccagcgccgttgaccaacgcagacgtcataaccagcaacctacagaaaccgaacatcagccaggcaatgaggataaacaggcatga

SEQ ID NO: 472300 - DNA, 660 bp, Shigella flexneri
atggatcgtattgttagttcttcacatgaccgtacatcactgcttagcacccataaggtgctgcgtaatacctattttctgctgagcctgacgctggccttttcggcgattaccgcaactgccagtacggtgctgatgctgccatctccgggtctgattctgactctggtgggtatgtatggtttgatgttcctgacctataaaacggcgaataagccgaccgggattatctccgcattcgcctttaccggttttctgggttatatcctcggaccaattctgaacacctatctgtctgccggaatgggtgacgtaatcgctatggcactgggcggaacggcgttagtgttcttctgctgctctgcatatgtgctgaccacccgcaaagatatgtcgttcctcggcggtatgctgatggcgggtattgtggtggtactgattggtatgattgctaatatcttcctgcaactgcctgctctgcatctggcgatcagcgcggtcttcattctgatctcctctggcgctatcttgtttgaaaccagcaacatcattcatggcggtgaaacgaactatattcgtgccacggttagcctgtatgtttcgctgtacaacatcttcgtcagcctgctgagcattctgggcttcgccagccgcgattaa

SEQ ID NO: 472301 - DNA, 330 bp, Shigella flexneri
atgctgatcttcgaaggtaaagagatagaaacggataccgaaggctatctcaaagaaagcagccagtggagtgaaccgctggcagtggtgattgcagagaacgaagggatttcgctgtcgccagaacactgggaagtggtgcgttttgtacgtgacttctacctggaatttaatacgtctccggcgattcgtatgctggtaaaagcgatggcgaataaatttggtgaagaaaaaggtaacagccgctatttataccgactgttcccgaaaggcccggctaagcaagccaccaaaattgctggcctgccaaaaccggtaaaatgtatttaa

SEQ ID NO: 472302 - DNA, 279 bp, Shigella flexneri
atgtcgaaagtctgcataattgcctggatttacgggcgagttcagggcgtaggatttcgctacaccacacagtacgaagcgaaaagactgggcttaaccgggtacgccaaaaatcttgacgatggcagcgtggaagtggttgcctgcggtgaagaagggcaggtagaaaaattaatgcagtggttaaagagtggcggcccgcgttctgcgcgtgtagaacgggtgctcagcgagccgcatcatccctcgggggaattaaccgattttcgtatccgttaa

SEQ ID NO: 472303 - DNA, 1176 bp, Shigella flexneri
gtgttagccaaagggcgcgaaaaatcattacttcgtcgccatccgtgggtcttttccggggccgttgcccgcatggaaggtaaagccagcctcggtgaaaccatcgatattgttgatcatcagggaaaatggttagcacgcggcgcttattcgccagcttcgcaaatccgggcgcgcgtctggacgtttgacccgtctgagtctatcgacattgcttttttttcccgccgtttgcaacaagcacaaaaatggcgtgactggctggcgcaaaaagatggcctcgacagctatcgtttaatcgccggagaatctgatggcctgccgggtattactatcgatcgtttcggtaattttctggtgctgcaactgctgagtgctggcgcagaatatcagcgcgcggcattaattagtgccctgcaaacgctgtacccggaatgtgcgatttacgatcgcagcgatgttgcggtacgtaaaaaagaagggatggagctgacccagggcctcgtcaccggcgagttgccgcctgccctgctgccgattgaagaacacggcatgaagctgctggtggatattcagcacggacacaaaacgggctactatctggaccagcgagacagccgcctggctacccgccgctacgttgaaaataaacgtgtgctgaactgtttctcctataccggtggtttcgccgtatcggcactgatgggcggttgcagccaggttgtcagcgttgatacctcccaggaagcgctggatattgcacggcagaacgttgagctgaacaaactggatctgagcaaggctgagtttgtccgtgatgatgtctttaaattgctgcgtacttatcgcgatcgcggtgaaaaatttgacgttatcgtgatggacccgccgaagtttgttgagaataaaagccagttgatgggcgcgtgtcgtggttataaagacatcaacatgctggcgattcagttgctgaatgaaggcggtattctcctgactttctcctgttccggtctgatgaccagcgatttatttcagaaaatcatcgcggatgccgcaattgatgccggtcgtgatgtacaatttatagagcagttccgtcaggcagccgatcatccggtgatcgctacctacccggaagggctatatctgaaagggtttgcctgtcgcgtcatgtaa

SEQ ID NO: 472304 - DNA, 318 bp, Shigella flexneri; identical to SEQ ID NO: 261426

SEQ ID NO: 472305 - DNA, 414 bp, Shigella flexneri
atgaaagaaaccgatattgcaggcattttaacgtccactcacaccattgcgctggtgggggcaagcgacaaacccgatcgccccagctatcgcgtgatgaaatatctactcgaccaggggtatcacgtcattccggtttcgccaaaagttgccggcaaaacgctgctgggccagcaggggtatggcacgctggcagacgttccggaaaaggtcgatatggtcgatgttttccgtaattcagaagcggcgtggggcgtggcacaggaagctattgccattggcgcgaaaaccctctggatgcaactgggggtgattaatgagcaagcggcagtactggcacgggatgccgggttaaatgtggtgatggatcgctgcccggctattgagatccctcgcctgggtctggccaaataa

SEQ ID NO: 472306 - DNA, 663 bp, Shigella flexneri
atgaaaaccggcatcgtgaccaccttgattgcattatgtttgccggtatccgtttttgccaccacgctgcggctttcaaccgatgtcgatcttctggtactcgacggcaagaaggtttccagctctctgctgcgcggtgcggacagcattgaactggacaatggaccgcatcagttagtgtttcgcgttgagaagacgattcatctttccaatagtgaagaacggctgtatatctccccaccgctggtggtcagttttaatacccagctcatcaaccaggtcaattttcgcctgcctcgcctggagaatgagcgggaagctaaccattttgatgccgcgccgcgccttgaattgttggatggcgatgcgacgccgattccggtaaagctggatattctcgccattacctcaacggcaaaaacgattgattatgaggtcgaggttgaacgctataacaaatccgcgaaacgcgcttcactaccgcaatttgccacgatgatggcagatgacagtacgctgctttcgggtgtttccgagctggatgctattccaccgcagtctcaggtgctcacagaacaacggctgaagtattggtttaaactggctgacccacaaacgcgaaatactttcctgcaatgggcggaaaaacaaccatcttcctga

SEQ ID NO: 472307 - DNA, 459 bp, Shigella flexneri
atggaactgacgactcgcactttacctgcgcggaaacatattgcgctggtggcacacgatcactgcaaacaaatgctgatgagctgggtggaacggcatcaaccgttactggaacaacacgtactgtatgcaacaggcactaccggtaacttgatttcccgcgcgaccggcatgaacgtcaacgcgatgttgagtggcccaatggggggtgaccagcaggttggcgcattgatctcagaagggaaaattgatgtattgatattcttctgggatccactaaatgccgtgccgcacgatcctgacgtgaaagccttgctgcgtctggcgacggtatggaacattccggtcgccaccaacgtggcaacggcagacttcattatccagtcgccgcatttcaacgacgcggtcgatattcttatccccgattatcagcgttatctcgctgaccgtctgaagtaa

SEQ ID NO: 472308 - DNA, 2055 bp, Shigella flexneri
atggaactgaaagcgacaacgcttggaaaacgtctggcacagcacccttacgatcgggcggtgatcctcaatgccgggattaaagtctccggcgatcgccacgaataccttattcctttcaatcaattactggcgattcactgtaagcgcggtctggtatggggcgagctggaatttgtactgccggacgaaaaagtggtgcgtctgcacggcacagaatggggcgagacgcagcgtttttaccatcatcttgatgctcactggcggcggtggagtggcgagatgagcgaaattgcgtctggtgttttacgccagcaactggatttgattgccacgcgcactggagaaaataaatggctgacgcgtgagcaaacctctggcgttcagcaacaaatccgccaggctttgtcggcgttgccgttgccggttaaccgactggaagaattcgataactgccgtgaggcgtggcgtaaatgtcaggcttggttgaaagatattgaaagcgctcggttgcagcataaccaggcgtataccgaagccatgcttaccgagtatgcggattttttccgccaggtcgagtcttcaccgctgaatccggcgcaggcccgggcagtcgttaatggcgagcattctctgttagtgctggccggtgcaggaagcggaaaaacgtcggtgctggtggcccgtgcaggctggttgctagcgcgtggtgaagcgtcccctgagcaaattttattgctggcgtttggtcgcaaagccgctgaagagatggacgagcggattcgcgaacggctacataccgaagacattaccgcacgcacgtttcatgcgttggcgctgcatattattcagcagggcagcaaaaaagttccgatagtcagcaaactggaaaatgataccgctgcccgtcatgaactctttattgctgagtggcgcaagcaatgcagcgaaaagaaagcgcaggcgaagggctggcggcaatggctgacggaagaaatgcagtggtcagtgccagaaggtaacttctgggatgatgaaaaattacagcgtcgccttgcctctcgcctcgatcgctgggtaagtctgatgcggatgcacggtggtgcacaggcagaaatgattgccagtgcacccgaagagattcgcgatctgttcagtaaacgtatcaagttgatggccccgttattaaaagcctggaaaggtgcgctgaaggcagaaaacgctgtcgatttttcgggccttattcatcaggcgattgtgattctggagaaaggccgctttatcagcccgtggaagcatattctggttgatgaatttcaggatatctcgccgcagcgcgcagcgttgttagcggcattacgcaagcaaaacagtcagacgacgttgttcgccgttggtgatgactggcaggcgatttaccgattcagcggtgcgcaaatgtcgctcaccaccgctttccatgaaaactttggtgaaggcgatcgctgtgatttagacacgacttaccgttttaacagtcgtatcggtgaggtggcaaaccggtttattcagcagaacccaggccagctgaaaaagccgctaaacagcttaaccaatggagacaaaaaagccgtcacgttattggatgagagtcaacttgacgctttgctggataagctctctggttatgccaaaccggaagagcgcattctgatcctggcgcgttaccatcacatgaggcctgccagcctggaaaaagcggcaacacgctggccgaagttgcaaatcgactttatgaccattcatgccagcaaagggcaacaggcggattacgtcatcatcgttggcttgcaggaggggagtggtggttttccggctgcggcgcgggagtcgattatggaagaggcgctactgccaccggttgaggatttcccggacgctgaagaacggcgtttaatgtacgtggcgctgacccgggcacgccatcgggtatgggcactgtttaacaaagagaatccctctccctttgtggaaatactgaaaaatctggatgtgccggtggcgagaaaaccgtaa

SEQ ID NO: 472309 - DNA, 447 bp, Shigella flexneri
atgcgtaccgttttgaacattctgaactttgtgcttggcggatttgccaccactctgggctggctgttggcgactctggtcagtattgtgctgatttttaccttaccgctgacacgatcctgctgggagatcactaaactgtctctggtgccttatggcaatgaagctattcatgtcgatgaactgaacccggctggcaaaaatgtgttgctgaatactggcggtacggtattgaatattttctggctgattttctttggctggtggttatgcctgatgcacattgcaacgggcatcgcacaatgtatttcaatcattggcattcctgtcggcattgcgaactttaaaattgccgctattgcactatggccggttggtcgtcgcgtggtatcggtagaaacagcgcaagctgcgcgtgaagccaatgcacgtcgtcgttttgaataa

SEQ ID NO: 472310 - DNA, 2166 bp, Shigella flexneri
atggcctttatgctaagtcctttgctcaaacgctatacctggaacagcgcctggctgtattacgcgcgtatttttattgcgctttgtggaaccacagcgtttccgtggtggctgggtgatgtaaaactgacgattccgctaacgctggggatggtggcagcggcgctgaccgatctcgatgaccgactggcgggacgtttgcgtaacctcatcattacgctgttctgcttttttatcgcctcggcctcagtagaattgctgtttccctggccctggctatttgcgattggcttaacgctctctaccagcggcttcattttgctcggcggtctgggtcaacgctatgcaacaattgccttcggtgcattgctgatcgccatttacactatgttgggaacatcactgtatgagcactggtatcagcagccgatgtatctgctggccggtgccgtctggtacaacgtcctgacacttattggtcatctgctgttcccggtccgcccgctgcaggacaacctggcgcgttgctatgaacaactggcgcgttatcttgagctcaagtcgcgcatgtttgatcctgatattgaagatgaaagccaggcaccgctgtacgatttggctctcgccaacggtcagctgatggcgacattgaatcagacgaaactctcgctgctgacccgcttacgtggcgatcgtggtcaacggggaacgcgtcgcacgctgcattattactttgtcgcacaggatattcacgagcgtgccagctcttctcatattcagtatcaaacattgcgtgaacattttcgccacagcgacgtgctgttccgttttcagcggctgatgtcgatgcagggccaggcgtgccagcaactgtcacgctgtattttgttgcgtcagtcttatcaacatgatccgcattttgagcgcgcttttacgcatattgatgctgcgctggagcggatacgcgataacggcgcacccgccgatttactcaaaacactgggatttttgctgaacaatttacgcgccattgatgcccaactggcaacaattgaatcagaacaggcccaggcactaccccgtaataatgacgaaaatgagctcgctgatgacagcccgcacggattgagtgatatctggctgcgtcttagccgtcacttcacgccggaatccgccctcttccgtcatgcggtaagaatgtcgctggtgttgtgcttcggctacgccatcattcaaataaccggaatgcatcacgggtattggatcttgctgacaagtttgtttgtctgccagccaaactataacgccacgcgccaccgcctgaagttaaggattattggtacgctggtaggtatcgcgattggcattcctgtgctgtggtttgtgccatcactggaagggcagctggtgctgctggttattaccggcgtgctcttttttgccttccgtaacgtgcaatacgctcatgcaacgatgttcatcacacttttggtgctactgtgttttaacttactgggtgaaggttttgaagtagcgttacctcgcgtaatcgatacgctgattggttgtgccattgcgtgggcggcagtgagctacatctggcctgactggaagtttcgcaatctgccgcgaatgctcgaacgcgccacagaggccaactgtcgctatctcgatgccatactggagcaataccatcaggggcgtgataaccgtctggcgtatcgtattgcccgccgcgatgcacacaaccgtgatgctgaactggcgtcggtggtatcaaatatgtccagcgaaccgaacgttaccccgcaaattcgcgaagccgcgtttcgcttgctgtgccttaaccatacgtttaccagctatatctcagccctcggtgctcaccgggagcagttaactaatcctgaaattctggcatttcttgatgacgcagtttgctatgttgatgacgcgttacatcatcaacctgctgatgaagaacgcgtcaatcaggcattagctggcctgaaacagcggatgcagcaacttgaaccacgggcagatagcaaagaacctctggtcgtacaacaagttgggttattgattgcattactgccagagattggtcgtctgcaacgccagattacagtcccaacatccgggcgaactggcgtgtttcattag

SEQ ID NO: 472311 - DNA, 501 bp, Shigella flexneri
gtgcttctccgtatacaccatgttatcggagagctgcccacgtatggttatcgtcgggtatgggcgctgcttcgcagacaggcagaacttgatggtatgcctgcgatcaatgccaaacgtgtttaccggctcatgcgccagaatgcgctgttgcttgagcgaaaacctgctgtaccgccatcgaaacgggcacatacaggcagagtggccgtgaaagaaagcaatcagcgatggtgctctgacgggttcgagttctgctgtgataacggagagagactgcgtgtcacgttcgcgctggactgctgtgatcgtgaggcactgcactgggcggtgactaccggcggcttcaacagtgaaacagtacaggacgtcatgctgggagcggtggaacgccgcttcggcaacgatcttccgtcgtctccagtggagtggctgacggataatggttcatgctaccgggctaatgaaacacgccagttcgcccggatgttgggactgtaa

SEQ ID NO: 472312 - DNA, 2199 bp, Shigella flexneri
atgagttttaacgcaaaggatatgacccagggcggtcagattgcgtccatgcgtatccgcatgttcagccagatcgccaatatcatgctttactgcctgtttatttttttctggatactcgttggtctggttttatgggtaaaaataagctggcagacgtttgtgaacggctgtatttactggtggtgtaccacgctggaaggcatgcgggatttaatcaagtcccagccagtatatgagatccagtattacggcaaaaccttccggatgaacgcggctcaggtactgcatgataaatacatgatctggtgcggtgagcagctatggtctgcattcgttctggcgtctgtcgtggccctggttatttgcctgatcaccttctttgttgtctcctggattctggggcgtcagggtaaacaacagagcgaaaatgaagtcacaggtggtcgtcagctgacagacaatccgaaagacgttgcccggatgctgaaaaaagacggcaaggactccgatatccggattggcgacctgccgattatccgggattccgaaatccagaacttctgtctgcacggcacggtcggggccggtaagtcggaggttatccgtcgtctggccaactacgcccgtcagcgcggtgatatggtggtgatttatgaccgttcaggggaatttgttaaaagttactatgatccctccatcgataaaatcctgaatccgctggatgcccgctgtgccgcatgggatttgtggaaggagtgcctgacacagccggattttgataataccgcaaatactctgatccctatgggaacaaaagaagacccgttctggcagggttcaggacgtaccatttttgcggaagcggcgtacctgatgcgtaatgaccccaaccgcagctacagcaaactggtggacacactgctttccatcaaaattgaaaaactgcgtaccttcctgcgtaattcaccggcggccaacctggtggaagagaaaattgagaaaacggcaatttccatccgtgctgtgctgaccaactacgtgaaagctatccgttacctgcaggggattgagcataacggtgagcccttcaccatccgtgactggatgcggggtgtccgggaagatcagaaaaacggctggctgtttatttcgtcgaatgccgacacccatgcctccctgaagccggtgatctccatgtggctgtccattgccattcgtggtctgctggcaatgggagaaaaccgtaaccgtcgtgtgtggtttttctgtgatgagctacccacgttacacaaactgccggacctggtggagatcctgccggaagcccgtaagttcggtggctgttatgtgtttggtatccagtcctatgcccagctggaagatatctacggtgagaaagcggctgccacgctgtttgacgtcatgaacacccgtgcctttttccgttctcccagccataagattgcagagttcgctgccggtgagattggtgagaaagagcacctgaaagccagcgagcagtattcctacggtgctgatccggtacgtgacggggtatcgaccggtaaggatatggagcgccagacgctggtcagttattccgacattcagtctctgccggatctgacctgttatgtcaccctgcccggaccgtatccggcagtaaaactctcactgaaatatcaggcacgtccgaaggttgcccctgagtttattccgcgtgacatcaacccggaaatggagaaccgtctgagtgccgtacttgccgcaagggaagcagaaggtcgtcagatggccagcctcttcgaaccggatgtgccggaagttgtttccggagaagacgtgactcaggctgaacagccgcaacagccgcaacagccgcaacagccgcaacagccgcaacagccgcaacagccggtgtctcctgccatcaacgataagaagtcagattcaggtgtgaatgttccggcaggggggatcgagcaggagctgaaaatgaaaccggaagaagagatggaacagcaactgccacccgggatcagtgaatccggtgaagtggtggatatggccgcttatgaggcatggcaacaggaaaatcatccggacatccagcagcagatgcagcgtcgtgaagaggtgaacattaatgtgcaccgggagcgtggggaggatgttgagccgggagatgatttctga

SEQ ID NO: 472313 - DNA, 777 bp, Shigella flexneri
atgacaggcgataagaaaactgtggtttgtaataaaggtaatttgatgaaaacaaaaaaattaatgatggttgcactggtcagttccactctggccctttcagggtgtggtgcgatgagcacagcaatcaagaagcgtaaccttgaggtgaagactcagatgagtgaaaccatctggcttaaacccgacagcgaacgcacggtatttctgcagatcaaaaacacgtctgataaagacatgagtgggctgcagggcaaaattgctgatgctgtgaaagcaaaaggatatcaggtggtgacttctccggatgcagcctactactggattcaggcgaatgtgctgaaggccgataagatggatctgcgggagtctcagggatggctgaaccgtggttatgaaggcgcagctgttggtgcagcgttaggtgccggtattaccggctataactcaaattctgccggtgccacactcggtgtaggccttgctgccggtctggtggggatggctgcagatgcgatggtggaagatgtgaactataccatgatcacggatgtgcagattgcagagcgtactaaggcaacggtgacaacggataatgttgccgccctgcgtcagggcacatcaggtgcgaaaattcagaccagtactgaaacaggtaaccagcataaataccagacccgtgtggtttcaaatgcgaacaaggttaacctgaaatttgaagaggcgaagcctgttctcgaagaccagctggccaaatcaatcgcaaatattctctga

SEQ ID NO: 472314 - DNA, 498 bp, Shigella flexneri; identical to SEQ ID NO: 154001

SEQ ID NO: 472315 - DNA, 2823 bp, Shigella flexneri
gtgaatgaagtttatgtgattgccggtggtgagtggttgcgtaacaacctgaatgccattgcagcatttatgagtacccggacctgggattcaattgaaaaaatcgcgctcaccctgtctgttgttgctgtggcttttatgtgggtacagcggcataacgtgatggatttgctgggctgggtggccgtgtttgtgcttatcagcctgctggttaatgtccgtacatcggtgcagattattgataacagtgacctggtcaaagtccatcgggtggataatgtgccggtcggtctggcgatgccactttcactgacgacacgtatcgggcatgcaatggtggtcagctacgagatgatattcacccaaccggacagcgtcacctacagcaagacaggcatgctgttcggggcgaatctgattgtgaaaagcaccgatttcctgtcccggaatccggaaatcatcaatctgttccaggactacgtccagaactgcgtgctgggtgatatttacctgaatcataaatacacgctggaagatctgatggcctccgctgacccctacacgctgattttttcccgacccagcccgctacggggcgtttatgacaacaataataatttcataacctgtaaggatgcgtcggtcacgctgaaagacaggctgaatctcgatacaaagacgggaggcaagacctggcattattatgtgcagcagatatttggcggcagaccggacccggacctgttattcagacaactggtcagtgacagttacagttatttctacggctccagtcagtctgccagccagattatgcgccagaacgtcacaataaatgccctgaaagagggtatcaccagtaatgccgcccgtaatggtgacaccgccagcctggtgaatctggccaccacgtcatcgatggagaagcaacgtctggcgcatgtctctatcggtcatgtgacaatgcgaaacctgccaatggtacagactatcctgacgggaattgccattggtattttcccgcttctggtactggcagctgtcttcaacaaactgacactgtccgtcctgaaaggctatgtgtttgccctgatgtggctgcagacctggccgttgttgtatgccattctgaacagtgccatgacattctatgcgaagatgaatggtgcgccggtcgtgctgtctgaactctctcagatacagctgaaatactctgacctggcctctactgccgggtatctttcagccatgatccccccgttgtcatggatgatggtaaaaggccttggcgcaggtttttccagcgtgtacagccacttcgcctcttcctctatcagtccgacggccagtgcagcaggcagtgtggttgacggtaattactcctacggcaacatgcagacggaaaacgtgaacggcttcagctggagcaccaacagcaccacgtcgtttggtcagatgatgtaccagaccggcagtggcgcaactgccacacagacccgtgacggtaatatggtgatggatgcaagcggagcgatgtcccggttaccggttggtatcaatgcaacgcgtcagattgcagcggcacaacaggaaatggcccgggaagcatcgaacagagcagaaagtgccctgcatgggttcagcagcagtattgccagtgcctggaactcgctcagtcagtttggttctaaccgggggagcagtgattctgtcaccggtggcgctgacagcaccatgagtgcacaggactccatgatggccagccgtatgcgcagtgcagtggaaagctatgcgaaggcgcataatatcagtaatgagcaggcaacaagagaactggcatcaagaagtacgagaggttctgcggggatgtatggcgatgttcatgctgaatggggggttaaacctaaaattcttggtgttggtggtggcgcaggtgttagaggtggtggtcgggcaagtattgactggagtgatgaggatgcgcatcaggccagcagtggttcacgggccagccatgatgctcgccatgatatcgatgccagggctacacaagactttaaagaggccagcgattactttaccagtcgcaaggtcagtgaatccggcagccatacggacaataatgccgattcccgtgtggaccagctgtctgcagccctgaactcagcgaaacagagttacgaccagtacacgacgaatatgacccgcagccatgaatatgcggaaatggcctcccgtactgaaagcatgagcgggcagatgagtgaagacctgtcgcaacagtttgcacagtatgtgatgaaacgcgcaccgcaggatgcagaagctattctgacaaataccagttcgccggagattgcagaacgccgtcgggctatggcgtggtcttttgttcaggaacaggtgcagcctggtgttgataatgcctggcgtgaatcccgtggggatattggtaaaggaatggagagcgtaccttcgggtggtggcagccaggatattattgctgaccatcaggggcatcaggccattattgatcaaagaacgcaggacagtaatatccgtaatgatgtaaaacatcaggttgataatatggtcacagaatatcgtggcaatatcggagatactcagagcagcatacgtggcgaagaaaatattgtaggaagacagtattctgaactacaaaatcaccataaaacagaggcattatctcagaataataaatataatgaagaaaaatcgggtcaggaaagaatgcctggtgctgacagtccacaggaactgatgaaaagagcaaaggagtatcaggataagcacaagcaataa

SEQ ID NO: 472316 - DNA, 1374 bp, Shigella flexneri
atgcctcgcattaaacctcttctggttctttgtgccgttttactgacggtcacacccgcagcgtcagcggatgtgaacagcgacatgaatcagttctttaataagctgggatttgcgtccaatgtcacccagccgggcgtctggcaggggcaggccgccgggtatgcctatggtggctccctgtatgcccgcacccaggtcaaaaatatccagctgatttccatgacgctgccggatatcaatgccggatgtggcggcatcgacgcctatctcggctcgttcagttttattaatggcgatcagttgcagcgttttgttaagcagattatgagcaatgctgccggttacttttttgaccttgccctgcagacaacggtgccggaaataaaaaccgcaaaagacttcctgcagaaaatggcaagtgacattaacagtatgaacctcagttcctgtcaggtggcacaggggcttgtgggggggctgttccctcagacgcaggaatctcagcagaaagtttgtcaggacattggcagtgaaagcaatatcttcgccgactgggccgcatctcgtcaggggtgcacggtcggagggcagtcctcatctgttcgtgacaaagccagcgacaaggacaaggagcgggtgctgaaaaaccagaatatcatatgggaggcgctgaaaaaaaacagaatgtttgacggcaacaaagagttgaaagaatttatcatgacgctcaccggtacgctgatttttggggaagacagcgagattacccccctgccggcgcgtaccactgaccgcgatatcctccgggcgattatggaggggggaacggcaaaaatttaccactgcaacgattcggacaagtgtctgaaggtggtggcggatgcaaatgtgaccatcgcccgggataaagccctgaagtcacagattacaaaactgctgaccagtattcagaataaagcagtgagtgacactccgcttgacgcccgggaacaggggtttatttccagcaccaccattcccgtttttaaatatctgattgacccgcagatgctcggtgtgtccaacagcgtcgtttaccagctgacggactatatcggctacgacatcatgctccagtacattcaggaactgcttcagcaggcccgggccatgattgccaccgggaactatccgcaggctgtgatggacaatgttctggagaatctgaatcaggcacagcaacagattgccattttccagagtcaggtacaggtccagcaggatgcgctgctggttgtcgaacgtcagatgagctacatgcgtcagcagctttccgcccgtatgctcagccgttaccagaacaactatcacttcggagggaattcactgtga

SEQ ID NO: 472317 - DNA, 393 bp, Shigella flexneri
atgaaagaaaaaagaaatgatgcggaactaaaaaacagaaaaactaaacggaattatgattatgaacgcagggtttctgatatatattttgatctgttttttgtgttcgttgctgccggaacttttttatgggtgattatgcacagtatttttgatgcctgtattgattcgtggaaagctgacccggaattaaataattttcgttatatgtggaacatcctgatgtatgtcattccgtatacgttatgggcgtttgcaggtggatttcttatcgtatacgtcaggaaccctttaaatgaattaataaacggggggatcaggatattccggctgaaacgccgtatgcgccgggagaacagtttcagggaggggaataacgatgcctcgcattaa

SEQ ID NO: 472318 - DNA, 282 bp, Shigella flexneri
gtgcgaaataagcaggtggtgttactcattgccggaatatccggcatcgcgacgggaataatcgtcagcctgaatatcccctttatccgtcaggggcttttttatcccgccagccctgtggaaattgtcgtttcgctgtgtcttaccttttctgtttctgttgtgttttttgtgggggcaattgtgggatggatttcggtgtcatattacagccgcataacctgtctgaatgaatcatcagaaatatcagaggaaacttataatgaaagaaaaaagaaatga

SEQ ID NO: 472319 - DNA, 546 bp, Shigella flexneri; identical to SEQ ID NO: 24305

SEQ ID NO: 472320 - DNA, 285 bp, Shigella flexneri
atgataagtaaatgcagattctctttaccccggcttgatattacgggtatgtgggtattttccctgggtgtctggtttcatatcgtcgcccgtcttgtttacagcaaaccctggatggctttttttctggcggagttgattgcggccatccttgtgctgttcggcgcataccaggtgctggatgcatggattgcacgtgtcagcctggaagagcgtgaggcactggaagccaggcaacaggccatgatggaagggcagcaggagggcggacatgtctctcactaa

SEQ ID NO: 472321 - DNA, 339 bp, Shigella flexneri
atgagtgaagattatttgaaaatgtttacaggtgttgttctgttaatatttgtcattattgccggttatttcttttctgagcgtaatgacaggaaaatgtttctcctgagttcactggttttccttgttattaatatcgcgtgtttatatgtgcttaccgccagtctctggtttctgtgtggtgcaattatgaatcagggcgcagcaatggttgttccaatggctattggctcattaccgaacgttacgagcttcgacaggttcagaagaatatttatctgtattatgttgtcatcagcatggtccggagtgatgtggttttttataaggggcttatga

SEQ ID NO: 472322 - DNA, 744 bp, Shigella flexneri
atgaataaagcattactgccactgttactctgctgctttatttttccggcgtcagggaaagatgcaggctggcagtggtataacgagaaaataagtccaaaggaaaaagaaaataaacctgtacctgcagccccccgtcaggagccggatattatgcagaaactggccgcgctgcagacggcaacaaagcgggcgctgtacgaagccattctgtatcccggcgtggataattttgtgaaatatttccggctgcagaattactggactcagcaggccgggcttttcaccatgagtgctaaaaaggccatgctggcacatcccgaactggactataacctgcagtacagccattacaacggcacggtacggaaccagctggcggcagaccaggcgcagcagcgacaggccattgcgaaactggctgaacactacggcatcatgtttttttaccgggggcaggaccccatcgacgggcagctggcgcaggtcattaatggcttccgggatacgtatggtctgagtgttattcccgtttccgtggatggcgtgattaatccgctgttgccggattcccggactgaccaggggcaggcgcagcgcctcggcgtgaaatatttcccggccatgatgctggttgacccgaaacagggcagtgttcgcccgttatcatacggctttatttcgcaggacgacctggcaaaacaattcctgaacgtttctgaagattttaaaccaaaattttaa

SEQ ID NO: 472323 - DNA, 258 bp, Shigella flexneri
atgaaagtcatattcacgtcgaaccgttttattgattttcttatccggcttttgattacagcgattgtcatttccccggtaattatctggtcgtgggatacggtaaaagaaaccacggcagacgggatgcttgccgctgctttcgttatcctttactccggtgtgctcctgtttattctgtatttttgtttttctgccctgactggcctgcagaaagctgatgaaagaaaaaatgatgaaaggaatgaagatgaataa

SEQ ID NO: 472324 - DNA, 1875 bp, Shigella flexneri
atggttcaggttatgaaagaaaagataaatacctttttcagatctctgaattttaattattccgtaaagccgtgcaatctttgtgcaattgttttttttctgagcttttctgtgtttgctgacagcaacagtgattaccgggccggttctgattttgctcaccagatcaaagggcagggaagcagcagtattcagggctttaagccacaggagagtatccccggctataacgcgaatccggacgagacaaaatattacggtggcgtgactgccggcggggatggcggcctgaaaaatgacggcaccacggaatgggcgaccggtgaaaccggaaaaaccatcacagagtccttcatgaacaagccgaaagacattctttcaccggatgcaccgtttatccagaccggcagggatgtggtgaaccgggctgacagcattgtgggaaacaccgggcagcagtgcagtgcgcaggagattagccggagtgaatacacgaattacacctgtgagcgggatttacaggtggagcagtactgcacacgaactgcccgtatggagctgcaggggagtaccacatgggaaacccggacgctggagtatgaaatgagtcagctacctgcacgtgaagtgaatggtcagtatgttgtctccattacctctcccgttaccggcgaaattgtcgatgcacattacagctggagtcgtacttacctgcagaagagtgtacctatgacaattacagtactgggaaccccactgagctggaatgccaaatactcagcagatgcctcatttacaccagtacagaaaacactgactgccggtgttgcttttacgtcatctcaccccgtccgggtcgggaatacaaaattcagacgtcatacggcaatgaagctgcgtctggttgtcagggtaaaaaaagcctcgtacaccccgtatgttgtctggtctgaaagctgcccgttcagcaaggagctggggaaactgacaaaaacagaatgtacggaggctggcgggaacaggacgctggtgaaagacggtcagtcatacagcatgtaccagagctgctgggcataccgggacacgtatgtcacacagtcagcagacaagggaacctgtcagacctacaccgacaatccggcctgtaccctggtgtcacaccagtgcgccttttactccgaagaaggtgcctgtctgcatgaatatgccacgtactcctgtgagtcaaaaacatccgggaaagtgatgctctgtgggggagatgtcttctgcctcgatggcgaatgcgataaggctcagagcgggaagagtaatgattttgccgaagctgtttctcagctggcagcactggccgctgcaggtaaggatgttgcggcgctgaacggggtggatgtccgtgctttcaccggtcaggcgaaattttgtaagaaggctgcagccggatacagcaactgctgtaaggacagcggctgggggcaggatatcgggctggccaaatgcagcagtgatgaaaaagccctggctaaagcaaaatcaaacaaactgaccgtcagtgtcggagagttctgttcgaaaaaagtgctgggtgtctgtctggagaaaaaacgcagctactgtcagtttgattcgaagctggcgcagatagtccagcagcaggggcgtaacgggcagttgcgtatcgggtttggcagtgcgaagcatcctgactgtcgggggattacggttgatgagctgcagaaaattcagttcgacagactggatttcactaacttctacgaagacctgatgaataaccagaaaatccctgacagtggcgttctgacgcagaaagtgaaagagcagattgctgaccagctgaaacaggcaggacagtaa

SEQ ID NO: 472325 - DNA, 219 bp, Shigella flexneri; identical to SEQ ID NO: 21647

SEQ ID NO: 472326 - DNA, 381 bp, Shigella flexneri; identical to SEQ ID NO: 21648

SEQ ID NO: 472327 - DNA, 639 bp, Shigella flexneri
atgaaccggaaaatatttgcactttttgctctgacagcagggatgcatcttgctgttcatgcttcagaaaatgtgaacacaactgaaaaccgccagttcctgaagcagcaggaaaatttaagcagacaactgcgagagaaacctgaccatcagctgaaagcctgggcggagaaacaggtgctggaaaacccccttcagcgttcagataaccattttctggatgagctggttcgtaaacagcaggcttcgcaggacgggaaaccccggcagggtgccctgtattttgtgtcgttttccattcccgaagaggggctgaaacggatgctgggtgaaacccggcactacggtatacccgccacactgcggggcatggtgaataatgacctgaagaccaccgctgaagccgtgctgtccctggtgaaagacggcgcgactgatggtgttcagatcgacccgacgctgttttcacagtacggcattcgcagtgtaccggcactggtggtgttctgcagtcagggatacgacattatccgaggtaacctgcgggtcggccaggcgctggagaaagtggccaccacgggggactgccggcaggtggctcgggcgttgctgaataacccgggagataaacaaaaatga

SEQ ID NO: 472328 - DNA, 306 bp, Shigella flexneri
atggcaacaatggacagtaaatatattcagcacctcaggaaaataggtgctgtgctgctcaggctgataagcagaacattaaaattatttccttttggtcttgtaatagtgcccgttatattattttattttgcacctgacagttttctcgctgaaattattcatgaatggaagaacgcagatatatcagaacaagtgacacttgtcagattatatctgaaggtgacatttacatgtgcgtttgtggctgtttttctcaattatcttttttctgatgagttcatgcctgtaaatagcagaaagtga

SEQ ID NO: 472329 - DNA, 993 bp, Shigella flexneri
atgaagcgaagcctgtggctgctgatgttattccttctcgccggtcatgtccctgcggcatctgcggattctgcctgtgaggggcgttttgtaaacccgatcacggatatctgctggagctgtattttcccgctctcgctgggcagtatcaaagtcagccagggtaaggtccccgacacggcgaacccgtcgatgcctattcagatttgtccggcaccgccgccgctgttcaggcgtatcgggctggccattggttactgggagccgatggcgctgacggacgtcacccggtcaccgggatgcatggtgaacctgggcttcagcctgccggcttttggtaaaacggcacagggaacggcgaaaaaggatgagaagcaggtgaacggggcgttctatcacgttcactggtacaaatacccgctgacgtactggctgaacatcatcacatcgctgggctgtctggaaggtggtgacctggatatcgcttatctttctgaaatcgaccccacctggacggacagcagcctgaccaccattctcaacccggaagccgtcatttttgccaatccgatagcacagggggcctgcgcagcagatgccattgccagtgcctttaatatgcctctcgatgttctgttctggtgtgccggttcgcagggcagtatgtacccgttcaatggctgggtgagtaatgagtccagtccgttgcagtcctccctgctggtcagtgaacgcatggcattcaagctgcaccgtcagggcatgattatggaaaccatcgggaaaaataacgccgtctgtaatgaatatccgtccccaatcctgcccaaagaacgctggcgttatcagatggtgaatatgtatccggacagcggacagtgccatccgttcgggcgcagtgtgatgcgctgggagacgggaaaaaatccgcccaacacaaagaaaaacttcggctacctgatgtggcgtaaacgtaactgtgtattcctgtaa

SEQ ID NO: 472330 - DNA, 633 bp, Shigella flexneri
atgagatgccgggggctgattgccctgctgatatgggggcagagtgtggccgccgccgatcttggcacctggggcgatctgtggccggtaaaggagccggacatgctgacggtgatcatgcagcgcctgacggcactggagcagtccggtgagatgggccggaaaatggatgcctttaaggagcgggtgatccgcaacagtctgcggccccctgccgtgcccggtatcggacgcacggagaaatacagcagccggttgtttgacccgtccgtcagactggctgcggatatccgggataacgaagggcgggtgtttgcccgtcagggtgaagtgatgaatccgctgcagtatgttccttttaaccagacgctgtatttcatcaatggcgatgatccggcgcaggtggcctggatgaaacgccagacgccgcccacactggagagcaaaattatcctcgtgcagggcagtatcccggagatgcagaaagcgctggacagccgtatttactttgaccagaacggtgtgctctgccagcgcctcggcattgatcaggtcccggcacgggtgagcgccgttcccggcgatcgcttcctgaaggtggaatttattccggcagaggagggcagaaaatga

SEQ ID NO: 472331 - DNA, 387 bp, Shigella flexneri
atgaccacaacgcaaaaaacgactgacgttacagccccccgacgcagccactggtggtggaccgtgccgggatgcctggcaatggtgttactgaacgcagccgtcagttacggcattgtcagactgaacgcaccggtgactgccgccttcaacatgaaacagaccgtggatgcgttttttgacagcgccagtcagaaacaactgtcagaagcacagtcaaaagccctttcagcgcgttttaacacggcactggaagccagcctgcaggcgtggcagcagaaacaccacgcggtcattctggtgtcgcctgccgtggtacagggggctccggatatcacccgggaaatccagcaggatattgcccggcgaatgagggcggaaccatga

SEQ ID NO: 472332 - DNA, 2628 bp, Shigella flexneri
gtgaataacccacttgaggccgtcactcaggcggttaactccctcgtcacagcactgaaactgcctgacgaatccgcaaaggccaatgaagttctgggcgaaatgagcttcccgcagttcagccgtctgctgccgtaccgtgattacaaccaggaatccggtctgttcatgaatgacaccacgatgggctttatgctggaagccattcccatcaatggggcgaataagtccattgtggaggcactcgatcacatgctgcgcaccaaactgccgcgcggtattccgttgtgtatccatctgatgtccagtcagctggttggtgacaggattgaatacgggctgcgtgagttctcctggtcaggtgaacaggctgaacggtttaacgccattacccgtgcctattatatgaaagcggcagcgacacagttcccgctgccggaggggatgaatctgcccctgaccctgcgccattaccgggtgtttatctcgtactgttctccctcgaagaaaaaaagccgggctgacattctggaaatggaaaatctggtaaaaatcatccgtgcctcttttcacggcgcaaaaatcaccacacagacagtggatgcacaggctttcatcgagattgtcggggagatgattaaccataatccggactctctgtacccgaaaagacgtcagctggacccgtattctgatctgaattatcagtgtgtggaggacagttttgacctgaatgtccgggctgattacctgacgctgggcctgcgtgagaacggcaggaacagcacggcccgcatcctgaatttccatctggcccgtaacccggaaatcgccttcctgtggaacatggccgacaactacagcaatctgctgaacccggaaatgtccatttcctgcccgttcatcctgacgctgactctggtggtggaagaccaggtgaaaacccacagcgaagccaacctgaagtacatggacctggagaagaagtcgaagacctcctatgccaaatggtttccgtcagttgaaaaggaggcgaaggagtggggggaactgcgccagcggctgggctccggccagtcttctgtcgtgtcctacttcctcaacatcacagccttctgcaaggacaataatgaaacggcactggaagtggagcaggacatcctgaacagcttccgtaaaaacggttttgagctgatttcaccgcgctttaaccacatgcgcaatttcctgacctgcctgccctttatggccgggaaagggctgtttaaacagctgaaagaggccggtgtggttcagcgcgcagagagctttaatgtggccaacctgatgccgttagtggcggataatcccctgacaccggcaggtctgctggcgcccacctaccgtaaccagctggcgtttatcgatatcttctttaaggggatgaataacaccaactacaacatggcggtctgtggcacctccggggccggtaaaaccggactgatacagccacttatccgcagcgtgctggactccgggggctttgccgtggtgttcgacatgggggatggctacaagtccctgtgtgagaacatggggggcgtatatctggacggtgaaaccctgcgttttaacccgtttgcgaacatcaccgatatcgaccagtcagcggagcgtgtccgcgaccagttgtcggtgatggccagccccaacggtaacctggatgaagtgcatgaaggtctgctgctgcaggcggtcaaagcctcctggctggccaaaaagaatcaggcgcgcattgatgatgtggtgaatttcctgaaaaacgccagtgacagcgagcagtatgccgggtcaccgaccatccgcagccgtctggatgaaatgattgtgctgcttgaccagtacactgccaacggcacttacggccggtattttaactctgatgagccgtccctgcgggatgatgccagaatggtggtgctggagctgggtgggctggaagaccgtccgtcactgctggttgcggtgatgttcagccttatcatttacatcgagaaccggatgtaccgcacgccgcgtaccctcaagaaactgaacgtcattgatgaaggctggcgtctgctggacttcaaaaatcgtaaagttggtgagtttattcaaaaaggttaccgcacctgtcgccgtcataccggtgcctatatcaccatcacacagaacatcgtcgactttgactctgacaaggcatccagcgcagcccgtgcggcatggggtaactcctcctacaaaattatcctcaaacagagtgcgaaggagttcgcgaaatataaccagttattcccggatcagtttcagccactgcagcgcgacatgattggtaagtttggtgcggccaaagaccagtggttcagttccttcctgctgcaggtggaaaaccattcctcctggcaccgtctgtttgtggacccgttaagccgcgccatgtacagctctgacggcccggattttgagtttgtgcagcagaaacgcagagagggtatgagtattcatgaggcggtgtggcagctggcgtggaagaaatcggggccggagatggcttcgctggaggcctggctggaagaacatgagaaatacaggagtgttgcatga

SEQ ID NO: 472333 - DNA, 222 bp, Shigella flexneri
gtgagtgatgaagtcgatgaagcatattcagtaacagaacaactgaccatgacaggaataaaccggatacgccagaaaataaatgctcatggtattcctgtttatctctgtgaagcatgcggtaatcctattccggaagcccggcggaaaatatttcccggtgtgacgttatgtgttgaatgtcaggcgtatcaggaaaggcagagaaaacattatgcataa

SEQ ID NO: 472334 - DNA, 516 bp, Shigella flexneri
atgaaacagatttctttatttattcctctgctggggaccttattactttccggctgtgccggaaccagtacggaatttgagtgtaacgccaccacatccgatacctgtatgacgatggagcaggccaatgagaaggccaaaaaactggagcagtcctcagaagcaaagccggttgcggcatcactgccgcgcctggctgaagggaacttccggacaatgccggtgcagaccatcaccgcgaccactccgtccggcagcagacctgcggtgacggcacttccggagcagaaactgctggcaccacgcccgctgtttacggctgcccgggaagtgaaaacgattgttccggtcagttcagttgcgccggtaacacctccccgcccgctaagaacgggtgagcagacggctgcattatggatagcgccttatattgataatcaggatgtttatcatcagccatccagtgtgttttttgttattaaaccgtctgcgtggggaaaaccacgtattaattaa

SEQ ID NO: 472335 - DNA, 252 bp, Shigella flexneri; identical to SEQ ID NO: 21351

SEQ ID NO: 472336 - DNA, 321 bp, Shigella flexneri; identical to SEQ ID NO: 235304

SEQ ID NO: 472337 - DNA, 585 bp, Shigella flexneri; identical to SEQ ID NO: 235305

SEQ ID NO: 472338 - DNA, 1428 bp, Shigella flexneri
atggccagtatcaataccattgtgaaacgcaagcagtacctgtggctggggattgtggttgtcggtgcagcctccgcgattggtggtgcactgtatctgtctgatgtggacatgtccggtaacggtgaggcggtggctgaacaggagcctgtgccggatatgaccggtgtggtggatacgacctttgatgacaaggtgcgtcagcatgccaccacagagatgcaggtgacggcagcgcagatgcagaagcagtatgaggaaatccgtcgtgagctggatgttctgaacaaacagcgcggtgatgaccagcgtcgtattgaaaagctgggacaggacaatgccgccctggcagagcaggtaaaagccctgggtgctaatcccgtcacggcgaccggtgagcctgtaccgcagatgcctgcctcaccgcccggcccggaaggcgaaccacagccaggaaacacccccgtatccttcccgccgcagggcagcgttgctgttccaccgccgacggcgttttatcccgggaatggtgtcacgccaccaccacaggtgacgtaccagtctgtgccggtgcctaaccggatacagcgtaaggtgtttacccgtaatgagggaaaacagggaccatcactgccgtacattccgtcaggaagttttgcgaaagccatgctgattgaaggagcggatgccaatgcctcagtcaccggtaatgaatccacggtgccgatgcagctgcgtatcaccggtctggtggaaatgccgaacagcaaaacgtatgacgcaacgggatgttttgtggggctggaagcctggggggatgtgtccagtgaacgtgccattgtacgcacccgcaatatcagctgcctgaaggacggcaaaaccattgatatgccgattaaggggcatgtcagcttccggggtaaaaacggtatcaagggcgaagtggtgatgcgtaacggcaaaatcctcggctgggcatggggcgcgggatttgttgacggtatcggtcagggaatggagcgcgcctcccagccggctgtcgggctgggtgccacagccgcttacggggctggtgatgtcctgaaaatgggtatcggtggcggcgcatcgaaagccgcacagacgctcagtgactactacatcaaacgtgccgaacagtatcacccggtgataccgattggtgcgggcaacgaagtgaccgtggtgttccaggacggcttccagctgaaaaccgtggaagagatggcgctggaacgcacgcagagcagagcggaagaagagaatcaggaaagtccggttcctgttccgccatcggctgaaagtcatcttaacggctttaatactgaccagatgctgaagcagctgggcaacctgaatccgcagcagtttatgtccggcagccagggagggggcaacgatggcaaataa

SEQ ID NO: 472339 - DNA, 729 bp, Shigella flexneri
atgagaaaaaataatacggcaataatattcggcagcctgtttttttcctgcagcgtgatggccgcaaacggtacgctggcccccaccgtggtgccaatggtgaacggtggtcaggccagtattgccatcagcaataccagcccgaatctgtttaccgttcccggtgaccggattatcgccgtgaacagtctggatggtgccctgaccaataatgagcagaccgcctccggcggtgtggtggtggccaccgtcaacaaaaagccttttacgttcattctggaaacagagcgtggtctgaatctttccattcaggccgttccccgtgaaggcgcggggcgtaccattcagctggtcagtgacctgcgcggaaccggagaagaagccggtgcgtgggaaacgtccacgccttacgaatccctgcttgtgaccatcagccaggctgtccgtggcggaaaattacctgcaggctggtatcaggttcctgtgacaaaggaaaccctgcaggccccggcggggctgtcttcagtggcagatgccgtatggacggggaatcacctgaagatggtccgctttgccgtggaaaataaaacgctgtctgccctgaatatccgggaaagtgatttctggcagccgggaacccgtgccgtgatgttcagccagcctgccagccagttactggcaggtgcgcgcatggatgtgtatgtcatccgtgacggggagggcaactga

SEQ ID NO: 472340 - DNA, 567 bp, Shigella flexneri
atggaacacggtgcccgtttaagtaccagtcgtgtaatggccatcgcctttatatttatgtcagtgcttattgttctcagcctctctgttaacgttattcagggggtgaataactaccgtcttcagaatgagcaacgcactgccgtgaccccaatgggatttaatgtgccctttgccgtgtcacagaacagtgccgacgcctcttatttacagcagatggcgctgtcatttattgccctccgtctgaatgtttcatcagaaaccgtcgatgcctcacatcaggcgcttctgcaatatatccgcccgggcgcacagaaccagatgaaagttattctggctgaagaagcgaagcgtattaaaaacgataacgtgaactcagcctttttccagaccagtgttcgtgtctggcctcagtatggccgtgtggaaattcgtggtgtgcttaaaacctggattggtgattcaaaacctttcactgatatcaaacattacatccttattctgaagcgggaaaacggggtgacctggctggataatttcggggaaacagacgatgagaaaaaataa

SEQ ID NO: 472341 - DNA, 315 bp, Shigella flexneri
atgatgtcgggagacgagaataaacttaagaaatatcgtttcccggaaacactgaccaaccagagccgctggtttggcctgccactggatgaactgatccccgcagcaatctgtattggctggggtatcacaacatcgaaatatctgttcggtattggtgcagcggttctggtttatttcgggattaaaaaactgaaaaaagggcggggcagttcctggttacgtgacctgatttactggtatatgccaacagccctgctgcgcggtatttttcataatgttcccgattcgtgtttccggcagtggattaaatag

SEQ ID NO: 472342 - DNA, 363 bp, Shigella flexneri; identical to SEQ ID NO: 153997

SEQ ID NO: 472343 - DNA, 228 bp, Shigella flexneri; identical to SEQ ID NO: 20701

SEQ ID NO: 472344 - DNA, 654 bp, Shigella flexneri; identical to SEQ ID NO: 239453

SEQ ID NO: 472345 - DNA, 384 bp, Shigella flexneri
atggccagagtaattttgtatatcagtaatgatgtctatgataaagtaaatgcgatagttgaacagcgtcgtcaggagggggcaagagataaagatataagcctttcaggaactgcttcaatgcttcttgaactggggcttcgcgtatatgaggctcagatggagcgtaaagagtctgcatttaatcagactgagtttaataaattacttcttgaatgtgttgtaaaaacacagtcatcagtagcgaaaattttgggtattgagtctctaagtcctcatgtctccgggaatccaaagtttgaatatgccaatatggttgaagatattcgtgagaaggtgtcatctgagatggaacgattttttccaaaaaatgatgacgaataa

SEQ ID NO: 472346 - DNA, 510 bp, Shigella flexneri
atgaaaaaatggatgttagcaatctgcctgatgtttataaatgggatctgcgaagccgccgattgctttgatcttgcaggtcgggattacaaaatagacccggatttactgagagcgatatcatggaaagaatcccgttaccgggttaatgccattggtattaatccggtaacgggatatggcagcggactgatgcaggtagattcccagcattttaacgaactggcccgctatggaattaagccggaacatctgacaacagatccctgcatgaacatttataccggtgcttattatctggcaatagcctttaaaaaatggggagtctcctgggaggccgttggtgcatacaatgccggattcaggaagaccgaacgccagaaccagagacgtcttgcctacgcatcagaggtttaccggatttatacctggataaagagcagtaaaggcatccgggttccgaccacgaagaaatcactttcccaaattaacagtgtgcagaacaattaa

SEQ ID NO: 472347 - DNA, 822 bp, Shigella flexneri
atgcgattagcttcccgttttggtcgatataattctattcgccgtgagcgcccgttaacggatgacgaattaatgcagtttgttccatctgtcttttctggtgataaacatgaatcccggagtgagcgttatacatatatcccaaccatcaatatcatcaataagttacgtgatgaaggtttccagccgttctttgcctgtcagagtcgggttcgtgatttaggacgccgcgaatacagtaaacatatgttacgtcttcgcagggaagggcatattaacgggaaagaagttcctgaaattatcctgcttaattcacatgatggttcatccagttatcagatgatcccaggaatttttcgttttgtctgcacaaatggcctagtgtgtgggaataattttggcgaaatccgcgttccacataaaggtgatattgtcgggcaggttattgagggagcgtatgaagtgctcggtgtctttgataaagtcactgaaaatatggaggcaatgaaagagatacatcttaacagtgacgaacaacatttatttggcagagctgcattgatggccaggtacgaagatgaaaataaaacgccagtgacgccagaacaaataattactccccgccgttgggaggataaacagaacgatctctggacaacctggcagcgggttcaggagaatatgataaaaggtggattatcggggcgaagtgcctccggtaaaaataccagaacaagagccattacaggcattgacggtgatatccgaatcaacaaagcattatggatgattgccgaaaagttcagggagtggaagtcatga

SEQ ID NO: 472348 - DNA, 297 bp, Shigella flexneri; identical to SEQ ID NO: 5319

SEQ ID NO: 472349 - DNA, 225 bp, Shigella flexneri
atgccggatgcggtgcaagcaccttatccggcctacagaccggagccaaacatgcaaaccatcaccatcgccccacccaagcgtagctggttctcgcttctgagctgggccgttgttctcgacgtgctggtcgtctcgtggcagggcgcggaaatggccccgcttacgctgattaaagacggcggcaacatggcaaccttcgcggtaatgactccaacttactga

SEQ ID NO: 472350 - DNA, 1017 bp, Shigella flexneri
atgaacgctaagataattgcctcgctggccttcaccagcatgttcagcctcagcaccctgttaaccccggcacacgccgaagagcaggaaaaggcgctgaatttcggcattatttcaacggaatcacagcaaaacctgaaaccgcaatggacgccgtttttacaggatatggagaagaaactgggcgtgaaggtcaacgccttctttgccccggactacgcgggcattatccaggggatgcgcttcaataaagtggatattgcctggtacggcaacctgtcggcgatggaagcggtggatcgcgccaatggccaggtcttcgcccagacggtcgcggcggatggatcgccgggttactggagcgtgttgatcgtcaacaaagacagcccgatcaacaacctgaacgatctgctggcgaagcggaaagatctcaccttcggcaatggcgatcctaactccacctctggcttcctcgtccccggttactacgtcttcgctaaaaacaatatctccgccagcgacttcaagcgcaccgtcaacgccgggcatgaaaccaacgcgctggccgtcgccaacaagcaagtggatgttgccaccaacaacaccgaaaacctcgacaagctgaaaacctccgcgccggagaagcttaaagagctgaaggtgatctggaaatcgccgctgatcctaggcgatccgatcgtctggcgcaagaatctgtccgaaactaccaaagacaagatctacgacttctttatgaactacggaaaaacgccggaagagaaagcggtgctggaacgcctgggctgggcgccgttccgcgcttccagcgacctgcaactggtgccgattcgccagctcgcactgtttaaagagatacaaagcgtgaaaggcaataaagggctgaatgagcaggacaagctggcgaaaaccaccgagattcaggcgcagctggatgacctggaccgcctgaacaacgcgttaagcgcgatgagttcggtgagtaaagcggtgcagtaa

SEQ ID NO: 472351 - DNA, 789 bp, Shigella flexneri
atgcaaacgattatccgtgtcgagaagctcgccaaaaccttcaatcagcatcaagcgctgcatgcggttgatctgaacattcatcacagtgaaatggtggctctgcttgggccgtcgggttccggcaaatccacccttttacgtcatttaagcggtttgattaccggcgataaatccgccggtagccatatcgagctactgggccgcactgtccagcgcgaaggccgcctggcccgcgatatccgcaaaagccgcgccaacaccggctacatctttcaacaattcaacctggtgaaccgcctgagcgtactggagaacgtgctgattggcgcgctcggcagcacgccgttctggcgcacctgttttagctggttcaccggcgagcagaaacagcgcgcgttacaggcgctgacccgcgttggcatggtgcattttgcccatcagcgcgtttccaccctctccggcggccagcagcaacgtgtggcgattgcccgtgcgctgatgcagcaggcgaaagtgattctggccgatgaacccatcgcctcgctggacccggaatcagcgcgcatcgtgatggacaccctgcgcgacatcaaccagaacgacggcatcaccgtggtcgtcacgctgcatcaggtggattacgccctgcgctactgcgaacgcatcgtcgccctgcgtcaggggcacgtcttctacgacggcagcagccaactgtttgataacgaacgttttgaccatctctaccgcagcattaaccgcatcgaagagaacgcgaaagctgcctga

SEQ ID NO: 472352 - DNA, 444 bp, Shigella flexneri
atgccgttaagtccctacctctcttttgccggtaactgttccgacgcgattgcctattatcaacgtacgttgggcgcggaactgctctataaaatcagcttcggcgaaatgccgaaatcagcgcaggacagcgccgagaactgcccttccggaatgcaatttcccgataccgccatcgctcatgccaacgtgcgcattgccggaagcgacatcatgatgagcgatgctataccgtcaggaaaagccagctactccggctttacgctggtgctcgattcgcaacaggtcgaagaaggaaaacgctggtttgataaccttgccgctaacggaaaaatcgaaatggcctggcaggaaactttctgggcgcatggctttggcaaagtcaccgataaatttggcgtaccgtggatgattaatgtcgtcaaacaacaaccaacgcaataa

SEQ ID NO: 472353 - DNA, 336 bp, Shigella flexneri; identical to SEQ ID NO: 461045

SEQ ID NO: 472354 - DNA, 2229 bp, Shigella flexneri
atgtacacacagaccctgtatgagttaagtcaggaggctgaacgcctgttacagctttctcgccaacagttgcagttactggaaaaaatgcctctctctgtacccggagacgacgcgccacaactggctttaccctggagtcagcctaatatcgccgaacgtcacgcgatgctgaataatgagttgtgtaaaatttcccgactggaaatggtgctggcaattgtcggtaccatgaaagcagggaaatcaaccaccattaatgccattgttggtacggaggttctgcctaatcgtaatcgcccaatgactgcgctgccgacgcttattcgccatacgcccgggcaaaaggaaccggtactgcatttttcacatgtcgcgccaatcgattgtttaattcaacaattacaacagcgcctgcgtgattgcgatattaagcatctgaccgatgtgctggaaatagataaagatatgcgtgcgcttatgcagcggatcgaaaatggcgtcgctttcgaaaaatattatctgggtgcccagcctatttttcattgtctgaaaagtttgaatgatttagtgcgactggcgaaggcgctggacgtcgattttcctttttctgcttacgccgccattgagcatattcccgtgattgaagtggagtttgtccatctggcggggctggaaagttatcccggtcagttgacgttactggatacccccgggccaaatgaagccgggcaaccgcatctgcaaaaaatgcttaaccagcagctggcacgcgcctcggcggtactggcggtgctggattatacgcaactgaaatcgatctccgatgaagaggtccgtgaggcgattttggcggtggggcaatcggtgccgctgtatgtgctggtcaataagttcgatcaacaggatcgtaacagtgacgacaccgaccaggtgcgggcactgatttccgggacgctgatgaaaggctgtattacgccacagcagatattcccggtgtcgtcgatgtggggctacctggcgaatcgggcgcgctatgagttagccaacaacggtaagttaccagcgccagagcaacaacgctgggtggaagattttgcccatgccgcgctcggcaggcgctggcgtcatgccgatctggcggacctcgaacatattcgtcatgctgccgatcagttgtgggaagattcgctgttcgcccagccaattcaggcgttgcttcatgccgcttacgctaacgcctcattgtatgctctgcgatctgctgcgcataaactgttgaattacgcgcagcaggcgcgggaatacctggattttcgtgcgcacgggttaaacgtcgcttgtgaacaattgcggcaaaatatccatcaggtcgaagaaagtttgcagctattgcaactcaatcaggcgcaggtgagcggcgagattaaacatgaaatcgagctggccctgacctccgccaaccactttctgcgtcaacagcaagatgcggtgaatgcgcagttagccgccttgtttcaggatgattcggagccgttaagcgagattcgtacccgctgtgagacactgttacagacggcgcagaacaccatcagtcgcgactttacgctgcgttttgccgagatggaatccaccctttgccgggtgttaaccgatgttattcgccccattgagcaacaagtcaaaatggaattgagcgagtcagggtttcgtcctgggtttcattttcctgtttttcacggcgtagttccccacttcaacactcgccagctgttcagtgaagtcatttcgcgccaggaagcaacggacgagcagagcacgcgtttaggcgttgtgcgtgagactttttcgcgctggttgaatcagcccgactggggacggggaaatgagaaatccccgacagaaacggttgattacagtgtgttgcaacgagcattaagcgcagaagtcgatctctattgccaacaaatggctaaagttctggcagagcaggtcgatgaatctgttacggcaggcatgaatacttttttcgctgagttcgcttcatgtttgacagaattacagacgcgtttacgcgaaagtctggctctgcgtcaacaaaatgaatcggtggtcaggctgatgcagcagcaattgcagcagactgtgatgactcacagctggatttacaccgacgctcagctgttacgcgatgatattcaaacacttttcacggcagaacgatattga

SEQ ID NO: 472355 - DNA, 879 bp, Shigella flexneri
ttgaccaagacgttactggacggccccggtcgcgtgctggagtcggttcatccgcgctttttagtggatctggcgcagggcgatgatgcccgccatcctcaagcccatcagcagcagtttcgtgaacgactgatgcaggaacttctttcgcgtgtgcagcttcagacatggacgaacggcggcatgttaaatgcgccgcttagcctgcgactgacaatggtggaaaaactggcgtcgatgctggatcccggtcatctggcgctgacgcagatcgcgcagcatctggcgctgctgcaaaaaatggatcaccgccagcactctgctttcccggagctcccccagcaaattgccgccttgtatgagtggttttcagcccgttgtcgctggaaggaaaaggcgttaacgcaacgaggcctactggtgcaggcaggtgatcagagcgagcaaatttttacccgctggcgtgctggggcgtataacgcctggtcgttgcctgggcgctgttttatcgttctggaggagttgcgctggggtgcatttggcgatgcctgccgtctgggaagcccgcaagcggtggtgttgttgctgggtgatttgcgcgagaaagcgacacaacatctggcagagagtatcaatgcggcaccgactacgcgtcactattaccatcagtggtttgcctcttcgaccgttccgacgggcggggatcatgctgattttttaagttggctgggaaagtggaccacggcagataaacaacccgtttgctggtcagtgacccaacgctggcaaactgtcgcgctggggatgccacgactctgttcagcgcagcgtttggtgggggcaatggtcgaggaaatcttctctgtaaatttggcgtaa

SEQ ID NO: 472356 - DNA, 1503 bp, Shigella flexneri
atgctgaaaaggaaaaaagtaaaaccgattacccttcgtgatgtcaccattattgatgacggtaaactgcgtaaagccattaccgcagcatcactgggtaatgcaatggaatggtttgattttggtgtttatggttttgttgcttacgcattaggtaaagtttttttcccgggggctgaccccagcgtgcagatggttgctgcacttgccactttctccgttccctttctgattcgaccgcttggcggactcttctttggtatgttgggcgataaatatggtcgccagaagatcctcgctatcactattgtgattatgtcgatcagtacgttctgtattggcttaataccgtcctacgacacgattggtatttgggcaccgattctgctgttgatctgtaagatggcacaaggtttctcggtcggtggtgaatataccggggcgtcgatatttgttgcggaatactcccctgaccgtaaacgtggctttatgggcagctggctggacttcggttctattgccgggtttgtgctgggtgcgggcgtggtggtgttaatttcgaccattgtcggcgaagcgaacttcctcgactggggctggcgtattccgttctttattgctctgccgttagggattatcgggctttacctgcgccatgcgctggaagaaactccggcgttccagcagcatgttgataaactggaacagggcgaccgcgaaggtttgcaggatggcccgaaagtctcgtttaaagagattgccactaaatactggcgcagcctgttgacatgtattggtctggtaattgccaccaacgtgacttactacatgttgctgacctatatgccgagttatttgtcgcataacctgcattactccgaagaccacggggtgctgattattatcgccattatgatcggtatgctgtttgtccagccggtgatgggcttgctgagtgaccgttttggccgtcgtccgtttgtgctacttggtagtgttgcactgtttgtgttggcgatcccggcgtttattctgattaacagtaacgtcatcggcctgatttttgccgggttactgatgctggcggtgatccttaactgctttatgggcgttatggcttctaccttgccagcgatgttcccgacgcatatccgttacagcgcgctggcggcggcatttaatatttcggtgctggttgccggtctgacgccaacactggcggcctggctggtcgaaagctcgcagaatctgatgatgcctgcctattacctgatggtagtggcggtgattggtttaatcaccggcgtaaccatgaaagagacggcaaatcgtccgttgaaaggtgcgacaccggcggcgtcagatatacaggaagcgaaggaaattctcgtcgagcattacgataatatcgagcagaaaatcgataatattgaccacgagattgccgatttgcaggcgaaacgtacccgcctggtgcagcaacatccgcgaattgatgaataa

SEQ ID NO: 472357 - DNA, 1101 bp, Shigella flexneri
ttgaatctgatgcgttttctgcgccgaccaatatcgctgcgccaacggctgatattgaccatcggggccattttgttggtgtttgagctgatcagcgtcttctggctatggcatgaaagtaccgagcagattcagctgtttgagcaggcgctacgcgacaatcgcaacaacgatcgccacatcatgcgtgagatccgcgaggcggtcgccagcctgattgtccccggcgtctttatggtcagcctgacgctatttatctgctatcaggcggtacgccgcatcacccgcccgctggcggagctgcaaaaagagctggaagcgcgcaccgccgacaacttaacgcccattgccattcacagcgccaccctcgaaatcgaagcggtggtttcggcgttgaacgatctggtcagtcgcctgaccagcacgctggataacgaaaggttgtttaccgctgacgtcgcgcacgaactgcgaacgccactggcgggggtgcgtttgcatctggaactgctggcgaaaacgcatcacattgatgtagcaccgttagtggcacggcttgatcagatgatggagagcgtctcccagctgctgcaactggcgcgtgccggacagtcattttcttccggtaattatcaacatgtaaaactgctggaagatgtcattctcccctcgtatgacgaactcagtaccatgctcgaccagcgacagcaaaccctgctattgccagagagcgccgccgacatcaccgttcagggtgatgcaaccctgctgcggatgttattgcgaaacctggtagaaaacgcccatcgttacagcccgcaaggcagcaacattatgattaagctgcaagaagatggcggagcggtcatggcagttgaagatgaaggaccaggtattgatgagagtaaatgcggggagttgagtaaagcgtttgtacgtatggacagccgttatggcgggattggtctggggttaagtattgtcagccgcattacacagttgcatcacgggcagtttttcctgcaaaaccggcaagagacttccggcacgcgggcctgggtacggctgaagaaagatcagaacgtggcaaaccagatataa

SEQ ID NO: 472358 - DNA, 669 bp, Shigella flexneri
atgaaaattctgattgttgaagacgatacgctgttattgcagggactgattctggcggcgcaaaccgaaggctacgcgtgcgatggcgtgacaaccgcgcggatggcggaacaaagccttgaggacggtcattacagcctggtggtactggatttagggttacccgacgaagatggactgcattttctcgcccgtatccggcagaaaaaatacaccctgccggtactgatcctcaccgctcgcgatacgctgaccgacaaaatcgccgggctggatgtcggtgccgatgactatctggtgaagccttttgcgctggaagagttacacgcccgtatccgcgccctgctacgacgccataataatcagggcgaaagtgagctgattgttggcaatctgacgctgaatatgggtcgccgtcaggtatggatgggcggtgaagagttgattctgacgcccaaagaatatgctctgctgtcacggttaatgctcaaagcaggcagtccggtacatcgggaaattctctacaacgacatctataactgggacaatgaaccctcgaccaacaccctggaagtgcatatccacaatctgcgcgacaaagtgggcaaagcccgtatccgcaccgtgcgcggctttggctatatgctggtcgcgaatgaggaaaactaa

SEQ ID NO: 472359 - DNA, 1644 bp, Shigella flexneri
atgttgaagcgcctactaaaaagaccctctttgaatttactcgcctggctattgttggccgctttttatatctctatctgcctgaatattgccttttttaaacaggtgttgcaggcgctgccgctggattcgctgcataacgtactggttttcttgtcgatgccggtcgtcgctttcagcgtgattaatattgtcctgacactaagctctttcttatggcttaatcgaccactggcctgcctgtttattctgattggcgcggctgcacaatatttcataatgacttacggcatcgtcatcgaccgctcgatgattgccaatattattgataccactccagcagaaagttatgcgctgatgacaccgcaaatgttattaacgctgggattcagcggcgtgcttgctgcgctgattgcctgctggctaaaaatcaaacctgccacctcgcgtctgcgcagtgttcttttccgtggagccaatattctggtttctgtactgctgattttgctggtcgccgcactgttttataaagactacgcctcgttgttccgcaataacaaagagctggtgaaatccttaagcccctctaacagcattgttgccagctggtcatggtactcccatcagcgactggcaaatctgccgctggtgcgaattggtgaagacgcgcaccgcaacccgttaatgcagaacgaaaaacgtaaaaatttgaccatcctgattgtcggcgaaacctcgcgggcggagaacttctccctcaacggctacccgcgtgaaactaacccgcggctggcgaaagataacgtggtctatttccctaataccgcatcttgcggcacggcaacggcagtttcagtaccgtgcatgttctcggatatgccgcgtgagcactacaaagaagagctggcacagcaccaggaaggcgtgctggatatcattcagcgagcgggcatcaacgtgctgtggaatgacaacgatggcggctgtaaaggtgcctgcgaccgcgtgcctcaccagaacgtcaccgcgctgaatctgcctgatcagtgcatcaacggcgaatgctatgacgaagtgctgttccacgggctggaagagtacatcaataacctgcagggtgatggcgtgattgtcttacacaccatcggcagccacggtccgacctattacaaccgctatccgccgcagttcaggaaatttaccccaacctgcgacaccaatgagatccagacctgtaccaaagagcaactggtgaacacttacgacaacacgctggtttacgtcgactatattgttgataaagcgattaatctgcttaaagaacatcaggataaatttaccaccagcctggtttatctttctgaccacggtgaatcgttaggtgaaaatggcatctatctgcacggtctgccttatgccatcgccccggatagccaaaaacaggtgccaatgctgctgtggctgtcggaggattatcaaaagcggtatcaggttgaccagaactgcctgcaaaaacaggcgcaaacgcaacactattcacaagacaatttattctccacgctattgggattaactggcgttgagacgaagtattaccaggccgcggatgatattctgcaaacttgcaggagagtgagtaaatga

SEQ ID NO: 472360 - DNA, 1362 bp, Shigella flexneri
atgtcttcggatgctgatgctcacaaagtgggcttaatccccgtcaccctgatggtgtcggggaatattatggggtcaggtgtttttctgttacctgcaaacctggcctccactggcgggattgccatttatggatggttggtgacgattatcggtgcgctggggctctcgatggtatacgccaaaatgtcgttcctcgacccaagtcctggtggttcttacgcttacgcccgccgctgctttggcccgtttctcggttatcaaaccaacgtcctctactggctggcctgctggatcggcaatatcgccatggtggtcattggcgtaggatatttaagttacttcttcccgattctgaaagatccattggtattaaccatcacctgcgtcgtggtgctgtggatcttcgtcctgctgaacattgtcggtccgaaaatgatcacccgcgtgcaggccgttgccactgtgctggcgctgatccccatcgtcgggattgccgtatttggctggttctggttccgtggtgaaacctatatggcggcatggaacgtcagcggcctgggcaccttcggtgcgattcaaagtacccttaacgttacgctgtggtcgttcatcggtgtggaaagtgcctccgttgccgcaggtgtggtgaaaaacccgaaacgcaatgtccctatcgccaccattggtggggtattgattgccgccgtttgctatgtgctctccaccaccgcgattatggggatgatccctaatgccgcactgcgcgtttctgcctcgccattcggtgatgccgcacggatggcgttgggtgacaccgctggggccattgtttccttctgcgcagctgcgggttgcttaggttcactgggcggctggacgttgctggcgggtcaaacggcgaaagccgctgccgatgacggactgttcccaccgatttttgcccgtgtaaataaagcgggtacgccagtggcggggctgattatcgtcggtattttgatgaccatcttccagctcagcagcatttcaccaaacgcgaccaaagagttcggtctggtttcttccgtctcggtcatctttacactggtgccatatctttacacctgtgcggcgttactgctgctcggccacggtcactttggtaaagcacgcccggcatatctggctgttactaccattgccttcctctactgcatttgggccgtggtggggtccggggcgaaagaggttatgtggtcatttgtcaccctgatggtcatcaccgccatgtatgcgctgaattacaaccggctacataaaaacccgtatcccttagatgcaccaataagcaaagataaattccccttaatccagcaaacataa

SEQ ID NO: 472361 - DNA, 762 bp, Shigella flexneri
atgaggatttgcagcgaccaaccttgtattgttttattgactgaaaaagatgtctggataagggtgaatgggaaagaacctattagccttaaagctaaccatatggcgttattaaattgtgaaaataatattatcgacgtctcctctcttaacaacactttggttgctcatattagtcacgacatcatcaaagattacctccggtttctgaataaagatctctcgcaaataccagtatggcaacgtagcgctacgcccatactcaccctgccatgcctgacgccagacgtctttcgcgttgccgcgcaacacagcatgatgcccgcagaaactgagtcagaaaaggaacgaacacgcgcattattattcacggtgctatcccgttttctcgacagtaaaaaattcctttcattaatgatgtatatgttacgtaattgtgtaagtgacagcgtttatcaaattattgaaagcgatattcacaaagactggaatcttagtatggtagccagttgtttatgtcttagcccaagtctgttaaagaaaaagttgaaaagcgaaaacaccagttatagccaaataatcaccacctgccgcatgcgttatgccgtaaatgaattaatgatggacggtaaaaatatctctcaggtatcacagtcctgcggctacaacagtacgtcgtactttatttctgtctttaaagacttctacggtatgacgccgctgcattatgttagtcagcacagagaacgcactgtcgcctga

SEQ ID NO: 472362 - DNA, 2271 bp, Shigella flexneri
atgatgaaagtattaattgttgaaagcgagtttctccatcaagacacctgggtcggtaacgccgttgagcgtctggcagatgctttaagccagcaaaatgttaccgtgattaaatccacctcctttgatgatggttttgccattctctcttcaaacgaagccattgactgcctgatgttcagctatcaaatggagcatccggacgaacatcaaaacgtcagacaattgatcggtaagcttcatgagcgccaacaaaacgtgccggtcttcctgttgggcgatcgggaaaaagccctcgccgcaatggaccgggatctgctggagcttgtcgatgaattcgcctggattctggaagataccgccgactttatcgccggacgcgccgttgccgcgatgacccgctaccgccagcagctgttgccgccactgttcagcgcgctgatgaaatatagtgacatccatgaatattcctgggcagcgccaggccaccagggcggcgttggttttaccaaaacacccgccggacgtttctaccatgactactatggtgaaaatctgttccgcaccgacatgggcatcgaacgaacttccctcggttctttgcttgaccatactggcgcatttggcgaaagcgaaaaatatgccgcacgcgtatttggtgccgatcgctcctggtcggtagtcgtcggtacttccggctctaaccgcaccatcatgcaggcttgcatgaccgataacgatgtcgtggtcgttgaccgtaactgccataaatccatcgaacaaggtttgatgctgacaggcgcgaaaccggtctatatggtgccaagccgcaaccgctacggcattatcgggccaatctatccgcaggaaatgcaacctgaaaccttgcaaaagaaaatcagtgaaagcccgctgaccaaagacaaagccgggcaaaaaccgtcttactgcgtggtaaccaactgcacctatgacggcgtgtgttataacgctaaagaagcgcaggatctgctggaaaaaacctccgatcgtctgcactttgacgaagcctggtacggctatgcacgtttcaacccgatctatgccgatcactatgccatgcgcggcgaacctggcgatcacaacggtcctaccgttttcgccacccactccatccacaaactgctgaatgcgctgtcacaggcttcttatattcatgtacgtgaaggtcgtggggcgattaacttctcccgcttcaaccaggcctacatgatgcatgccaccacctccccgctgtatgccatctgcgcatccaacgacgtggcggtgtcgatgatggacggcaacagcggcctgtcactgacacaggaagtgattgacgaagcggttgatttccgtcaggcgatggcgcggctatataaagagttcaccgctgacggtagctggttcttcaaaccgtggaacaaagaagtcgtcaccgacccacaaaccggcaaaacctatgactttgctgacgcaccaaccaaactgctgaccaccgttcaggactgctgggtaatgcatccgggcgaaagctggcacggcttcaaagatattccggataactggagtatgctcgacccaattaaagtcagcatccttgctccgggaatgggtgaagatggtgaactggaagaaaccggtgttccggcggcgctggtcactgcctggcttggtcgccacggcattgtgcctacccgcaccactgacttccaaattatgttcctgttctctatgggcgtaacccgtgggaaatgggggactctggttaacaccctttgctccttcaaacaccactatgacgccaacacaccgctggcgcaggtgatgccggaacttgttgaacaatatcctgacacttacgcgaacatggggattcacgatctgggtgacaccatgtttgcctggctgaaagaaaacaaccctggcgcacggttgaacgaagcctattccggcctgccggtggcggaaatcaccccgcgtgaagcgtacaacgcgattgtcgacaacaatgtcgaactggtatccattgaaaatctgccaggacgcatcgcggcaaactcagttatcccgtatccgccaggaatcccgatgctgctgtctggtgaaaacttcggcgataaaaacagtccgcaagtaagttatttacgctcgctgcaatcctgggaccaccatttccctggatttgaacacgaaactgaagggactgaaattattgacggtatttaccacgttatgtgcgtgaaagcgtaa

SEQ ID NO: 472363 - DNA, 909 bp, Shigella flexneri
atgaatacagatacgtttatgtgcagcagcgacgaaaaacagacccgcagcccgctgtcgctgtattcggaataccagcggatggagattgagtttcgcgcaccgcatatcatgcccaccagccactggcatggtcaggtcgaagtgaatgtgcctttcgatggcgatgtggaatacctgatcaacaatgaaaaagtgaatatcaatcagggtcatatcacgctgttctgggcctgtacaccgcaccaactaacagataccggaacctgtcagagcatggcgatttttaatctgccgatgcatctgtttctctcctggccgctggataaagacctgattaaccacgtcactcacggcatggtgatcaaatcacttgccacacagcaacttagcccgtttgaagtacgccgctggcagcaggaattaaacagtccgaatgagcaaattcgccagctcgccattgatgaaattggcctgatgctcaagcgatttagcctctctagctgggaaccgattctggtcaataaaacctcgcgcacacacaaaaacagcgtctcgcgccatgcgcaattttatgttagccagatgctgggctttattgccgaaaactatgatcaggcgctgaccatcaacgatgtggctgagcacgtcaaacttaacgccaactatgcaatggggatattccagcgggtcatgcaattgacgatgaaacagtacattaccgcgatgcgcatcaaccacgttcgcgcgttactgagcgataccgataaaagtattctcgatattgccctgacggcaggctttcgttcaagtagtcgtttttacagcacgttcggcaaatatgtcggcatgtcgccgcaacaataccgcaaacttagccaacagcgccgccagacgtttcccggctaa

SEQ ID NO: 472364 - DNA, 1356 bp, Shigella flexneri
atgatgtctgcacccaaaattacatttatcggcgctggttcgacgattttcgttaaaaatattcttggtgatgtgttccatcgcgaggcgctgaaaacggcgcatattgccctgatggacattgaccccacccgcctggaagagtcgcatattgtggtgcgtaagctgatggattcagcaggggccagcggcaaaatcacctgccacacccaacagaaagaagccttagaggatgccgattttgtcgtggtggcatttcagattggcggttatgaaccttgcacggtgactgatttcgaggtctgtaagcggcatggtctggaacaaaccattgccgatacgttggggccgggcggtattatgcgcgcgctacgtaccattccgcatctgtggcaaatttgcgagaacatgacggaagtctgccccgatgccaccatgctcaactatgttaacccaatggcgatgaatacctgggcgatgtatgcccgctatccgtatatcaaacaggtcgggctgtgccattcggtgcagggaacggcggaagagctggcgcgtgacctcaatatcgacccggctacgctgcgttaccgttgcgcaggtatcaaccatatggcgttttacctggagctggagcgcaaaaccgccgacggcagttacgtgaatctctacccggaactgctggcggcttatgaagcagggcaggcaccgaagccaaatattcatggtaatactcgctgccagaatattgtgcgctacgaaatgttcaaaaagctgggctacttcgtcacggaatcgtcagaacattttgccgaatatacgccgtggtttattaagctaggtcgtgaggatttgattgagcgttataaagtaccgctggatgagtacccgaaacgctgcgtcgagcagctggcgaactggcataaagagctggaggagtataaaaacgcctcccggattgatattaaaccgtcacgggaatatgccagcacaatcatgaacgctatctggactggcgagccgagtgtgatttacggcaacgtccgtaacgatggtttgattgataacctgccacaaggatgttgcgtggaagtagcctgtctggttgatgctaatggcattcagccgaccaaagtcggtacgctaccttcgcatctggccgccctgatgcaaaccaacatcaacgtacagacgctgctgaccgaagctattcttacggaaaatcgcgaccgtgtttaccacgccgcgatgatggacccgcatactgccgccgtgctgggcattgacgaaatatatgctcttgttgacgacctgattgccgcccacggcgactggctgccaagctggttgcaccgttaa

SEQ ID NO: 472365 - DNA, 1410 bp, Shigella flexneri
atgactacaaaactcagttatggatttggagcgttcgggaaggattttgcgatcggcattgtgtatatgtacctcatgtattactacaccgatgtcgtcgggctgtctgtgggtttggtcggtactttgtttctggtggcgaggatctgggatgctattaacgatccgattatgggatggattgtaaatgctacgcgatcgcgatggggtaagttcaaaccctggatcctgatcggtacgttggcaaactctgtaatcttatttctcctctttagtgcgcatctgtttgaaggtactactcagattgtctttgtttgcgtgacctacatcctctggggcatgacttacaccattatggatattcccttctggtcgctggttccaaccatcacgctcgataaacgtgaacgcgaacaactggttccttatccgcgtttttttgccagtctggcaggctttgttacggcaggtgtgacgctaccatttgttaattatgtcggcggtggcgatcggggatttggctttcagatgttcactctggtattgatcgccttttttattgtttcaaccatcatcactctgcgcaatgtgcatgaagtcttttcgtcagacaatcaatcgtctgctgaaggaagccatctgacacttaaagccatcgttgcgcttatttataaaaacgatcagctttcatgcctcttgggtatggctcttgcttataatgtagccagcaacattattaccggatttgctatctattatttctcatatgttatcggtgatgcggatttgttcccctattatctgtcgtatgcgggagctgctaacctggtgacgttagtattcttcccacgcttagttaaatcattatcccgacgcattttatgggccggagcatctattcttccggtgttaagctgtggtgttctcctgttaatggcattaatgagctatcacaacgtcgtcctcattgtgattgcgggtattttgctgaatgtgggaacggcgcttttctgggtattacaggtcatcatggtggcagataccgttgattacggtgaatataaactgcacgtacgctgtgaaagcatcgcttactccgtgcagactatggtggtgaagggcggttcagcctttgcggcttttttcattgcggttgtgttagggatgattggctatgtaccgaatgttgaacagtctacgcaagccctattaggtatgcagtttattatgattgctctaccgactctgtttttcatggtaacgctgattctctacttccgtttctatcgcctcaatggcgacacgctgcgcaggatccagattcatctgctggataaatatcgcaaagtaccgcccgagcctgttcatgctgatattccggtcggtgcagtgagtgatgtgaaagcctga

SEQ ID NO: 472366 - DNA, 630 bp, Shigella flexneri
atgacccgcacactcaagccgttaattcttaacaccggcgcactggcgctaacgttaatcctgatttataccggcatttcggcccatgacaaactcacctggctgctggaagtgacaccggtgattatcgtcgtgccgctactacttgccaccgccagacgttacccgttaacgctgctgctctatacgctcatcttctttcacgccatcatcctgatggtaggcgggcagtacacctacgcgaaagtccccgttggttttgaggtgcaggaatggctggggttgagtcgtaatccgtatgacaagctggggcactttttccaggggctggtgcctgcactggtggcacgagaaattctcgttcgcgggatgtacgtgcgcggacgtaaaatggtggcgtttctggtctgttgcgtggcgctggcgataagcgcgatgtatgaattaatcgagtggtgggcggcactggcgatgggccagggagcggatgattttctcggtacccagggcgaccagtgggacacgcaatccgatatgttctgcgcgctgcttggcgcattaacgacagtgatattgctcgctcgctttcattgccgccagctacggcgctatggcttgataactggataa

SEQ ID NO: 472367 - DNA, 1647 bp, Shigella flexneri
atgtcaaacaaaccctttatctaccaggcacctttcccgatggggaaagacaataccgaatactatctactcacttccgattacgttagcgttgccgacttcgacggcgaaaccatcctgaaagtggaaccagaagccctgaccctgctggcgcagcaagcctttcacgacgcttctttcatgctacgtccggcacaccagaaacaggttgcggctattcttcacgatccagaagccagcgaaaacgacaagtacgtggcactgcaattcttaagaaactccgaaatcgccgccaaaggcgtgctgccgacctgccaggataccggcaccgcgatcatcgtcggtaaaaaaggccagcgcgtgtggaccggtggcggtgatgaagaagcgctgtcgaaaggcgtctataacacctatatcgaagataacctgcgctactcgcaaaacgcggcgctggacatgtacaaagaggtcaacaccggcactaacctgcctgcgcaaatcgacctgtacgcggtagatggcgatgagtacaaattcctttgcgttgcgaaaggcggcggctctgccaacaaaacgtatctctaccaggaaaccaaagccctgctgactcccggcaaactgaaaaacttcctcgtcgagaaaatgcgtaccctcggtactgcagcctgcccgccgtaccatatcgcgtttgtgattggcggtacgtctgcggaaaccaacctgaaaaccgtcaaattagcaagcgctcactattacgatgaactgccgacggaagggaacgaacatggtcaggcgttccgcgatgtccagctggaacaggaactgctggaagaggcccagaaactcggtcttggcgcgcagtttggcggtaaatacttcgcgcacgacattcgcgttatccgtctgccacgtcacggcgcatcctgcccggtaggcatgggcgtctcctgctccgctgaccgtaacattaaagcgaaaatcaaccgcgaaggtatctggatcgaaaaactggaacacaatctaggtcagtacattccacaagaactgcgtcaggctggtgaaggcgaagcggtgaaggtcgaccttaaccgcccgatgaaagagatcctcgcccagctttcgcaatatccggtttccactcgtttgtcgctcactggcaccattattgtgggtcgagatattgcacacgccaagctgaaagagctgattgacgccggtaaagaacttccgcagtacatcaaagatcacccgatctactacgcgggtccggcgaaaacccctgccggttatccatcaggttcacttggcccaaccaccgcaggtcgtatggactcctatgtggatctgctgcaatcccacggcggcagcatgatcatgctggcgaaaggcaaccgcagccagcaggttaccgacgcgtgtcataaacacggcggcttctacctcggtagcatcggcggtccggcggcggtactggcgcagcagagcatcaagcatctggaatgcgtcgcttatccggagctgggtatggaagctatctggaaaatcgaagtagaagatttcccggcgtttatcctggtcgatgacaaaggtaacgacttcttccagcaaatcgtcaacaaacagtgcgcgaactgcactaagtaa

SEQ ID NO: 472368 - DNA, 1341 bp, Shigella flexneri
atgttatttactatccaacttatcataatactaatatgtctgttttatggtgccagaaagggtggtatcgcgctgggtttattaggcggtatcggtctggtcattctggtcttcgtcttccaccttcagccaggtaaaccaccagttgatgtcatgctggttatcattgcggtggtggcggcatcggcgaccttgcaagcttcgggcggtcttgatgtcatgctgcaaattgccgagaagctgctgcgccgcaacccgaaatatgtctcaattgtcgcgccgtttgtgacctgtacactgaccattctttgcggtacgggtcatgtggtttacaccattctgccgatcatctacgacgtcgccattaagaacaacatccgtccggaacgtccgatggcggcaagttctatcggtgcacagatggggattatcgccagtccggtgtcggttgcggtcgtgtctctggttgcgatgctgggtaatgtcacctttgatggtcgccatcttgagttcctcgatctgctggcaatcaccattccatcgacgttaatcggtatcctggcgatcggtatcttcagctggttccgcggtaaagatctggataaagacgaagagttccagaaattcatctccgtaccggaaaaccgtgagtatgtttacggtgataccgcgacgctgctggataaaaaactgccgaaaagcaactggctggcaatgtggattttcctcggggcaatcgctgtagtcgcccttcttggtgctgattcggacctgcgtccatccttcggcggcaaaccgctgtcgatggtactggttattcagatgtttatgctgctgaccggggcgctgattattatcctgaccaaaaccaatcccgcgtctatctcaaaaaacgaagtcttccgttccggtatgatcgccatcgtggcggtgtacggtatcgcatggatggcagaaaccatgttcggtgcgcatatgtctgaaattcagggcgtactgggtgaaatggtgaaagagtatccgtgggcgtatgccattgttctgctgctggtttccaagtttgtaaactctcaggctgcggcgctggcggcgattgttccggtcgcgctggcgatcggcgttgatccggcatacatcgtggcttcagcaccggcttgctacggttattacatcctgccgacttatccgagcgatctggcagcgattcagtttgaccgttccggcaccacccacatcggtcgcttcgtcatcaaccacagttttattctgccggggttgattggtgtgagcgtatcgtgcgtcttcggctggatcttcgccgcgatgtacgggttcttataa

SEQ ID NO: 472369 - DNA, 720 bp, Shigella flexneri
atgatcaatgtattaattatcgatgacgacgcaatggtcgcggagctgaatcgccgatacgtagcacaaatcccaggctttcaatgctgtggaacagcctcgacgctggagaaagccaaagagattatcttcaatagcgatgcgcctatcgacctgatattgctcgatatctatatgcaaaaagagaacgggctcgatttactgcctgtcctgcataacgcgcgttgcaaaagtgatgtgattgtcatctcctccgcagccgatgcggcaaccattaaagattcgctgcattacggtgtcgtggattacctgatcaaacccttccaggcttcccgctttgaagaggcgctcaccggctggcggcaaaagaaaatggcgctggaaaaacatcagtattatgaccaggccgagcttgatcagctaatccacggcagcagctccaacgaacaggatcctcgtcgcttgccaaaaggcttaacgccgcagacgttacgcacgctgtgccagtggattgacgcgcatcaggactatgagttttcaaccgacgagctggctaacgaggttaacatctcgcgtgtttcctgccgaaaatacctcatctggctggtcaactgccacatcttgttcaccagtatccattatggcgtcacggggcgtccggtttaccgttaccgtattcaggcagaacactactcactgctgaaacaatattgccaataa

SEQ ID NO: 472370 - DNA, 1632 bp, Shigella flexneri
atgagacattcattgccctaccacatattacgcaaacgtccgatgaaattgagtaccactgtgatcttaatggtcagcgcggtactgttctcggtgctattggtggtgcatctgatttacttctcgcaaatcagtgatatgacgcgagacgggctggccaacaaggcactggcagtggcgcgtaccctcgccgactcgccggaaatccgtcagggcttgcagaaaaaaccgcaggagagtggcatccaggccatcgcggaagccgtgcgcaaacgcaacgatctgctgtttattgtcgttaccgatatgcaaagtcttcgctactcacatcctgaagcccagcgtattggtcagccatttaaaggtgatgacatccttaatgcgctgaatggcgaagaaaatgtcgctatcaatcgcggttttctggcgcaggctttacgcgtatttacccccatctacgatgaaaatcataaacaaattggcgtggtggcgatcggccttgagttaagccgcgtgacccaacagatcaatgacagtcgctggagcattatctggtcggtattatttggcatgctggtcggactgattggcacctgcattctggttaaggtactgaaaaaaatccttttcggcctggaaccctacgaaatctccacgctgtttgagcaacgccaggccatgttgcagtctatcaaagaaggcgtcgttgccgtggacgatcgcggcgaggtcacgctgatcaacgatgccgcacaagaattgctgaattaccgtaagtcgcaggacgatgagaaactgtcgacgctcagccactcatggtcacaggtggtagatgtctcggaagtgttacgcgacggtacgccgcgccgcgacgaagagattacgattaaagaccggctattactgatcaacaccgttccggtgcgcagtaatggcgttatcatcggtgccatttcaaccttcagggacaaaactgaagttcgtaaactgatgcagcgactcgacggtctggtcaactatgctgacgcacttcgtgaacgatcccacgaatttatgaataaattgcatgtgattctcggattattgcatctgaagagttataagcagttggaagattacattctcaaaacagccaataactatcaggaagagattggctctctgctgggtaagatcaaatctccggttatcgctggttttttaatcagcaagattaaccgcgcgaccgatttaggccatacgctgattttaaacagtgaaagccagctgccagacagcggcagtgaggaccaggtcgcgacgctgattaccacattgggaaatctgatagaaaacgcgctggaagcattagggccggaacccggtggcgaaattagcgtaacattgcactaccgtcacggctggctgcactgcgaagttaacgatgatggaccggggatcgcacccgacaaaatcgatcacatttttgacaaaggtgtctcgacaaaaggaagcgagcgaggcgtcggtttagcacttgtcaaacaacaggtagaaaatctcggcggcagcatcgccgtggaatcggaaccggggattttcacacaattttttgtccagataccctgggacggggagaggtcgaacagatga

SEQ ID NO: 472371 - DNA, 159 bp, Shigella flexneri
atggatcaggcgctactggacgggggttatcgctgttataccggcgaaaagatcgatgtctatttcaacactgcgatatgtcagcattctggcaattgcgtacgtggcaacggcaagttatttaatctcaaacgaaagtcgtgtagactggctccctga

SEQ ID NO: 472372 - DNA, 366 bp, Shigella flexneri; identical to SEQ ID NO: 462994

SEQ ID NO: 472373 - DNA, 1056 bp, Shigella flexneri
atgaaaaagagcactctggcattagtggtgatgggcattgtggcatctgcatctgtacaggctgcagaaatatataataaagacggtaataaactggatgtctatggcaaagttaaagccatgcattatatgagtgataacgccagtaaagatggcgaccagagttatatccgttttggttttaaaggtgaaactcaaattaacgatcaactgactggttatggtcggtgggaagcggagtttgccggaaataaagcggagagtgatactgcacagcaaaaaacgcgtctcgcttttgccgggttgaaatataaagatttgggttctttcgattatggtcgtaacctgggcgcgttgtatgacgtggaagcctggaccgatatgttcccggaatttggtggcgattcctcggcgcagaccgacaactttatgaccaaacgcgccagcggtctggcgacgtatcggaacaccgacttcttcggcgttatcgatggcctgaacttaaccctgcaatatcaagggaaaaacgaaaaccgcgacgttaaaaagcaaaacggcgatggcttcggcacgtcattgacatatgactttggcggcagcgatttcgccattagtggggcctataccaactcagatcgcaccaacgagcagaacctgcaaagccgtggcacaggcaagcgtgcagaagcatgggcaacaggtctgaaatacgatgccaataatatttatctggcaactttctattctgaaacacgcaaaatgacgccaataactggcggctttgccaataagacacagaactttgaagcggtcgctcaataccagtttgactttggtctgcgtccatcgctgggttatgtcttatcgaaagggaaagatattgagggcatcggtgatgaagatctggtcaattatatcgacgtcggtgctacgtattatttcaacaaaaatatgtcagcgtttgttgattataaaatcaaccaactggatagcgataataagctgaatattaataatgatgatactgtcgcggttgggatgacgtatcagttttaa

SEQ ID NO: 472374 - DNA, 402 bp, Shigella flexneri
atgacgttaccgagtggacacccgaagagcagattgatcaaaaaatttaccgcactaggcccgtatattcgtgaaggtaagtgcgaagataatcgattctttttcgattgtctggctgtatgcgtcaacgtgaaaccggcaccggaagtgcgtgaattctggggctggtggatggagctggaagcgcaggaatcccgttttacctacagctaccagtttggtctgttcgataaagcaggcgactggaagagtgttccggtaaaagatactgaagtggttgaacgactggagcacaccctgcgtgagtttcacgagaagctgcgtgaactgctgacgacgctgaatctgaagctggaaccggcgaatgattttcgtgatgaaccggtgaagttaacggcgtga

SEQ ID NO: 472375 - DNA, 1245 bp, Shigella flexneri
atgacacaggcaaacctgagcgaaaccctgttcaaaccccgctttaaacatcctgaaacctcgacgctagtccgccgctttaatcacggcgcacaaccgcctgtgcagtcggctcttgatggtaaaaccatccctcactggtatcgcatgattaaccgtctgatgtggatctggcgcggtattgacccacgtgaaatcctcgacgtccaggcacgtattgtgatgagcgatgctgaacgtaccgacgatgatttatacgataccgtgattggctaccgtggtggcaactggatttatgagtgggccacccaggcgatggtgtggcaacaaaaagcctgtacggaagaagatccgcaactcagtggtcgacactggctgcatgcggctacgttgtacaacattgccgcctatcctcatctgaaaggagatgacctggccgagcaagcgcaggctttatcaaaccgcgcctatgaagaggccgcccagcgtctgccgggcacgatgcggcagatggagtttaccgtacccggcggtgcgcccatcaccggctttttgcatatgccgaaaggcgatggcccgttcccgacagtattaatgtgtggtggtctggatgcgatgcagacggactattacagcctgtatgaacgttattttgcgccgcgcggcattgcgatgctgactattgatatgccgtcggtgggcttttcttcaaaatggaagctcacccaggactccagcctgttgcatcagcacgtcttaaaggcgctgcctaacgtaccgtgggtggatcacactcgcgtcgcggcctttggtttccgtttcggcgctaacgttgccgtgcgtctggcataccttgaatcgccgcgtctgaaagcggttgcctgtcttggtccggtagttcataccctgttgagtgattttaagtgccagcaacaggtgccggaaatgtatcttgacgttctggcgagtcgtttggggatgcatgatgcttccgacgaagcgttacgcgtggagctgaatcgctattcattaaaagtgcaaggattgctggggcgtcgctgcccaacgccaatgttatcaggctactggaagaacgatccgttcagcccggaagaggactcacgcttaatcacctcatcatctgctgacggtaaattattagagatcccatttaacccggtgtatcggaattttgacaaaggtcttcaggaaatcaccggctggatcgaaaaacgcttgtgttaa

SEQ ID NO: 472376 - DNA, 459 bp, Shigella flexneri
atgagcgaaaaatacatcgtcacctgggacatgttgcagatccatgcacgtaaactcgcaagccgactgatgccttctgaacaatggaaaggcattattgccgtaagccgtggcggtctggtaccgggggcgttactggcgcgtgaactgggtattcgtcatgtcgataccgtttgtatttccagctacgatcacgacaaccagcgcgagcttaaagtgctgaaacgcgcagaaggcgatggcgaaggcttcatcgttattgatgacctggtggataccggtggtactgctgttgcgattcgtgaaatgtatccaaaagcgcactttgtcaccatcttcgcaaaaccggctggtcgtccgctggttgatgactatgttgttgatatcccgcaagatacctggatcgaacagccgtgggatatgggcgtcgtattcgtcccgccaatctccggtcgctaa

SEQ ID NO: 472377 - DNA, 1458 bp, Shigella flexneri
gtgtctgaactgtctcaattatctccacagccgctgtgggatatttttgccaaaatctgttctattcctcacccgtcctatcatgaagagcaactcgctgaatacattgttggttgggcaaaagagaaaggtttccatgtcgaacgcgatcaggtaggtaatatcctgattcgtaaacctgctaccgcaggtatggaaaatcgtaaaccggtcgtcttacaggcccacctcgatatggtgccgcagaaaaataacgacaccgtgcatgacttcacgaaagatcctatccagccttatattgatggcgaatgggttaaagcgcgcggcaccacgctgggtgcggataacggcattggtatggcctctgcactggcggttctggctgacgaaaacgtggttcacggcccgctggaagtgctgctgaccatgaccgaagaagccggtatggacggtgcgttcggcttacagagcaactggttgcaggctgatattctgattaacaccgactccgaagaagaaggtgaaatctacatgggttgtgcggggggtatcgacttcacctccaacctgcatttagatcgtgaagcggttccagctggttttgaaaccttcaagttaaccttaaaaggtctgaaaggcggtcactccggcggtgaaatccacgttggcctgggtaatgccaacaaactgctggtgcgcttcctggcgggtcatgcagaagaactggacctgcgccttatcgatttcaacggcggcacactgcgtaacgccatcccgcgtgaagcctttgcgaccattgctgtcgcagctgataaagtcgacgcactgaaatctctggtgaatacctatcaggagatcctgaaaaacgagctggcagagaaagagaaaaatctggccttgttgctggactctgtagcgaacgataaagctgccctgattgcgaaatctcgcgatacctttattcgtctgctgaacgccaccccgaacggtgtgatccgcaattccgacgtggcaaaaggtgtggtcgaaacctccctgaacgtcggtgtggtgaccatgactgacaataacgtagaaattcactgcctgatccgttcactgatcgacagcggtaaagactacgtggtgagcatgctggattcgctgggtaaactggctggcgcgaaaaccgaagcgaaaggcgcatatcctggctggcagccggacgctaattctccggtgatgcatctggtacgtgaaacctatcagcgcctgttcaacaagacgccgaacatccagattatccacgcgggcctggaatgtggtctgttcaaaaaaccgtatccggaaatggacatggtttctatcgggccaactatcaccggtccacactctccggatgagcaagttcacatcgaaagcgtaggtcattactggacactgctgactgaactgctgaaagaaattccggcgaagtaa

SEQ ID NO: 472378 - DNA, 456 bp, Shigella flexneri
gtgaaaaaggcgctggacaggctaattaaagaagctgcccgacaagacgtcgcggtaacggtgctggaaacagaaacaggccgctactctgacacgctgcgttcggcgctgatttctctggatggcgacaacgcatgggcgttaagcgaaagctggtgtggcactattcagtggatttgcccgagcccgtatcgcccacatcacgggcgtaaaaactggtttctgggcattgggcgttttaccgctgatgagcaggagcaatccgatgcgatccggtatgagacgctgcgttcgtcggggccgggcggtcaacatgtcaataaaaccgactcggcggtacgcgccacgcatttggcatccggtattagcgtgaaggttcagtcagagcgcagccagcatgctaacaaacggctggcgcgattgctgattgcctggaagctggatcagcagcaatag

SEQ ID NO: 472379 - DNA, 1044 bp, Shigella flexneri
atgggcaattatattcgtcccttatccgatgcggtatttaccatcgcatctgatgacctgtggatcgagagtttagcgatccaacaattacacaccacggcaaatttacccaacatgcagcgcgtagtggggatgccagatttacaccccggacgcggctacccgattggcgcagcgttcttctccgcaggccgtttttacccagcactggtcggcaatgatatcggctgtggcatggcgctatggcaaacagatattctcgctcgcaaatacaacgccgataagtttgaaaagcgattatcagctttggatgacgttgctgaagaaagctggctggaggaaaacctgccgtcagcatttgcacagcatccgtggcgcagctcgcttggctctatcggtggtggcaatcatttcgctgaactgcaacaagttgatcaaatcatcaacgctgaactgtttgcactggcaggtctggatgcgcagcatctgcaactgctggttcatagcggctcgagggggctagggcagtctattttacagcggcatattgcctcgttttcgcatcatggtttgcctgaaggcagtgacgacgcgctggcgtttgcgcgttttaatcgccacctgatcgctttgcgcataatgcaacaggttaaggccaccggaagtccggttctggatgtggcgcataactttgttagcgcgtgtcgaatcggtgatcaacaaggggtcttacatcgtaaaggtgccacgcctgatgactgtggtctggtggttattcccggttcacgcggtgattactccaggctggttcagcccgtcaggagtgaggaaacattgcattcgctggcgcatggggctgggcgtaaatgggggcgcaccgagtgtaaagggcgtctggcagcgaaatacacagcgacgcaactctcgcgtactgaacttggcagtcgggtaatttgtcgcgataaacaactcatcttcgaagaagcgccacaagcctataaatcggctgaaagtgtggtgcaatgtctgggcaggccggattaa

SEQ ID NO: 472380 - DNA, 375 bp, Shigella flexneri
atgaccgtcagtcagcattattcactacaacaaattgccgcctgggcgcagattgacgaatctcgctggaaggagaaactcacgaaatcacaagtgcgggttgcagttattaatgcaaaactggtcggctttattacctgcgttgaacactatatcgatatgttatttgttgaccctgaatacacccgccgtggggttgccagcgctttgttaaaaccttttattaagtctgaatccgaacttacggtggacgcaagcataaccgcaaaacccttttttgaacgttatggttttcagacagttaagcagcagcgcgttgaatgccggggagcgtggtttattaatttttatatgcgttataaaccgcaacattaa

SEQ ID NO: 472381 - DNA, 399 bp, Shigella flexneri; identical to SEQ ID NO: 261010

SEQ ID NO: 472382 - DNA, 294 bp, Shigella flexneri
atgcatcgaattctcgctgaaaaatcggtcaatatcactgagttacgtaaaaacccagctaaatactttattgatcaaccagttgcggttctttctaataatcgccccgcaggatatctcttaagtgccagcgcattcgaagcgttaatggacatgcttgctgaacaagaggagaaaaagcccataaaggcgcgctttcgtccaagtgctgcaagattagaggaaattacacgccgcgctaaacaatatcttaatgatatgacggatgatgatttcaatgactttaaggaataa

SEQ ID NO: 472383 - DNA, 1056 bp, Shigella flexneri
atgcgtaaaatcattcatgtggatatggactgctttttcgcagcggtggagatgcgcgacaatcccgctctgcgcgatatccctattgctattggcggcagccgcgaacgtcggggggtgatcagcaccgccaattatcccgcgcgtaaatttggcgtacgtagcgctatgcctactgggatggcgctcaaattatgcccacatctcaccttgcttccggggcgctttgacgcctacaaagaagcctcaaatcatatccgtgaaatcttctcgcgctacacctcgcgcattgaaccgttgtcactggatgaggcttatctcgatgtcaccgatagcgtccattgccacggttctgcgaccctcatcgcccaggaaatccgccagacgatcttcaacgagctgcaactgacggcatctgcgggcgtggcaccagtaaagtttctcgccaaaatcgcctccgacatgaataaacccaacggtcagtttgtgattacgccggcagaagttccggcatttttacaaaccttaccactggaaaaaatccccggcgtcggcaaagtctcggcggcaaaactggaagcgatggggctgcggacctgcggtgatgtacaaaagtgtgatctggtgattctgcttaaacgctttggcaaatttggccgcattttgtgggagcgtagtcaggggattgacgagcgcgacgttaacagcgaacggttacgaaaatccgtcggcgtggaacgcacgatggcggaagatattcatcactggtctgaatgtgaagcgattatcgagcggctgtatccggaacttgaacgccgtctggcaaaggtaaaacctgatttactgattgctcgccagggggtgaaattaaagttcgacgattttcagcagaccacccaggagcacgtctggccgcggctgaataaagctgacttaatcgccaccgcgcgtaaaacctgggatgaacgccgcggcgggcgcggtgtgcgtctggtggggctgcatgtgacgttgcttgacccgcaaatggaaagacaactggtgctgggattatga

SEQ ID NO: 472384 - DNA, 636 bp, Shigella flexneri
gtggcggtgccggaagagacggagaaaaaagcgcgtgatgtgaatgagaaaacggcgctgctgaagaagaaatccgccaccgagcttggcgagttggcaaccagtatcaacaccattgcccgtgatgcgcatatggaagcgaatctggagatggagattgttccccagggattacgcgtgctgattaaagacgaccagaatcgcaatatgttcgaacgcggcagcgcgcagattatgccgttctttaaaactttgctggtggagctcgcgccagtgttcgactcgctctataacaaaattattattaccgggcataccgatgcgatggcctacaaaaacaatatctacaacaactggaacctttcgggcgatcgcgcgctttcagctcgtcgggtgctggaagaggccggaatgccggaaaataaagtgatgcaggtaagcgcaatggcggaccagatgctgctggacgcgaagaatccgcaaagcgcgggcaatcggcgtattgagattatggtgctgaccaaaagtgcgtccgatacgctgtatcaatactttggtcagcatggggataaagtggtgcagccgctggtgcaaaagctggataagcagcaggtgctttcgcagcgaatgcgctaa

SEQ ID NO: 472385 - DNA, 1740 bp, Shigella flexneri
atgctttcacgctcggatttactgacgctgttgacaatcaactttatcgtcgtcaccaaagaggccgagcgtatttccgaggtttctgcccgctttaccctggacgcgatgcccggcaaacagatggcgattgacgccgatcttaacgccggattgatcaaccaggcgcaggcgcaaacccggcgtaaagatgttgccagcgaggccgatttctacggcgcgatggacggggcatcgaagtttgtacgcggagacgccatcgccgggatgatgattctggcgatcaacctgagcggcggcgtctgtatcggcatcttcaaatacaacctgagcgccgacgccgccttccagcaatacgtgctgatgaccatcggcgacggcctggtggcgcagatcccttccctgctgctctccaccgcggcggcgattatcgtcacccgcgtcagcgacaacggcgatatcgcccatgacgtgcgccaccagttgctggcaagcccgtcggtgctctacaccgccaccgggatcatgttcgtgctggcggtggtgccggggatgccgcatctgccgtttttgctgttcagcgccctgcttggctttaccggctggcggatgagcaaacgcccgcaggcggcggaggcggaagagaaaagcctcgaaacgctgacccgcaccatcactgaaaccagcgaacaacaggtcagttgggaaactattccgctgatcgagcccatcagcttaagcctcggctacaagctggtggcgctggtggacaaagcgcagggcaacccgctcacccagcggattcgcggcgttcggcaggtgatttccgacggtaacggcgtgctgctgccggagatccgcattcgggaaaacttccgcctcaagcccagccagtacgctattttcatcaacggcattgaggctgatgaagcggatattccggcggataaactgatggcgctgccctccagcgaaacctacggcgagattgacggcgtgctggggaacgacccggcgtacgggataccggtcacctggatccagcctgcgcagaaagcgaaggctctgaatatggggtatcaggtgatcgacagcgccagtgtgattgccacccatgtgaacaagattgtgcgcagctatattcctgatttgtttaactatgatgacatcacgcagttgcataaccgtttgtcgtcgatggcaccgcgcctggcggaggatttaagcgcggcgctcaattacagccaattgctgaaagtgtaccgggcgctgctgaccgaaggcgtttccctgcgcgatatcgtcaccatcgccaccgtgctggtcgccagtagcacggtgactaaagatcatattctgctggcggccgatgtgcgcctggcgctgcggcgcagcattactcatccgttcgttcgcaagcaggagctgacggtgtatacgctgaataatgagctggaaaatctgctgaccaacgtagtgaatcaggcgcaacaggccggcaaagtgatgctcgacagcgtgccggttgacccgaatatgctcaaccagttccagagcacgatgccacaggtgaaagagcagatgaaagcggcggggaaagatccggtgctgctggtgccgccgcagctacgccctttgctggcgcgttatgcaaggttgtttgcgccggggctgcatgtgctgtcgtataacgaagtgccggatgagctggagttgaagattatgggggcgttgatgtaa

SEQ ID NO: 472386 - DNA, 498 bp, Shigella flexneri
atgtcggaatatcgtcgttattacatcaaggggggaacatggtttttcacggtaaatttacgcaatcgtcgaagccatcttctgaccacccagttccagacgctccgtaacgccattattaacgttaagcgagacagaccttttgaaattaacgcctgggtcgttttgccggagcatatgcattgcatatggacattacccgaaagcgatgatgatttttcctctcgctggcgggagattaaaaagcagttcacccatgcttgcggattgaaaaatatctggcaaccgcgtttttgggagcatgccattcgcaatacaaaagattatcgccatcatgttgattatatttatataaatccagagaaacatggctgggtaaagcaggtgagtgattggccattctcaacgttccatcgcgatgtcgcgcgagggttatatcccatcgattgggcgggagacataacggatttaagtgccggggagcgtatcattttataa

SEQ ID NO: 472387 - DNA, 171 bp, Shigella flexneri
atgacgctgtgttatatcgggaaagcggctcgcaaaaacgcacagatttgtaggcatgataagacgcgtcagcgtcgcatcaggcatccgtgcacaaccgccggatgcggcgtaaacgccttatccggcctacaaaatcatctcttccgtcaaaatcctgcgcgcgcctaa

SEQ ID NO: 472388 - DNA, 555 bp, Shigella flexneri
atgcgttttgctccctttactcgccagcgccaccacaaccgggagcagataaaacagcatccagaatggtttcctgcgccgctcaaggcgagtgacagacgctggcaggcgctggcggaaaacaaccactttttaagcagcgatcacctgcataacatcaccgaagtggcgattcaccgcctggagcagcagcttggcaagccttacgtctggggcggcacgcggcccgatcaaggcttcgattgtagtgggttagttttttatgcctacaacaagatccttgaggcgaaactcccgcgcacggccaatgagatgtaccactaccgtcgggcaacgattgtggcgaataacgacctgcgccggggagatttgctatttttccatatccacagccgcgagattgccgaccatatgggggtgtatctgggcgacggtcagtttattgagtcactgcgcaccggggaaaccattcgggtaagccggttagccgaacctttctggcaggaccattttttaggcgcgcgcaggattttgacggaagagatgattttgtag

SEQ ID NO: 472389 - DNA, 741 bp, Shigella flexneri
atgcgtaaaatcgcattaattcttgcgatgttgttgatcccgtgcgtttcgtttgccggtttgctgggcagcagtagctcgaccacgccagtgagcaaagagtataagcagcagttgatgggatcccctgtctacatccagatcttcaaggaagaacgtacgctcgatctttacgtcaaaatgggcgagcaatatcaactgctcgacagttataaaatctgtaaatattccggcggcttagggccaaaacagcgtcagggcgatttcaaaagcccggaagggttttatagcgtccagcgtaatcagttaaaaccagacagccgttactacaaagcgattaatattggattccccaatgcttatgaccgtgcgcatggttatgaagggaaatacctgatgatccacggcgattgtgtatccatcggctgctacgcaatgaccaatcagggtattgatgagatcttccagttcgttactggtgcgctggtgtttggtcagccgagcgtgcaggtgagtatttacccattccgcatgaccgacgccaatatgaagcgccataaatattccaactttaaggacttctgggagcagctgaagccgggctacgactactttgagcaaacccgtaagccaccgaccgtttctgtggccaatggccgttacgtggtcagcaagccgttaagccacgaagtggtgcagccacaactggcatcaaactacacgctccccgaggcaaaataa

SEQ ID NO: 472390 - DNA, 768 bp, Shigella flexneri
atgtgcgaattgctcgggatgagcgccaacgtccctaccgatatctgctttagtttcaccggacttgtacagcgtggtggtggaaccgggccacataaagatggctggggcattaccttttacgaaggtaaaggctgtcgcacatttaaagatccacaacccagctttaattcccccatcgccaaacttgtccaggactacccgataaaatcctgttcggtggtggctcatattcgccaggctaatcggggcgaggtggcgctggaaaatactcacccatttacccgcgagttatgggggcgtaactggacttatgcccataacggacaactgacgggctacaaatcactggaaaccggcaacttccgcccggtcggtgaaaccgacagcgaaaaagccttttgctggctgctgcataaattaacgcagcgttacccgcgcacgccgggcaacatggcggcagtgtttaaatatatcgcctcactggcggatgaactgcgggcgaagggcgttttcaacatgctgctttcggacgggcgctatgtaatggcgtattgctcgactaatttacactggatcacccgccgcgcgccgtttggcgtggcaacgttgctggatcaggatgtggaaatcgacttcagctcgcagaccacaccgaatgatgtggtcacggtgattgcgacacagccgctgacgggcaatgaaacctggcaaaaaattatgccaggcgaatggcgcttattttgcctcggggagcgtgtagtttga

SEQ ID NO: 472391 - DNA, 579 bp, Shigella flexneri
atgtaccaggatcttattcgtaacgaactgaacgaagcggcggaaacgctggctaactttttaaaagatgacgccaatattcacgccattcagcgcgcggcggtcctgttagcagacagctttaaagccggtggcaaagtgctttcctgcggcaacggcggttcccattgcgacgctatgcactttgccgaagagttgaccggtcgctaccgtgaaaaccgtccgggctacccggcgattgctatttctgacgttagtcatatttcctgcgtcggtaatgatttcggtttcaatgatattttctcccgctacgttgaagcggtaggtcgcgaaggcgatgtactgctggggatctccacctccggtaactctgcaaacgtgatcaaagcgatcgcagcggcgcgtgagaaggggatgaaagtgatcaccctgaccggtaaagacggcggtaaaatggctggcacggcggatatcgaaattcgcgttccgcactttggttatgccgaccgcattcaggagattcacattaaagtgatccatatcctgatccagttaattgaaaaagagatggttaagtaa

SEQ ID NO: 472392 - DNA, 2445 bp, Shigella flexneri
atgatgattttgagtattctcgctacggttgtcctgctcggcgcgttgttctatcaccgcgtgagcttatttatcagcagtctgattttgctcgcctggacagccgccctcggcgttgctggtctgtggtcggcgtgggtactggtgcctctgaccattatcctcgtgccatttaactttgcgcctatgcgtaagtcgatgatttccgcgccggtatttcgcggtttccgtaaggtgatgccgccgatgtcgcgcactgagaaagaagcgattgatgcgggcaccacctggtgggagggcgacttgttccagggcaagccggactggaaaaagctgcataactatccgcagccgcgcctgaccgctgaagagcaagcgtttctcgacggcccggtagaagaagcctgccggatggcgaatgatttccagattactcatgagctggcggatctgccgccggagttgtgggcgtaccttaaagagcatcgcttcttcgcgatgattatcaaaaaagagtacggcggactggagttctcagcttatgcccagtctcgtgtgctgcaaaaactctctggcgtgagcgggatcctggcgattaccgtcggcgtgccaaactcattaggcccgggcgaactgttgcaacattacggcactgacgagcagaaagatcactatctgccgcgtctggcgcgtggtcaggagatcccctgctttgcactgaccagcccggaagcgggttccgatgcgggcgcgattccggacaccgggattgtctgcatgggcgaatggcagggccagcaggtgctggggatgcgtctgacctggaacaaacgctacattacgctggcaccgattgcgaccgtgcttgggctggcgtttaaactctccgacccggaaaaattactcggcggtgcagaagatttaggcattacctgtgcgctgatcccaaccaccacgccgggcgtggaaattggtcgtcgccacttcccgctgaacgtaccgttccagaacggaccgacgcgcggtaaagatgtcttcgtgccgatcgattacatcatcggcgggccgaaaatggccgggcaaggctggcggatgctggtggagtgcctctcggtaggccgcggcatcaccctgccttccaactcaaccggcggcgtgaaatcggtagcgctggcaacgggcgcgtattctcacattcgccgtcagttcaaaatctctatcggtaagatggaagggattgaagagccgctggcgcgtattgccgggaacgcttatgtaatggatgctgcggcatcgctgattacctacggcattatgctcggcgaaaaacctgccgtgctgtcggctatcgttaagtatcactgtacccaccgcgggcagcagtcgattattgatgcgatggatattaccggcggtaaaggcattatgctcgggcaaagcaacttcctggcgcgtgcttaccagggcgcaccgattgccatcaccgttgaaggggctaacattctgacccgcagcatgatgatcttcggacaaggagcgattcgttgccatccgtacgtgctggaagagatggaagcggcgaagaacaatgacgtcaacgcgttcgataaactgttgttcaaacatatcggtcacgtcggtagcaacaaagttcgcagcttctggctgggcctgacgcgcggtttaaccagcagcacgccaaccggcgatgccactaaacgctactatcagcacctgaaccgcctgagcgccaacctcgccctgctttctgatgtctcgatggcactgctgggcggcagcctgaaacgtcgtgagcgtatctcggcacgtctgggggatattttaagccagctttacctcgcctctgccgttctgaagcgttatgacgacgaaggccgtaatgaagccgatctgccgctggtgcactggggcgtacaggatgcgctgtatcaggcagaacaggcaatggacaatttactgcaaaacttcccgaaccgcgtggttgccgggctgctgaatgtggtgatcttcccgaccggacgtcattatctggcaccgtctgacaagctggatcataaagtggcgaagattttacaagtgccgaacgccactcgttcacgtattggtcgcggtcagtacctgacgccaagcgagcataacccggttggtttactggaagaggcgttggtggatgtgattgccgccgacccgattcatcagcggatctgtaaagagctgggtaaaaatctgccatttacccgtctggatgaactggcgcacaacgcgctgacgaaggggctgattgataaagatgaagccgctattctggtgaaagcggaagaaagccgtctgcgcagtattaacgttgatgactttgatccggaagagctggcgacgaagccggtaaagttgccggagaaagtgcggaaagttgaagccgcgtaa

SEQ ID NO: 472393 - DNA, 474 bp, Shigella flexneri
atgggcaggataagctcgggaggaatgatgtttaaggcaataacgacagtcgccgcactggtcatcgccaccagtgcaatggcgcaggatgatttaaccattagcagccttgcaaagggcgaaaccaccaaagctgcgtttaatcagatggtgcaagggcataagctacctgcatgggtgatgaaaggcggtacttatactcccgcacaaaccgtaacgttgggagatgagacgtatcaggtgatgagcgcgtgcaaaccgcatgactgtggctcgcaacgtatcgctgtgatgtggtccgagaaatctaatcagatgacggggctgttctcggctattgatgagaaaacgtcgcaagagaaactcacctggctgaatgtgaacgatgcgctttcgattgatggtaaaacggtgctgttcgcggcgttgaccggcagcctggaaaaccatccggatggctttaattttaaataa

SEQ ID NO: 472394 - DNA, 771 bp, Shigella flexneri
gtgcctagtttgaagattacgcttttgcagcaaccgttggtgtgggtggatggtcctgccaacctgcgccattttgatcgtcaactggaaggtattaccgggcgcgatgtgatcgttctaccggagatgtttaccagcggctttgccatggaagcggcagcttcgtcgcttgcacaagatgacgtagtgaactggatgacagctaaggcgcagcagtgcaatgcgctgattgcaggcagtgttgcattacaaacggagtctggttcggttaaccgctttttgctggttgagccgggcggcacggtacatttttatgataagcgtcatctgttccgcatggcagatgagcatctgcattataaagcgggcaatgcgcgagtgattgtggaatggcgcggctggcgtattttgccgctggtgtgctacgacttacgttttccagtgtggtcgcgcaatctcaacgattatgacctcgccctgtacgtcgccaactggccagctccgcgctctctgcactggcaggcattgctgacggcccgcgcgattgagaatcaggcgtatgtggcgggatgcaatcgcgtcggcagcgatggcaacggctgccattatcgcggtgacagccgggtgattaatccgcaaggcgagattatcgctaccgccgacgcgcataaggcaacgcgtattgatgcggagctgtcgatggtggcattgcgggaatatagagaaaagtttccggcatggcgggatgcggatgagtttaggttgtggtga

SEQ ID NO: 472395 - DNA, 237 bp, Shigella flexneri
atggaaactcatgcattatctgacgattgtttagattgtgtatatgattggtatgcggaaaaaaatggacaattttttagtgcaacgagtccagaagagttacttggattagttgcaatgtgggaagttcgtggtaatgactggagagctaatttgaatgagataaatacttatcaaaaagccatagaagaatccccgttttttgataaaaacggcaatgaaatagagtctgactaa

SEQ ID NO: 472396 - DNA, 990 bp, Shigella flexneri
gtgacggcgcgggactatatctggaacgcagacggtgaagtcggcggcatcaatgacaaactgcgcggttgcctggtgttcagctatgaccgcagcggctggctgaccagccgcacggggcagatgtatgaccatgaccattattattacgacaaagcgggcaacctgctgacggatgagtatcagggagcggtgatggataaccgcctgccgggttacgggcgtgaccgctaccgctataacgaatggggcgaactgacagagcgcagggaccagcagctggagtggaacgcgcagggccagttaacgcgggtcatcagcagcaacagcgagacgcggtatcagtacgatgcgctgggcaggcgcatcagcaaggcgaccagcaatctccataccgaccggggagaacgaagccggacaacgtttgtgtgggaagggttccggctgttacaggagacaacgtggcagggaaagcggacatacctgtacgatgcggaacagccgtacacgccggtggctgccatcacggggcgcggagagagccagaaaatctggtattaccacacggacctgacgggcacggtacacgaggtaaccgcgccggacgggacgctggtgtgggcgggctaccaggcgggatttggtgaaaaccggggcgacatcagcaacagcggggcgtactttgagcagccgcagcggctgccggggcagtactttgacgaagaaacagggctgcattacaatctgttcaggtattatgcgccggagtgcgggaggttcgtaagccaggacccgataggattaaacggtgggttgaacttatatgcttatgcgcctaatccgttaggttggatcgatccgctaggactgaattctttaggaatagattcaaataatatatttagaggagatggtaactataaaggtggcggaattggacagccaaagagtggcacaatatcagcacaggacattattgatcatctctaa

SEQ ID NO: 472397 - DNA, 2478 bp, Shigella flexneri
gtgattgaggacggctcccccaatgtctttctcggcggcggtacgcagacggtactggaaatcagcccggaaatccctgactggctgcgtcaggtggtggatgtgctgtatgtggtcgccggaatgcttggcgggctggctggcgcctggagtcaggcggcaaagatggggtcgaaatttggtacaaaatgtgcggcaaaatttattggtggcgaaatggtcgggatggccatctctgacacagtcatgggattgttcagcaatccggtagatgtcaccactgggcaaaaaattttgctgccggagacggattttaccctgccaggacgcctgcctgtcacctgttcgcgcttttacgccagccacctggaaactgaaggattgctgggcagaggatggcggctgaactgggagataaacctgcgtgaggatgaaacatatatcaccttcatcggtgtacagggtcgggaactgagttatccgaaagagatgctgataccgggccaccagatattcgacccggaagagcagttttacctgagccgtctgcatgacggatgctatgtgctgcattacaccgaccgcagctattacgtgtttgatgaatttgatgaccacggcgtcgcgccgttactttttatggagacgccgtaccggcagcgtattgctttcgggcgtgagaacggcaggctggtgcgggtggcctccagcagcggacaccatctgttattgcaccgcacgatgacgcaagcaggggaacgcctgtcgcatattgaacttgtgaagggcgggcgtcccggtaacctggtggaatatcgttacgacgataacgggcaactgactggcgtggtgaaccgggctggtgtgacggtgcgccagtttgcctatgaaaatggcctgatgacagagcatcgcaacgcgacgggctttacctgtacctaccactgggaagagattgaaggtttcccgcgcgtggtggaacacacgaccagcgacggcgaggattaccggttccactatgattttgctggcgggcagacggtggtaaccggcaggccggagcagaagtggcagtggtggtttgatgaagagacgtatgtgactgcgcaccggacgccgggcggcggaatgtaccgcttcacgtacaacgaaaaccattttccggtagcggtggaactccccggcgaacgcagggtaacgctggaatacgacaccctgagccgggtggtgaaagagacggacccggcaggccgggtgacacagacgcagtggaacggcagttttgctgaaatcacgcgccgggcgctggatgacgaccacgtatggaaggcggattacaacgaacacggccaggtgatacgggagacggacccggaagggcgcgtcacgcggtacgggtatgatgaacaggggctggcggtcagccgcacggatgcgcggggcggcgaggttgcgctggcgcacgatgcgcgcggtcaactgaggcgttacaccgactgttcagggtgcgccacgggttatgaatacgatgaagacggcaacctgacggcggtgacggacgcggaggggaaaacggtacgcatcagctataaccgtcaggggctgccggagacggtctgccaccccggtaaacagcaggaccgttacacctggaacgcgctggggttactgagcagccaccgtcgcatcacgggcagtgtgcagtcctggcagtatacgccgcgcgggatgctggcgcgccatacggatgaagagaaacgggagacgcgctggcagtacaccccggaagggctggttgccagtctgagcaacggcaacggggctcagtaccggttcagctacgacggcgacggacggctgacgggagaacagcgcccggacggcctgataaggatgtttgcgctgaatgcggacgggtttccggtcatcatcccgacgcagggcacagagggcggggtgcgcaatgaacagcaggagcgtgatgcgctgggccgcctgctgcgcagtgacacgcagcacagtacacggaccttcagctacaaccgtcttgaccagataacggaagtgacgctcacccccacggaagaaggggaacggctgcaccacatgcaggcggacacggtgcgttttgcgtatgaccgcagcgggtggctgacggcagagcacagcgtgcacggcagtatcaaataccggcgcgatgcgctgggcaatcccaccgatatcacgttgccggacgggcagcatctcagtcatctttactacggcagcgggcatctgctccagacggcactggacggtatcacggtcagtgaatatgagcgtgacagcctgcaccgtcaggtgatacgcacgcaggggaaactggcgacgttcagcggctacaacgccgacaaccggttaagctggcagcgcagcctgccaggtggcagccagaatccacagcaggcggtactcccccggcgcagaacgacagcgtga

SEQ ID NO: 472398 - DNA, 408 bp, Shigella flexneri
atgtatgaagccgcacgggtggatgaccccatctaccacaccagcgcccttgccgggtttttgataggggccatcataggtatcgccattattgccgtcgccagctttgctttttttacctgcggctttttggccgggctgattttgagttttctggctgatcagatagcttccggagtcctgcaactgggtgaggctattgggcgctcgatacattccacagtgggaaaaattctgaccggttctgataatgtcagcaccaacagtcgcccggccgcccgggccgtactgagtacggtgatatgcgaagaccattccccggaaatccgcattgcccaaggttccggcaacatctacatcaacagccagctgcccgtaaggatgaccacactgagtgtgatgcagtga

SEQ ID NO: 472399 - DNA, 201 bp, Shigella flexneri
atgaccagcctttaccgtattcaggagggctgctttgccctgcctgaaacttttcttgatcgcaccgtcaatatcttcgtcccatcgggcaatgaaagggcaactcccagtctgaatatttcccgcgatacgctcaggccagatgaaaatctgaccacctatattgaccgccagatagccttgatgaaaaaaaaaacctag

SEQ ID NO: 472400 - DNA, 2214 bp, Shigella flexneri
atgagttttgtatctacgggtaataaaccagttggaaacggtggacccgtcatcaccacaccaccaatagctggcgaaagtggcggtatgagcacaggttcagctgtaaccgatgtatctggtgccgccgaggagatggcagaacaggctgcggcggacctgtttggtgcgctgccggaaccgtcaggtctggttaaagccgcagtagctgctgcgcaggctgccgctgcagcagcagggatctcggatatggctggtgcagttcaggatgcagcggcgtcgcttgcagccggtgctccgggggcgcataacgtcacagtaagtggtagtgcggtgccgccgcagatgcttttgtttgcaggcatgaatggttcggaagggcttgggaatctgttttcttacacagtacagcttaaaacgctggacgccctgaacttggggtacgtttcccccgctgctaacctgccgcttcagctcatggtgggcaaagacctgtgcgtcagtatcgaactggacggcggcggaaaacggtatatcagcgggctggtgacggcggcgagggtggtcggccatgagggccgttcggtaacgtatgaattacgcattgagccatggctgaagctgctgacccataccagcgactacaaagcgttccagaacaaaaccgtggtggatattctcgatgaagtactggatgaatattcctttccggtggaaaagcggctggtggaaaattatccaccccgcgcctggcaggtgcagtatggtgaaaccgacttcgatttcatccagcgcctgatgcaggaatgggggatttactggtggtttgagcacagcgagaacagccacacgctggtgctggtggatgccatcaatggtcataaagcgtgccctgactcgccgctggtggagtggcaccaggaagggctgaaactggataaggaatttatccacaccattacggccagtgagaggctgcgtactggaaagtgggtgatggacgattttgattttatgaagcctcgttcgctgcttaaaagtaccgtggccagtccgcgtgataccggtcatgctgaatacgagcattacgaatggcctggtgattacttcactacgggcgaaggcgagatgctgacgcgcattcgtatggaagcgcagcgcagcccaggcagccgggcacatggggccggtcatatccgtaccctcatgaccgggtacacctttacgttgatgaatcacccgacggcagaaattaatcaggaatatctgctggtacagaccactctgtttttacgggataatgcgcagcacagcggtcaggatcagcattttacctatgtcaccacgtttgaactgcaccccaccagcgaagtttaccgcccacaacgaaccctgagcaaaccccacaccaaaggcccgcagagcgccatcgtcaccggcccggcggggcaggaaatctggacggataaatatggccgggtgaaggtgcagtttggctgggaccgttacggaaagaatgacgaaaacagttcctgctggatccgcgtcagctatccgtgggcgggtaaaggattcggcatgatccagatcccgcgtattggccaggaagtactggtggatttcaaaaacggcgatccggatttgcccatcatcgtggggcgcacctataaccaggacaccatgccgccgtgggggctgccgggcatggcgtcgcagagtgggatattcagccactcattgcagggagggccgactaacggaaatatgctgcgcttcgatgataaaacgggtgcggaagaggtgaagttccatgcggaaaaagacctcaataccacggtaaaaaacaatgaaacccacacggtcatggtcgatcgcataaaaaccattgtcaaaaatgaaaccatcagcgtgggagaagaccgtaatgccaccatcacaaaaaatgatggtctttccgtcaaactggctcaaaccatcaatgtcggaacgacatatcgtctggatgttggcgatcaatttacccttcgttgcggcaatgcagcgcttgtattacacaaggatggctcgattgagttttgcggaaaacaactgttactgcacaccagcgatgttatgcaactcattggcagtggcattgatatgaatccggatggcggcacagccatgactgcggatgatattgccccgttacctacccccgacgtttctgaataa

SEQ ID NO: 472401 - DNA, 387 bp, Shigella flexneri
atgaaatttttctgtattatagtgattttcctttcaataaattacatagctatagtgaatgttttcaagtcttctgcagttgctcaatccaccaaatattatgaagaaaatgatatacatgatggaagtaatgacatcttttttatgaagaaatatgggccgcctgctcatgagttcgtgaggccacgatataaatttgttggtgagtattatatcggcttgaatcaaacttatcgcataacagatcctgaatttcaagatgttcctattaaggaaatgttctggaatttgcagggggatttgaatctgacatgttggtttcattataaagacgggcaatggagagtgattacttatattttttggccaccaggggctagattttaa

SEQ ID NO: 472402 - DNA, 486 bp, Shigella flexneri
atgcgagcgatatatttatctgttcagcaggcatggaatgggaaaataacttattctgtttccggtgaatctgagttcgctaaaaaatttcagggtaaagctttgccttttgatgtaagaataatttctgcatctcagaatgaagactggttggttattgcaacaaaggttttgcctggtgctgatttaagaacatatgttgattttaaaaacagtacggttcatgttgattcagcgggcctggaaaaagtagcgaaatgtattaactgtaataatacgttgcaagtaaatatacctcatgaagccggacatgtacttggttacttagatgatgattatgattcttcgtcaccgtatgttggagatattagtgggttgatgaatgtgggaatggagcttcgggaacgataccttaaaaacgcaactataacgttgaatatcataatgcctgaaactaaatttactttattgaatgtaaccaaatga

SEQ ID NO: 472403 - DNA, 873 bp, Shigella flexneri
atgataaaacgtaacttgccgctgatgatcaccatcggcgtctttgtgctgggctatctctactgcctgacccagtttcccggttttgcttccacaagggtgatctgcaatatcctgaccgataacgcctttcttgggataatcgccgttggcatgacctttgtgatcctctctggcggtatcgatctctccgtcggttcggtgatcgcctttactggcgtgtttctggcaaaagtggttggcgatttcggcctctcgccgctgctggcgtttccgctagtgctggtgatgggctgtgccttcggcgcatttatggggcttctgatcgacgccctgaagatcccggcatttatcattacgcttgcggggatgttctttttgcgcggcgtcagctatctcgtttcggaagagtcgattccgataaaccatcccatttatgacacgctctcaagccttgcgtggaaaatccccggcggcggtcgccttagtgcgatggggctgttgatgctggcggtggtggttatcggtattttccttgcgcattgtacccgttttggcaatcaggtgtacgctattggcggcaacgcgacgtcggcgaacctgatggggatttctactcgcagcaccactattcgcatttatatgctctccaccggactggcaacactggcggggattgtcttctcgatttatacccaagccggatatgcactggcgggcgtaggtgtggaactggacgccatcgcgtcggtggtgattggcggtacgttgttaagtggtggcgtcgggacggtgcttgggacgctttttggcgtggcaattcagggactgatccagacttacatcaactttgacggcacgctgagttcctag

SEQ ID NO: 472404 - DNA, 1023 bp, Shigella flexneri
atgcctcaatctctccctgacactacgccgccaaaaaggcgttttcactggccgacggggatgccgcagctggcggcactgttgctggtgctgctggtcgatagcctggtagccccgcatttctggcaggtggtgcttcaggatgggcgtttgttcggtagccctatcgacattcttaaccgtgcagctcccgttgcgttactggcgattggtatgacgctggtgatcgccaccggtggtatcgatctctctgtgggggcggtgatggctatcgccggagccacaacggctgcgatgacggtcgcgggattcagcctgccgattgttttgttaagcgccctgggcaccggcatcctggcgggattgtggaacggcatactggtagcgatcctcaaaattcagccgtttgtcgccaccctgatcctgatggtcgccgggcgcggcgtggcgcaactgatcaccgccgggcagatcgtcacgtttaactcgccggatctctcatggtttggcagcggatcgctgttgttcctgccaacgccggtcattatcgcggtgctgacgcttctcctgttctggctgttgacccgcaaaacggcgctggggatgtttatcgaagtcgttggtatcaacattcgggcggcaaaaaatgccggggtaaacacgcgaatcatcgtcatgctcacctacgtgttgagcgggctatgtgcggcgattgcgggcattatcgtggcggcggatattcgcggtgccgatgccaacaacgccggattatggctggagctggacgccattctcgcggtggtgattggcggcggatcgctgatgggcgggcgctttaacctgctgctctcggtagtgggggcgctgattattcaggggatgaacaccggaattttgctttcgggctttccgccggagatgaaccaggtggtgaaagcggtggtggtgctttgtgtgctgattgttcagtcgcaacgctttatcagtctgattaaaggagtacgtagccatgataaaacgtaa

SEQ ID NO: 472405 - DNA, 1503 bp, Shigella flexneri
atgacgaccgaccaacaccaggagatcctccgcaccgaaggattaagtaaatttttccccggcgtcaaagcgttagacaacgttgatttcagcctgcgccgtggcgaaatcatggcgctgcttggtgaaaacggggcgggaaaatcaacgctaatcaaagcattaactggtgtataccacgccgatcgcggcaccatctggctggaaggccagactatctcaccgaaaaataccgcccatgcacaacaactcggtatcggcaccgtctatcaggaagtcaacctgctacccaatatgtcggttgctgataatctattcataggtcgcgaacccaaacgtttcggccttctacgccgtaaagagatggaaaagcgcgccaccgaactgatggcatcttacggtttctccctcgacgtgcgcgaaccgcttaaccgtttttcggtggcgatgcagcaaatcgtcgccatttgccgggctatcgatctctccgccaaagtgctgatcctcgatgaacccaccgccagcctcgacacccaggaaatggagctattatttggcctgatgcgtcagttgcgcgatcgcggcgtcagcctgatctttgtcactcactttctcgatcaggtctatcaggtcagcgatcggatcaccgtcttacgcaacggcagtttcgtaggctgtcgggaaacgcgcgagctaccgcagatcgaactggtaaaaatgatgctggggcgcgagctggatacccacgcgctacagcgtgccgggcgaacattgttgagcgacaaacccgttgccgcgttcaaaaattacggcaaaaaaggaacgatagcaccgtttgatctcgaagtgcgccccggcgagatcgtcggtctggctggcttgctgggatccggacgtaccgaaaccgccgaagtgatcttcggtatcaaacctgctgacagcggcacggcgttgatcaaaggcaaaccgcaaaccctgcgatcgccacatcaggcttcagtactgggcatcggattctgcccggaagacaggaaaaccgatggcatcatcgccgccgcctcggtgcgggaaaatatcatcctcgctctccaggcccagcgcggctggctacgacccatttcccgcaaagagcagcaagagattgccgaacgctttatccgccagcttggcattcgcacaccttcaactgaacaaccgattgaatttctctccggtggcaatcagcaaaaagtgctgctttcacgttggctactgacccgaccgcaatttctgatccttgatgagctaacccgtggcattgatgttggtgcccacgccgagatcatccgcctgattgaaacgctgtgtgctgacggtctggcgctgctggtgatctcctccgaactggaagagctggtgggctatgccgaccgggtgatcatcatgcgcgatcgcaaacaggtggcggagatcccgctggcacagctttccgttccggcgatcatgaacgccattgcggcgtaa

SEQ ID NO: 472406 - DNA, 720 bp, Shigella flexneri
gtggatgcgatctttatcgctccagtggttgcgacgggttgggaaccggtattaaaagaggcgaaagatgccgaaatcccggtcttcttgctcgaccgttccatcgatgtgaaagacaaatctctctatatgaccaccgttactgccgacaacatcctcgaaggtaagttgatcggtgactggctggtaaaagaagtgaatggcaaaccatgcaacgtggtggagctgcagggcaccgttggggccagcgtcgccattgaccgtaagaaaggctttgccgaagccattaagaatgcgccaaatatcaaaattatccgctcgcagtcaggtgacttcacccgcagtaaaggcaaagaagtcatggagagctttatcaaagcggaaaacaacggcaaaaacatctgcatggtttacgcccataacgacgacatggtgattggtgcaattcaggcaattaaagaagcgggcctgaaaccgggcaaagatatcctcacgggttccattgacggtgtaccggacatctacaaagcgatgatggatggcgaagcgaacgccagtgttgaactgacgccgaacatggcgggacccgctttcgatgcgctggagaaatacaaaaaagacggcaccatgcctgaaaagctgacgttaaccaaatccaccctttacctgcctgataccgcaaaagaagagttagagaagaagaaaaatatggggtattga

SEQ ID NO: 472407 - DNA, 234 bp, Shigella flexneri
atgtggaaacgcttacttgtagtctctgcagtctcggcagccatgtcgtctatggcgttggccgctccattaaccgtaggattttcgcaggtcggatcggaatccggctggcgcgccgcagaaaccaatgtggcgaaaagtgaggccgaaaaacgcggaattacgttgaaaattgccgatggtcagcaaaagcaggaaaaccagattaaagcggtacgttccttcgttgcataa

SEQ ID NO: 472408 - DNA, 531 bp, Shigella flexneri
atgagcttactcaacgtccctgcgggtaaagatctgccggaagacatctacgttgttattgagatcccggctaacgcagatccgatcaaatacgaaatcgacaaagagagcggcgcactgttcgttgaccgcttcatgtccaccgcgatgttctatccgtgcaactacggttacatcaaccacaccctgtctctggacggtgacccggttgacgtactggtcccgactccgtacccgctgcagcctggttctgtgatccgttgccgtccggttgccgttctgaaaatgaccgacgaagccggtgaagatgcgaaactggttgcggttccgcacagcaagctgagcaaagaatacgatcacattaaagacgtaaacgatctgcctgaactgctgaaagcgcaaatcgctcacttcttcgagcactacaaagacctcgaaaaaggcaagtgggtgaaagttgaaggttgggaaaacgcagaagccgctaaagctgaaatcgttgcttccttcgagcgcgcaaagaataaataa

SEQ ID NO: 472409 - DNA, 342 bp, Shigella flexneri
atgcgaatatttgtctacggcagtttacgccacaaacaaggcaacagtcactggatgaccaatgcccagttactgggcgatttcagtatcgataactaccagttgtatagcctgggccactatccaggcgcagttccggggaacggaacggtacacggtgaagtttatcgtattgacaacgccacgctggccgaacttgatgccttgcgcaccaggggcggtgaatacgcgcgccagttgattcagacgccgtatgggagtgcatggatgtacgtttatcaacgacccgtcgatggattaaagctaattgaaagcggcgactggttagacagggataagtaa

SEQ ID NO: 472410 - DNA, 3780 bp, Shigella flexneri
atgagtttatggaaaaaaatcagcctcggcgtggttatcgttatcttactgttgctgggatcggtggcgtttctggtgggcaccaccagcggcctgcatcttgtatttaaagcggcggatcgctgggtgccaggactggatattggcaaggtcaccggcggctggcgcgatctcaccttgtctgacgttcgttatgagcagctaggcgtggcggtaaaagcgggtaatctgcatctgggggtcggtcttgagtgcctgtggaacagtagcgtttgtattaatgacttggcgctgaaagacattcaggtcaacatcgacagtaaaaaaatgcctccttctgaacaggttgaagaagaggaagatagcggtccgctggatctctccacgccgtatcccatcaccctgacacgggtggcgctggacaacgtcaacatcaagattgatgacaccacggtgtcggtgatggacttcacctccggcctgaactggcaggagaaaaccctgaccctgaaaccgacgtcgctgaaaggcctgctgattgctctgccgaaagtggtggaagtggcgcaggaagaagtggtcgaaccgaaaattgaaaatccgcagccggaggaaaagccgctcggcgaaacgctgaaagatctcttttctcgcccggtattgccggaaatgaccgacgtgcatttgccgcttaacctgaacattgaagagtttaagggcgagcagctgcgcgtgacgggcgacacggacatcaccgtgcgcaccatgctgctgaaagtgagcagcattgacggcaatactaaactggacgccctggatatcgattccaaccaggggatcgtcaacgccagcggcacggcgcagctgtcagacaactggccggtggatatcaccctcaacagcacactgaacgtggagccgttgaaaggtgaaaaggtgaagctgaaagtgggcggcgcgctgcgcgaacagctggagataggcgttaacctttccggtccggtggatatggatttacgcgcccagacgcgactggcggaagccggattgccactcaacgtggaagtgaacagcaaacagctttactggccgttcactggtgagaagcagtatcaggcggatgatctgaaactgaaacttaccggcaaaatgaccgattacacgctctctatgcgtacggcagtgaagggacaggagatcccgccagccaccattacccttgatgccaaaggtaatgaacagcaggtcaatctcgacaaactcaccgtcgcggcgctggaagggaaaactgaactcaaggcgttgctcgactggcagcaggccattagttggcgcggtgagctaacgcttaatggcattaacaccgccaaagagttcccggagtggccgtcgaaactcaatggcttgattaaaacccgcggtagcctgtacggcggcacctggcagatggaggtgccagaactgaagctgaccggtaacgtcaaacagaacaaagtgaacgttgacggcacgctgaaaggcaacagttatatgcagtggatgatccctgggcttcatctggaactcgggccaaacagtgccgaagtgaaaggcgagctgggggtaaaagatctcaatcttgatgccaccatcaacgcgccggggctggataacgcgctgccggggcttggcggtacagcgaaagggctggtgaaagtacgcggcacggtggaagcgccacaactactggcagatatcaccgcgcgcggcctgcgctggcaggaactttccgtggcgcaggttcgcgtggaaggcgacattaaatccaccgatcagatcgccgggaaactcgacgtacgcgttgagcaaatttcgcagccggatgtaaatatcaacctcgtcaccctgaatgccaaaggcagcgaaaagcagcacgagctacagttgcggattcagggcgagcctgtctccgggcagcttaatctggcaggaagttttgatcgcaaagaagaacgctggaagggaactcttagcaatacccgcttccagacgccggtcggcccgtggtcgctgacccgcgatattgcgctggattaccgcaataaggagcaaaaaatcagcatcgggccacactgctggcttaacccgaatgcggaactgtgcgtgccgcaaactatcgatgcgggggccgaagggcgtgcggtggtgaatctcaaccgcttcgacctcgccatgctgaaaccgtttatgccagaaaccactcaggccagcggtatcttcacgggtaaagcggatgttgcctgggacaccacgaaagaggggctgccgcagggcagtatcaccctttcggggcgtaacgtgcaggtaacgcaaaccgtcaacgatgcggcgctgccggtggcgtttcagacactgaatctgacggcggaattgcgtaacaaccgtgccgaattgggctggaccatccgcctgaccaataacggccagtttgatggacaggtgcaggtgaccgatccgcaaggccgccgtaatcttggtggcaacgtcaatatccgtaacttcaaccttgcgatgataaaccccatctttacccgtggggaaaaagcagcggggatggtgagtgccaacttgcgtctgggtggtgatgtgcaaagcccgcagttgtttggtcagcttcaggttacgggtgtggatatcgacggcaactttatgccgtttgatatgcagccgagccagcttgcggtcaactttaacggtatgcgctcgacgcttgccggtacagtacggacccagcagggtgaaatctacctgaacggtaatgccgactggagccaaattgaaaactggcgggcacgagtaacggcgaaaggcagtaaagtgcggatcaccgtgccgccgatggtacgaatggatgtatcgccagatgttgtattcgaggctacaccaaacctgtttaccctcgatggtcgcgtggatgtcccgtgggcgcgcatcgtggtgcacgatctgccggaaagcgcagtaggcgtctccagcgatgtggtgatgcttaacgataacctgcaaccggaagagccgaaaacggcgtcgattccgattaacagtaacctgattgtccacgttggcaacaatgtgcgcattgacgcctttggcctgaaagcgcggctgacgggcgatcttaacgtcgtacaggacaaacaagggctgggcctgaacgggcagatcaacatccctgaagggcgcttccatgcctatggtcaggatctgattgtgcgtaagggtgagttactgttctctggtccgccggatcaaccgtatcttaatattgaagctattcgtaacccggatgctacagaagacgatgtaatcgccggagttcgcgtcactggtctggcggacgaaccgaaagcggagatcttctctgacccggcgatgtcgcaacaagctgcattgtcttatttgctacgtggacaagggctggagagcgatcagagcgacagtgcggcaatgacctcgatgctgattggtctgggggttgcgcaaagtggccagattgtgggtaaaatcggcgagacgtttggcgtaagcaatttagcgctcgacaccctgggagtaggcgactcctcccaggtagtggtcagcggctatgtattgccaggtctgcaagtgaaatacggcgtgggtatatttgactctatagcaacactcacgttacgttatcgcctgatgcctaagctatatctggaagccgtgtctggtgtagaccaggcactggatttgctctatcagttcgagttttag

SEQ ID NO: 472411 - DNA, 1734 bp, Shigella flexneri
gtgcgctatatccgacagttatgctgtgtaagcttactctgcttaagcggatctgccgtcgccgcgaacgtccgtctacaggtcgaggggttatcgggacagctggaaaagaacgttcgtgcgcagctttctacgattgaaagtgatgaagtgacgccagaccgtcgctttcgcgcacgcgtcgatgatgccatccgtgaaggtctgaaagcgctgggttattaccagccgaccattgaatttgatctccgtccaccgccaaagaaagggcggcaggtattgatcgccaaagtcacgccaggtgtgccggtgttaattggcggcaccgatgtggtattgcgcggcggcgcgcggaccgataaagactatttgaaattgctcgatactcgcccggctattggtacggtactgaaccagggcgattatgaaaatttcaaaaagtccttaaccagtattgcgttgcgtaaaggttatttcgatagcgaatttaccaaagcgcagctgggcattgcgctcggcctgcataaagccttctgggatattgattataacagtggcgaacgttaccgctttgggcatgtgacctttgaaggatcacaaatccgcgatgaatacctgcaaaatctggtgccgtttaaagagggcgatgagtatgaatcgaaagatctggcggaactgaaccgccgactttctgctaccggctggtttaactcggtggtggtggctccacaatttgataaagcgcgcgaaacgaaagtattaccattgacgggcgtggtttcgccgcgaacagaaaacaccatcgaaaccggggtcggttactctacggacgtgggaccgcgcgtgaaagcgacgtggaaaaagccgtggatgaactcatacggtcacagtttgaccaccagtaccagtatttccgcgccggaacagaccctcgacttcagctataaaatgccgctgctgaagaatccactggaacaatattatttggtgcagggcggttttaagcgcactgacctgaacgataccgaatctgactccactacgctggtggcttctcgctactgggatctctccagcggctggcagcgtgccattaacctgcgctggagcctcgaccactttacccagggtgaaattaccaacaccacgatgctgttttatcctggggtgatgattagccgcacgcgttctcgtggtggcctgatgccaacctggggagactcgcaacgctactctatcgactactccaacacggcctggggttcagatgtcgatttctccgttttccaggcgcagcacgtctggatccgcacactgtacgatcgccatcgctttgtgacacgcggcacgctgggctggattgaaaccggtgatttcgacaaagtaccgccggatctgcgtttcttcgtcgggggcgatcgcagtattcgcggctacaaatacaaatctatcgccccgaaatacgccaacggtgacctgaaaggggcctcgaagttgataaccggatcgctggaataccagtacaacgtgaccggaaaatggtggggcgcggtgtttgtcgatagtggcgaagcggtaagcgatattccccgcagcgactttaaaaccggtaccggggtcggcgtacgctgggaatcgccggtcgggccaatcaaactcgattttgccgtaccggtcgcggataaagacgaacacgggttacagttttacatcggtctggggccagaattatga

SEQ ID NO: 472412 - DNA, 639 bp, Shigella flexneri
atgagtttatttgataaaaagcatctggtttcccccgccgatgccctgcctggacgtaacaccccgatgcccgtagccacgctgcatgcggtcaacggtcactcaatgaccaatgtacctgacggaatggagattgccatttttgcgatgggttgtttctggggtgtggagcgtctgttctggcagttacccggcgtttacagcaccgccgcaggctataccggcggctatacgccaaatccgacttatcgggaagtgtgctccggtgatacgggtcatgccgaagcggtacgcattgtttacgatccttccgtcatcagctatgagcagttgctacaggtattttgggagaatcacgatcccgcccagggaatgcgtcagggcaatgaccacggcacgcagtatcgttcagcgatttatccgctgaccccagaacaggatgccgcagctcgcgccagtctggaacgttttcaggcggcgatgcttgccgccgatgacgatcgtcacatcaccacggaaatcgctaacgccacaccgttttattatgccgaagatgaccaccagcaatatctgcataaaaacccatatggttactgtggaattggcggaattggcgtctgtctgccgccggaagcatag

SEQ ID NO: 472413 - DNA, 1344 bp, Shigella flexneri; identical to SEQ ID NO: 458121

SEQ ID NO: 472414 - DNA, 207 bp, Shigella flexneri
atgaaaattttccaacggtacaacccacttcaggtggcgaagtacgtaaagatcctgttccgtggacggttatacatcaaggacattggcgcttttgaatttgataagggtaagattcttatcccaaaagtgaaggataagctgcatttgtcagtgatgtccgaagttaaccgtcaggttatgcgtctgcaaacagagatggcttaa

SEQ ID NO: 472415 - DNA, 555 bp, Shigella flexneri
atgaccctacgcaagattctggcactcacctgcctgctgttgccgatgatggcttccgcacatcagttcgaaatcggtcagcgagtgccgccgattggcattaccgatcggggcgagttggtgcttgataaagatcagtttagctacaaaacctggaacagcgcgcagttagtgggaaaagtgcgagtactgcaacatattgctggtcgcacctctgcaaaagagaaaaacgcgacgctgattgaagcgattaaatcagcgaagttaccgcacgatcgttaccagaccaccaccattgttaacaccgacgacgcgattccgggttccggcatgtttgtgcgcagcagtctggagagtaataaaaagctttatccctggtcgcagtttattgtcgatagcaatggcgtcgcgcgcggtgcctggcagctggatgaagaaagttccgctgtagtggtgctggataaagacggtcgcgtgcaatgggccaaagacggggcgctcacaccggaagaggtgcagcaagtgatggacctgctgcaaaagttgctcaaataa

SEQ ID NO: 472416 - DNA, 939 bp, Shigella flexneri
atgttacccaggatcagacacaataattttattggtgcggtggagttatttgtaaagtcatcgcatacaaaaacacattcaaacgatttttttaataatattcagcatgcatttaagaaaaaagattgggtttcgaattatgatagtctgttaactttgcgggagtcctttcgttgcgcaacacagattgataaaaatagttatcaagtgctttcatcaaaaaatgaaactgttaatgccatggataattttcttatcagtttcagccttaaagataacggtgctgaatatacaataacattgcgaggcagtgggtttgaatacgaagaaattcccataacaataaatgagtataactcattcatggatttcaaaaaccgcgagtttccgttagaacaaaacagaagattgtatgcctgtgatattttgcagaaaaaacagtctgacataccaaaaaggattaaaggttatattcgccaggcgtttggtgacgtatctttcggttatgccttattggaggatgtagtaagcaaattaaaacggggtaaatttgaactccaaataccaggcggtggaattaaagaatgcgatggatggtatatttacgaaaaaataattgatgataattttgccatagtcatagaatctttgggctttgcgcttaaaatctatggaggggatgaacgttttcgtaatggttcctctgttgttttggaggatgaagattactctcttatttataattttctggttaatgcaggttgccaacaagtcgaattagccgaacaagtggatgcgatagtaagtgcgaatctggccgcagatagtaatattaccaaagaaaagatttgcgagaaatataaatcgaccattgaggcgtttaaaaaagagcaactagcgttaccagtattagttcggtgtaagaactcagagacttaa

SEQ ID NO: 472417 - DNA, 741 bp, Shigella flexneri
atgttagatcaagtatgccagcttgcacggaatgcaggcgatgccattatgcaggtctacgacgggacgaaaccgatggacgtcgtcagcaaagcggacaattctccggtaacggcagcggatattgccgctcacaccgttatcatggacggtttacgtacgctggcaccggatattccggtcctttctgaagaagatcctcccggttgggaagtccgtcagcactggcagcgttactggctggtagacccgctggatggtactaaagagtttattaaacgtaatggcgaattcaccgttaacattgcgctcattgaccatggcaaaccgattttaggtgtggtgtatgcgccggtaatgaacgtaatgtacagcgcggcagaaggcaaggcctggaaagaagagtgcggtgtgcgcaagctgattcaggtccgcgatgcgcgcccgccgctggtggttatcagccgttcccatgcagatgcggagctgaaagagtatctgcaacagcttggcgaacatcagaccacgtccatcggctcttcgctgaaattctgcctggtggcggaaggacaggcgcagctgtacccgcgcttcggaccaacgaatatttgggacaccgccgccggacatgctgtggctgcagctgccggagcgcacgttcacgactggcagggtaaaccgctggattacactccgcgcgagtcgttcctgaatccggggttcagagtgtccatttactaa

SEQ ID NO: 472418 - DNA, 1944 bp, Shigella flexneri
atgattaagtttagcgcaacgctcctggccacgctgattgccgccagtgtgaatgcagcgacggtcgatctgcgtatcatggaaaccactgatctgcatagcaacatgatggatttcgattattacaaagacaccgccacggaaaaattcggactggtacgtacggcaagcctgattaacgatgcccgcaatgaagtgaaaaacagcgtactggtcgataacggcgatttgattcaggggagtccgctggccgattacatgtcggcgaaaggattaaaagcaggtgatgttcatccggtttataaggcgctgaatacgctggattatacggtcggtacactcggcaatcatgaatttaactacggtctggattacctgaaaaatgcgctggcgggagcgaaattcccttatgtaaatgccaacgtcattgacgccagaaccaaacagccaatgtttacaccgtatttaattaaagataccgaagtggtcgataaagacggaaaaaaacagacgctgaagattggctatattggcgtcgtgccgccgcaaatcatgggctgggataaagctaatttatccggaaaagtgacggtgaatgatattaccgaaaccgtgcgcaaatacgtgcctgaaatgcgcgagaaaggtgccgatgtcattgtcgttctggcgcattccgggctgtctgccgatccgtataaagtaatggcggaaaactcagtttattacctcagtgaaattccgggcgttaacgccattatgtttggccatgctcacgccgttttcccgggtaaagattttgctgatatcgaaggggctgatatcaccaaaggcacgctgaatggtgttccggcggtaatgccgggcatgtggggcgatcatcttggggtggtcgacttacaactcagtaatgacagcggtaaatggcaggtgacgcaggcgaaagcggaagcacggccgatttacgacatcgccaataaaaaatccctcgcggcggaagacagcaagctggtagaaacactcaaagccgatcacgatgccacacgccagttcgtcagcaagccaatcggtaaatctgccgacaatatgtatagctatctggcgctggtgcaggacgatccgaccgtgcaagtcgtgaacaacgcgcaaaaagcgtatgtcgaacattacattcagggcgatccggatctggcaaaactgccggtgctttcagctgccgcaccgtttaaagttggtggtcgcaaaaatgacccggcaagctatgtggaggtggaaaaaggccagttgaccttccgtaatgccgccgatctttatctctaccccaatacgctgattgtagtgaaagccagcggtaaagaggtgaaagagtggctggagtgctccgccggacagtttaaccagattgctcctaacagcacgaaaccacagtcactcatcaactgggatggtttccgcacttataactttgatgttattgatggtgtgaattatcagattgatgttacccaacccgcccgctatgacggcgagtgccagatgattaatgccaatgcagagcggattaagaacctgacctttaatggcaagccgattgatccgaacgctatgttcctggttgccaccaataactatcgcgcttacggcggcaaatttgccggtacgggcgacagccatatcgcttttgcttcaccggatgagaaccgctcggtgctggcagcgtggattgctgatgagtcgaaacgtgcgggggaaattcatccggcggcagataacaactggcgtttagcaccgatagctgccgataagaaactggatatccgtttcgaaacttccccgtcagataaagccgcagcgtttattaaagagaaagggcagtatccgatgaataaagtcgcgaccgatgatatcgggtttgcgatttatcaggtggatttgagtaagtaa

SEQ ID NO: 472419 - DNA, 381 bp, Shigella flexneri
atgagtcaggttagcctgtcacaacaactgaaagagggtaatctctttgcggaacagtgcccgtcgcgcgaggtgttgaaacacgtcaccagccgttggggggtgttgattctggtggcgctacgcgaaggtactcatcgctttagcgacctgcggcgcaaaatcggtggggtgagtgaaaagatgcttgcgcagtcgttacaggcgttagaacaggatggttttcttaaccgtatcgcgtatccggtggtgccgccgcatgtggaatatagcctcacgccgctgggcgagcaggtgagcgaaaaggttgctgcactggcggactggattgagttgaatttgcccgaggtgttggcggtgcgggatgaacgtgcggcataa

SEQ ID NO: 472420 - DNA, 861 bp, Shigella flexneri
atgatcgctattactggtgccactggccaacttggtcactatattattgaatccttgatgaaaacggttcctgccagccaaatagtggctatcgttcgtaatccggcaaaagcccaggccctggcagcacaaggcattaccgtgcgtcaggctgactacagcgatgaagccgcactgacatctgcacttcagggagtggaaaaactactgctgatctcttccagcgaagtgggtcaacgtgccccgcagcatcgtaatgttattaatgccgcaaaggcggctggcgtgaaatttatcgcttataccagcctgctacatgcagatacctccccgctcggcctcgccgatgagcacatcgagacggagaaaatgctggctgattctggcatcgtttacaccctgctgcgcaacggctggtacagcgaaaactacctcgccagcgccccggcagcactggaacacggcgtatttatcggtgcggcgggcgatggcaaaatcgcctcagcaacgcgggcagattatgcgacagctgcggcacgcgtgattagcgaagccggtcacgaaggcaaggtttacgaactggcgggcgatagtgcctggacgttgacacagttagcggcagagctgaccaaacagagcggcaaacaggttacctatcaaaatctgagcgaagccgatttcgccgcggcactgaaaagcgtcggactgcccgacggactggcggatatgctggcggattctgacgttggcgcatcgaaaggtggtctgtttgataacagcaaaacgcttagcaaattgattggctgcccaacgacaacgttagccgaaagcgtaagccatctttttaatgttaataactag

SEQ ID NO: 472421 - DNA, 966 bp, Shigella flexneri
atgattagcggcgtgctgtacgccctgttagcagggttgatgtgggggcttatttttgtcgggccgttgatcgtgccggaatacccggcgatgttgcagtcgatggggcgttatctggcgttagggttaattgcgctacccattgcctggctgggacgcgtgcgtctgcgtcagttggcgcgtcgggactggcttaccgccttgatgctcactatgatgggcaacctcatttattacttctgccttgccagtgccattcaacgtactggcgcgcctgtttccacgatgattatcggcaccctgccggtggtgattcctgtctttgccaatctgctttatagccagcgcgacggcaaactcgcgtggggaaaactcgccccggcactgatttgtattggcatcggcctggcgagtgtgaatattgctgagttaaaccacggactccccgattttgactgggcacgttatacctctggcatcgtgctagcgttagtttccgtggtctgctgggcatggtatgccctgcgcaacgcccgctggctgcgggaaaatcccgacaaacatccgatgatgtgggcgacggcgcaggcgctggtcacgctgccggtttctctcatcggctatctcgtcgcctgttactggctgaatatacaaacgccggacttctccttaccttttggcccccgtccgctggtgtttattagtctgatggttgcgatagccgtgctttgctcatgggttggcgcactctgctggaacgtcgccagccagcgattaccgacagtgattctcgggccgctgattgttttcgaaacgctggcaggtttgctgtacacctttttactccgccagcaaatgccgccgctaatgacgctgagcggtatcgcgctgttagtgattggcgtggtcatcgcggtcagagcaaaaccagaaaaacctttaactgaatctgtctcagaaagttga

SEQ ID NO: 472422 - DNA, 663 bp, Shigella flexneri
atggcttatcgcgaccaacctttaggtgaactggcgctctctatccctcgcgcttcggctctgtttcgtaaatatgatatggattactgctgtggcggtaagcagacgctggcgcgcgcggcggcacgtaaagaactggatgttgaggtcattgaagctgaactggcaaagcttgctgaacaaccgattgagaaagactggcgtagcgccccgctggcagaaatcattgaccatatcatcgtgcgctaccacgatcgtcaccgcgagcagctgccggagctgatcctgcaagcgactaaagtcgagcgcgttcacgccgacaaaccgagcgtgccaaaagggctgacaaaatacctgaccatgctgcatgaagagctttccagccacatgatgaaagaagagcagatcctcttcccgatgatcaaacaaggcatgggcagccaggcaatggggccaatcagcgtaatggaaagcgagcacgatgaagcgggcgaactgctggaagtgatcaaacacactaccaataacgtcacaccgccgccagaagcctgcaccacctggaaagcgatgtataacggcattaatgaactgattgatgacctgatggatcacatcagtctggaaaacaatgtactgttcccacgcgccctagcgggtgagtga

SEQ ID NO: 472423 - DNA, 1413 bp, Shigella flexneri
atggtagatcaggtaaaagtcgttgccgatgatcaggctccggctgaacagtcgctacggcgcaatctcacaaaccgacatgttcagcttattgccattggaggtgccattggtactgggttgtttatggggtccggcaaaacgattagccttgccgggccgtcgatcattttcgtttatatgatcattggttttatgctctttttcgtgatgcgggcaatgggggaattgctgctttcgaatctggaatacaaatcttttagtgacttcgcttccgatttactggggccgtgggcgggatatttcaccggctggacttactggttctgctgggttgtaaccggtatggcagacgtggtggcgatcacggcttatgctcagttctggttccccgatctctccgactgggtcgcctcgctggcggtgatagtgctgctgctgacgctcaaccttgccaccgtgaaaatgttcggtgagatggagttctggtttgcgatgatcaaaatcgtcgccatcgtgtcgctgattgtcgtcggcctggtcatggtggcgatgcactttcagtcaccgaccggtgtggaagcgtcattcgcgcatttgtggaatgacggcggctggttcccgaaaggtttaagtggcttctttgccggattccagatagcggttttcgctttcgtggggattgagctggtaggtacaacagctgcggaaaccaaagatccggagaaatcactgccacgcgcgattaactccattccgatccgtatcattatgttctacgtcttcgcgctgattgtgattatgtccgtgacaccgtggagttcggtagtcccggagaaaagcccgttcgttgagctgtttgtgttggtaggtttgcctgcggctgccagcgtgatcaactttgtggtgctgacctctgcggcgtcttccgctaacagcggtgtcttctctaccagccgtatgctgtttggtctggcgcaggaaggtgttgcgccgaaagcgttcgctaaactttctaagcgcgcagtacccgcgaaagggttgaccttctcgtgtatctgtctgctcggcggcgtggtgatgttgtatgtgaatcctagcgtgattggcgcgttcacgatgattacaaccgtttccgcgattctgtttatgttcgtctggacgattatcctttgctcgtacctggtgtaccgcaaacagcgtcctcatctgcatgaaaagtcgatctacaagatgccgctcggcaagctgatgtgctgggtatgtatggcgttctttgtgttcgtggtcgtgttgctgacactggaagatgacactcgccaggcgctgctggttaccccgctgtggtttatcgcgctggggttgggctggctgtttattggtaagaagcgggctgctgaactgcggaaataa

SEQ ID NO: 472424 - DNA, 621 bp, Shigella flexneri
atgaccaccccaacttttgacaccatcgaagcgcaagcaagctacggcattggtttgcaggtagggcaacaactgagtgaatctggcctggaagggctgctgccagaagcactggttgcaggtattgccgatgcgctggaaggcaaacatccggctgtgccggttgatgtggtgcatcgcgcgctgcgtgaaatccacgaacgcgccgatgccgttcgtcgtcagcgtttccaggcgatggctgctgaaggcgtgaaatacctggaagaaaacgccaaaaaagaaggtgtgaatagcaccgaatctggcctgcaattccgcgtgatcaaccagggtgaaggcgcaattccggcacgtaccgaccgcgttcgtgttcattacaccggtaaactgatcgacggcaccgtgtttgacagctccgttgctcgtggtgaacccgctgaattcccggttaatggcgtgatccctggctggattgaagcactgactctgatgccggtaggttctaaatgggaactgactatcccgcaggaactggcatatggcgagcgcggcgcaggtgcatccatccctccgttcagcaccctggtgtttgaagtcgaactgctggaaatcctctaa

SEQ ID NO: 472425 - DNA, 546 bp, Shigella flexneri
atgcccgggcgctttgaactaaaaccaaccctggagaaagtctggcacgcgccggacaattttcgcttcatggacccgctgccgccgatgcatcgtcgggggatcattattgccgccattgtattggtggtcggatttctgcttccatctgatgatacgcccaacgcgtcggtggtgacgcgtgaagcgcagttagatattcagtcgcaatcacaaccgccgacagaagaacagccgcaaactacccaaacgcaaccattccagccagatagcggaattgataatcaatggcgctcttaccgtgtcgaacccggtaaaacgatggcgcagctgttccgcgaccacggactgcccgctaccgatgtctatgcaatggcgcaggtagaaggcgcgggtaagccgctgagtaatttgcaaaatgggcagatggtgaaaatccgccagaacgccagcggcgtggtgacgggcttaaccattgatacggggaataatcaacaggtcctgtttacccgccagccggatgacagttttattcgtgcgcggtag

SEQ ID NO: 472426 - DNA, 648 bp, Shigella flexneri
atgtatattgataccagcaacgtacagagcctgaaggaaaaattgctgctatgtgcggttaatgaatttgccgaatatggttatgaaggggccagagtagataatattgtaaaggcagcagggtgtagtaaacagacggtttatcaccactttggtaataaagaaaatttatttatcgaagtgctggaatatacctggaacgatattcgacaaaaagaaaaggcccttgatttctcagatcttccgccacaaaaagccattgagaaaattattgattttacatgggattattatattgctaatccttggtttttaaaaattgtgcatagtgaaaatcaaagtaaaggtgtgcattatgcaaaatcacagcgtctcttagaaattaaccatgctcacttgcagttaatggaatccttattggatgaagggaagaaatacaatatttttaagccaggtatcgacccattgcaggtgaatattaatattgctgcgcttgggggatattatttgatcaaccagcatacgcttggcctagtttatcatatcagtatggtttccccccaggcactggaagccagacgtaaggtcatcaaagagacaatccttagctggcttttggttgacccttcatctaccgcgcacgaataa

SEQ ID NO: 472427 - DNA, 792 bp, Shigella flexneri
atgaaatccactcgtcctgttgccgtgattaccggagccactcgcggtattggaaagggctgtgcgcaggagcttgctcgtggcgggtttaacctgctgattaacgatcgtcccgatgccgacagcgtagaaaaactgcatatcacacaacaagaatgtttggcggaaggcgtggaagtgatttgcttccctgctgatgtcggtgatctatctctgcatgaggagatgctcgacgcggcgcaaaaccagtgggggcggctggactgtctgctcaataacgcggggatttcagtgaaaaaacgcggtgacctcctcgacctcgaaccagacagcttcgatcaaaacattgccattaacacccgcgcgccgttcttccttgctcaggcattcagtaagcgcttactggcacagccgaaaccggaagcggagctgccgcaccgctcgattattttcgtcagttccatcaacgccatcatgctggcgatgaatcgcggcgaatacaccattgccaaaaccgccgtttctgccgctgctcgtctgtttgctgctcgcctttgtaatgaacaaattggcgtttatgaagtgcgccctggtctcatcaaaactgatatgactattccggcaacggcttattacgacgaactgattgccaaaggtctggtgccgtggggacgttggggttatccggctgatattgcttccaccgtccgcgcgatggcggaaggtaaactgatttacacctgtggtcaggcggtcgcaatcgacggcggcttaagtatgccgcgcttctga

SEQ ID NO: 472428 - DNA, 885 bp, Shigella flexneri
atgagagatctgttacaacgcccggatttattcagtatcaataccgcgacactgggctataaaacgccgctacccgccattattgatgcctgcgccgcacgcggtattggcgcaattgccccctggcgcagggagttgcagggtgaagatctccagcaaatcacccgccagcttgccgccagtaacatgagcgtttccggtttgtgccgtagcacttactacaccgcgccgacactggcggaacgcaaactggcgattgatgataaccgccgggcgctggacgacgcagcggtgcttaacgccgcctgttatatgcaggtggttggcggtctgccaacgggcactaaagatctatatgaagcgcgagaacaagtgaaacaagggattcgccagttgctgccacattcgaaagatgtcggcgtgccaattgcgctggagccactgcacccgatgacagctgccgatcgctcttgcctgtgcacgttacgtcaggcgctggactggtgtgatgaactcgatcccgatggtgagtttggcctcggcgtggcggtggatgtttatcacgtctggtgggatccggatctcgccagtcagatcctgcgtgccggaaaacgcatcctcgcgtttcatgtttccgactggttaatgccgaccactgatctggtcaatgaccgtggtatgccgggagatggcgtcatcaatattccgtcaattcgtcggctggttgaaaacgccggatttaatggtgctattgaactggaaatattctcgccttactggtggcagaaagatattaacagcacgggtaatgactccaacttactgatagtgttttatgttcagataatgcccgatgaccttgtcatgcagctccaccgattttga

SEQ ID NO: 472429 - DNA, 1680 bp, Shigella flexneri
atgactcaatttacgcaaaataccgccatgccttcttccctctggcaatactggcgcggcctttccggctggaacttctattttctggttaagtttggcctgttgtgggcgggatatcttaacttccacccgctcctcaatttggtgtttgccgcgtttctgctgatgcccattccgcgttacagcctgcatcgcttgcgccactggattgccctgccgatcggctttgctttgttctggcatgacatctggttgcctggcccggaaagcataatgagccagggttcgcaggtggcggggttcagtaccgattatttaatcgaccttgtcacacgctttattaactggcagatgattggggccatttttgttttattagtggcctggttattcctgtcacaatggattcgcattaccgtttttgtggttgccatactgctatggctgaacgtacttaccctggcgggaccaagtttctccttgtggccagccggacaaccgacgaccactgtaacaacgacgggtggtaacgcagcggcaaccgttgcggcgacgggtggcgcaccggtagtgggtgatatgcccgcacaaactgcaccgccaacaacggcgaaccttaacgcctggctgaataatttctataacgcggaggcgaaacgtaaatcgaccttcccgtcttcgctgcccgctgatgctcagccatttgaactactggtgattaacatctgttcgctttcctggtcggatatagaagccgccgggttgatgtcgcatccactgtggtcgcatttcgatattgatttcaagaactttaactccgccacctcctacagtggcccggcggcgatccgtttactacgcgccagctgcgggcagacttcgcacactaatctgtatcaaccggcaaataacgactgctatctgtttgataacctttcgaaactgggctttacccagcacctgatgatgggacataacggccagttcggcggttttttgaaagaagttcgcgaaaatggcggcatgcagactgaattgatggatcaaacaaatctgccggttattttgctgggctttgatggttcgccggtttatgacgataccgccgtgcttaaccgctggctggacgttaccgaaaaagataaaaacagccgtagtgccacgttctacaacacgcttccactgcatgacggcaaccattatccgggggtcagcaaaacagcggattacaaagcgcgggcgcagaaattctttgatgaactggacgccttctttactgaactggagaaatcgggtcgtaaagtgatggtggtcgtggtgccggaacacggcggcgcgctgaagggcgacagaatgcaggtatctggcctacgtgatatccctagcccgtctatcacagacgtccccgttggggtgaaattcttcggcatgaaggcaccacatcagggggcaccgattgtcattgaccaaccgagcagcttcctggctatctccgatctggtggttcgcgttcttgatggcaagattttcaccgaagacaatgttgactggaaaaaactcaccagtgggttgccacaaacagcaccggtctccgagaactcaaatgcagtagttattcaataccaagataaaccgtacgttcgcctgaacggcggcgactgggtgccttacccgcagtaa

SEQ ID NO: 472430 - DNA, 192 bp, Shigella flexneri
atgatgaccatcagcgatatcattgaaattattatcgtttgcgcactgatatttttcccgctgggctatctggcgcggcactctttgcgacgcattcgcgacaccttacgtttgttctttgctaaacctcgttatgttaaaccggccgggacgttacgccgcacggaaaaagccagggcaaccaaaaaatga

SEQ ID NO: 472431 - DNA, 1560 bp, Shigella flexneri
gtggaccctgtattctctatcggtatctcatcattatgggatgagctgcgacatatgccagcaggcggcgtctggtggtttaacgtcgatcgccatgaagatgctatcagtctggcgaatcaaacaattgcatcccaggctgaaaccgcacacgtcgcggtcattagcatggacagcgatccggcgaaaatctttcaattagatgattctcaagggccggaaaaaataaaattattttcaatgctaaatcatgaaaaaggtctatactatttggcccgtgatttgcagtgttctattgatccccataattacctttttattcttgtttgcgcaaataacgcatggcaaaatattcctgccgagcggcttcgctcatggttggataaaatgaataaatggagcaggttaaaccattgttcgcttttggtaattaatcccggaaataataacgataaacaattttcattgttgcttgaggaataccgttcactttttggtcttgccagtttgcgttttcagggtgaccaacatttgctggatattgccttctggtgcaacgaaaaaggggtcagcgcccgtcagcagcttagcgttcagcaacaaaatggtatctggacattagttcaaagcgaagaggcggagatccaaccacgcagcgacgaaaaacgcattctgagtaatgttgctgtactggaaggtgcgccgccgctatcggaacactggcaactgttcaacaataacgaagtcctgttcaatgaagcccgtaccgctcaggcggcgacggtggtcttttctttacagcaaaatgcgcaaatcgagccactggcccgcagcattcataccctgcgtcgccagcgcggtagtgcgatgaaaatcctcgtgcgggaaaataccgctagcctgcgcgccaccgatgaacgtttgttattggcctgcggtgcaaatatggttattccgtggaatgcgccactctcccgttgtctgacgatgatcgaaagcgtgcaagggcagaagtttagtcgctatgtaccggaagatatcactaccttgctgtcaatgacccagccgctcaaactgcgtggtttccagaagtgggatgtgttctgtaatgccgtcaacaacatgatgaataaccctctcttgcctgcccacggtaaaggcgttctggttgccctacgtccggtaccgggtatccgcgttgagcaagccctgacgctatgtcgccctaaccgtaccggcgatatcatgaccattggcggtaatcggctggtgctgtttctctcattctgtcggattaacgatctggataccgcgttgaatcatattttcccattgcctactggcgacattttctcaaaccgtatggtctggtttgaagatgatcaaatcagtgccgagctggtgcagatgcgcctgcttgccccagaacaatggggaatgccgctgcctttaacgcaaagttctaaaccggtcatcaatgccgagcacgatggtcgccactggcgacgaataccagaacccatgcgactgttagatgatgctgtggagcgctcatcatga

SEQ ID NO: 472432 - DNA, 189 bp, Shigella flexneri
atgaataacaatgaaccagatactctgcctgatcccgcgataggctatatcttccagaatgatattgtggcgttaaagcaggcattttcactgcctgatattgattatgccgatatttcccaacgcgaacagttggccgcggcattaaaacgctggccgttgctggcagagtttgcgcaacaaaagtag

SEQ ID NO: 472433 - DNA, 753 bp, Shigella flexneri
atggccgtactgggattgcagggggtgcggggaggcgtggggacaacaaccatcaccgccgcattagcctggtcattacaaatgttgggagaaaatgtcctggtggtcgatgcctgcccggacaacttgttgcgcctgtcatttaatgttgattttacccaccgtcagggctgggccagagcgatgctggatggccaggactggcgtgacgctgggttgcgctacacctcgcagctcgatttgctgccttttggtcagttatccattgaagaacaagaaaatccacagcactggcaaacccggctgagcgatatttgctccggcttacagcaactaaaagccagcgggcgttaccagtggattttaatcgacttaccgcgtgatgcctcgcagataacccaccagctgctgagtttgtgcgagcactcgctggcaatcgtcaatgtggatgccaactgccatatccgactgcatcagcaagcgctgccggatggcgcacatattttgattaatgacttccgtattggcagtcaggttcaggacgatatttaccagctttggttgcaaagccagcgccgattactgccgatgctcattcatcgtgatgaagcgatggctgaatgcctggcggctaagcaaccagtaggtgaatatcgcagtgatgcgctggcggctgaagagatactgacgctggcgaactggtgcctgttgaactactccgggctgaaaacgccagtcgggagtgcatcatga

SEQ ID NO: 472434 - DNA, 354 bp, Shigella flexneri
atgagtatcctgacccggtggttgcttatcccgccggtcaacgcgcggcttatcgggcgttatcgcgattatcgtcgtcacggtgcgtcggctttcagcgcgacgctcggctgtttctggatgatcctggcctggatttttattccgctggagcacccgcgctggcagcgtattcgcgcagaacataaaaacctgtatacgcatatcaacgcctcgcgtccgctggacccggtccgttatctcattcaaacatgctggttattgatcggtgcatcgcgcaaagaaacgccgaaaccgcgcagcgggcattttcaggtctgcaaaatattcgtggacgttaccatcaatggatga

SEQ ID NO: 472435 - DNA, 1152 bp, Shigella flexneri
atgaacgagctgcctgagcgcgttagccataaaacacagcatctggatgaaaaaaaagagctcggtcatttgagtgccggggcgcggcggttgatcctcggtatcatcgtcaccttctcgctgattctggcgttaatctgcgttactcagccgtttaacccgctggcgcagtttatcttcctgatgctgctgtggggggtagcgctgatcgtacggcggatgccggggcgcttctcggcgctaatgttgattgtgctgtcgctgaccgtttcttgccgttatatctggtggcgttacacctctacgctgaactgggacgatccggtcagcctggtgtgcgggcttattctgctcttcgctgaaacgtacgcgtggattgtgctggtgctcggctacttccaggtagtatggccgctgaatcgtcagccggtgccattgccgaaggatatgtcgctgtggccgtcagtggatatctttgtcccgacttacaacgaagatctcaatgtggtgaaaaataccatttacgcctcgctgggtatcgactggccgaaagacaaactgaacatctggatcctcgatgacggcggcagggaagagtttcgccagtttgcgcaaaacgtgggggtgaaatatatcgcccgcaccactcatgaacatgcgaaagcgggcaacatcaacaatgcgctgaaatatgccaaaggcgagttcgtgtcgattttcgactgcgaccacgtaccaacgcgatcgttcctgcaaatgaccatgggctggttcctgaaagagaaacagctggcgatgatgcagactccacaccacttcttctcgccggacccgtttgaacgcaacctgggacgttttcgtaaaacgccgaacgaaggcacgctgttctatggtctggtgcaggatggcaacgatatgtgggacgccactttcttctgcggttcctgtgcggtgattcgtcgtaagccgctggatgaaattggcggcattgctgtcgaaaccgtgactgaagatgcgcatacttctctgcgtttgcaccgtcgtggctatacctccgcgtatatgcgtattccgcaggcggcggggctggcgaccgaaagtctgtcggcgcatatcggtcagcgtattcgctgggcgcgcgggatggtataa

SEQ ID NO: 472436 - DNA, 1038 bp, Shigella flexneri
atgttccacttcttgtcgggcattccacggctgatcttcctgactgcgccgctggcgttcctgctgcttcatgcctacatcatctatgcgccagcgttgatgatcgccctattcgtgctgccgcatatgatccatgccagcctgaccaactcgaagatccagggcaaatatcgccactctttctggagtgaaatctacgaaacggtgctggcgtggtatatcgcaccaccgacgctggtggcgctgattaacccgcacaaaggcaaatttaacgtcaccgccaaaggtggactggtggaagaagagtacgtcgactgggtgatctcgcggccctacatcttccttgttctactcaacctggtgggcgttgcggtaggcatctggcgctacttctatggcccgccaaccgagatgctcaccgtggtcgtcagtatggtgtgggtgttctacaacctgattgttcttggcggcgcagttgcggtatcggtagaaagcaaacaggtacgccgatcgaaccgcgtggagatgacgatgcccgcggcaattgcccgcgaagatggtcacctcttctcgtgtaccgttcaggatttctccgacggtggtttggggatcaagatcaacggtcaggcgcagattctggaagggcagaaagtgaatctgttgcttaaacgcggtcagcaggaatacgtcttcccgacccaggtggcgcgcgtgatgggtaatgaagttgggctgaaattaatgccgctcaccacccagcaacatatcgattttgtgcagtgtacgtttgcccgtgcggatacatgggcgctctggcaggacagctacccggaagataagccgctggaaagtctgctggatattctgaagctcggcttccgtggctaccgccatctggcggagtttgcgccttcttcggtgaagggcatattccgtgtgctgacttctctggtttcctgggttgtatcgtttattccgcgccgcccggagcggagcgaaacggcacaaccatcggatcaggctttggctcaacaatga

SEQ ID NO: 472437 - DNA, 2313 bp, Shigella flexneri
gtggctatggggatgagtgcgttcccctctttcatgacgcaggcgacgccagcaacgcaaccactgatcaatgctgagccagctgtagccgcccagacggaacaaaatccgcaggtggggcaagtgatgtcaggcgagcagggagctgatgcccccatcgtggcgcagaacggtccttcgcgtgatgtgaagctgacctttgcgcaaatcgcgccgccgccgggcagcatggtgctacgtggtattaacccgaacggcagcattgagtttggtatgcgcagcgatgaagtggtgacgaaggcgatgctcaacttcgaatacacgccatcgccatcgttactgcctgtccagtcgcagttaaaggtttatctcaatgatgagctgatgggcgtgctgccagtgaccaaagaacagttgggtaaaaaaacgctggcgcaaatgcccattaatccactgtttattaccgacttcaaccgtgtgcggctggagtttgtcggccattatcaggacgtgtgcgaaaacccggccagcaccacgctttggctggatgttgggcggagcagtggactggatctgacctatcagaccctgaatgtgaagaatgacctgtcacacttcccggtgccattctttgacccgcgcgataaccgtactaacaccttgccgatggtctttgcgggtgcgccggatgttgggctgcaacaagcatctgccattgtcgcctcgtggtttggttcgcgttctggctggcgtgggcagaacttcccggtgctctataaccaattgccggatcgcaatgccattgtctttgcaaccaacgacaaacggccggacttcctgcgcgatcatccggcggtaaaagccccggtgattgagatgattaaccatccgcagaatccttacgtcaaactgctggtggtgtttggtcgtgacgacaaagacctgttgcaggcagcgaaaggtatcgctcagggtaacattctgttccgtggtgaaagcgtggtagtgaatgaagtgaaaccgctgctaccgcgtaagccgtacgatgcgccgaactgggtacgtaccgatcgtccggtcacatttggcgaactgaaaacctatgaagaacagttacaatccagcggccttgagccagcagcgattaacgtttcgctaaacctgccgccggatctctacctgatgcgcagtaccggcattgatatggatattaattaccgctacaccatgccgccggtgaaagacagttcgcggatggatatcagcctgaataaccagttcctgcaatccttcaacctgagcagcaaacaggaggcgaaccgtctgctgctgcgtattccggtattacaaggtttgctggatggcaaaacagatgtctctattccggcgctgaaactgggcgcgaccaaccagctgcgcttcgactttgagtatatgaacccgatgccaggcggttcggtagataactgtattaccttccagccggtgcagaatcatgtggtgattggtgacgattccaccatcgacttctcgaagtattaccacttcatcccgatgccggatctacgcgcctttgctaacgcgggcttcccattcagccggatggcggatctgtcgcaaaccatcaccgtgatgccgaaagcgcctaacgaagcacagatggaaacgttgctgaatactgttggttttatcggcgcacagacgggcttcccggcgattaatctgacggtgaccgatgatggcagcaccattcagggcaaagatgccgacatcatgatcatcggtggtatcccggacaaactgaaagacgataagcagatcgacctattggtgcaggcgaccgaaagctgggtgaaaacaccgatgcgccagaccccgttccccggcattgtgccggacgagagcgatcgcgcggcagaaacccagtcaactctgacctcttccggtgcgatggcggcggtgattggcttccagtcgccgtataacgaccagcgcagcgtgattgcgctgttggcagatagcccacgcggttatgaaatgcttaacgatgcggtgaacgatagcggcaaacgcgccaccatgttcggttcggtcgcggtgatccgcgagtccggtatcaacagcctacgtgttggcgacgtttattacgtaggtcatctgccgtggttcgagcgcttgtggtatgcgctggcaaaccatccgattctgctggcggtgctggcgactatcagtgtgatattgctggcatgggtactgtggcgtctgctgcgaattattagtcgtcgtcgtcgtcttaacccggataacgagtaa

SEQ ID NO: 472438 - DNA, 1107 bp, Shigella flexneri
atgaatgtgttgcgtagtggaatcgtgacgatgctgttgttggctgcctttagtgttcaggcagcctgtacctggcctgcctgggagcagtttaaaaaggattacatcagtcaggaagggcgcgtcatcgaccccagcgacgcgcgcaaaatcaccacctccgaagggcaaagttacggtatgttctttgccctggcggctaacgaccgtgcagctttcgataatattctcgactggacgcagaacaatctcgctcagggttctttaaaagaacgtttgcccgcctggctgtggggcaagaaagagaacagtaagtgggaagtgctggacagcaattcggcctccgatggtgatgtctggatggcctggtcgttgctggaggcggggcgtttgtggaaagagcagcgttataccgacatcggcagcgcgttgctaaaacgtatcgcgcgggaggaagtggtgacggtgcctgggctgggttccatgttgttaccgggcaaagtgggttttgctgaggataacagctggcgttttaaccccagctacatgccgccgacgctggcgcagtatttcacccgctttggcgcgccgtggaccacgctgcgcgaaaccaatcaacatttattgctggaaaccgccccgaaaggcttttcgccagactgggtgcgctatgagaaagacaaaggctggcagctaaaagccgaaaaaacattgatcagcagctacgacgctatccgcgtttacatgtgggtaggcatgatgcctgacagcgatccgcaaaaagcgcggatgctcaaccggtttaaaccgatggcgacattcactgagaaaaacggttatccgccggaaaaagtggatgtggctacggggaaagcgcagggtaaaggaccggtcggtttttctgccgccatgctgccttttttacaaaaccgcgatgcgcaggcagttcagcgccagcgcgtggccgataactttcccggcagcgatacctattacaactatgtgctgaccctgtttggacaaggctgggatcaacaccgtttccgcttctcgacaaaaggtgagttattacctgactggggccaggaatgcgcaaattcacactaa

SEQ ID NO: 472439 - DNA, 603 bp, Shigella flexneri
atggacagcggcaacactaatgccgtgcgcgggctggcgaatatttaccgccagcagtcgccagaaaaagctgaagcgtttatcgcctcgctctctgccagccagcggcgcagcattgatgatatcgaacgcagcctgcaaaacgaccgtctggcacagcaggcagaggtactggaaaaccagggcaaatgggcgcaggcggcagcacttcagcggcaacgactggcgctgggccccggcagcgtatggattacttaccgactttcgcaggatctctggcaggccggacaacgcagccaggccgatacgttaatgcgcaatctggcgcagcagaagccgaacaacccggagcaggtttacgcttacgggctgtacctctcaggtcacaaccaggacagagcggcgctggcgcatatcaacagcctgccgcgcgcgcagtggaacagcaatattcaggagctggttaatcgactgcaaagcgatcaggtgctggaaaccgctaatcgcctgcgagaaagcggcaaagaggctgaagcggaagcgatgctgcgtcagcaaccaccttccacgcgtattgacctcacgctggctgactgggcgtaa

SEQ ID NO: 472440 - DNA, 1539 bp, Shigella flexneri
gtggatattgctgccggtgacaaagcggcggcacgtagccagctggcgaaactgcctgccaccgataacacctcgctgaacactcagcggcgcgtggcgctggcacaggcgcagcttggagataccgcagcggcgcagcagacgtttaataagttgatcccgcaggcaaaatctcagccaccgtcgatggaaagcgcgatggtactgcgcgacggtgcgaagtttgaagcgcaggcgggcgatccaaagcaggcgctggaaacctacaaagacgccatggtcgcatccggtgtgactacgacgcgtccgcaggataacgacacctttacccgactgacccgtaacgacgagaaagatgactggctgaaacgcggcgtgcgcagcgatgcggcggacctctatcgccagcaggatcttaacgtcacccttgagcacgattactggggttcgagcggcaccggtggttactccgatctgaaagcgcacactaccatgttgcaggtggatgcgccgtattctgacgggcggatgttctttcgcagtgatttcgtcaatatgaacgtcggcagtttctccactaatgccgatggcaaatgggatgacaactggggcacctgtacattacaggactgtagcggcaaccgcagccagtcggattccggtgccagcgtggcggtcggctggcgaaatgacgtctggagctgggatatcggtaccacgccgatgggcttcaacgtggtggatgtggtcggcggcatcagttacagcgatgatatcgggccgctgggttacaccgttaacgcccaccgtcggcccatctccagttctttgctggcctttggtgggcaaaaagactccccgagcaataccgggaaaaaatggggtggcgtacgtgccgacggtgtggggctaagtctgagctacgataaaggtgaagtaaacggcgtctgggcatcgcttagtggcgaccagttaaccggtaaaaatgtcgaagataactggcgcgtgcgctggatgacgggctattactataaggtcattaaccagaacaatcgccgcgtcacaatcggcctgaacaacatgatctggcattacgacaaagatctgagtggctactcactcggtcagggcggttactacagtccgcaggaatacctgtcgtttgccataccggtgatgtggcgggagcgcacggaaaactggtcgtgggagctgggggcgtctggctcgtggtcgcattcacgcaccaaaaccatgccgcgttatccgctgatgaatctgatcccgaccgactggcaggaagaagctgcgcggcaatccaacgatggcggcagcagtcagggcttcggctacacggcgcgggcattacttgaacgacgtgttacttccaactggtttgttggtacggcaattgatatccagcaggcgaaagattacgcacccagccatttcctgctctacgtacgttattccgccgccggatggcagggtgacatggatttaccgccgcagccgctgataccttacgccgactggtaa

SEQ ID NO: 472441 - DNA, 1950 bp, Shigella flexneri
atggtggcagccgttgtcctggtgttcgtttttattttttgcaccgttttgctgttccatctggtccagcagaatcgctataacacggctacgcaactggaaagcattgctcgctctgtccgcgaacccttatcttcagctattttgaaaggcgatattcccgaagcggaagctattcttgccagcattaaaccggcaggcgtggtcagccgtgccgatgtagtgctgcctaaccagttccaggcgctgcgtaaaagttttattccagagcgtccggtgccggtaatggttactcgcctgtttgagctaccggttcaaatctcgctgggcgtctactcgctcgaacgtccggcaaatccgcagccaatagcctatctggtgctacaggcggattccttccgtatgtataagttcgtgatgagcactctctcaacgttagtgaccatttacttacttttgtcgcttatcctgaccgtcgccatcagctggtgcattaaccgcctgattttgcatccgttacgcaatattgctcgcgaacttaacgccatcccagcccaggagcttgttggtcaccaactggcattaccgcgtctgcatcaggacgatgaaatcggtatgttggtgcgcagttacaacctcaaccagcaattgctgcagcgccattatgaagaacagaacgaaaatgcgatgcgcttcccggtgtcggatttgccgaacaaagccttgctgatggagatgctggagcaggttgtcgcgcgtaaacaaaccaccgcgctgatgatcatcacctgtgaaaccctgcgtgatactgcgggcgtgctgaaagaggcgcaacgagaaattctgctgctgacgctggtggaaaaactcaaatcggtactgtcgccacgtatgatcctcgcgcagattagcggttatgactttgctgtcattgccaacggtgtacaggaaccgtggcacgcaatcactttgggtcagcaagtactcactatcatgagcgagcgcctgccgattgaacgtattcaactccgtccgcactgtagcattggcgtggcgatgttctacggcgatctcaccgccgaacagctttacagtcgcgctatttctgcggcatttaccgctcgccataaaggcaagaatcagattcagttctttgatccgcagcagatggaagcagcccagaagcggttgacggaagagagcgatatccttaatgcactggaaaatcatcagtttgcaatttggttacagccacaggtcgagatgaccagcggtaaactggtcagtgcggaagtgttactgcgtatccagcaaccggatggcagttgggacctgccggatggcttaatcgatcgcattgagtgctgtgggctgatggttaccgtcggtcactgggtgctggaagagtcctgtcgattgcttgcagcctggcaagagcgcggcattatgctgcccttgtcggtaaacctctctgcgctgcaactgatgcacccgaatatggtggcggatatgctggaactgttaacccgctatcgcattcagccgggaacactgattctggaagtgacagaaagccgacgtattgacgaccctcatgctgcggtggcaatcctccgtccgctgcgcaatgccggagttcgggtggcgctggatgatttcggcatgggctacgcagggctgcgtcagctgcagcatatgaaatcgttgccaatcgacgtactgaaaatcgacaaaatgtttgttgaaggcttgccggaagatagcagcatgattgctgcaattatcatgctggcgcagagcctgaacttacaaatgattgccgaaggcgtggagactgaagcacaacgagactggctggcaaaagcgggcgttggtattgcccagggcttcctttttgctcgcccactccctattgaaatcttcgaagagagttacctggaagaaaagtag

SEQ ID NO: 472442 - DNA, 1287 bp, Shigella flexneri
atgaaaacctctctgtttaaaagcctttactttcaggtcctgacagcgatagccattggtattctccttggccatttctatcctgaaataggcgagcaaatgaaaccgcttggcgacggcttcgttaagctcattaagatgatcatcgctcctgtcatcttttgtaccgtcgtaacgggcattgcgggcatggaaagcatgaaggcggtcggtcgtaccggcgcagtcgcactgctttactttgaaattgtcagtaccatcgcgctgattattggtcttatcatcgttaacgtcgtgcagcctggtgccggaatgaacgtcgatccggcaacgcttgatgcgaaagcggtagcggtttacgccgatcaggcgaaagaccagggcattgtcgccttcattatggatgtcatcccggcgagcgtcattggcgcatttgccagcggtaacattctgcaggtgctgctgtttgccgtactgtttggttttgcgctccaccgtctgggcagcaaaggccaactgatttttaacgtgatcgaaagtttctcgcaggtcatcttcggcatcatcaatatgatcatgcgtctggcacctattggtgcgttcggggcaatggcgtttaccatcggtaaatacggcgtcggcacactggtgcaactggggcagctgattatctgtttctacattacctgtatcctgtttgtggtgctggtattgggttcaatcgctaaagcgactggtttcagtatcttcaaatttatccgctacatccgtgaagaactgctgattgtactggggacttcatcttccgagtcggcgctgccgcgtatgctcgacaagatggagaaactcggctgccgtaaatcggtggtggggctggtcatcccgacaggctactcgtttaaccttgatggcacatcgatatacctgacaatggcggcggtgtttatcgcccaggccactaacagtcagatggatatcgtccaccaaatcacgctgttaatcgtgttgctgctttcttctaaaggggcggcaggggtaacgggtagtggctttatcgtgctggcggcgacgctctctgcggtgggccatttgccggtagcgggtctggcgctgatcctcggtatcgaccgctttatgtcagaagctcgtgcgctaactaacctggtcggtaacggcgtagcgaccattgtcgttgctaagtgggtgaaagaactggaccacaaaaaactggacgatgtgctgaataatcgtgcgccggatggcaaaacgcacgaattatcctcttaa

SEQ ID NO: 472443 - DNA, 1497 bp, Shigella flexneri
atgcagggcataaaaattcgacttttagcgggcggtttgctgatgatggccactgctggctatgtgcaggcagatgcgctccagcctgatccagcatggcaacaggggacgctttccaacggtttacagtggcaagtgctgaccaccccccagcgtcccagcgatcgtgttgaaattcgcctgctggttaataccggttcgctcgccgaaagtacacaacagagcggttacagtcacgccatccctcgtattgcgctaacgcaaagcggtggccttgacgcagcacaggcgcgttcattgtggcagcaggggatcgaccctaaacgcccgatgccgccggtaattgtctcttatgacaccacgctgtttaatctgagtttgcccaataaccgtaacgatttgctgaaagaagcgctctcttatctggcaaatgccactggcaaattgaccatcacaccagaaaccatcaaccacgcgctgcaaagtcaggacatggtggcaacctggcctgccgatactaaagagggctggtggcgctatcgtctgaaagggtcaaccttgttaggtcacgatcctgccgatccgctgaaacaacccgttgaagcggaaaaaattaaagatttctatcagaaatggtacaccccggatgcaatgacgctactggtggtgggaaacgtggatgcgcgctcggttgtcgaccaaatcaacaaaacgtttggcgaactgaaaggcaaacgtgaaacgccagctccggtgccgacgctttctccgctgcgtgcggaagcggtgagtattatgactgacgcggtgcgtcaggaccggttatctatcatgtgggatacgccgtggcagccgattcgtgaatcagccgcactgctgcgctactggcgtgcggacctggcccgcgaggcgctgttctggcatgttcagcaagcgttaagcgccagtgacagcaaagacatcggtcttggatttgactgccgtgtgctgtatctgcgtgcgcagtgtgccatcaacatcgaatcaccaaacgacaagctgaacagcaaccttaatctggtggcgcgtgaactggcgaaggttcgcgataaaggtctgccggaagaagagttcaatgcgttagtggcgcaaaagaaactggagctgcagaaactgtttgccgcctatgcacgggctgataccgatattctgatgggccagcggatgcgttcgttgcaaaatcaggtcgtcgatatcgcgccggagcagtatcagaaactgcggcaggatttccttaacagcctgactgtggagatgttaaatcaggatctgcgtcagcagttgtcgaatgatatggcgttaatactgctgcagccgaaaggcgagccggaatttaacatgaaagcgttgcaggcggcctgggatcaaatcatggccccatctaccgccgctgcgaccacctctgtcgccacggatgacgtacatcctgaagtgacggatattccacctgcacagtaa

SEQ ID NO: 472444 - DNA, 930 bp, Shigella flexneri
atgtccaaaaagattgccgtgattggcgaatgcatgattgagctttccgagaaaggcgcggacgttaagcgcggtttcggcggcgataccctgaacacttccgtctatatcgcccgtcaggtcgatcctgcggcattaaccgttcattacgtaacggcgctgggaacggacagttttagccagcagatgctggacgcctggcacggcgagaacgttgatacttccctgacccaacggatggaaaaccgtcttccgggcctttactacattgaaaccgacagcaccggcgaacgtacgttctactactggcgtaacgaagccgccgccaaattctggctggcgagcgagcagtctgcggcgatttgcgaagagctggcgaatttcgattatctctacctgagcgggattagcctggcgatcttaagcccgaccagccgcgaaaagctgctttccctgctgcgcgaatgccgcgccaaaggcggaaaagtgattttcgacaataactatcgtccgcgcctgtgggccagcaaagaagagacacagcaggtgtaccagcaaatgctggaatgcacggatatcgccttcctgacgctggacgacgaagacgcgctgtggggtcaacagccggtggaagacgtcattgcgcgcacccataacgcgggcgtgaaagaagtggtggtgaaacgcggggcggattcttgcctggtgtccattgctggtgaagcgttagttgatgttccggcggtgaaactgccgaaagaaaaagtgatcgataccaccgcagctggcgactctttcagcgccggttatctggcggtacgtttgacgggcggcagtgcggaaaacgcggcgaaacgcgggcacctgaccgcaagtaccgttattcagtatcgcggcgcgattatcccgcgtgaggcgatgccagcgtaa

SEQ ID NO: 472445 - DNA, 768 bp, Shigella flexneri
atgataaggcaggttatccagcgaataagcaaccctgaagcaagcatcgagagcttgcaggaacggcgtttttggttgcagtgtgagcgtgcttacacctggcagccgatctatcaaacatgcgggcggttaatggccgtggagctattaacggtggtcacgcatcccttgaacccttcgcaacgcctgccgccggatcgctattttactgaaatcaccgtcagccatcggatggaggttgtgaaagagcagattgatttgctggcgcaaaaagccgacttctttgtagagcacggcctgctggcatcggtcaatattgatggccctacgctcatcgccctgcgtcagcaaccaaaaatcctgcgccagattgagcgtcttccctggctgcgtttcgaactggtggagcatatccgtctgccgaaagattcaacctttgcctcgatgtgtgaatttggcccgctgtggctggatgattttggtaccgggatggcaaatttctctgcactaagtgaagtgcgttatgactacatcaaaatcgcgcgagaactgtttgtgatgctgcgtcagtcgccggaaggccgcacactcttttctcagcttttacatctaatgaatcgctattgtcgcggggtgattgtcgagggcgtagaaacaccggaagagtggcgtgatgttcagaactcgcccgcattcgccgcacaaggctggtttctttcacgcccggcaccgatggaaacgctgaatacggcggttctggcgctataa

SEQ ID NO: 472446 - DNA, 2061 bp, Shigella flexneri
atgagcaaggcaggcaaaataaccgctgcgatttcaggggctttcttgttgttgattgtcgtggcgatcattttgattgcaacttttgactggaatcgactcaaaccgaccatcaaccagaaagtctctgcggagttgaatcgtccgttcgctatccgtggcaatctgggcgtggtgtgggagcggcaaaaacaagaaactggctggcgcagctgggtgccgtggcctcatgtacatgcagaagacatcattcttggtaatccaccggatattcccgaagtcacgatggtgcatttgccgcgagtagaggcaacgctggcaccgctggcgctgctgaccaaaacggtctggctgccgtggatcaagctcgaaaagcccgacgcgcgcctgattcgcctctctgaaaagaacaataactggacgtttaatcttgccaacgatgacaacaaagacgcgaatgcaaagccgtcggcatggtcgtttcggctggataatattcttttcgatcaagggcggatcgccattgatgacaaagtaagcaaagcggatctggaaatttttgttgatccgttaggcaagccgctgccattcagcgaagttactggatcgaaaggtaaagcggataaagaaaaggtgggcgattacatttttggcctgaaggcgcagggacgttataacggtgaaccgctcacgggtacgggaaaaataggcggtatgctggcgctgcgtggcgaagggacgccgtttccggtacaggctgatttccgttcaggtaatacccgtgttgcttttgatggcgtcgtgaatgacccaatgaagatgggcggtgtcgatttacggcttaaattttctggcgattcactgggtgatctctatgaactgacgggcgttctgctgcccgataccccgccgtttgaaacggatggtcggctggtagcgaaaatcgacactgaaaaatcgtcggtctttgattatcgcggttttaatgggcgaattggcgatagcgatatccacggttctctggtctacaccaccggaaagccacgaccaaaactggaaggtgatgtcgagtcgcggcaattgcggctggcggacctgggaccgttgattggcgttgattccgggaaaggggcagaaaagtcgaaacggtctgaacagaagaagggcgaaaaaagcgttcagcctgcgggcaaagtgctgccttatgaccgcttcgaaaccgataaatgggacgttatggatgccgatgttcgcttcaaagggcggcgcattgagcatggcagtagcctgccgattagcgatctttctactcatatcatcctcaaaaatgctgacctgcgcctgcaaccgctgaaatttggcatggcgggcggcagcattgcggcgaatattcatctggaaggcgataaaaagccgatgcaggggcgggcagatattcaggctcgtcgactgaaactgaaagaactgatgcccgatgtggaactgatgcagaagacgctgggggaaatgaacggtgacgcggaactacgcggtagcggtaactcggtggcggcgcttttaggcaacagtaacggcaacctgaaactgttgatgaatgacgggctggtgagccgcaacctgatggagattgttgggctgaatgtcggcaactacattgtcggtgcgatatttggtgacgatgaggtgcgggtgaactgcgcggcggcgaatctgaatattgccaacggcgtggcgcgcccgcagatttttgctttcgatactgagaacgcgttgattaatgttaccggcacggcaagttttgcttcggaacagctggatttgactattgatccggagagtaaagggattcggattatcacactgcgttcgccgctgtatgtgcgtgggacgtttaaaaatccgcaggctggggtgaaagccggaccgctgattgcccgtggtgctgttgctgcggcactggcaacgctggtaacaccggcggcggcgttactggcactgatctcaccttccgaaggggaggctaatcagtgtcggacgatattgtcgcagatgaagaagtga

SEQ ID NO: 472447 - DNA, 1323 bp, Shigella flexneri
atgcaagcaacagccacaacactcgaccacgaacaagaatacacgccgatcaactcgcgtaataaagtccttgtcgcctctctcattggcacggccattgagttcttcgacttttacatttacgccactgcggccgttattgtgtttccgcatatcttcttcccgcagggcgatccaacggcagcaacgctacagtcgctcgccaccttcgccatcgccttcgtcgcgcgccccattggctctgccgtttttggtcattttggcgatcgcgttgggcgtaaagcgacgctggtcgcctcgttgctaacgatggggatttcgaccgtggtgattggtctgctgccgggctatgccacgattggtattttcgccccactgctgctggcgctggctcgatttggtcagggtctgggcttaggcagtgaatggggcggcgcggcgctgctggcgactgaaaacgccccaccgcgcaaacgtgcactgtatggctccttcccacagctaggcgcaccgattggcttcttctttgccaacggcactttcttgctgctttcctggctactgaccgatgagcagtttatgagctggggctggcgtgtgccatttatcttctcggcggtgctggtcattatcggcctgtatgttcgcgtgtcgctgcatgagtcgccggtgtttgagaaagtcgctaaagcgaaaaaacaggtgaagatcccgctgggtacgctgctgaccaaacatgttcgcgtaaccgtactgggtacgttcattatgctggcaacctatacgctgttttacatcatgacggtctactctatgaccttcagtaccgccgccgcgccagttgggcttggcctgccgcgtaacgaagtgttgtggatgctgatgatggcagttattggttttggcgtgatggtgccagtcgccggattactggctgatgcctttggtcgccgtaaaagcatggtgatcatcaccacgctgatcatcctgttcgcgctgttcgcctttaacccgctgctcggttctggcaacccgattctggtttttgccttcctgctgctggggttaagtctgatggggctgaccttcgggccgatgggtgcgctgttaccagagctgtttccgacagaagtgcgttacaccggagcatcgttctcttacaacgtatcgtcgattctcggggcttccgttgcgccgtatatcgcagcctggttgcaggctaactacgggttaggtgcggtggggttatatctggcggcgatggctggcttgacgttaatcgccctgctgctgacccatgagacgcgacatcagtcgttgtaa

SEQ ID NO: 472448 - DNA, 1014 bp, Shigella flexneri
atgacgcaggaaaacgagatcaaacgtcccacccaggatctggagcacgagccgattaagcagttggataatagcgagaaaggcggcaaagttagccaggcgctggaaaccgtcaccaccactgccgaaaaagtccaacgccaaccggttattgcgcaccttattcgcgcgacagaacgctttaacgatcggctgggtaaccagtttggtgcggctatcacctatttctcatttttgtcgatgatcccgattttgatggtgtcgtttgccgcagggggctttgtgctggcctcccatccgatgttgctacaggatatcttcgacaaaattctgcaaaacatcagcgatccgacactagccgccacgttgaaaaacaccatcaacaccgccgttcagcagcgtacgactgtagggcttgtcggcctggcggtggcactttattccggcatcaactggatgggtaacctgcgtgaagcgattcgtgcccagtcgcgcgatgtctgggaacgctcgccgcaagatcaggagaagttctgggtaaaatatctgcgtgattttatttcactgattggtttgttgattgcgctgattgtgacgctttcgatcacctcggttgccggttcggcgcagcaaatgattattagcgccctgcacctgaacagcattgagtggctgaaaccgacgtggcgattgattggcctggcgatttccatcttcgccaactatctgcttttcttctggatcttctggcggttgccgcgccaccgtccgcgcaaaaaagccctgattcgcggaacatttctggctgctattggttttgaagtgattaaaatcgtgatgacctacaccctgccatcgctgatgaaatccccctctggcgcagcatttggttccgtgctggggctgatggcatttttctacttcttcgcccgtttgacgctgttttgcgcggcgtggattgccaccgccgaatataaagacgacccgcgaatgccagggaaaacgcagccttaa

SEQ ID NO: 472449 - DNA, 972 bp, Shigella flexneri
atgttagaaaaaacaataaacaatgcgatatgcgcgttactgtttcgctgtgaacaacaatcggtcaaagaaatggataaaattcacgcaatgcagttgttcatcaaagtcgcggagctggaaagtttttcccgcgcggcggatttctttgctttgccaaagggaagtgtttcgcgccagatacaggcactggaacatcaacttggcacccagcttctccagcgcactacgcgacgggtcaaactcacgccagaaggcatgacctattatcaacgggcaaaagatgtgttgagtaatctcagcgaactggacggtctgtttcaacaggatgccaccagtatcagcggtaaattacgcatcgacatcccgtcaggaatcgcgaaaaacctgttactgccgcgtctgtcggaatttctctatcagcatccgggaattgagctggaactgagtagccataaccgtccggtagatattcttcatgatggttttgattgcgtgatacgcactggcgcgttaccggaagatggcgttatcgcccgtcccctcggcaaactaaccatggtcaactgtgccagtccgcactatctgacgcgctttggttatccgcaaagccccgatgatctgacttcacacgcaatagtgcgttatacaccgcacctgggtgtacatccgttaggttttgaggttgccagcgttaatggcgtccagtggtttaagtctggcggcatgttgacggtaaacagtagcgaaaactatctcgccgccggtcttgccggtctggggattattcagatcccgcgcattgccgtgcgcgaagccctgcgtgccgggcggcttattgaagtgttgccaggctaccgtgccgagccgctctccctttcgctggtttacccgcagcgtcgggagctttcccggcgtgtaaacctgtttatgcagtggctggctggcgtaatgaaagagcacctggactga

SEQ ID NO: 472450 - DNA, 603 bp, Shigella flexneri
atgcaaatagtcatgtttgacaggcagtcaatatttattcatggaataaaaatcagtttacagcagcgtattccaggagtgagtattcagggggtcagtcaggcagacgagttatggcaaaagctggaaagttaccctgaagccttagttatgctcgatggcgatcaggatggtgagttttgctactggttgctgcaaaaaaccgtggtgcagtttcctgaggttaaggtgttaatcacggcgacggattgcaataaacggtggttacaggaagttatccattttaatgtgctggccattgtgcctcgcgattcaaccgtcgagacatttgcgttggcggtaaatagtgcggcgatggggatgatgtttctgcctggagactggcggacgacgccggaaaaggacattaaagatctcaaatcgttaagcgcccgccagcgggagattttaaccatgttagcggcgggcgaatcaaataaggagatcggcagagcgctgaatatcagtaccggaacggtaaaagcgcatctggaatccctgtatcgccgtctggaagtgaaaaatcgcacccaggcggcaatgatgttaaatatctcctcctga

SEQ ID NO: 472451 - DNA, 1299 bp, Shigella flexneri
atggctgaaagtactgtaacggcagacagcaaactgacaagtagtgatactcgtcgccgcatttgggcgattgtgggggcctcttcaggtaatctggtcgagtggttcgatttctatgtctactcgttctgttcactctacttcgcccacattttcttcccttccgggaacacgacgactcaactactacaaacagcaggtgtttttgctgcgggattcctgatgcgcccaataggcggttggctatttggccgcatagccgataaacatggtcgcaaaaaatcgatgctgttatcggtgtgtatgatgtgtttcggatcgctggttatcgcctgcctcccaggttatgaaactataggtacgtgggctccggcattattgcttctcgctcgtttatttcagggattatccgttggcggagaatatggcaccagcgccacctatatgagtgaagttgccgttgaagggcgcaaaggtttttacgcatcatttcagtatgtgacgttgatcggcggacaactgctagccctactggctgtcgtggttttacaacacaccatggaagacgctgcactcagagagtggggatggcgtattcctttcgcgttaggagctgtgttagctgttgtggcgttgtggttacgtcgtcaattagatgaaacttcgcaacaagaaacgcgcgctttaaaagaagctggatctctgaaaggattatggcgcaatcgccgtgcattcatcatggttctcggttttaccgctgcgggctccctttgtttctataccttcaccacttatatgcagaagtatctggtaaatactgcgggaatgcatgccaacgtggcgagtggcattatgactgccgcattgtttgtattcatgcttattcaaccactcattggcgcgctgtcggataagattggtcgccgtacctcaatgttatgtttcggttcgctggcagccatttttaccgttcctattctctcagcattgcaaaacgtttcctcgccttatgccgcttttggtctggtgatgtgtgccctgctgatagtgagtttttatacatcaatcagtggaatactgaaggctgagatgttcccggcacaggttcgcgcattaggcgttggtctgtcatatgcggtcgctaatgctatatttggtggttcggcggagtacgtagcgttgtcgctgaaatcaataggaatggaaacagccttcttctggtatgtgaccttgatggccgtggtggcgtttctggtttctttgatgctacatcgcaaagggaaggggatgcgtctttag

SEQ ID NO: 472452 - DNA, 273 bp, Shigella flexneri
atggataacgatagctggagtgggcaggataaagctcaacactttatcgcctcggcgatactttccgccgccggaaatgaatattcacagcatcaggggatgagccgggatcgcagtgccatgtttggattgatgttctctgtcagtttgggggcgtcaaaagagctttgggatagccgccccgaagggagcggctggagctggaaggatttggcctgggatgtcgccggtgcaagcaccggctataccgtctggcaactgacccgtcactaa

SEQ ID NO: 472453 - DNA, 1356 bp, Shigella flexneri
atgttgtcaaaatttaagcgtaataaacatcaacaacaccttgcccaactacccaagatttctcaatcagttgatgatgtcgatttcttttacgctcccgccgacttccgggagacgctgctggaaaaaatagccagcgcgaagcagcgcatttgcattgtcgccctgtatctcgaacaggatgacggtggcaaaggcattctgaacgcgttgtatgaggctaaaaggcagcgtccggaactggatgtgcgggtgctggtcgactggcatcgtgcacaacgtggacgcattggcgctgcggcatctaacactaacgctgactggtactgccgcatggcgcaggaaaatccgggcgtagatgttccggtttatggcgttccaatcaatacccgtgaagctcttggtgttctgcactttaaaggctttatcatcgacgatagcgtactttatagcggtgccagcctgaacgatgtttacctgcatcaacacgataaatatcgctacgaccgttatcatctgatccgtaaccgtaagatgtcagacattatgtttgaatgggttacacagaatattatgaatggccgcggcgttaatcgtctggatgatgttaatcggccaaaaagcccggaaatcaagaacgatattcgtctgttccgccaggagctgcgtgatgccgcttatcatttccagggcgatgccgacaacgatcagctttccgtaacgccgctagtggggctggggaaatcgagtctgttgaacaagaccattttccatcttatgccttgtgccgagcagaaactaaccatctgtacgccatacttcaacctgccagcaatccttgtgcgcaatattatccagttgctgcgcgaagggaaaaaggtcgaaattattgttggtgataaaaccgcgaacgacttctacattccggaagatgaacctttcaagataattggcgcattgccttatctctatgagatcaatctgcgtcgtttcctgagccgtttgcagtattacgtcaatactgaccagctagtggttcggttatggaaagatgacgacaacacctatcacctgaaagggatgtgggttgatgataagtggatgttgatcaccggtaataacctgaacccgcgcgcctggcgtctggatctggaaaacgccattttgatccacgatccacaactggagcttgcgccgcagcgagagaaagaactggagctgatccgcgagcgtaccaccatcgttaagcactatcgcgatctgcaaagtattgccgattatccggtgaaggttcgtaaactcatccgccgtttgcgccgtatccgcatcgaccgattaattagccgcatcctgtaa

SEQ ID NO: 472454 - DNA, 2661 bp, Shigella flexneri
atgagtcagcgaggactggaagcactactgcgaccaaaatcgatagcggtaattggcgcgtcgatgaaacccaatcgcgcaggttacctgatgatgcgtaacctgctggcgggaggctttaacggaccggtactcccggtgacgccagcctggaaagcggtgttgggtgtgttggcctggccggatattgccagcttgccctttacacccgaccttgcggttttatgtaccaatgccagccgtaatcttgctcttctggaagagctcggcgagaaaggctgtaaaacctgcattattctttccgccccggcatcgcaacacgaagatctccgcgcctgcgccctgcgccataacatgcgcctgcttggaccaaacagtctgggtttactggctccctggcaaggtctgaatgccagcttttcgcctgtgccgattaaacgcggcaagctggcgtttatttcgcaatcggctgccgtctccaacaccatcctcgactgggcgcaacagcgtgagatgggcttttcctactttattgcgctcggcgacagcctagatatcgacgttgatgaattgctcgactatctggcgcgcgacagtaaaaccagcgccatcctgctctatctcgaacagttaagcgacgcgcgacgctttgtttcggcggcccgtagtgcctcgcgtaataaaccgattctggtgattaaaagcggacgtagcccggcggcacagcgactgctcaacaccacggcaggaatggacccggcatgggatgcggctattcagcgtgccggtttgttgcgggtacaggatacccacgaactgttttcggcggtggaaacccttagccatatgcgcccgctgcgtggcgaccggttgatgattatcagcaacggtgctgcgcctgccgcgctggcgctggatgccttatggtcacgcaatggcaagctggcaacgctaagcgaagaaacctgccagaaattgcgcgatgcattgccagaacatgtggcagtctctaacccgctcgatctgcgcgatgacgccagcagcgagcattatgtcaaaacgctggacattctgctccacagccaggattttgatgcactgatggttattcattcgcccagcgccgctgctcccgcaacagaaagcgcgcaagtattaattgaagcggtaaagcatcatccccgcagcaaatatgtctctttgctgacgaactggtgcggcgagcactcctcgcaagaggcacgacgtttattcagcgaagccgggctgccgacctaccgtaccccggaaggaaccatcactgcttttatgcatatggtggagtaccggcgtaatcagaagcaactacgcgaaacgccggcgttgcccagcaatctgacttccaataccgcagaagcgcatcttctgttgcaacaggcgattgccgaaggggctacgtcgctcgatacccatgaagttcagcccatcctgcaagcgtatggcatgaacacgctcccaacctggattgccagcgatagcaccgaagcggtgcatattgccgaacagattggttatccggtggcgctgaaattgcgttcgccggatattccacataaatcggaagttcagggcgtcatgctttacctgcgtacagccaatgaagtccagcaagcggcgaacgctattttcgatcgcgtaaaaatggcctggccacaggcgcgggtccacggcctgttggtgcaaagtatggctaaccgtgctggcgctcaggagttgcgggttgtggttgagcacgatccggttttcgggccgttgatcatgctgggtgaaggcggtgtggagtggcgtcctgaagatcaagccgtcgtcgcactgccgccgctgaacatgaacctggcccgctatctggttattcaggggatcaaaagtaaaaagattcgtgcgcgcagtgcgctacgcccattggatgttgcaggcttgagccagcttctggtgcaggtttccaacttgattgtcgattgcccggaaattcagcgtctggatattcatcctttgctggcttctggcagtgaatttaccgcgctggatgtcacgctggatatctcgccgtttgaaggcgataacgagagtcggctggcagtgcgcccttatccgcatcagctggaagaatgggtagaattgaaaaacggtgaacgctgcttgttccgcccgattttgccagaagatgagccacaacttcagcaattcatttcgcgagtcaccaaagaagatctttattaccgctactttagcgagatcaacgaatttacccatgaagatttagccaacatgacacagatcgactacgatcgggaaatggcgtttgtagcggtacgacgtattgatcaaacggaagagatcctcggcgtcacgcgtgcgatttccgatcctgataacatcgatgccgaatttgctgtactggttcgctcggatctcaaagggttaggcttaggtcgacgcttaatggaaaagttgattacctatacgcgaaatcacggactacaacgtctgaatggtattacgatgccaaacaatcgtggcatggtggcgctagcccgcaagctcgggtttaacgttgatatccagctcgaagaggggatcgttgggcttacgctaaatcttgcccggcgcgaggaatcatga

SEQ ID NO: 472455 - DNA, 699 bp, Shigella flexneri
atgaccgaaaacgctgttctccagttacgcgccgagcgtattgcgcgcgcaacacgtccttttcttgcccgcggtaatcgcgttcgtcgctgccaacgctgtcttttgccagagaaattatgtctctgttcgacaattaccccagcacaagcaaaaagtcgcttctgtttgctgatgttcgacaccgagccaatgaagcccagtaataccgggcgtctgattgctgatattttgcctgataccgttgcgtttcaatggtcgcgtaccgaaccctcgcaggatttgctggatctggtacaaaacccggattatcagccaatggtggtctttcccgcctcgtatgctgatgagcaacgggaagtgatcttcacaccacctgccggtaagccaccgctgtttatcatgctcgatggtacctggccggaagctcgcaagatgtttcgtaaaagtccgtatctggataatcttcccgtcatttccgtcgatctttcccggctttctgcctatcgcctgcgtgaagcccaggctgcaggccaatattgtactgccgaggtagccatcgcactgttagatatggccggcgataccggggcggcagcagggttaggcgagcattttacccgctttaaaacacgctatctggcaggaaaaacgcaacatctgggtagcatcacagcagaacagttagaaagcgtttaa

SEQ ID NO: 472456 - DNA, 420 bp, Shigella flexneri
atgaataccgtttgtacccattgtcaggccatcaatcgcattcccgacgatcggatcgaagatgcggcaaaatgcggacgctgcggtcacgacttgtttgacggagaggtgattaatgcgaccggtgaaacactcgacaaattgctgaaggatgatctacctgtggtgatcgacttctgggcaccgtggtgcggcccctgccgtaatttcgcaccaatttttgaagatgtcgcgcaagagcgtagcggtaaagtgcgctttgtgaaagtgaataccgaagctgaacgtgaattgagcagtcgctttggaattcgtagtataccgacgatcatgattttcaaaaacggtcaggttgtcgacatgcttaatggcgcagtaccgaaagcgccgttcgatagctggctgaacgaatctctttaa

SEQ ID NO: 472457 - DNA, 1038 bp, Shigella flexneri
atgaacgatgaaatgaaaggtaaaagcggcaaggtcaaagtgatgtatgtccgcagtgatgatgattctgataaacgtacccacaacccgcgtaccgggaaagggggcgggcgtccaggaaaatctcgtgctgatggtggccgtcgccccgcccgcgatgacaaacagagtcagccccgtgaccgcaagtgggaagattcgccgtggcgcacggtttcccgcgcgccgggtgatgagacgccggaaaaggccgatcacggtggcatcagtggtaaaagttttattgatccggaagtgttgcgtcgtcagcgtgcggaagaaacccgcgtctacggcgaaaacgcctgtcaggcactgttccagagccgtccggaagcgattgttcgcgcctggtttatccagagtgtaacgccgcgttttaaagaagccttgcgctggatggcagcaaaccgcaaagcgtaccatgtggtggatgaagcggaattgacaaaagcgtcaggtacggaacatcacggcggcgtttgcttcctgatcaaaaagcgtaacggtacaaccgtgcagcagtgggtaatccaggcaggcgcgcaggattgcgttctggcactggaaaacgaatctaacccgcataacctgggtggcatgatgcgcagctgcgcgcacttcggcgtgaaaggtgtcgtggtgcaggatgcggcactgctggagtcgggggcggctatccgtaccgcagaaggcggcgcagagcacgttcagccgattactggcgacaacattgttaacgtgctggatgatttccgtcaggcaggttacaccgtagtgaccacttccagcgagcagggtaaaccgctgttcaaaaccagtctgccagcgaaaatggtactggtgctgggtcaggaatatgaagggttaccggatgccgcacgcgatccgaacgatctgcgcgtgaagattgacggtacgggcaacgttgccgggctgaatatctctgtcgcaaccggcgttttgcttggtgaatggtggcgtcagaataaagcctga

SEQ ID NO: 472458 - DNA, 690 bp, Shigella flexneri
atggctaacgaattaacctggcatgacgtgctggctgaagagaagcaacaaccttattttcttaatacccttcagaccgtcgccagcgagcggcagtccggcgtcactatctatccaccacaaaaagatgtctttaacgcgttccgctttaccgagttgggtgacgttaaagtggtgattctcggccaggatccttatcacggaccgggacaggcgcatggtctggcattttccgttcgtcccggcattgccattcctccgtcattattgaatatgtataaagagctggaaaatactattccgggcttcacccgccctaatcatggctatctcgaaagctgggcgcgtcagggcgttctgctgctcaatactgtgttgacggttcgcgcaggtcaggcgcattcccacgccagcctcggttgggagacgtttactgataaagtcatcagcctgattaaccagcaccgcgaaggcgtggtgtttttgttgtggggatcacatgcgcaaaagaaaggggcgattatagataagcaacgccatcatgtactgaaagcaccgcatccgtcgccgctttcggcgcatcgtggattctttggctgcaaccattttgtgctggcaaatcagtggctggaacaacgtggcgagacgccgattgactggatgccagtattaccggcagagtgtgagtaa

SEQ ID NO: 472459 - DNA, 384 bp, Shigella flexneri
atgattacaggtatccagattactaaagccgctaacgccgatctgctgaactctttctggctgctggacagcgaaaaaggtgaagcacgttgcatcgttgcaaaagcaggttatgcagaagatgaagtggttgcagtaagcaaactgggtgacattgaataccgtgaagttccagtagaagtgaaaccagaagttcgcgttgaaggtggtcaacacctgaacgttaacgttctgcgtcgtgaaactctggaagatgcagttaagcatccggaaaaatatccgcagctgaccatccgtgtatccggttatgcagttcgctttaactctctgactccggaacagcagcgcgacgttatcgctcgtacctttactgaaagcctgtaa

SEQ ID NO: 472460 - DNA, 588 bp, Shigella flexneri
gtgacaccgatccttttaagtgctttttggacttacaccctgattaccgctatgacgccaggaccgaacaatattctcgcccttagctctgctacgtcgcatggatttcgtcaaagtacccgcgtgctggcagggatgagtctgggatttttgattgtgatgttactgtgtgcgggcatttcattttcactggcagtgattgacccggcagcggtacaccttttgagttgggcgggggcggcatatattgtctggctggcgtggaaaatcgccaccagcccaacaaaggaagacggacttcaggcaaaaccaatcagcttttgggccagctttgctttgcagtttgtgaacgtcaaaatcattttgtacggtgttacggcactgtcgacgtttgttctgccgcaaacacaggcgctaagctgggtagttggcgtcagcgttttgctggcgatgattgggacgtttggcaatgtgtgctgggcgctggcggggcatctgtttcagcgattgtttcgccagtatggtcgccagttaaatatcgtgcttgccctgttgctggtctattgcgcggtacgcattttctattaa

SEQ ID NO: 472461 - DNA, 882 bp, Shigella flexneri
atggatctgcgccgttttattacgcttaaaaccgtggtggaagagggttcctttttgcgagcttcgcaaaaattgtgctgtacacaatcgacggtgacttttcatattcagcagcttgagcaggagttttcagtccagttatttgagaaaattggccgacggatgtgccttacccgcgaaggaaaaaagttgctgccgcacatttatgaacttacccgagtgatggatacgcttcgtgaggctgccaaaaaggagtcagatccggacggggaactacgcgttgtttcgggcgaaacgttgctctcttaccgaatgccgcaggtgttgcagcgttttcggcaacgcgcaccaaaagtgcgtttatcgttgcaggcgctgaactgttacgtgatccgtgatgcgctactgaatgatgaggccgatgtcggcgtcttttatcgcgtagggaatgatgatgccctgaaccgacgagagttgggtgaacaatcgctggtgctggtggcttcaccacaaattgcagatgtcgattttactgagccgggaagacataacgcctgtagctttattatcaacgaaccgcaatgtgtcttccggcagatatttgagagcacgctgcgacagcggcggatcacggtggaaaacaccattgagcttataagtatcgaaagcatcaagcgttgtgtcgcggcgaatatcggtgtcagttacttgccccactttgcggtggaaaaagagattgagagcggagaattaattgaattgccttttggcgaacagtcgcagaccattacggcaatgtgcgcacattatgctggaaaagcggttagcccggcgatgcacatttttattcagtgtgttgaagagtgttttgtggttgtgtaa

SEQ ID NO: 472462 - DNA, 1335 bp, Shigella flexneri
atgactgtaacgactttttccgaacttgaactcgacgaaagcctgctggaagccctccaggataaaggtttcactcgcccgaccgccattcaggctgccgccattccgcctgcgctcgatggccgtgatgtactcggttctgcgccgacaggcaccggtaaaacggcggcgtatctgctgccagcgttgcagcacctgctcgatttcccacgtaagaaatccggtccgccgcgtattttgatcctcaccccaactcgcgagctggcgatgcaggtggccgatcatgcccgcgaactggcgaaacatacgcatctggatatcgccaccatcaccggcggcgtagcctatatgaaccacgcggaagtgttcagcgaaaatcaggacatcgtggtcgccacgaccggacgtctgctgcaatacataaaagaagagaacttcgattgccgcgcggttgaaacgctgatcctcgacgaagcagaccgtatgctggatatgggcttcgctcaggatatcgaacatattgctggcgaaactcgctggcgtaaacagaccctgctcttttcggcaacgctggaaggcgatgcgattcaggactttgccgagcgtctgctggaagatccggtggaagtttctgccaatccgtccacccgtgagcgcaaaaaaattcatcagtggtattaccgcgccgatgacctggaacataaaaccgcattgctggtgcacctgttaaaacagcctgaagcgactcgctcaatcgtgtttgtgcgtaagcgtgaacgtgtgcatgagctggcaaactggctgcgcgaagcgggcatcaacaactgctatctcgaaggtgagatggtacaaggcaagcgtaacgaagcaattaaacgcctgaccgaaggccgcgtaaacgtactggttgccaccgatgttgccgcgcgcggtatcgacattcctgacgtcagccacgtctttaacttcgatatgccgcgcagtggcgatacttatttgcatcgtatcggacgtaccgcgcgcgccggtcgtaaaggcaccgcaatttcgctggtggaagcccatgaccatttgctgctgggcaaggttggccgttacattgaagagccgattaaagctcgcgttattgatgagttacgcccgaaaacgcgtgcgccaagcgagaagcagaccggcaagccatcgaagaaagtactggcaaaacgcgccgagaagaaaaaagctaaagagaaagagaagccgcgggtgaaaaaacgccatcgcgacaccaaaaatattggtaagcgccgtaaaccgagcggaacgggcgtgccaccgcaaacgacagaagagtaa

SEQ ID NO: 472463 - DNA, 738 bp, Shigella flexneri
atgtcacagtctacatccgtgcttcgtcgtaatggatttacttttaaacagttttttgttgctcacgatcgctgtgcgatgaaagtgggaacggatggcattttgctgggcgcatgggcaccggtggctggggtgaaacgttgccttgatatcggcgcgggtagcgggttgctggcactgatgctggcgcagcgaaccagtgacagcgtgataattgatgccgttgagctggaaagtgaagctgccgcgcaggcgcaggaaaatatcaaccagtccccgtgggcagagcggattaacgtccatacggcggatattcagcagtggatcacacagcagacagtacgcttcgatttaatcatcagtaacccaccttactatcagcagggagtagagtgcgcgacacctcaacgggaacaggctcgctataccactacgcttgatcacccatcgctgctgacctgtgcggcggagtgcattaccgaagagggatttttctgcgtggtgctgccagagcagattggtaatggttttactgaactggcattaagcatgggctggcatttacgtttgcggacggatgtggcggaaaacgaagcgcgactgccgcatcgggtgctgctggcattctccccgcaggcgggagaatgctttagcgatcgcttagtcattcgtgggccagaccagaactattccgaagcgtatacggcgctgacccaggctttttatctgtttatgtaa

SEQ ID NO: 472464 - DNA, 552 bp, Shigella flexneri
atggttgatgatcatgggcgtacggacgtcgagggcttgtatgccattggcgaggtgagttataccggcttacacggcgctaaccgcatggcctcgaattcattgctggagtgtctggtctatggctggtcggcggcagaagatatcaccagacgtatgccttatgcccacggcgtcagtacgttaccgccgtgggatgaaagccgcgttgagaaccctgacgaacgggtagtaattcagcataactggcacgagctacggctgtttatgtgggattacgttggcattgtgcgcacaacgaagcgcctggaacgcgccctgcggcggataaccatgctccaacaagaaatagacgaatattacgcccatttccgcgtctcaaataatttgctggagctgcgtaatctggtacaggttgccgagttgattgttcgctgcgcgatgatgcgcaaagaaagccgggggctgcattttacgctggattacccggaactgctcacgcattccggtccatcgatcctttcccccggcaatcattacataaacagataa

SEQ ID NO: 472465 - DNA, 1062 bp, Shigella flexneri
atgaatactctccctgaacattcatgtgacgtgttgattattggtagcggcgcagccggactttcactggcgctacgcctggctgaccagcatcaggtcatcgttctaagtaaaggcccggtaacggaaggttcaacattttatgcccagggcggtattgccgccgtgtttgatgaaactgacagcattgactcgcatgtggaagacacattgattgccggggctggtatttgcgatcaccatgcagttgaatttgtcgccagcaatgctcgttcctgtgtgccatggttaattgaccagggggttttgtttgatacccacgttcaaccgaatggcgaagaaagctaccatctgacccgtgaaggtggacatagtcaccgtcgtattcttcatgccgccgacgccaccggtagagaagtacaatccacgctggtgagcaaggcgcagaaccatccgaatattcgtgtgctggagcgcagcaacgcagttgatctgattgtctctgacaaaattggcctgccgggcacgcgacgggttgtaggcgcgtgggtatggaaccgaaataaagaaacggtggaaacctgccacgcaaaagcagtggtactggcaaccggcggtgcgtcgaaggtgtatcagtacaccaccaatccggatatttcttctggcgatggcattgctatggcgtggcgcgcgggctgtcgggttgccaatctcgaatttaatcagttccaccctaccgcactgtatcacccacaggcacgcaatttcctgttaacggaagcactgcgcggcgaaggcgcttatctcaagcgcccggatggcacgcgttttatgcccgattttgatgagcgcggcgaactggccccgcgcgatattgtcgcccgcgccattgaccatgaaatgaaacgcctcggcgcagattgtatgttcctcgacatcagccataagcccgccgattttattcgccagcatttcccgatgatttatgaaaaattgctcgggctggggattgatctcacacaagaaccggtaccgattgtgcctgctgcacactatacctga

SEQ ID NO: 472466 - DNA, 576 bp, Shigella flexneri
atgagcgagcagttaacggaccaggtcctggttgaacgggtccagaagggagatcagaaagcctttaacttactggtagtgcgctatcagcataaagtggcgagtctggtttcccgctatgtgccgtcgggtgatgttcccgatgtggtacaagaagcttttattaaagcctatcgtgcgctggattcgttccggggagatagcgctttttatacatggctgtatcggattgctgtaaatacagcgaaaaattacctggttgctcaggggcgtcgtccaccttccagtgatgtggatgccattgaagctgaaaacttcgaaagtggcggcgcgttgaaagaaatttcgaaccctgagaacttaatgttgtcagaagaactgagacagatagttttccgaactattgagtccctcccggaagatttgcgcatggcaataaccttgcgggagctggatggcctgagctatgaagagatagccgctatcatggattgtccggtaggtacggtgcgttcacgtatcttccgagcgagggaagctattgataacaaagttcaaccgcttatcaggcgttga

SEQ ID NO: 472467 - DNA, 651 bp, Shigella flexneri
atgcagaaagaacaactttccgctttaatggatggcgaaacgctggatagtgagctgcttaacgaactggctcataacccagaaatgcagaaaacttgggaaagctatcacttaatccgtgattcaatgcggggtgatactcccgaggtgctccatttcgatatctcttcacgcgtgatggccgccattgaagaagagccagtacgtcaatcggcgacattgatcccggaagcccagcctgcgccgcatcaatggcagaaaatgccattctggcagaaagtacgtccgtgggcggcacagcttacccaaatgggcgtagccgcatgcgtatcgcttgcagttatcgttggcgtccagcactataatggacaatctgaaacgtcccagcagcccgaaacgccggtatttaatacactgccgatgatgggtaaagccagcccggtaagcctgggagtaccttctgaagcgaccgcaaacaatggtcaacagcagcaggtacaggagcagcgtcgtcgcattaatgcaatgttgcaggattacgaactgcaacgccgactccactctgaacagcttcagtttgagcaggcgcaaacccagcaagccgctgtacaggtgccaggaattcaaactttaggaacgcaatcgcagtaa

SEQ ID NO: 472468 - DNA, 957 bp, Shigella flexneri
atgaagcaactttggtttgccatgtcattagtgacaggtagcctgttattctctgctaacgcctcggccactcccgcgtccggggcgttattacagcagatgaacctggccagtcagtcactgaattacgagctgtcattcatcagcatcaataaacagggtgttgagtctctgcgttatcgacatgcacgcctcgataaccgtcctcttgcacaattgttgcaaatggatggcccgcgccgggaagtggtacagcgcggcaatgaaatcagctattttgaaccgggacttgaaccgttcacgcttaatggcgattacattgttgattctctgccatcgcttatctataccgatttcaaacgcctttctccttactacgactttatctccgtcgggcgcacgcgtattgctgatcgtctttgcgaagtcattcgcgtggttgcccgagatggtacacgctacagctacatcgtgtggatggacaccgaatcgaaattaccgatgcgggttgatctccttgatcgcgatggtgaaacgctggaacaatttcgcgtgattgcttttaacgtcaatcaggatatcagcagcagtatgcagacgctggcgaaggcaaatttgccgccgttgctttctgttcctgtaggtgaaaaagctaaattcagctggacgccaacctggttgccacagggttttagcgaagtttccagtagtcgacgtccgctaccgacgatggacaacatgcctatcgaatcacgtctctattccgacggattattcagcttctcggtaaacgttaaccgcgctacgccatcgagcaccgatcagatgttgcgcaccggacgcagaaccgtcagtacaagcgtacgtgataacgccgaaatcaccattgtcggtgaactgccgccgcaaacggcgaaacgcattgccgagaatattaagttcggggcagcgcaatga

SEQ ID NO: 472469 - DNA, 480 bp, Shigella flexneri
atgatcaaagagtgggctaccgtcgtctcctggcaaaacgggcaggcgctggtcagttgtgatgttaaagcttcatgcagcagctgcgcttcacgcgccggttgcggtagccgcgtgttgaataaacttggcccgcaaaccacgcataccattgtcgtaccctgtgatgagccgttagtgccggggcaaaaagtggaattggggatcgccgaaggcagcctgcttagctccgcattactggtttatatgtcgccgctggtgggattattcctcatcgcttcgctatttcagctactctttgcttctgacgtcgcagcattatgtggtgcggtcctcggcggtattggcgggttcctgattgcgcgcggctactcgcgtaagtttgctgcccgggcagaatggcaaccgatcatcttaagcgtggcattgccgcctggccttgtgcgatttgaaacatcttcggaagacgcgagccagtga

SEQ ID NO: 472470 - DNA, 1800 bp, Shigella flexneri
atgaagaatatacgtaacttttcgatcatagctcacattgaccacggtaaatcgacgctgtctgaccgtattatccagatctgcggtggcctgtctgaccgtgaaatggaggcgcaggttctcgattccatggatcttgagcgtgagcgtggcattaccatcaaagcgcaaagcgtgacgctggactacaaagcgtctgacggcgaaacctatcagcttaactttatcgacaccccgggccacgtagacttctcctatgaagtttcccgttcgctggctgcctgtgaaggtgcattgctggtggtcgacgccgggcagggcgtagaagcgcaaaccctggcaaactgctacaccgccatggaaatggatctcgaagtggtgccggtactgaacaagattgacctgccggcagccgatcctgaacgcgtggcggaagaaattgaagatatcgtcggcatcgacgccaccgatgcagtgcgctgttcagcgaaaaccggcgttggcgtgcaggacgttctcgaacgtctggtgcgcgacattccgccgccggaaggcgatccggaaggcccgttgcaggcactaattatcgactcctggttcgacaactacctgggcgttgtttcacttatccgtattaaaaacggcaccctgcgtaagggcgacaaagtgaaagtcatgagtaccgggcagacctataacgccgaccgtctgggcatcttcacgccgaaacaggttgaccgcactgaactgaaatgtggcgaagtaggctggctcgtatgtgcgattaaagatatccacggcgctccagtcggcgataccttaacgctggcgcgtaatccggcagaaaaggcgctgcctggctttaagaaagtcaaaccgcaggtatacgccggtctgttcccggtaagttccgacgactatgaagccttccgtgacgcgctgggtaaactcagcctgaacgatgcctcactgttctatgagccggaaagctccagcgcgctgggctttggtttccgctgcggcttccttggcctgctgcacatggagatcatccaggagcgtctggaacgtgaatacgatctggatctgatcaccactgcgccgaccgtagtgtatgaagttgaaaccacgtcaagggaagttatctacgtcgacagcccatccaagctgcctgcggtaaataacatttacgaactgcgcgagccgattgcagagtgtcacatgctgctgccgcaggcatatctcggcaacgttattacgctgtgcgtagaaaaacgcggcgtgcagaccaatatggtttaccacggtaatcaggtggcgctgacgtacgagatcccgatggcggaagtggtgctcgacttcttcgatcgcctgaaatctacctcgcgtggttatgcgtctctggattacaacttcaaacgcttccaggcgtccgacatggtacgtgtagacgtattaatcaacggtgaacgtgttgatgcgctggcgttgatcacccaccgtgataattcgcaaaaccgcggtcgcgagttggtggagaagatgaaagatctgatcccacgccagcagtttgatatcgccattcaggcagcgattggtacgcacattattgcgcgatccaccgtgaaacagctgcgtaaaaacgtactggctaaatgttatggcggcgatatcagccgtaagaaaaagctgctgcagaagcagaaagaaggtaagaaacgcatgaagcagatcggtaacgttgagctgccgcaggaagcgttcctcgccattctgcacgtcggcaaagacaacaaataa

SEQ ID NO: 472471 - DNA, 975 bp, Shigella flexneri
atggcgaatatgtttgccctgattctggtgattgccacactggtgacgggcattttatggtgcgtggataaattctttttcgcacctaaacggcgggaacgtcaggcagcggcgcaggcggctgccggtgactcactggataaagcaacgttgaaaaaggttgcaccgaagcctggctggctggaaaccggagcttctgtttttccggtgctggctatcgtattgattgtacgttcgtttatttatgaaccgttccagatcccgtcaggttcgatgatgccgactctgttaatcggtgattttattctggtagagaagtttgcttatggcattaaagatcctatctaccagaaaacgctgatcgaaaccggtcatccgaaacgcggcgatatcgtggtctttaaatatccggaagatccaaagcttgattacatcaagcgcgcggtgggtttaccgggcgataaagtcacttacgatccggtctcaaaagagctgacgattcaaccgggatgcagttccggccaggcgtgtgaaaacgcgctgccggtcacctactcaaacgtggaaccgagcgatttcgttcagaccttctcacgccgtaatggtggggaagcgaccagcggattctttgaagtgccgaaaaacgaaaccaaagaaaatggaattcgtctttccgagcgtaaagagacactgggtgatgtgacgcaccgaattctgacagtgccgattgcgcaggaccaggtggggatgtattaccagcagccagggcaacaactggcaacctggattgttccgccgggacaatacttcatgatgggcgacaaccgcgacaacagcgcggacagccgttactggggctttgtgcctgaagcgaatctggtcggtcgggccacggctatctggatgagcttcgataagcaagaaggcgaatggccgactggtgtgcgcttaagtcgcattggcggcatccattaa

SEQ ID NO: 472472 - DNA, 681 bp, Shigella flexneri
atgaaccccatcgtaattaatcggcttcaacggaagctgggctacacttttaatcatcaggaactgttgcagcaggcattaactcatcgtagtgccagcagcaaacataacgagcgtttagaatttttaggcgactctattctgagctacgttatcgccaatgcgctttatcaccgtttccctcgtgtggatgaaggcgatatgagccggatgcgcgccacgctggtccgtggcaatacgctggcggaactggcgcgcgaatttgagttaggcgagtgcttacgtttagggccaggtgaacttaaaagcggtggatttcgtcgtgagtcaattctcgccgacaccgtcgaagcattaattggtggcgtattcctcgacagtgatattcaaaccgtcgagaaattaatccttaactggtatcaaactcgtctggacgaaattagcccaggcgataaacaaaaagatccgaaaacgcgcttgcaagaatatttgcagggtcgccatctgccgctgccgacttatctggtagtccaggtacgtggcgaagcgcacgatcaggaatttactatccactgccaggtcagcggcctgagtgaaccggtggttggcacaggttcaagccgtcgtaaggctgagcaggctgccgccgaacaggcgttgaaaaaactggagctggaatga

SEQ ID NO: 472473 - DNA, 906 bp, Shigella flexneri
atgagcatcgataaaagttactgcggatttattgccatcgtcggacgtccgaacgttggcaaatccacattgttgaacaaactgctggggcagaaaatctccatcacctcccgcaaggcgcagacaactcgtcaccgcattgtggggatccatactgaaggcgcgtatcaggcgatctacgtcgatacaccgggcctgcatatggaagaaaaacgcgccattaaccgcctgatgaacaaagcggcgagcagctctattggcgatgttgagctggtgatttttgtcgttgaaggcacccgctggacgccggacgacgaaatggtgctcaacaaactgcgcgaaggcaaagcgccggtaatcctcgcggtgaacaaagtggacaacgtgcaggagaaagccgatctgctgccgcacctgcagttcctggcaagccagatgaacttcctcgatatcgtgccaatctctgccgaaaccgggctgaatgttgacactattgcggcaatcgtgcgtaagcatctgcctgaagcgactcatcacttcccggaagattacatcaccgatcgctcacagcgttttatggcgtctgaaatcatccgcgaaaaactgatgcgtttccttggcgctgaactgccgtactccgtgaccgtggagatcgaacgtttcgtctctaacgaacgcggcggttgtgacatcaacggtttgattctcgttgagcgtgaagggcagaagaagatggttattggcaacaaaggggccaagatcaaaaccatcgggattgaagcgcgtaaagacatgcaggaaatgttcgaagcgcctgtccaccttgaactgtgggtaaaagtgaaatcgggttgggccgacgacgaacgcgcactgcgcagtctcggttatgttgacgatctttaa

SEQ ID NO: 472474 - DNA, 729 bp, Shigella flexneri
atggaaggctggcagcgcgcatttgtcctgcatagtcgcccgtggagcgaaaccagcctgatgctggacgtcttcacagaggaatcgggtcgcgtgcgtctggttgccaaaggcgcacgctctaaacgctctactctgaaaggtgcattacagcctttcacccctctcttgctacgttttggcgggcgtggcgaagtcaaaacgctgcgcagtgctgaagctgtctcactggcgctgccattaagcggtatcacgctttacagcggtctgtacatcaacgaacttctctcccgcgtactggaatacgagacgcgcttctctgaactctttttcgattacttgcactgcattcagtctcttgcaggtgacactggtacgccagaacccgcgctgcgtcgctttgaactggcactactcgggcatctgggctatggcgtcaattttacccattgcgcgggtagcggcgagccggtagatggcaccatgacgtatcgttatcgcgaagaaaaagggtttatcgcaagcgtcgttatcgacaataaaacgttcaccggaaggcagttaaaagcgttaaacgcgcgggaatttcctgacgcagacacactacgcgccgcgaaacgctttacccgaatggcgcttaagccgtatcttggcggtaaaccattaaagagcagggaactgttccggcagtttatgcctaagcgaacggtgaaaacacattatgaatga

SEQ ID NO: 472475 - DNA, 732 bp, Shigella flexneri
atggctgaattactgttaggcgtcaacattgaccatattgcaacgctgcgtaacgcacgcggtactgcttacccggatccggtgcaggcggcgtttattgccgagcaggcgggagcggacggcattaccgtgcatttacgtgaagatcgccgccacattactgaccgcgatgtgcgcatcctgcggcagacgctggatacccgaatgaatctggagatggcagtgaccgaagagatgctggcgatcgccgttgagacgaagccacatttttgctgcttggtaccggaaaagcgtcaggaagtaacaaccgaaggcggcctggacgttgcagggcagcgtgaaaaaatacgcgatgcctgcaaacgtctggcagatgccgggattcaggtttctctgtttatcgacgccgatgaagagcagatcaaagctgcggcagaggttggcgcaccgtttatcgagatccacaccggttgctatgctgatgccaaaactgacgccgaacaggcgcaagagctggtgcgtatcgccaaagccgcgacctttgccgctagtctcggtctgaaagttaacgccggacacggtctgacctatcacaacgtgaaagccattgccgccatccctgagatgcatgaactgaatatcggtcatgccattattggccgtgcagtgatgaccggactgaaagatgcggtggcagaaatgaagcgtctgatgctggaagcgcgtggctaa

SEQ ID NO: 472476 - DNA, 381 bp, Shigella flexneri
atggcaatattaggtttaggcacggatatcgtagagatcgctcgcatagaagcagtgatcgcccgatccggtgagcgcctggcacgccgcgtattaagcgataacgaatgggcaatctggaaaacgcaccaccagccggtgcgttttctggcgaagcgttttgctgtgaaagaagccgcagcaaaagcgtttggcaccgggatccgcaatggtctggcgtttaatcaatttgaagtattcaatgatgagctcggcaaaccacggctacggctatggggtgaggcattaaaactggcggaaaagctcggcgttgtaaatatgcatgtaacgctggcagatgaacgccactatgcttgtgccacggtaattattgaaagttaa

SEQ ID NO: 472477 - DNA, 186 bp, Shigella flexneri
atgggagatcatatctacgaaattaacagcgataagtgtaccgaatgcgtagggcactacgagacaccaacctgccagaaggtgtgcccgatccccaatactattgtgaaagatccggcgcatgtcgagacagaagaacagttgtgggataaatttgtgctgatgcaccacgcggataaaatttaa

SEQ ID NO: 472478 - DNA, 402 bp, Shigella flexneri
atgccgcgcactgtaacacataatccggatagccccaataatgacgatgttttagccgcatctgaaaaatgggacgcctgtaaacccccctataccagcgcacacatgaaaatctgtgttgctgccgccaaaatcatcctcgctgcttccggcgtggctcgccgttccaaatacgaaaaagagaactatctccgtatcgatttcagcaaagccggtaaggttacattttacgccgagtttccaaaaaagatgggcctcaaaggtaaaaagctcggcgagtggccggagctcgttatccagctggcgcgcgaaaaagcactaggtatggctgacggtggactgcgggcagagtccgtacatgcagcgctggaaatgtaccgggatgacccaaagccaaagtag

SEQ ID NO: 472479 - DNA, 225 bp, Shigella flexneri
atgtcgcgtaaaggtaactgttacgacaacgctccgatggaaagcttctggggaacgctgaaaaatgagagcctgagccactatcgttttaataaccgggatgaagccatctcagtaatacgggaatacattgagattttctacaatcgtcagcgtcgtcactctcgtctggggaatatctccccggcagccttcagggaaaaacatcatcagatggctgcttaa

SEQ ID NO: 472480 - DNA, 1284 bp, Shigella flexneri
atggctgatacaaaagcaaaactcaacctcaacggggacacagctgttgaactggatgtgctgaaaggcacgctgggtcaagatgttattgatatccgtactctcggttcaaaaggtgtgttcacctttgacccaggcttcacttcaaccgcatcctgcgaatctaaaattacttttattgatggtgatgaaggtattttgctgcaccgcggtttcccgatcgatcagctggcgaccgattctaactacctagaagtttgttacatcctgctgaatggtgaaaaaccgactcaggaacagtatgacgaatttaaaactacggtgacccgtcataccatgatccacgagcagattacccgtctgttccacgctttccgtcgcgactcacatccaatggcagtcatgtgtggtattaccggcgcgctggcggcgttctatcacgactcgctggatgttaacaatcctcgtcatcgtgaaattgccgcgttccgcctgctgtcgaaaatgccgaccatggccgcgatgtgttacaagtattccattggtcagccatttgtttatccgcgcaacgatctctcctatgccggtaacttcctgaatatgatgttctccacgccgtgcgaaccgtatgaagttaatccgattctggaacgtgctatggaccgtattctgatcctgcacgctgaccatgaacagaacgcctctacctccaccgtgcgtaccgctggctcttcgggtgcgaacccgtttgcctgtatcgcagcaggtattgcttcactgtggggacctgcgcacggtggtgctaacgaagcggcgctgaaaatgctggaagaaattagctccgttaaacacattccggaatttgttcgtcgtgcgaaagataaaaatgattctttccgcctgatgggcttcggtcaccgcgtgtacaaaaattacgacccgcgcgccaccgtaatgcgtgaaacctgccatgaagttctgaaagagctgggcaccaaagatgacctgctggaagtggctatggagctggaaaacatcgcgctgaacgacccgtactttatcgagaagaaactgtacccgaacgtcgatttctactctggtatcatcctgaaagcgatgggtattccgtcttccatgttcaccgtcattttcgcaatggcacgtaccgttggctggatcgcccactggagcgaaatgcacagttacggtatgaagattgcccgtccgcgtcagctgtatacaggatatgaaaaacgcgactttaaaagcgatatcaagcgttaa

SEQ ID NO: 472481 - DNA, 405 bp, Shigella flexneri
atgtgggcgttattcatgataagaaatgtgaaaaaacaaagacctgttaatctggacctacagaccatccggttccccatcacggcgatagcgtccattctccatcgcgtttccggtgtgatcacctttgttgcagtgggcatcctgcagtggcttctgggtaccagcctctcttcccctgaaggtttcgagcaagcttccgcgattatgggcagcttcttcgtcaaatttatcatgtggggcatccttaccgctctggcgtatcacgtcgtcgtaggtattcgccacatgatgatggattttggctatctggaagaaacattcgaagcgggtaaacgctccgccaaaatctcctttgttattactgtcgtgctttcacttctcgcaggagtcctcgtatggtaa

SEQ ID NO: 472482 - DNA, 348 bp, Shigella flexneri
atggtaagcaacgcctccgcattaggacgcaatggcgtacatgatttcatcctcgttcgcgctaccgctatcgtcctgacgctctacatcatttatatggtcggttttttcgccaccagtggcgaactgacatatgaagtctggatcggtttcttcgcctctgcgttcaccaaagtgttcaccctgctggcgctgttttctatcttgattcatgcctggatcggcatgtggcaggtgttgaccgactacgttaaaccgctggccttgcgcctgatgctgcaactggtgattgtcgttgcactggtggtttacgtgatttatggattcgttgtggtgtggggtgtgtga

SEQ ID NO: 472483 - DNA, 1767 bp, Shigella flexneri
atgaaattgccagtcagagaatttgatgcagttgtgattggtgccggtggcgcaggtatgcgcgcggcgctgcaaatttcccagagcggccagacctgtgccctgctctctaaagtcttcccgacccgttcccataccgtttctgcgcaaggcggcattaccgttgcgctgggtaatacccatgaagataactgggaatggcatatgtacgacaccgtaaaagggtcggactatatcggtgaccaggacgcgattgaatatatgtgtaaaaccgggccggaagcgattctggaactcgaacacatgggcctgccgttctcgcgtctcgatgatggtcgtatctatcaacgtccgtttggcggtcagtcgaaaaacttcggcggcgagcaggcggcacgcactgcggcggctgctgaccgtaccggtcacgcactgttgcacacgctttatcagcagaacctgaaaaaccacaccaccattttctccgagtggtatgcgctggatctggtgaaaaaccaggatggcgcggtggtgggttgtaccgcactgtgcatcgaaaccggtgaagtggtttatttcaaagcccgcgctaccgtgctggcgactggcggagcagggcgtatttatcagtccaccactaacgcccacattaacactggcgacggtgtcggcatggctatccgcgcaggcgtaccggtgcaggatatggaaatgtggcaattccacccgaccggcattgccggtgcgggcgtactggtcaccgaaggttgccgtggtgaaggcggttatctgctgaacaaacatggcgaacgctttatggagcgttatgcgccgaacgccaaagacctggcgggccgtgatgtggtggcgcgttccatcatgattgaaatccgtgaaggtcgcggctgtgatggtccgtgggggccacacgcgaaactgaaactcgatcacctgggtaaagaagttctcgaatcccgtctgccgggtatcctggagctttcccgtaccttcgctcacgtcgatccggtgaaagagccgattccggttatcccaacctgtcactacatgatgggcggtattccgaccaaagttaccggtcaggcgctgactgtgaatgagaaaggcgaagatgtggttgttccgggactgtttgccgttggtgaaatcgcttgtgtatcggtacacggcgctaaccgtctgggcggcaactcgctgctggacctggtggtctttggtcgcgcggcaggtctgcatctgcaagagtctatcgccgagcagggcgcactgcacgatgccagcgagtctgatgttgaagcgtctctggatcgcctgaaccggtggaacaataatcgtaacggtgaagatccggtggcgatccgtaaagcgctgcaagaatgtatgcagcataacttctcggtcttccgtgaaggtgatgcgatggcgaaagggcttgagcagttgaaagtgatccgcgagcgtctgaaaaatgcccgtctggatgacacttccagcgagttcaacacccagcgcgttgagtgcctggaactggataacctgatggaaacggcgtatgcaacggctgtttctgccaacttccgtaccgaaagccgtggcgcacatagccgcttcgacttcccggatcgtgatgatgaaaactggctgtgccactccctgtatctgcctgagtcggaatccatgacgcgccgaagcgtcaacatggaaccgaaactgcgcccggcattcccgccgaagattcgtacttactaa

SEQ ID NO: 472484 - DNA, 717 bp, Shigella flexneri
atgagactcgagttttcaatttatcgctataacccggatgttgatgatgctccgcgtatgcaggattacaccctggaagcggaagaaggtcgcgacatgatgctgctggatgcgcttatccagctgaaagagaaagatcccagcctgtcgttccgccgctcctgccgtgaaggtgtgtgcggttccgacggtctgaacatgaacggcaagaatggtctggcctgtattaccccgatttcggcactcaaccagccgggcaagaagattgtgattcgcccgctgccaggtttaccggtgatccgcgatttggtggtagacatgggacaattctatgcgcaatatgagaaaattaagccttacctgttgaataatggacaaaatccgccagctcgcgagcatttacagatgccagagcagcgcgaaaaactcgacgggctgtatgaatgtattctctgcgcatgttgttcaacctcttgtccgtctttctggtggaatcccgataagtttatcggcccggcaggcttgttagcggcatatcgtttcctgatcgatagccgtgataccgagactgacagccgcctcgacggtttgagcgatgcattcagcgtattccgctgtcacagcatcatgaactgcgtcagtgtatgtccgaaggggctgaacccgacgcgcgccatcggccatatcaagtcgatgttgttgcaacgtaatgcgtaa

SEQ ID NO: 472485 - DNA, 2802 bp, Shigella flexneri
atgcagaacagcgctttgaaagcctggttggactcttcttacctctctggcgcaaaccagagctggatagaacagctctatgaagacttcttaaccgatcctgactcggttgacgctaactggcgttcgacgttccagcagttacctggtacgggagtcaaaccggatcaattccactctcaaacgcgtgaatatttccgccgcctggcgaaagacgcttcacgttactcttcaacgatctccgaccctgacaccaatgtgaagcaggttaaagtcctgcagctcattaacgcataccgcttccgtggtcaccagcatgcgaatctagatccgctgggactgtggcagcaagataaagtggccgatctggatccgtctttccacgatctgaccgaagcagacttccaggaaaccttcaacgtcggttcatttgccagcggcaaagaaaccatgaaactcggcgagcttatttccgccctcaagcaaacctactgcggcccgattggtgccgagtatatgcacatcaccagcaccgaagaaaaacgctggatccaacagcgtatcgagtctggtcgcgcgactttcaatagcgaagagaaaaaacgcttcttaagcgaactgaccgccgctgaaggccttgagcgttacctcggcgcaaaattccctggcgcaaaacgcttctcgctggaaggcggtgacgcgttaatcccgatgcttaaagagatgatccgccacgctggcaacagcggcacccgcgaagtggttctcgggatggcgcaccgtggtcgtctgaacgtgctggtgaacgtgctgggtaaaaaaccgcaagacttgttcgacgagttcgccggtaaacataaagaacacctcggcacaggcgacgtgaaataccacatgggcttctcgtctgacttccagaccgatggcggcctggtgcacctggcgctggcgtttaacccgtctcaccttgagattgtaagcccggtcgttatcggctctgttcgtgcccgtctggacagacttgatgagccgaacagcaacaaagtgctgccaatcaccatccacggtgacgccgcagtgaccgggcagggcgtggttcaggaaactctgaacatgtcgaaagcgcgtggttatgaagttggcggtacggtacgtatcgttatcaacaaccaggttggtttcaccacctctaacccgctggatgcccgttctacaccgtactgtactgatatcggtaagatggttcaggcaccgattttccacgttaacgcggatgatccggaagccgttgcctttgtgacccgtctggcgctcgatttccgtaacacctttaaacgtgatgtcttcatcgacctggtatgctaccgccgtcacggccacaacgaagccgacgagccgagcgcaacccagccactgatgtatcagaaaatcaaaaaacatccgacaccgcgcaaaatctacgctgacaagctggagcaggaaaaagtggcgacgctggaagatgccaccgagatggttaacctgtaccgcgatgcgctggatgctggcgattgcgtagtggcagagtggcgtccgatgaacatgcactctttcacctggtcgccgtacctcaaccacgaatgggacgaagagtacccgaacaaagttgagatgaagcgcctgcaggaactggctaaacgtatcagtacggtaccagaagcagttgaaatgcagtctcgcgttgccaagatttatggcgatcgccaggcgatggcagccggtgagaaactgttcgactggggcggtgcggaaaacctcgcttacgccacgctggttgatgaaggcattccggttcgcctgtcgggtgaagactccggtcgcggtaccttcttccaccgccacgcggtgatccacaaccagtctaacggttccacttacacgccgctgcaacacatccataacggtcagggcgcgttccgtgtctgggactccgtactgtcagaagaagccgtgctggcgtttgaatatggttatgccaccgcagaaccacgcaccctgaccatctgggaagcgcagttcggtgacttcgccaacggtgcgcaggtggttatcgaccagttcatctcctctggcgagcagaaatggggccggatgtgtggtctggtgatgttgctgccgcacggttacgaagggcaggggccggagcactcctccgcgcgtctggaacgttatctgcaactttgtgctgagcaaaacatgcaggtttgcgtaccgtctaccccggcacaggtttaccacatgctgcgtcgtcaggcgctgcgcgggatgcgtcgtccgctggtcgtgatgtcgccgaaatccctgctgcgtcatccgctggcggtttccagcctcgaagaactggcgaacggcaccttcctgccagccatcggtgaaatcgacgagcttgatccgaagggcgtgaagcgcgtagtgatgtgttctggtaaggtttattacgacctgctggaacagcgtcgtaagaacaatcaacacgatgtcgccattgtgcgtatcgagcaactctacccgttcccgcataaagcgatgcaggaagtgttgcagcagtttgctcacgtcaaggattttgtctggtgccaggaagagccgctcaaccagggcgcatggtactgcagccagcatcatttccgtgaagtgattccgtttggggcttctctgcgttatgcaggccgcccggcctccgcctctccggcggtagggtatatgtccgttcaccagaaacagcaacaagatctggttaatgacgcgctgaacgtcgaataa

SEQ ID NO: 472486 - DNA, 1218 bp, Shigella flexneri
atgagtagcgtagatattctggtccctgacctgcctgaatccgtagccgatgccaccgtcgcaacctggcataaaaaacccggcgacgcagtcgtacgtgatgaagtgctggtagaaatcgaaactgacaaagtggtactggaagtaccggcatcagcagacggcattctggatgcggttctggaagatgaaggtacaacggtaacgtctcgtcagatccttggtcgcctgcgtgaaggcaacagcgccggtaaagaaaccagcgccaaatctgaagagaaagcgtccactccggcgcaacgccagcaggcgtctctggaagagcaaaacaacgatgcgttaagcccggcgatccgtcgcctgctggctgaacacaatctcgacgccagcgccattaaaggcaccggtgtgggtggtcgtctgactcgtgaagatgtggaaaaacatctggcgaaagccccggcgaaagagtctgctccggcagcggctgctccggcggcgcaaccggctctggctgcacgtagtgaaaaacgtgtcccgatgactcgcctgcgtaagcgtgtggcagagcgtctgctggaagcgaaaaactccaccgccatgctgaccacgttcaacgaagtcaacatgaagccgattatggatctgcgtaagcagtacggtgaagcgtttgaaaaacgccacggcatccgtctgggctttatgtccttctacgtgaaagcggtggttgaagccctgaaacgttacccggaagtgaacgcgtctatcgacggcgatgacgtggtttaccacaactatttcgacgtcagcatggcggtttctacgccgcgcggcctggtgacgccggttctgcgtgatgtcgataccctcggcatggcagacatcgagaagaaaatcaaagagctggcagtcaaaggccgtgatggcaagctgacggttgaagatctgaccggtggtaacttcaccatcaccaacggtggtgtgttcggttccctgatgtctacgccgatcatcaacccgccgcagagcgcaattctgggtatgcacgctatcaaagatcgtccgatggcggtgaatggtcaggttgagatcctgccgatgatgtacctggcgctgtcctacgatcaccgtctgatcgatggtcgcgaatccgtgggctttctggtaacgatcaaagagttactggaagagccgacgcgtctgctgctggacgtgtag

SEQ ID NO: 472487 - DNA, 1167 bp, Shigella flexneri
atgaacttacatgaatatcaggcaaaacaactgtttgcccgctatggcttaccagcaccggtgggttatgcctgtactactccgcgcgaagcagaagaagccgcttcaaaaatcggtgccggtccgtgggtagtgaaatgtcaggttcacgctggtggccgcggtaaagcgggcggtgtgaaagttgtaaacagcaaagaagacatccgtgcttttgcagaaaactggctgggcaagcgtctggtaacgtatcaaacagatgccaatggccaaccggttaaccagattctggttgaagcggcgaccgatatcgctaaagagctgtatctcggtgccgttgtagaccgtagttcccgtcgcgtggtctttatggcctccaccgaaggcggcgtggaaatcgaaaaagtggcggaagaaactccgcacctgatccataaagttgcgcttgatccgctgactggcccgatgccgtatcagggacgcgagctggcgttcaaactgggtctggaaggtaaactggttcagcagttcaccaaaatcttcatgggcctggcgaccattttcctggagcgcgacctggcgctgatcgaaatcaacccgctggtcatcaccaaacagggcgatctgatttgcctcgacggcaaactgggcgctgatggcaacgccctgttccgccagcctgatctgcgcgaaatgcgtgaccagtcgcaggaagatccgcgtgaagcacaggctgcacagtgggaactgaactacgttgcgctggacggtaacatcggttgtatggttaacggcgcaggtctggcgatgggtacgatggacatagttaaactgcacggcggcgaaccggctaacttcctggacgttggcggcggcgcaaccaaagaacgtgtaaccgaagcgttcaaaatcatcctctctgacgacaaagtgaaagccgttctggttaacatcttcggcggtatcgttcgttgcgacctgatcgctgacggtatcatcggcgcggtagcggaagtgggtgttaacgtaccggtcgtggtacgtctggaaggtaacaacgccgaactcggcgcgaagaaactggctgacagcggcctgaatattattgcagcaaaaggtctgacggatgcagctcagcaggttgttgccgcagtggaggggaaataa

SEQ ID NO: 472488 - DNA, 870 bp, Shigella flexneri
atgtccattttaattgataaaaacaccaaggttatctgccagggctttaccggtagccaggggactttccactcagaacaggccattgcatacggcactaaaatggttggtggcgtaactccaggtaaaggcggcactacccacctcggcctgccggtgttcaacaccgtgcgtgaagctgttgctgctactggcgcttccgcgtctgttatttacgtaccagcaccgttctgcaaagactccattctggaagctatcgatgcaggcatcaaactgattatcaccatcactgaaggcatcccgacgctggatatgctgaccgtgaaagtgaaactggacgaagcaggcgttcgtatgatcggcccgaactgcccaggcgttatcaccccgggtgaatgcaaaattggtatccagccgggtcacattcacaaaccgggtaaagtgggtatcgtttcccgttccggtacactgacctatgaagcggttaaacagaccacggattacggtttcggtcagtcgacctgtgtcggtatcggcggtgacccgatccctggctctaactttatcgacattctcgaaatgttcgaaaaagatccgcagaccgaagcgatcgtgatgatcggtgagatcggcggtagcgctgaagaagaagcggcagcgtacatcaaagagcatgttaccaagccagttgtgggttacatcgctggtgtgactgcgccgaaaggcaaacgtatgggccacgcgggtgcgatcattgccggtgggaaagggactgcggatgagaaattcgctgctctggaagccgcaggcgtgaaaaccgttcgcagcctggcggatatcggtgaagcactgaaaactgttctgaaataa

SEQ ID NO: 472489 - DNA, 723 bp, Shigella flexneri
atgggacacaaacccttataccgacagattgctgatcgcattcgtgagcaaattgcgcgtggcgagcttaaacctggcgatgcgttacctaccgaatcggcattacaaacagagtttggcgtcagccgggttacggtgcgtcaggctttgcgccagttagtcgagcaacagatcctcgaaagcattcagggcagcgggacttacgtcaaagaagagcgggtcaattacgatatttttcagttaaccagttttgatgaaaaactgtcggaccgtcacgtcgatacacacagtgaagttctgatatttgaagtgattccggctgacgattttcttcagcaacagctacaaatcaccgtgcaggatcgtgtgtggcatgtgaagcgcgtgcgctatcgcaagcaaaagccaatggcgctggaagaaacctggatgccgcttgcgttgttcccggatctcacctggcaggtcatggaaaattcgaaatatcactttattgaagaagtgaagaagatggttatcgatcgtagcgaacaggaaatcattcctctgatgccaaccgaagagatgagccgtctgcttaatatcagccagacaaagccgattcttgaaaaagtatcgcgtggatatttagttgatggtcgggtgtttgaatatagccgcaacgcttttaataccgatgactataaatttaccctgatagcgcagcgaaaatcatcgcgataa

SEQ ID NO: 472490 - DNA, 1917 bp, Shigella flexneri
atgaacctgacgactctgacccaccgcgatgcgttgtgtctgaatgcgcgctttaccagccgtgaagaggccattcacgcgttgactcaacgtcttgctgctctggggaaaatttccagtactgagcaatttctgaaagaagtgtatcgccgtgaaagccttggcccgaccgccttaagtgaagggttggctgtgccgcatggcaaaactgctgcggtaaaagaagcggcgtttgcggtcgccacactcagcgagccgcttcagtgggaaggcgtggatggcccggaagcggttgatttagtggtgttgctggcgattcccctcaatgaagcgggtactacgcacatgcaactgctgacagcgctgaccacgcgcctggcggatgatgagattcgggcgcgtatacagtcggcgacgacgcctgatgaattgctctcggcgctggatgacaagggaggcacgcaaccttctgcctctttttccaacgcgccaactatcgtttgcgtaacggcctgcccggcgggtattgctcacacctacatggctgcggagtatctggaaaaagccggacgcaaactcggcgtgaatgtctacgttgaaaagcaaggtgctaacggtattgaagggcgtttaacggcggatcaactcaatagtgcaactgcctgtatttttgcggctgaagtcgccatcaaggagagtgagcgttttaacggcattcctgcgctttctgtgcctgttgccgagccgattcgccatgcagaagcgttgatccaacaatcgcttaccctcgagcgtggcgatgagacgcgtaccttacagcaagatacgcaaccggtgaaaagcgtcaaaacggagctgaaacaggcactgttgagcgggatctcttttgccgtaccgttgattgtcgcgggggggacggtgctggcggtcgcggtattactgtcgcaaatcttcgggctacaagatctgtttaatgaagaaaactcctggctgtggatgtaccgcaaactgggcggcgggctgctcggaattttgatggtaccggtgctggcagcctataccgcctattcgctggcagataaaccggcgttagcgccaggctttgcggctggacttgccgccaacatgatcggctccgggtttctcggcgcggtcgttggcggattgatagccggttacttgatacgctggatgaaaaatcacttgcgtcttagcagtaaattcaatggcttcctgactttttatctctacccggtgctcggtacattgggagcgggcagtctgatgctgtttgtggtgggggaacctgtcgcctggatcaataactcgcttaccgcctggctgaacggtctgtcaggaagtaacgcgctgttgctgggtgccattctcggttttatgtgttcctttgaccttggagggccagtgaataaagccgcttatgcattctgcctgggcgcaatggcgaacggcgtttacggcccgtatgccattttcgcctccgtcaaaatggtttcggcatttaccgtaaccgcttccacgatgctcgcaccgcgcctgtttaaagagtttgaaattgagaccgggaaatccacctggctgttagggctggcaggtattaccgaaggggcgatcccgatggcgattgaagatccgctgcgggttattggttcgtttgtgctgggctctatggtaacgggcgctattgtcggtgcgatgaatatcggcctttcgacacccggtgctggcattttctcgctctttttacttcatgataatggcgcgggcggtgttatggcggcaattggctggtttggtgcggcattggtgggggctgcaatctcgactgcaattctcctgatctggcggcgtcacgcggttaagcatggcaactatctgactgatggcgtaatgccataa

SEQ ID NO: 472491 - DNA, 2634 bp, Shigella flexneri
atgaaagcggtatctcgcgttcacatcaccccgcatatgcactgggatcgggagtggtatttcaccaccgaagagtcacgcattctgctggtcaataatatggaagagatcctgtgccgactggaacaggacaacgaatacaaatattacgtactcgacgggcaaacggcgatcctcgaagattatttcgcggtgaaaccggaaaacaaagaccgcgtgaagaaactggtagaagccggcaagttgattatcggcccctggtatacccagaccgataccacgattgtttctgcggaatccatcgtccgtaatctgatgtacggaatgcgtgactgcctcgcgtttggcgagccgatgaaaataggttatttacccgattcctttggcatgtccgggcaactgccgcatatctacaatggatttggcattacctgcaccatgttctggcgtggatgttctgagcgccacggtacggataaaaccgagtttttgtggcaaagcagtgacggtagcgaagtgacggcgcaggtgatgccgttgggttatgccatcggtaagtacttacctgcggacgaaaacggattacgcaaacgcctcgacagttattttgacgtgctggaaaaagcgtctgtaaccaaagagattttgctgccgaatgggcatgatcagatgccattgcagcaaaatatcttcgaagtgatggagaaactgcgcgaaatttatcctcaacgaaagtttgtgatgagccgctttgaagaggtatttgagaagatcgaagcgcagcgagataatctggcaaccctgaaaggggaatttattgatggcaaatatatgcgcgtgcatcgcaccatcggttccacgcgcatggatatcaaagttgcccacgcacgtattgaaaataagattgttaatctgctggaaccgctggcaacgctggccaggacgttgggttttggataccaccacggcttgctggagaaaatgtggaaagagatcttaaaaaatcatgcccacgacagcatcggctgctgctgtagtgacaaagttcatcgcgaaatcgtcgcccgcttcgaactggctgaagacatggcggataatctgctgcgtttctatatgcgtaaaatcgccgacaacatgccgcagagcgacgccgacaaactcgtcctgtttaacctgatgccctggccgcgggaagaagtgatcaacaccactgtgcggctgcgcgccagccagtttaatctacgagacgatcgcggtcagcctgtaccgtattttattcgccatgcccgtgagatcgatccaggcctaatcgatcggcaaatagttcattacggtaattacgatccctttatggagtttgatatacagatcaaccagattgtcccttctatgggctatcgcacgctttatatcgaagcgaatcagcctggcaacgtgattgcggcaaaaagtgacgctgaagggatactggaaaatgctttctggcaaattgcgctcaatgaggatggaacgctacaactggtagataaagatagcggtgtgcgctatgaccgggtgttgcaaattgaagaaagctctgatgatggtgatgaatatgactattcacccgcaaaagaagagtgggtaattacttcggcgaatgcgaaaccgcaatgcgagattattcatgaggcctggcagagcagggctgttatccgctatgaaatggcggtgccgcgtaatctgcaacaacgcagcgcaagacaatccactggcagagtagatgtcgagttggttgtcactcttagtcataacaacaggcgcattgatgtggatatcaaccttgataaccaggctgacgatcatcgccttcgcgtcctgatccctacatcttttaacaccgatagtgttctggcagatacccagtttggttcgctaacgcgccccgtgaacgacagtgcaatgaacaactggcagcaagaaggctggaaagaagcgccggttccggtatggaatatgctcaactatgcagccttacaggaagggcgtaacggcatggctgtctttagcgaagggctacgtgaatttgaagtcatcggtgaagagaagaaaacctttgccattacgttgctgcgcggcgtgggcttactggggaaagaagatctgcttttaaggcctaggcggccttcgggaattaaaatgccagtcccggactcacaactacgtggtctgctttcttgtcgcctaagtttattgagttataccggtacgccaaccgccgctggtgtagctcagcaggcgcgagcatggctgactccagtacagtgttacaacaaaatcccatgggatgcgatgaagctcaacaaagccggattcaacgtgccggaaagttatagtttgttgaaaatgcccccagtgggatgcctgataagcgcacttaagaaagctgaagaccgacaagaagtgattttacggctgtttaatccggctgaatcagcaacctgtgatgcgactgttgctttcagtcgcgaggtgatttcttgctcagaaacgatgatggatgaacacattaccaccgaggaaaatcaaggttcaaatctatcggggccttttttacccggccagtcacggacgttcagttaccggcttgcctga

SEQ ID NO: 472492 - DNA, 1569 bp, Shigella flexneri
atgttagatatagtcgaactgtcgcgcttacagtttgccttgaccgcgatgtaccacttcctttttgtgccactgacgctcggtatggcgttcctcctggccattatggaaacggtctacgtcctctccggcaaacagatttataaagatatgaccaagttctggggcaagttgtttggtatcaacttcgctctgggtgtggctaccggtctgaccatggagttccagttcgggactaactggtcttactattcccactatgtaggggatatcttcggtgcgccgctggcaatcgaaggtctgatggccttcttcctcgaatccacctttgtaggtctgttcttcttcggttgggatcgtctgggtaaagttcagcatatgtgtgtcacctggctggtggcgctcggttcaaacctgtccgcactgtggattctggttgcgaacggctggatgcaaaacccaatcgcgtccgatttcaactttgaaactatgcgtatggagatggtgagcttctccgagctggtgcttaacccggttgctcaggtgaaattcgttcacactgtagcgtctggttatgtgactggcgcgatgttcatcctcggtatcagcgcatggtatatgctgaaaggtcgtgacttcgccttcgctaaacgctcctttgctatcgctgccagcttcggtatggctgctgttctgtctgttattgttctgggtgatgaatccggctacgaaatgggcgacgtgcagaaaaccaaactggctgctattgaagccgagtgggaaacgcaacctgcgcctgctgcctttactttgttcggcattcctgatcaggaagaggagacgaacaaatttgcgattcagatcccttacgcactgggcatcattgcaacgcgttccgtggataccccggttatcggcctgaaagagctgatggtgcagcatgaagaacgcattcgtaacgggatgaaggcgtactctctgctcgaacaactgcgttctggttctaccgaccaggcggttcgtgaccagttcaatagcatgaagaaagacctcggttacggtctgctgctgaaacgctatacgccaaacgtggctgatgcgactgaagcgcagattcaacaggcaaccaaagactccatcccgcgtgtagcgccgctgtactttgcgttccgtatcatggtggcgtgtggcttcctgctgctggcaatcatcgcgctctctttctggagtgtcatccgcaaccgcattggcgagaaaaaatggcttctgcgcgccgcgctgtacggtattccgctgccgtggattgctgtagaagcgggctggttcgtggctgaatatggccgccaaccgtgggctatcggtgaagtgctgccgacagctgtggcgaattcgtcactgaccgcaggcgatctcatcttctcaatggtgctgatttgcggcctgtataccctgttcctggtggcagaattgttcttaatgttcaagtttgcacgcctcggcccaagcagcctgaaaaccggtcgctatcactttgagcagtcttccacgactactcagccggcacgctaa

SEQ ID NO: 472493 - DNA, 1140 bp, Shigella flexneri
atgatcgattatgaagtattgcgttttatctggtggctgctggttggcgttctgctgattggttttgcagtcactgacggtttcgacatgggggtgggcatgctcacccgtttcctcggtcgtaacgacaccgagcgtcgaattatgattaactccattgcaccacactgggacggtaaccaggtttggctgatcaccgcgggcggcgcactctttgctgcctggccgatggtctatgccgctgcgttctccggcttctatgtggcgatgatcctcgtgctggcgtctttgttcttccgtccggtcggttttgactaccgctccaagattgaagaaacccgctggcgtaacatgtgggactggggcatcttcattggtagcttcgttccgccgctggtaattggtgtagcgttcggtaacctgttgcagggcgtaccgttcaacgttgatgaatatctgcgtctgtactacaccggtaacttcttccagttgcttaacccgttcggcctgctggcaggcgtggtgagcgtagggatgatcattactcagggcgcaacctatctgcaaatgcgtaccgtgggcgaactgcacctgcgtacccgtgcaacggctcaggtggctgcgctggtgacactggtctgtttcgcactggctggcgtatgggtgatgtacggtatcgatggttatgtcgtgaaatcgacaatggaccattacgcagcctctaacccactgaataaagaagtggttcgtgaagctggcgcatggctggttaacttcaacaacacgccaattctgtgggctattccggcactgggtgtggttctgctgctgctgaccatcctgactgcacgtatggataaagccgcgtgggcgtttgtgttctcctccctgacgctggcctgcatcatcctgacagccggtatcgcaatgttcccgtttgtgatgccgtccagcaccatgatgaacgcaagtctgacaatgtgggatgcaacttccagccagctgacgcttaacgtcatgacctgggttgcggtggttctggtaccgatcattctgctctacaccgcctggtgttactggaaaatgttcggtcgtatcaccaaagaagatattgaacgtaacacccactctctgtactaa

SEQ ID NO: 472494 - DNA, 294 bp, Shigella flexneri
atgagtaagattatcgcgaccttgtatgcggtaatggacaagcgccccctgcgggcgctttccttcgtgatggcgcttctgttagcaggatgtatgttttgggacccatctcgttttgccgcgaagaccagtgaactggaaatctggcatggtttattgctgatgtgggccgtctgtgctggtgtgattcacggcgtgggctttcgtccgcagaaggttctttggcaagggattttttgcccattgcttgccgatattgttctcattgtcgggctgattttcttcttcttttaa

SEQ ID NO: 472495 - DNA, 405 bp, Shigella flexneri
gtgaatacaacgctgtttcgatggccggttcgcgtctactatgaagataccgatgccggtggtgtggtgtaccacgccagttacgtcgctttttatgaaagagcacgcacagagatgctgcgtcatcatcacttcagtcagcaggcgctgatggctgaacgcgttgcctttgtggtacgtaaaatgacggtggaatattacgcacctgcgcggctcgacgatatgctcgaaatacagactgaaataacatcaatgcgtggcacctctttggttttcacgcaacgtattgtcaacgccgagaatactttgctgaatgaagcagaggttctggttgtttgcgttgacccactcaaaatgaagcctcgtgcgcttcccaagtctattgtcgcggagtttaagcagtga

SEQ ID NO: 472496 - DNA, 693 bp, Shigella flexneri
gtgactgacatgaatatccttgatttgttcctgaaggctagccttctggttaaacttatcatgttgattttgattggtttttcaatcgcatcctgggccattattatccagcgaacccgtattcttaacgcagcggcgcgtgaagccgaagcgtttgaagataaattctggtctggaatcgaactctctcgcctctatcaagagagtcaggggaaacgggataatctgactggttcggaacaaatcttttacagcgggttcaaagagtttgtgcgcctgcatcgtgccaatagccatgcgccggaagccgtagtggaaggggcgtcgcgtgctatgcgtatctccatgaaccgtgaacttgaaaatctggaaacgcacattccgttcctcggtacggttggctccatcagcccgtatattggtctgtttggtacggtctgggggatcatgcacgcctttatcgccctcggggcggtaaaacaagcaacactgcaaatggttgcgcccggtatcgcagaagcgttgattgcgacggcaattggtctgttcgccgcaattccggcggtaatggcttataaccgtctcaaccagcgcgtaaacaaactggaactgaattacgacaactttatggaagagtttaccgcgattctgcaccgccaggcgtttaccgttagcgagagcaacaaggggtaa

SEQ ID NO: 472497 - DNA, 429 bp, Shigella flexneri
atggccagagcgcgtggacgaggtcgtcgcgatctcaagtccgaaatcaacattgttccgttgctggacgtactgctggtgctgttgctgatctttatggcgacagcgcccatcatcacccagagcgtggaggtcgatctgccagacgctactgaatcacaggcggtgagcagtaacgataatccgccagtgattgttgaagtgtctggtattggtcagtacaccgtggtggttgagaaagatcgcctggagcgtttaccaccagagcaggtggtggcggaagtgtccagccgtttcaaggccaacccgaaaacggtctttctgatcggtggcgcaaaagatgtgccttacgatgaaataattaaagcactgaacttgttacatagtgcgggtgtgaaatcggttggtttaatgacgcagcctatctaa

SEQ ID NO: 472498 - DNA, 1275 bp, Shigella flexneri
gtgtcaaaggcaaccgaacaaaacgacaagctcaagcgggcgataattatttcagcagtgctgcatgtcatcttatttgcggcgctgatctggagttcgttcgatgagaatatagaagcttcagccggaggcggcggtggttcgtccatcgacgctgtcatggttgattcaggtgcggtagttgagcagtacaaacgcatgcaaagccaggaatcaagcgcgaagcgttctgatgaacagcgcaagatgaaggaacagcaggctgctgaagaactgcgtgagaaacaagcggctgaacaggaacgcctgaagcaacttgagaaagagcggttagcggctcaggagcagaaaaagcaggctgaagaagccgcaaaacaggccgagttaaagcagaagcaagctgaagtggcggcagcgaaagcggcggcagatgctaaagctgcggaagaagcagcgaagaaagcggctgcagacgcgaagaaaaaagcagaagcagaagccgccaaagccgcagccgaagcgcagaaaaaagccgaggtagccgctgcggcactgaagaagaaagcggaagcggcagaagcagctgcagctgaagcaagaaagaaagtggcaactgaagctgctgaaaaagccaaggcagaagctgagaagaaagcggctgctgaaaaggctgcagctgataagaaagcggcagcagagaaagctgcagctgataagaaagcggcagcagagaaagctgcagccgacaaaaaagcagcagaaaaagcggctgctgataaggcagcagctgataagaaagcagcggcagaaaaagccgccgcagacaaaaaagcggcagcggcaaaagcagcagctgaaaaagccgctgcagcaaaagctgccgcagaggcagatgatattttcggtgagctaagctctggtaagaatgcaccgaaaacggggggaggggcgaaagggaacaatgcttcgcctgccgggagtggtaatactaaaaacaatggcgcatcaggggccgatatcaataactatgccgggcagattaaatctgctatcgaaagtaagttctatgacgcatcgtcctatgcaggcaaaacctgtacgctgcgcataaaactggcacccgatggtatgttactggatatcaaacctgaaggtggcgatcccgcactttgtcaggctgcgttggcagcagctaaacttgcgaagatcccgaaaccaccaagccaggcagtatatgaagtgttcaaaaacgcgccattggacttcaaaccgtaa

SEQ ID NO: 472499 - DNA, 1293 bp, Shigella flexneri
atgaagcaggcattacgagtagcatttggttttctcatactgtgggcatcagttctgcatgctgaagtccgcattgtgatcgacagcggtgtagattccggtcgtcctattggtgttgttcctttccagtgggcggggcctggtgcggcacctgaagatattggcggcatcgttgctgctgacttgcgtaacagcggtaaatttaatccgttagatcgcgctcgtctgccacagcagccgggtagtgcgcaggaagtacaaccagctgcatggtccgcactgggcattgacgctgtagttgtcggtcaggtcactccgaatccggatggttcttacaatgttgcttatcaacttgttgacactggcggcgcaccgggtactgtacttgctcagaactcgtacaaagtgaacaagcagtggctgcgttatgctggtcataccgccagtgatgaagtgtttgaaaaactgaccggcattaaaggtgcgttccgtacccgtattgcctacgttgttcagaccaacggcggtcagttcccgtatgaactgcgcgtatctgactatgacggttacaaccagtttgtcgttcaccgttcaccgcagccgctgatgtctccggcgtggtcaccagacggttctaaactggcttatgtgaccttcgaaagcggtcgttcctcgctggttattcagacgctggcaaatggcgctgtacgtcaggtggcttcattcccgcgtcacaacggtgcacctgcattctcgccagacggcagcaaactggcattcgccttgtcgaaaaccggtagtctgaacctgtacgtaatggatttggcttctggtcagatccgccaggtgactgatggtcgcagtaacaataccgaaccgacctggttcccggatagccagaacctggcatttacttctgaccaggccggtcgtccgcaggtttataaagtgaatatcaacggcggtgcgccacaacgtattacctgggaaggttcgcagaaccaagatgcggatgtcagcagcgacggtaaatttatggtaatggtcagctccaatggtgggcagcagcacattgccaaacaagatctggcaacgggaggcgtacaagttctgtcgtccacgttcctggatgaaacgccaagtctggcacctaacggcactatggtaatctacagctcttctcaggggatgggatccgtgctgaatttggtttctacagatgggcgtttcaaagcgcgtcttccggcaactgatggacaggtcaaattccctgcctggtcgccgtatctgtga

SEQ ID NO: 472500 - DNA, 522 bp, Shigella flexneri; identical to SEQ ID NO: 460264

SEQ ID NO: 472501 - DNA, 792 bp, Shigella flexneri
atgagcagtaacttcagacatcaactattgagtctgtcgttactggttggtatagcggccccctgggccgcttttgctcaggcaccaatcagtagtgtcggctcaggctcggtcgaagaccgcgtcactcaacttgagcgtatttctaatgctcacagccagcttttaacccaactccagcaacaactttctgataatcaatccgatattgattccctgcgtggtcagattcaggaaaatcagtatcaactgaatcaggtcgtggagcggcaaaagcagatcctgttgcagatcgacagcctcagcagcggtggtgcagcggcgcaatcaaccagcagcgatcaaagcggtgcgacggcatcaacgacgccgacagctgatgctggtactgcgaatgctggcgcgccggtgaaaagcggcgatgcaaacacggattacaatgcagctattgcgctggtgcaggataaatcccgccaggatgacgcaatggtggcatttcagaatttcatcaaaaattaccctgattcaacttacctgccaaacgccaattattggctgggtcagttaaactacaacaagggtaaaaaagatgatgcggcgtactattttgcttcggtagtgaaaaactatccgaagtcaccaaaggctgctgatgcgatgtttaaagtcggcgtcatcatgcaggacaaaggtgacaccgcaaaagcgaaagccgtataccagcaggttatcagtaaataccctggtactgatggcgctaaacaggcacaaaaacgtctgaacgcgatgtaa

SEQ ID NO: 472502 - DNA, 264 bp, Shigella flexneri; identical to SEQ ID NO: 460013

SEQ ID NO: 472503 - DNA, 942 bp, Shigella flexneri
atgaagctgatacgcggcatacataatctcagccaggccccgcaagaagggtgtgtgctgactattggtaatttcgacggcgtgcatcgcggtcatcgcgcgctgttacagggcttgcaggaagaagggcgcaagcgcaacttaccggtgatggtgatgctttttgaacctcaaccactggaactgtttgctaccgataaagccccggcaagactgacccggctgcgggaaaaactgcgttaccttgcagagtgtggcgttgattacgtgctgtgcgtgcgtttcgacaggcgttttgcggcgttaaccgcgcaaaatttcatcagcgatcttttggtgaagcatttgcgcgtaaaatttcttgccgtaggtgatgatttccgctttggcgctggtcgtgaaggcgatttcttgttattacagaaagctggcatggaatacggcttcgatatcaccagtacgcaaactttttgcgaaggtggtgtgcgtatcagcagcaccgccgtgcgtcaggcgctggctgatgacaatctggctctggcagaaagtttactggggcacccgtttgccatctccgggcgtgtagtccacggtgatgaattagggcgcactataggtttcccgacggcgaatgtaccgctacgccgtcaggtttccccggtgaaaggggtttatgcggtagaagtgctgggcctcggtgaaaagccgttacccggcgtggcaaacatcggaacacgcccaacggttgccggtattcgccagcagctggaagtgcatttgttagatgttgcaatggacctttacggtcgccatatacaagtagtgctgcgtaaaaaaatacgcaatgagcagcgatttgcgtcgctggacgaactgaaagcgcagattgcgcgtgatgaattaaccgcccgcgaattttttgggctaacaaaaccggcttaa

SEQ ID NO: 472504 - DNA, 2817 bp, Shigella flexneri
atgagtgactataaatcaaccctgaatttgccggaaacagggttcccgatgcgtggcgatctcgccaagcgcgaaccgggaatgctggcgcgttggactgatgatgatctgtacggcatcatccgtgcggctaaaaaaggcaaaaaaaccttcattctgcatgatggccctccttatgcgaatggcagcattcatattggtcactcggttaacaagattctgaaagacattatcgtgaagtccaaagggctttccggttatgactcgccgtatgtgcctggctgggactgccacggtctgccgatcgagctgaaagtagagcaagaatacggtaagccgggtgagaaattcaccgccgccgagttccgcgccaagtgccgcgaatacgcggcgacccaggttgacggtcaacgcaaagactttatccgtctgggcgtgctgggcgactggtcgcacccgtatctgactatggacttcaaaactgaagccaacatcatccgcgcgctgggcaaaatcatcggcaatggtcacctgcacaaaggcgcgaagccggtgcactggtgcgtagactgccgttctgcactggcagaagcggaagttgagtattacgacaaaacttctccgtccattgacgtcgctttccaggcggtcgatcaggatgcgctgaaagcgaaatttggcgtaagcaacgttaacggcccaatctcgctggtgatctggaccactacgccgtggactctgcctgcgaaccgcgcaatctctattgcacctgatttcgactatgcgctggtgcagatcgacggtcaggccgtgattctggcgaaagatctggttgaaagcgtaatgcagcgtatcggcgtgaccgattacaccattctcggcacggtaaaaggtgcagagcttgagctgctgcgctttacccatccgtttatgggcttcgacgttccggcaatcctcggcgatcacgttaccctggatgccggtaccggtgccgttcacaccgcgcctggccacggcccggacgactatgtgatcggtcagaaatacggcctggaaaccgctaacccggttggcccggacggcacttatctgccgggcacttatccgacgctggatggcgtgaacgtcttcaaagcgaacgacatcgtcgttgcgctgctgcaggaaaaaggcgcgctgctgcacgttgagaaaatgcagcacagctatccgtgctgctggcgtcacaaaacgccgatcatcttccgcgcgacaccgcagtggttcgtcagcatggatcagaaaggtctgcgtgcgcagtcactgaaagagatcaaaggcgtgcagtggctcccggactggggccaggcgcgtatcgagtcgatggttgctaaccgtcctgactggtgtatctcccgtcagcgcacctggggcgtaccgatgtcactgttcgtgcacaaagacacggaagagctgcatccgcgtaccctcgaactgatggaagaagtggctaaacgcgttgaagttgacggcatccaggcgtggtgggatctcgatgcgaaagagatcctcggcgacgaagctgaccagtatgtgaaagtgccggatactctcgacgtatggtttgactccggatctacccactcttctgttgttgacgtgcgtccggaatttgccggtcacgcagcggacatgtatctggaaggttctgaccagcaccgtggttggttcatgtcttccctaatgatctccaccgcgatgaaaggcaaagcgccgtatcgtcaggtactgacccacggctttaccgtggatggtcagggtcgcaagatgtctaaatccatcggcaacaccgtttcgccgcaggatgtgatgaacaaactgggcgcggatattctgcgtctgtgggtggcatcaaccgactacaccggtgaaatggccgtttctgacgagatcctgaaacgtgctgccgatagctatcgtcgtatccgtaacaccgcgcgcttcctgctggcaaacctgaatggttttgatccagcaaaagatatggtgaaaccggaagagatggtggtactggatcgctgggccgtaggttgtgcgaaagcggcacaggaagacatcctcaaggcgtacgaagcatacgatttccacgaagtggtacagcgtctgatgcgcttctgctccgttgagatgggttccttctacctcgacatcatcaaagaccgtcagtacaccgccaaagcggatagcgtggcgcgtcgtagctgccagactgcgctgtatcacatcgctgaagcgctggtgcgctggatggcaccaatcctctccttcaccgctgatgaagtgtggggctatctgccgggcgaacgtgaaaaatacgtcttcaccggtgagtggtacgaaggcctgtttggtctggcagacagtgaagcaatgaacgatgcgttctgggacgagctgttgaaagtgcgtggcgaagtgaacaaagtcattgagcaagcgcgtgccgacaagaaagtgggtggctcgctggaagcggcagtaaccttgtatgcagaaccggaactggcggcgaaactgaccgcgctgggcgatgaattacgatttgtcctgttgacctccggcgctaccgttgcagactataacgacgcacctgctgatgctcagcagagcgaagtactcaaagggctgaaagtcgcgttgagtaaagccgaaggtgagaagtgcccacgctgctggcactacacccaggatgtcggcaaggtggcggaacacgcagaaatctgcggccgctgtgtcagcaacgtcgccggtgacggtgaaaaacgtaagtttgcctga

SEQ ID NO: 472505 - DNA, 495 bp, Shigella flexneri
atgagtcaatcgatctgttcaacagggctacgctggctgtggctggtggtagtcgtgctgattatcgatctgggcagcaaatacctgatcctccagaactttgctctgggggatacggtcccgctgttcccgtcgcttaatctgcattatgcgcgtaactatggcgcggcgtttagtttccttgccgatagcggcggctggcagcgttggttctttgccggtattgcgattggtattagcgtgctcctggcagtgatgatgtatcgctcgaaggccacgcagaagctaaacaatatcgcttacgcgctgattattggcggcgcgctgggcaacctgttcgaccgcctgtggcacggcttcgttgtcgatatgatcgacttctacgtcggcgactggcacttcgccaccttcaaccttgccgatactgccatttgtgtcggtgcggcactgatcgtgctggaagggtttttaccttccaaagcgaaaaaacaataa

SEQ ID NO: 472506 - DNA, 450 bp, Shigella flexneri
atgtctgaatctgtacagagcaatagcgccgtcctggtgcacttcacgctaaaactcgacgatggcaccaccgccgagtctactcgcaacaacggtaaaccggcgctgttccgcctgggcgatgcttctctttctgaagggctggagcaacacctgctggggctgaaagtgggcgacaaaaccaccttctcgctggagccagatgcggcgtttggcgtgccgtcaccggacctgattcagtacttctcccgccgtgaatttatggatgcaggcgagccagaaattggcgcaatcatgctttttaccgcaatggatggcagtgagatgcctggtgtgatccgcgaaattaacggcgactccattaccgttgatttcaaccatccgctggccgggcagaccgttcattttgatattgaagtgctggaaatcgatccggcactggaggcgtaa

SEQ ID NO: 472507 - DNA, 951 bp, Shigella flexneri
atgcagatcctgttggccaacccgcgtggtttttgtgccggggtagaccgcgctatcagcattgttgaaaacgcgctggccatttacggcgcaccgatatatgtccgtcacgaagtggtgcataaccgctacgtggtcgatagcttgcgcgagcgtggggctatctttattgagcagattagcgaagtgccggacggcgcgatcctgattttctccgcacacggtgtttctcaggcggttcgtaacgaagcgaaaagccgcgatttgacggtgtttgatgccacctgtccgctggtgaccaaagtgcatatggaagttgcccgcgccagtcgccgtggcgaagaatctattctcatcggccacgccgggcacccggaagtggaagggacgatggggcagtacagcaaccccgaagggggaatgtatctggtcgaatcgccagacgatgtgtggaaactgacggtcaaaaacgaagagaagctctcctttatgacccaaaccacgctgtcggtggatgacacgtctgatgtgatcgacgcgctgcgtaaacgcttcccgaaaattgtcggtccgcgcaaagatgacatctgctacgccacgactaaccgtcaggaagcggtacgcgccctggcagaacaggcggaagttgtgttggtggtcggttcgaaaaactcctccaactccaaccgtctggcggagctggcccagcgtatgggcaaacacgcgtttttgattgacgatgcgaaagatatccaggaagagtgggtgaaagaggttaaatgcgtcggcgtgactgcgggcgcatcggctccggatattctggtgcagaatgtggtggcacgtttgcagcagttgggtggtggtgaagccattccgctggaaggccgtgaagaaaatattgttttcgaagtgccgaaagagctgcgtgtcgatattcgtgaagtcgattaa

SEQ ID NO: 472508 - DNA, 915 bp, Shigella flexneri
atgcgtttacctatcttcctcgatactgaccccggcattgacgatgccgtcgccattgccgccgcgatttttgcccccgaactcgacctgcaactgatgaccaccgtcgcgggtaatgtctcggttgagaaaactacccgcaatgccctgcaactgctgcatttctggaatgcggagattccgctcgcccagggagccgctgtgccgctggtacgcgcaccgcgtgatgcagcatctgtgcacggcgaatcgggaatggctggctacgactttgttgagcacaaccgaaagccactcgggataccggcgtttctggcgattcgggatgccctgatgcgtgcaccagagcccgttaccctggtggccatcggcccgttaaccaatattgcgctgttacttttacaatgcccggaatgtaaaccgtatattcgtcgtctggtgatcatgggcggttctgctggtcgcggcaactgtacaccaaatgccgagtttaatatcgctgccgatccagaagcggctgcctgtgtcttccgtagcggcatcgaaattgtcatgtgcggtctggatgtcaccaatcaggcaatattaacccctgactatctcgctactttaccggagttgaatcgcaccggaaaaatgctccacgccctgtttagccactaccgtagcggcagtatgcaaagcggtctgcgaatgcacgatctctgcgccatcgcctggctggtgcgcccggacttattcaccctcaagccgtgttttgtcgcggtagaaactcaaggcgaatttacctcaggcacgacggtggttgatatcgacggttgcctgggcaaaccagccaatgtacaggtggcattggatctgaatgtaaaaggcttccaacagtgggtggctgaggtgctggctctggtgccgtaa

SEQ ID NO: 472509 - DNA, 822 bp, Shigella flexneri
atgcatgatgcaaacatccgcgttgccatcgcgggagccggggggcgtatgggccgccagttgattcaggcggcactggcattagaaggcgtgcagctgggcgcggcgctggagcgcgaaggatcttctttactgggcagcgacgccggtgagctggctggtgcagggaaaacaggcgttaccgtgcaaagcagtcttgatgcgataaaagatgattttgatgtgtttatcgattttacccgtccggaaggtacgctgaaccatctcgctttttgtcggcagcatggcaaagggatggtgatcggcactacggggtttgacgaagccggtaaacaggcaattcgtgacgccgccgccgatattgcgattgtctttgccgccaattttagcgttggcgttaacgtcatgcttaagctgctggagaaagcagccaaagtgatgggtgactacaccgatatcgaaattattgaagcacatcatagacataaagttgatgcgccgtcaggcaccgcactggcaatgggagaggcgatcgcccacgcccttgataaagatctgaaagattgcgcggtctacagtcgtgaaggccataccggtgaacgtgtgccaggtaccattggttttgctaccgtgcgtgcaggtgacatcgttggcgaacataccgcgatgtttgccgatattggcgagcgtctggagatcacccataaggcgtccagccgcatgacatttgctaacggtgcggtaagatcggctttgtggttgagtggtaaggaaagtggtctttttgatatgcgagatgtgcttgatctcaataatttgtaa

SEQ ID NO: 472510 - DNA, 1149 bp, Shigella flexneri
ttgattaagtcagcgctattggttctggaagacggaacccagtttcacggtcgggccataggggcaacaggttcggcggttggggaagtcgttttcaatacttcaatgaccggttatcaagaaatcctcactgatccttcctattctcgtcaaatcgttactcttacttatccccatattggcaatgtcggcactaatgacgccgatgaagaatcttctcaggtacatgcacaaggtctggtgattcgcgacctgccgctgattgccagcaacttccgtaataccgaagacctctcttcttacctgaagcgccataacatcgtggcgattgccgatatcgatacccgtaagctgacgcgtttactgcgcgagaaaggcgcacagaatggctgcattatcgcaggcgataacccggatgcggcgctggcgttagaaaaagcccgcgcgttcccaggtctgaacggcatggatctggcaaaagaagtgaccaccgcagaagcctatagctggacacaagggagctggacgttgaccggcggcctgccagaagcgaaaaaagaagacgagctgccgttccacgtcgtggcttatgattttggtgccaagcgcaacatcctgcggatgctggtggatagaggctgtcgcctgaccatcgttccggcgcaaacttctgcggaagatgtgctgaaaatgaatccagacggcatcttcctctccaacggtcctggcgacccggccccgtgcgattacgccattaccgccatccagaagttcctcgaaaccgatattccggtattcggcatctgtctcggtcatcagctgctggcgctggcgagcggtgcgaagactgtcaaaatgaaatttggtcaccacggcggcaaccatccggttaaagatgtggagaaaaacgtggtgatgatcaccgcccagaaccacggttttgcggtggatgaagcaacattacctgcaaacctgcgtgtcacgcataaatccctgttcgacggtacgttacagggcattcatcgcatcgataagccggcgttcagcttccagggtcaccctgaagccagccctggtccacacgacgccgcgccgttgttcgaccactttatcaagttaattgagcagtaccgtaaaaccgctaagtaa

SEQ ID NO: 472511 - DNA, 3222 bp, Shigella flexneri
atgccaaaacgtacagatataaaaagtatcctgattctgggtgcgggcccgattgttatcggtcaggcgtgtgagtttgactactctggcgcgcaagcatgtaaagccctgcgcgaagagggttaccgcgtcattctggtgaactccaacccggcgaccatcatgaccgacccggaaatggccgatgcgacctacatcgagccgattcactgggaagtggtacgcaagattattgaaaaagagcgcccggacgcggtgctgccaaccatgggcggtcagacggcgctgaactgcgcgctggagctggaacgtcagggcgtgttggaagagttcggtgtcaccatgattggtgccactgccgatgcgattgataaagcagaagaccgccgtcgtttcgacgtagcgatgaagaaaattggtctggaaaccgcgcgttccggtatcgcacacacgatggaagaagcgctggctgttgccgctgacgtgggcttcccgtgcattattcgcccatcctttaccatgggcggtagcggcggcggtatcgcttataaccgtgaagagtttgaagaaatttgcgcccgcggtctggctctctctccgaccaaagagttgctgattgatgagtcgctgatcggctggaaagagtacgagatggaagtggtgcgtgataaaaacgacaactgcatcatcgtctgctctatcgaaaactttgatgcgatgggcatccacaccggtgactccatcactgtcgcgccagcccaaacgctgaccgacaaagaatatcaaatcatgcgtaacgcctcgatggcggtgctgcgtgaaatcggcgttgaaaccggtggttccaatgtccagtttgcggtgaacccgaaaaacggtcgcctgattgttatcgaaatgaacccacgcgtgtcccgttcttcggcgctggcgtcgaaagcgaccggtttcccgattgctaaagtggcggcgaaactggcggtgggttacaccctagacgaactgatgaacgacatcactggcggacgtactccggcctccttcgagccgtccatcgactatgtggttactaaaattcctcgcttcaacttcgaaaaattcgccggtgctaacgaccgtctgaccactcagatgaaatcggttggcgaagtgatggcgattggtcgcacgcagcaggaatccctgcaaaaagcgctgcgcggcctggaagtgggcgcaactggcttcgacccgaaagtgagcctggatgacccggaagcgttaaccaaaatccgtcgcgaactgaaagacgcaggcgcagagcgtatctggtacatcgccgatgctttccgcgcgggcctgtctgtggacggcgtcttcaacctgactaacattgaccgctggttcctggtacagattgaagaactggtgcgtctggaagagaaagtggcggaagtgggcatcactggcctgaacgctgaattcctgcgccagctgaaacgcaaaggctttgccgatgcgcgcttggcaaaactggcgggcgtacgcgaagcggaaatccgtaagctgcgtgaccaatatgacctgcacccggtctacaagcgcgtggatacctgtgcggcagagtttgccaccgacaccgcttacatgtactccacttatgaagaagagtgcgaagcgaatccgtctaccgaccgtgaaaaaatcatggtgcttggcggcggtccaaaccgtatcggtcagggtatcgaattcgactactgctgcgtacacgcctcgctggcgctgcgtgaagacggttacgaaaccattatggttaactgtaacccggaaaccgtctctaccgactacgacacttccgatcgcctctacttcgagccggtaactctggaagatgtgctggaaatcgtgcgtattgagaagccgaaaggcgttatcgttcagtacggcggtcagaccccgctgaaactggcgcgtgcactggaagccgctggcgtaccggttatcggcaccagcccggatgctatcgaccgtgcggaagaccgtgaacgcttccagcatgcggttgaccgtctgaaactgaaacaaccggcgaacgccaccgttactgctattgaaatggcagttgagaaggcaaaagagattggctacccgctggtggtgcgtccgtcttacgttctcggcggtcgggcgatggaaatcgtctatgacgaagctgacctgcgtcgctacttccagacggcggttagcgtgtctaacgatgcgccagtgttgctggatcatttccttgatgacgcagtagaagttgacgtggatgccatctgcgacggcgaaatggtgctgattggcggcatcatggagcacatcgagcaggcgggtgtgcactccggtgactccgcatgttcgctgccagcgtacaccttaagtcaggaaattcaggatgtgatgcgccagcaggtgcagaaactggccttcgaattgcaggtgcgcggtctgatgaacgtgcagtttgcggtgaaaaacaacgaagtttacctgattgaagtaaacccgcgtgcggcgcgtactgttccgttcgtctccaaagccaccggcgtaccgctggcaaaagtggcggcgcgtgtgatggctggcaaatcgctggctgagcagggcgtaaccaaagaagttattccgccgtactactcggtgaaagaagtggtgctgccgttcaataaattcccaggcgttgacccgctgttagggccagaaatgcgctctaccggggaagtcatgggcgtgggccgcaccttcgctgaagcgttcgccaaagcgcagctgggcagcaactccaccatgaagaaacacggtcgtgcgctgctttccgtgcgcgaaggcgataaagaacgcgtggtggacctggcggcaaaactgctgaaacagggcttcgagctggatgcgacccacggcacggcgattgtgctgggcgaagcgggtatcaatccgcgtctggtaaacaaggtgcatgaaggccgtccgcacattcaggaccgtatcaagaatggcgaatatacctacatcatcaacaccacctcaggccgtcgtgcgattgaagactcccgcgtgatccgtcgcagtgcgctgcaatataaagtgcattatgacaccaccctgaacggtggtttcgctaccgcgatggcgctgaatgccgatgcgactgaaaaagtaatttcggtgcaggaaatgcacgcacagatcaaataa

SEQ ID NO: 472512 - DNA, 396 bp, Shigella flexneri
atgtgtgaaggatatgttgaaaaaccactctacttgttaatcgccgaatggatgatggctgaaaatcggtgggtgatagcaagagagatctctattcatttcgatattgaacacagcaaggcggttaataccctgacttatattctgtcggaagtcacagaaataagctgcgaagttaagatgatccctaataagctggaagggcggggatgccagtgtcagcgactggttaaagtggtcgatatcgatgagcaaatttacgcgcgcctgcgcaataacagtcgggaaaaattagtcggcgtaagaaagacaccgcgtattcctgccgttccgctcacggaacttaaccgcgagcagaagtggcagatgatgttgtcaaagagtatgcgtcgttaa

SEQ ID NO: 472513 - DNA, 591 bp, Shigella flexneri
gtgagctattacgcctttgaggggttaattccggtggttcacccgacggcgtttgtccatcccagtgccgtcttgattggcgatgtgattgtgggagccggtgtctacatcggcccactcgcctcactgcgtggtgactacgggcggttgatcgtgcaagcgggagccaatattcaggatggctgcattatgcatggctactgcgacactgacaccatcgttggggaaaacggccatatcgggcatggagcgatcctgcatggttgtgtgattggtcgcgatgcattggtcgggatgaacagcgtaattatggatggcgcggtcattggcgaagagagcattgttgccgcaatgagctttgtcaaagcaggctttagtggcgagaaacgccagttgttgatgggtacgccagcccgcgctgtacgcagtgttagtgacgacgagttacactggaaacggttgaataccaaagagtatcaggatcttgtcgggcgctgtcatgcatcgttacatgaaacgcagccactgaggcaaatggaggaaaatcgcccccgtttgcaggggacgacggatgtgacgcctaaacggtga

SEQ ID NO: 472514 - DNA, 786 bp, Shigella flexneri
atgagtgaatcattacatctgacccgcaatggatcaattctggaaattacccttgatcgcccaaaagcgaatgctattgatgcaaaaaccagctttgaaatgggcgaagtatttctaaatttccgtgacgatccgcaattacgtgtcgccattattaccggtgccggagagaaattcttttccgcgggctgggatttaaaagcggcagcagaaggcgaagcaccggatgctgactttggcccgggtggttttgcgggattaaccgaaattttcaatctcgacaaaccagttatcgcagctgtgaacggctacgcctttggcggcggtttcgaactggcgctggcggcagattttattgtttgtgccgataacgccagcttcgccctgccggaagccaaactgggcatcgttcctgacagcggcggtgtgctgcgtctgccgaagatcctgccgcctaccatcgtcaatgaaatggtgatgaccggcagacgaatgggcgcagaagaggcgctgcgttgggggatagtcaaccgcgtggttagccaggcggaactgatggataacgcccgcgaactggctcagcagctggttaacagcgccccgctggcgattgcggcgctgaaagagatctaccgcaccaccagcgaaatgccggtagaagaagcgtatcgctatattcgcagcggcgtgttgaaacactatccatcggttctgcattcggaagatgccattgaagggccgctggcgtttgccgagaagcgcgatccggtgtggaaaggacgttaa

SEQ ID NO: 472515 - DNA, 1554 bp, Shigella flexneri
atggatatcattggcggacaacatctacgtcaaatatgggacgatctggcggacgtttacggtcataaaacggcgctgatttgtgaatccagcggcggagtcgttaaccggtatagttatcttgagttaaatcaggagattaaccgcacggcaaacctgttttatacgctggggattcgcaaaggcaacaaggttgcactacatctcgacaactgcccggaatttatcttttgctggttcgggctggcaaaaattggcgcgattatggtgccgattaacgcccgcctgttacgcgaggaaagcgagtggatcttgcaaaatagccaggcgtgcctgctggtgaccagtgcgcaattttatcctatgtatcaacagattcagcaggaagatgccactcaattgcggcacatttgcctgacagatgtggcacttcccgctgatgatggagtgagttcatttactcaactgaaaaatcaacaacctgccaccttgtgctatgcaccgccgctatcgactgacgatacggcggaaattctcttcacctccggcaccacctcccgaccgaaaggtgtggtgattacccattacaacctgcgcttcgctggatattactccgcctggcagtgtgcactgcgtgacgatgacgtctacatgacggtaatgcctgcgtttcatatcgattgccagtgtactgcggcgatggcggcgttttctgccggggccacctttgtgctggtcgagaaatacagcgcccgcgccttctggggacaggcgcagaagtaccgcgccaccattaccgaatgtattccgatgatgatccgtacgttgatggtgcagccgccttcagcgaacgatcggcaacaccgcctgcgggaagtgatgttttatctcaacttgtcggagcaggaaaaagacgcattttgtgaacgcttcggcgttcgcttgctgacgtcttatgggatgacggaaaccattgtgggcattatcggcgatcgccctagcgataaacgacgctggccgtcgattggtcgggcggggttttgctacgaagcggagatccgcgacgatcacaatcgcccgctcccggcaggtgagatcggtgaaatctgtattaaaggcgtaccagggaaaaccatcttcaaagagtattttctcaacccgaaagccactgcgaaagtgctggaagccgacggctggctacataccggcgataccggataccgcgacgaagaaggctttttttatttcgtcgatcgccgctgcaatatgatcaaacgcggtggcgagaatgtctcctgcgtggagctggaaaatatcatcgccacccatccgaaaattcaggacatcgtggttgtgggtattaaagattcgattcgcgatgaagccatcaaagcatttgtggtgctgaatgaaggtgaaacattgagcgaagaggaattttttcgcttctgcgaacaaaatatggcgaaatttaaagtgccctcttatctggagatcagaaaagatctgccacgtaattgctcggggaaaataattagaaagaatctgaaataa

SEQ ID NO: 472516 - DNA, 1218 bp, Shigella flexneri
atggatcatctacccatgccgaaattcggaccgctggccggattgcgcgttgtcttctccggtatcgaaatcgccggaccgtttgccggacaaatgttcgcagaatggggcgcggaagttatttggatcgagaacgtcgcctgggccgacaccattcgcgttcaaccgaactacccgcagctctcccgccgcaatttgcacgcgctgtcgttaaatattttcaaagatgaaggccgcgaagcgtttctgaaattaatggaaaccaccgatatcttcatcgaagccagtaaaggtccggcctttgcccgtcgtggcattaccgatgaagtactgtggcagcacaacccgaaactggttatcgctcacctgtccggttttggtcagtacggcaccgaggagtacaccaatcttccggcctataacaccatcgcccaggccttcagtggttacctgattcagaacggtgatgttgaccagccaatgcctgccttcccgtataccgccgattacttttctggcctgaccgccaccacggcggcgctggcagcactgcataaagtgcgtgaaaccggtaaaggcgaaagtatcgacatcgccatgtatgaagtgatgctgcgtatgggccagtacttcatgatggattacttcaacggcggcgaaatgtgcccgcgcatgagcaaaggtaaagatccctactacgccggttgcggtctgtataaatgtgccgacggctacatcgtgatggaactggtgggcattacccaaattgaagagtgctttaaagatattggcctcgcacatctactcggtacgccggaaatcccggaaggcactcagcttatccaccgtatcgaatgcccttacggcccactggtagaagaaaaactcgatgcctggctggcggcacataccatcgcagaagttaaagaacgctttgccgaactgaatatcgcctgtgccaaagtactgaccgtaccggaactggaaagcaatccacagtatgttgcccgtgaatcaatcactcagtggcaaacgatggatggtcgcacctgcaaagggccgaacatcatgccgaaattcaaaaataaccccggacaaatctggcgcggaatgccctcacatggcatggacacggctgccattttgaaaaatatcggctacagcgaaaacgacattcaggagttggtcagcaaaggtctggccaaagttgaggactaa

SEQ ID NO: 472517 - DNA, 1143 bp, Shigella flexneri
atggattttaatttaaatgatgagcaggaactgtttgtcgccggtatccgcgaactgatggccagcgaaaactgggaggcctattttgccgagtgcgaccgtgacagcgtctacccggaacgttttgtcaaagcactggcggatatgggtatcgacagtctgctgatccctgaagagcacggtggtctggacgcggggtttgttactctcgccgccgtgtggatggagctgggacgtctgggggcaccaacctatgtactgtaccagctgccgggcgggttcaataccttcctgcgcgaaggcacacaagagcagatcgacaagattatggctttccgcggcaccggtaagcagatgtggaactcagcgattaccgaaccgggcgcgggctccgacgtgggtagcctgaaaacgacttatacccgtagaaatggtaagatttatcttaatggtagtaagtgttttattaccagtagcgcctacaccccgtacatcgtggtgatggcgcgcgacggggcttctccggacaaacctgtctacaccgaatggtttgttgatatgagcaaaccgggcatcaaagtgaccaaacttgagaagctcggtctgcgtatggatagctgctgtgaaatcacctttgacgatgtggaactggacgagaaagacatgttcggtcgggaaggtaacggctttaaccgcgtcaaagaagagttcgaccatgaacgtttcctggtagccctgaccaactacggtacggcgatgtgcgcctttgaagatgcggcgcgctacgccaaccagcgcgtgcagtttggcgaggctattggtcgtttccagttgattcaggaaaaattcgcccacatggcgatcaaattaaactccatgaaaaacatgctgtatgaagcagcgtggaaagcagacaacggcaccatcacctctggcgatgcagcgatgtgcaaatacttctgcgccaatgcggcatttgaagtggtggatagcgcaatgcaggtgctgggcggtgtcgggattgcgggcaaccaccgcatcagccgcttctggcgtgacctgcgtgtagaccgcgtttccggaggatctgacgaaatgcagatcctgacgctgggtcgtgcggtgctgaagcaataccgctaa

SEQ ID NO: 472518 - DNA, 1515 bp, Shigella flexneri
atgaagaatgaaaagagaaaaacgggaatagaaccgaaggttttctttccgccattaataatcgtcggcatactttgttggcttacagtcagagatctggatgcggcgaatgtcgttattaatgctgtattcagttacgtcaccaatgtatggggatgggcatttgaatggtatatggtggtgatgcttttcggttggttctggctggtgtttggcccgtatgccaaaaagcgtttaggtaacgaaccgccagaatttagcaccgccagttggatctttatgatgttcgcctcctgtacgtctgctgccgtactgttctggggatcgattgagatctactactacatctccaccccgccgtttggcttagaaccgaactcgacaggagcgaaagagttggggctggcttacagcttgttccactggggacctctgccgtgggccacttacagcttcctttcagtcgccttcgcttacttcttctttgtccgcaaaatggaagtgattcgccccagctcgacactggtgccgctggtaggtgaaaaacacgccaaagggttgttcggtaccatcgtcgacaacttctatctcgtcgccttgatcttcgcgatgggtaccagtctgggccttgccacgccgctggtgaccgagtgtatgcaatggttgtttggcattccgcataccctgcaactggacgctatcatcattacctgctggattatcctcaacgccatttgcgtcgcttgcggtctgcaaaaaggggtacgtatcgccagtgacgtgcgtagttacctgagcttcctgatgctgggttgggtgttcatcgtcagcggtgccagcttcatcatgaactacttcaccgattcggtggggatgttgctgatgtatctgccgcgcatgttgttctataccgatcccatcgctaaaggcggcttcccgcagggctggaccgtgttctactgggcatggtgggtgatttacgccatccagatgagtatcttcctcgcccgcatctcccgtggtcgtactgtgcgtgaactgtgcttcggcatggtgatggggctgacagcatccacctggatcctgtggaccgtgctcggtagtaacactctgctgttgatggataaaaacatcatcaacattccaaatctgatcgaacagtacggtgtggcgcgcgccatcatcgaaacctgggccgctctgccactcagcaccgccaccatgtggggcttcttcatcctctgctttattgccaccgttacgctggttaacgcctgctcttataccctggcgatgtctacttgccgcgaagtacgcgatggtgaagaaccaccgctgctggtgcgtatcggttggtcaattctggttggcattatcggtattgttctgctggcgctcggcggcctgaaaccgattcaaaccgccattatcgccggaggatgcccgctgttcttcgtcaacattatggtgacgctctcctttattaaagacgcgaaacagaactggaaagattaa

SEQ ID NO: 472519 - DNA, 771 bp, Shigella flexneri
atgaagattattacttgctataagtgcgtgcctgatgaacaggatattgcggtcaataatgctgatggttcattagacttcagcaaagccgatgccaaaataagccaatacgatctcaacgctattgaagcggcttgccagctaaagcaacaggcagcagaggcgcaggtgacagccttaagtgtgggcggtaaagccctgaccaacgccaaagggcgtaaagatgtgctatcgcgcggcccggatgaactgattgtggtgattgatgaccagttcgagcaggcactgccgcaacaaacggcgagcgcactggctgcagccgcccagaaagcaggctttgatctgatcctctgtggcgatggttcttccgacctttatgcccagcaggttggtctgctggtgggcgaaatcctcaatattccggcagttaacggcgtcagcaaaattatctccctgacggcagataccctcaccgttgagcgcgaactggaagatgaaaccgaaaccttaagcattccgctgcctgcggttgttgctgtttccactgatatcaactccccacaaattccttcgatgaaagccattctcggcgcggcgaaaaagccagtccaggtatggtcggcggcggatattggttttaacgccgtggacgcctggtctgaacaacaggttgccgcgccgaaacagcgcgagcgtcagcgcatcgtgattgaaggcgacggcgaagaacagatcgccgcatttgctgaaaatcttcgcaaagtcatttaa

SEQ ID NO: 472520 - DNA, 792 bp, Shigella flexneri
atgaacacgttttctcaagtctgggtattcagcgataccccctctcgtctgccggaactgatgaacggtgcgcaggctttagctaatcaaatcaatgcctttgtcctcaatgatgccgacggcgcacaggcaatccagctcggcgctaatcatgtctggaaattaaacggcaaaccggacgatcggatgatcgaagattacgccggtgtcatggctgacactattcgccagcacggcgctgacggtctggtgctgttgccaaacacccgtcgcggcaaattactggcggcaaaactgggttatcgccttaaagcggcggtgtctaacgatgccagcaccgtcagcgtacaggacggtaaagcaacagtgaaacacatggtttacggcggtctggcgattggcgaagaacgcattgccacgccgtatgcggtactgaccatcagcagcggcacgttcgatgcggctcagccagacgcgtcacgcactggcgaaacgcacaccgtggagtggcaggctccggctgtggcgattacccgcacggcaacccaggcgcgccagagcaacagcgtcgatctcgacaaagcccgtctggtggtcagcgtcggtcgcggcattggcagcaaagagaacattgcgctggcagaacagctttgcaaggcgataggtgcggagttggcctgttctcgtccggtggcagaaaacgaaaaatggatggagcacgaacgctatgtcggtatctccaacctgatgctgaaacctgaactgtacctggcggtggggatctccgggtag

SEQ ID NO: 472521 - DNA, 1287 bp, Shigella flexneri
atgtccgaagatatctttgacgccatcatcgtcggtgcagggcttgccggttcggttgccgcactggtgctcgcccgcgaaggggcgcaagtgttagttatcgagcgtggcaattccgcaggtgccaagaacgttactggcgggcgtctctatgcccacagtctggaacacattattccaggtttcgccgattccgcccccgtagaacgcctgatcacccatgaaaaactcgcgtttatgacggaaaagtcagcgatgactatggactactgcaacggtgacgaaacctcgccatcccagcgttcttactccgttttgcgcagtaaatttgatgcctggttgatggagcaggccgaagaagcgggcgcgcagttaattaccgggatccgcgtcgataacctcgtacagcgcgatggcaaagtcgtcggtgtagaagccgatggcgatgtgattgaagcgaaaacggtgctccttgctgatggggtgaactccatccttgccgaaaagttggggatggcaaaacgcgttaaaccgacggatgtggcggttggcgtgaaggaactgatcgagttaccgaagtcggtaatcgaagaccgttttcagttgcagggtaatcagggcgcggcttgtctgtttgcgggatcacccaccgatggcctgatgggcggcggcttcctttataccaatgaaaataccctgtcgctggggctggtttgtggtctgcatcatctgcatgacgcgaaaaaatcggtgccgcaaatgctggaagatttcaaacagcatccggccgttgcaccgctgatcgcgggcggcaagctggtggaatattccgctcacgtagtgccggaagcaggcatcaacatgctgccggagctggtcggtgacggcgtattgattgccggtgatgccgccggaatgtgtatgaacctcggttttaccattcgcggtatggatctggcgattgccgccggggaagctgcagcaaaaaccgtgctttcagcgatgaaaagcgacgatttcagtaagcaaaaactcgcggaatatcgtcagcatctggagagtggcccgctgcgcgatatgcgcatgtaccagaaactaccggcgttccttgataacccacgcatgtttagcggcaacccggaactggcggtgggcgtggcgcgtgacctgttcaccattgacggcagtgcgccggaactgatgcgcaagaaaatcctccgccacggcaagaaagtgggcttcatcaatctgatcaaggatggcatgaaaggagtgaccgttttatga

SEQ ID NO: 472522 - DNA, 288 bp, Shigella flexneri
atgacttctcccgtcaatgtggacgtcaaactgggcgtcaataaattcaatgtcgatgaagagcatccgcacattgttgtgaaggccgatgctgataaacaggtgctggagctgctggtgaaagcgtgccccgcaggtctgtacaagaagcaggatgacggcagtgtgcgcttcgattacgccggatgtctggagtgcggcacctgtcgcattctggggctggggtcggcgctggaacagtgggaatacccgcgcggcacctttggtgtggagttccgttacggctga

SEQ ID NO: 472523 - DNA, 1419 bp, Shigella flexneri
atgcaaccgtccagaaactttgacgatctcaaattctcctctattcaccgccgcattttgctgtggggaagcggtggtccgtttctggatggttatgtactggtaatgattggcgtggcgctggagcaactgactccggcgctgaaactggacgctgactggattggcttgctgggcgcgggaacgctcgccgggctgttcgttggcacatcgctgtttggctatatctccgataaagtcggacggcgcaaaatgttcctcattgatatcatcgccatcggcgtgatatcggtggcgacgatgtgtgtttcatcccccgtcgaactgttggtgatgcgggtactcatcggcattgtcatcggtgcagattatcccatcgccacttcgatgatcaccgagttctccagtacccgtcagcgggcgttttccatcagctttattgccgcgatgtggtatgtcggcgcgacctgcgccgatctggtcggctactggctttatgatgtggaaggtggttggcgctggatgctgggtagcgcggcgatcccttgtttgttgattttgattggtcgattcgaactgccagaatctccccgctggttattacgcaaagggcgagtaaaagagtgcgaagagatgatgataaaactgtttggcgaaccggtggctttcgatgaagagcagccgcagcaaacccgttttcgcgatctgtttaatcgccgccattttccttttgttctgtttgttgccgccatctggacctgccaggtgatcccaatgttcgccatttacacctttggcccgcaaatcgttggttcgttgggattgggggttggcaaaaacgcggcactagggaatgtggtgattagcctgttctttatgctcggctgtattccgccgatgctgtggctaaacactgccggacggcgtccattgttgattggcagctttgccatgatgacgctggcgctggcggttttggggctaatcccggatatggggatctggctggtagtgatggcctttgcggtgtatgcctttttctctggcgggccgggtaatttgcagtggctctatcctaatgaactcttcccgacggatatccgcgcctctgccgtgggcgtgattatgtccttaagtcgtattggcaccattgtttcgacctgggcactgccgatatttatcaataattacggtatcagtaacacgatgctaatgggggcgggtatctcgctgtttggcttgttgatttccgtagcgtttgccccggagactcgaggaatgtcactggcgcagaccagcaatatgacgatccgcgggcagagaatgggattatttgttcagatttctctcttttctgaatcaatattattagactggccccctgaatctccagacaaccagtatcacttatttaagtga

SEQ ID NO: 472524 - DNA, 258 bp, Shigella flexneri; identical to SEQ ID NO: 5052

SEQ ID NO: 472525 - DNA, 1359 bp, Shigella flexneri; identical to SEQ ID NO: 463076

SEQ ID NO: 472526 - DNA, 366 bp, Shigella flexneri
gtgcacgtccgcatcccgtcagcactgacggaagaagccctggagcagatcggtcagttgtacgccatagaggcggatataaggggaatgccggcagagcagcggcttgctgaacgtcagcgaaaaacgaaaccgctgttgaaatccctggaaagctggttgcgtgaaaagatgaagaccctgttcttcggctctggccatggtggtgagcggggagcgctactgtacagcctgatcgggacgtgcaaactgaatgacgtggatccagaaagctaccttcgccatgtgcttggcgtcatagcagactggccggtcaaccgggtcagcgaactgcttccgtggcgcatagcactgccagctgaataa

SEQ ID NO: 472527 - DNA, 1008 bp, Shigella flexneri
atgaacgacatctcttctgacgacatcttcctgctgaaacagcgcctggccgaacaggaagcgctgatccacgccctgcaggaaaagctgagcaaccgggagcgcgaaatagaccatctgcaggcgcagctggataaactccgccggatgaacttcggcagtcgttccgaaaaagtctcccgccgtatcgcacaaatggaagccgatctgaaccggcttcagaaagagagcgatacgctgactggtagggtgtatgacccggcagtacagcgtccgttgcgtcagacccgcacccgtaagccgttccctgaatcactaccccgtgacgaaaagcgactgttgcctgcggcgccgtgctgcccgaactgcggcggttcactgagctatctgggcgaggataccgccgaacagctggagttgatgcgtagcgccttccgggttatccggacggtacgggaaaaacatgcctgtactcagtgcgataccatcgtgcaggcacctgcaccttcgcggcccatcgagcggggtatcgccggaccggggctgctggcccgcgtgctgacctcgaagtatgcagagcacaccccgctgtatcgccagtcagaaatatacggccggcaaggtgtggagctgagccgttcactgctgtcgggctgggtggatgcatgctgccggctgctgtctccgctggaagaggcgcttcatggctatgtcatgactgacggcaaactccatgccgatgataccccggtccaggtactgctgccgggtaataagaagacgaagaccgggcggttgtgggcgtatgttcgtgatgaccgcaatgccgggtcagcgttggcacctgcagtgaggttcgcttacagcccggacagaaaaggcatccatccgcagactcatcttgcttgcttcagcggtgtgctgcaagcggatgcgtacgccgggttcaacgagctgtatcgcaatggtgggataacggaagctgcctgctgggctcatgcccgctga

SEQ ID NO: 472528 - DNA, 348 bp, Shigella flexneri
atgatcccgttaccttccgggaccaaaatttggctggttgccggtatcaccgatatgagaaatagcttcaacggcctggctgcgaaagtacaaacggcgctgaaagacgatcccatgtccggccatattttcattttccggggccgcagcggcagtcaggttaaactgctgtggtccaccggtgacggactgtgcctcctgaccaaacggctggagcgtgggcgcttcgcctggccgtcagcccgtgatggcaaagtgttccttacgcaggcgcagctggcgatgctgctggaaggtatcgactggcgacagcccaagcggctgctgacctccctgaccatgctgtaa

SEQ ID NO: 472529 - DNA, 390 bp, Shigella flexneri
gtgtcagatatgcagaaaaatgtgactcccggcaggcgaaaaggctgccctaattatcctcccgaatttaaacagctgctcgttgctgcctcctgtgaacccgggatatccatctcaaaacttgctcttgaaaatggcattaacgccaatctgttgttcaaatggcgacaacaatggcgcgagggaaagctgctattaccttcttcagagagcccccagctacttcctgtgactctcgatgcagctgccgaacagccagaatcgctcgcagaggacccggaaaccctcagtatcagctgtgaggtaacgttccggcacgggacgctccgcttcaatggcaatgtcagcgaaaagctcctgactctgctgatacaggaactgaagcgatga

SEQ ID NO: 472530 - DNA, 237 bp, Shigella flexneri; identical to SEQ ID NO: 16015

SEQ ID NO: 472531 - DNA, 435 bp, Shigella flexneri; identical to SEQ ID NO: 463073

SEQ ID NO: 472532 - DNA, 402 bp, Shigella flexneri; identical to SEQ ID NO: 9339

SEQ ID NO: 472533 - DNA, 570 bp, Shigella flexneri; identical to SEQ ID NO: 36787

SEQ ID NO: 472534 - DNA, 201 bp, Shigella flexneri; identical to SEQ ID NO: 7224

SEQ ID NO: 472535 - DNA, 210 bp, Shigella flexneri; identical to SEQ ID NO: 463070

SEQ ID NO: 472536 - DNA, 207 bp, Shigella flexneri
atgaataccccagtttcgctgatggatgaccagatggtcaacatggcgtttatcactcaactgaccggcttaaccgataagtggttttacaagctcatcaaggatggtgcctttccggcccccatcaaactcggccgcagctcccgatggctgaaaagtgaagtggaagcctggttgcaggcgcgtattgcacaatcccgtccgtaa

SEQ ID NO: 472537 - DNA, 573 bp, Shigella flexneri; identical to SEQ ID NO: 7168

SEQ ID NO: 472538 - DNA, 216 bp, Shigella flexneri; identical to SEQ ID NO: 7167

SEQ ID NO: 472539 - DNA, 1020 bp, Shigella flexneri; identical to SEQ ID NO: 6124

SEQ ID NO: 472540 - DNA, 873 bp, Shigella flexneri
atgaatccgtctgatgccattgaggcaattgaaaaaccgctctcctccctgccttactcactttcccgtcacatcctggaacatctgcgcaaactcaccagtcacgaacccgtgattggcattatgggtaaaagcggggccggtaaatcttcactctgtaatgcactgtttcagggggaggtcacaccggtcagtgatgttcacgccggcacccgggaagtgcagcgcttccgtctgagtggtcacggtcacagcatggttatcactaacctgcccggggtgggcgagagccgggacagggatgcagagtatgaagccctgtaccgtgacattctgcctgaactggacctggtgctgtggctgattaaagccgatgaccgggccctgtctgtggatgagtatttctggcgacacatcctgcagtgcggacatcagcaggtgctgtttgtggtgacacaggccgacaaaacggagccctgccatgaatgggatatggccggcattcagccctctcccgcacaggcacagaacattcgcgaaaaaacggaggcggtattccgtctgttccggcctgtacatccggttgtggccgtatcggcccgcaccggctgggaactggatacgctggtcagtgcgctcatgacagcgcttcccgaccatgccgccagtcccctgatgacccgcctgcaggacgagctgcgcacggaatctgtccgcgctcaggcccgtgagcagtttaccggtgcggtggaccggatatttgacacagcggagagcgtctgtgttgcctctgttgcacgcacggttctgcgtgccgtccgtgacacagtggtctctgttgcccgcgcggtatggaactggatcttcttctga

SEQ ID NO: 472541 - DNA, 3123 bp, Shigella flexneri
atgaaacgacatctgaatacctgctacaggctggtatggaatcacattacgggcgctttcgtggttgcctccgaactggcccgcacacggggtaaacgtggcggtgtggcggttgcactgtctcttgccgcggtcacgtcactcccggtgctgtctgctgacatcgttgtgcacccgggtgaaacagtgaatggcggaacactggtaaaccatgacaaccagtttgtatccggaacagctgatggcgtgactgtcagtaccgggcttgagctggggccggacagtgacgaaaacaccggcgggcaatggataaaagcgggtggcacaggcagaaacaccactgtcaccgcaaatggtcgtcagattgtgcaggcaggaggaactgccagtgatacggttattcgtgatggcggagggcagagccttaacggactggcggtgaacaccacgctggataacagaggtgagcagtgggtacacgggggagggaaagctgccggtacaattattaaccaggatggttaccagaccataaaacatggcggactggcaaccggaaccatcgtcaacaccggtgcagaaggtggtccggagtctgaaaatgtgtccactggtcagatggtcggggggactgctgaatccaccaccatcaacaacaatggccgacaggttatctggtcttcgggggtatcccgggacactctcatttacacaggcggtgaccagacggtacacggagaggcacataatacccggctggagggaggaaaccagtatgtgcacaaatacggacttgcgctgaacacagtaattaacgaggggggctggcaggttgttaaggcaggtggtactgccggtaacaccaccataaatcagaacggcgagctgaaggttcatgccggcggagaagcgtctgatgtcacccagaacacgggcggtgcactggttaccagtacagctgcaaccgtcaccggcacaaaccgtctgggagcattctccgttgtggcgggtaaggctgataatgtcgtactggaaaatggcggacgtctggatgtgctgagcggacacacagccactaatacccgtgtggatgatggcggaacgctggatgtccgcaacggtggtgccgccaccaccgtatccatggggaatggcggtgtactgctggccgattccggggccgctgtcagtggtacccggagcgacggaacggcattccgtatcggaggcggtcaggcggatgccctgatgctggaaaaaggcagttcattcacgctgaacgccggtgatacggccacggataccacggtaaatggcggactgttcactgccagagggggctcgctggcgggcaccaccacgctgaataacggtgccacgcttaccctttccgggaaaacggtgaataacgataccctgaccatccgtgaaggtgatgcactcctgcagggaggcgctcttaccggtaacggcagggtggaaaaatcaggaagtggcacactcactgtcagcaacaccacactcacccagaaagccgtcaacctgaatgaaggcacgctgacgctgaacaacagtaccgtcaccacggatgtcatcgctcagcgcggcacggccctgaagctgaccggcagcacagtgctgaacggtgccattgaccccacgaatgtcaccctgacatccggtgccacctggaatatccccgataacgccacggttcagtcggtggtggatgacctcagccatgccggacagattcatttcacctccgcccgcacagagaagttcgttccgacaactctgcaggtgaaaaacctgaacggacagaatggcaccatcagcctgcgtgtacgcccggagatggcgcagaacaatgctgacagactggtcattgacggtggcagggcaaccggaaaaaccatcctgaatctggtgaacgccggcaacagtggtacggggctggcgaccaccggtaagggtattcaggtggttgaggccattaacggtgccaccacggaggaaggggcttttgtccaggggaatatgctgcaggccggggcctttaactacaccctcaaccgggacagtgatgagagctggtatctgcgcagtgaagaacgttatcgtgctgaagtccccctgtacgcctccatgctgacacaggcaatggactatgaccggattctggcaggctcacgcagccatcagaccggtgtaaacggtgaaaataacagcgtccgtctcagcattcagggcggccatctcggtcacgataacaacggcgatattgcccgtggggccacgccggaaagcagcggcagctatggcttcgtccgcctggagggtgacctgctcagaacagaggtcgccggtatgtcactgacgacaggagtgtatggtgctgcaggccattcttccgttgatgttaaggatgatgacggctcccgcgccggcacggtccgggatgatgccggcagcctgggcggatatatgaacctgacacacacctcctccggcctgtgggctgacattgtggcacagggaacccgccacagtatgaaagcgtcatcgggcaataacgacttccgcgcacggggctggggctggctgggctcactggaaaccggtctgcccttcagtatcactgacaacctgatgctggagccacggctgcagtacacctggcaggggctttcgctggatgacggtaaggacaacgccggttatgtgaagttcgggcatggcagtgcacaacatgtgcgtgccggtttccgtctgggcagccacaacgatatgacctttggtgaaggcacctcatcccgtgcccccctgcgtgacagtgcaaaacacagtgtgcgtgaactgccggtgaactggtgggtacagccttccgttatccgcaccttcagctcccggggtgatatgcgtgtggggacctccaccgcaggcagcgggatgacgttctctccctcacagaatggcacttcactggatctgcaggccggactggaagcccgtgtccgggaaaatatcaccctgggcgttcaggccggttatgcccacagcatcaacggcagcagcgctgaaggttatagcagtcaggccacgctgaatgtgaccttctga

SEQ ID NO: 472542 - DNA, 2517 bp, Shigella flexneri
atgttacagatagtcggcgcgctgattctgctgatcgcaggatttgccattcttcgccttttgttcagagcattaaccagcacagcgtctgcgctggcagggttcgtattgctgtgtctgttcggcccggctttactggctggctatatcactgaacgcataacccggttattccatattcgctggctggcaggcgtatttctgacgattgccggaatgattatcagcttcatgtggggacttgatggtaaacatatcgcactggaggctcatacttttgactctgtaaaatttattctgaccaccgctctcgccgctggtctgctggctcttcccgtgcagataagaaccattcagcagaacgggctcacacctgaagatatcagcaaggaaattaacgggtattactgctgtttttatactgcttttttccttatggcgtgttctgcatacgcaccattgatcgcattgcagttcgatatttcaccctcactgatgtggtggggcgggttgttgtactggctggctgcattagtggcgctgctatgggcggccagccagatccaggcgctgaaaagactgaccagtgccatccgccagacactggaagaacaaccggtgctcaacagtaaatcgtggctgagcagtttgcaaaacgattacagccttcctgaaacgctgacggagtgcatctggctgacactcatttcacaacggatttcccggggagaactgagggaatttgaactggcagacggaaactggctactggacaatgcctggtatgaaagaaacatggcgggtttcaacgaaaagctgagagagagcctgtcatttacccctgatgaactgaaaaccctcttccggaaccgcctgaatttatcaccggaagcgaatgacgattttctcgatcgttgcctggacggcggtgactggtaccccttttcagaaggccgccgttttgtatcattccaccacgtggatgagcttcgtatctgtgcctcctgcgggctgacagaagtacatcatgccccggaaaatcataagccggatccggaatggtactgctcctctctttgtcgcgaaacagaaacactgtgtcaggacatttatgaacgttcttacaccggttttatttccgatgcaacggcgaatggtctgattctcatgaaactgccggaaacctggagtacaaatgagaaaatgtttgcttccggagggcagggacatgggtttgccgctgaacggggaaaccatattgtcgacagagtccgtctgaaaaacgcacggatcctcggtgataataatgccagaaatggagcagacagactggtcagcggaacagaaatccagacgaaatattgttcaactgcagcccgtagcgtcggtgcggcattcgacggacaaaacggacagtatcgttacatgggaaatcatggtcccatgcaactggaagtcccccgtgatcagtatgccggcgctgtggaaaccatgaagaataagatccgcgaaggtaaagtacccggtgtaaccgatcccgcagaagcgtcccggctgattcgtcggggacatctgacttatacccaggcccgtaatatcacccggttcgggaccatcgaatcggtcacttatgatattgccgaggggtcggttgtcagtctggcggccggagggatcagttttgccctgacggcatcggtcttctggctcagcaccggcgatcgcgatgctgccctgcagacagctgctgtccaggcaggaaaaaccttcacccgcacactggctgtctacgtcacaacccagcaacttcaccggctcagtgttgttcagggtatgctgaagcatattgatttttcgacggccagcccgactgtccggcaggcgcttcagaaggggaccggtgcaggaaatatcagtgccctgaacaaagtgatgaagggtacgctggtgacatctctggcactggtagctgtcacaaccggccctgacatgatcaaaatgttgcggggacggatctccggtgcgcagttcatcaggaatcttgccgtggcatcttccggtgtggcaggtggtgctgtcgggtcagtggcgggcgggatattgttcagtccactgggaccatttggtgcactgacagggcgtgtggttggcggtgttctggggggaatgattgcctccgctgtatcaggaaaaattgccggagcgctggttgaagaagatcgcgtcaaaattctggcaatgattcaggagcaggtgacatggcttgccggcagtttcctgctgaccggacatgagattgaaaatctgaacgcgaatctggcccgtgttatcgatcagaatgctctggagatcattttcgccgccggtatacaacaacgggccgcgaccaatatgttaatcaaaccactggtggtcagtatcatcaggcaacgccccgtcatggaatatgatgcatcccatctcggcaatatggttaaccgactggaagaagcattccccccggagttaccggcataa

SEQ ID NO: 472543 - DNA, 456 bp, Shigella flexneri; identical to SEQ ID NO: 463063

SEQ ID NO: 472544 - DNA, 156 bp, Shigella flexneri; identical to SEQ ID NO: 463062

SEQ ID NO: 472545 - DNA, 822 bp, Shigella flexneri; identical to SEQ ID NO: 463061

SEQ ID NO: 472546 - DNA, 486 bp, Shigella flexneri
atgaaaaccatttcacataattccaccacatcttctgtttccgtaaccgctgcatcagggaatgaccagcctcagttggttgccaccctcgtccctgatgaacagcgcatcagcttctggccgcagcactttggcctcattccacagtgggtgaccctggagccccgtgtcttcggctggatggaccgtctgtgtgaagactactgcggtggtatctggaatctgtacaccctgaacaacggcggggcatttatggcacccgaaccggatgacgatgatgacgaaacatgggtactgttcaatgccatgaacggtaaccgcgctgaaatgagtccggaagctgccggcattgctgcctgtctgatgacgtacagtcatcatgcctgtcgtacggagtgttatgccatgacggtccattattaccggctgcgggattacgccctgcagcatccggaatgcagcgccattatgcgcatcatcgactga

SEQ ID NO: 472547 - DNA, 477 bp, Shigella flexneri
atgcaacaactttcctttctgcccggagagatgacgcccggcgagcgcagtctcattctgcgggccctgaaaactctggaccgccatcttcatgaacccggcgtggccttcacctccacccgtgcggcacgggaatggctgattctgaacatggcgggactggagcgtgaagaattccgggtgctgtatctgaataaccagaatcaactgattgccggtgaaaccctcttcaccggcaccatcaaccgcacggaagtccatccccgggaagtgattaaacgcgccctgtaccacaatgccgctgccgtggtgctggcgcacaatcacccgtccggtgaagtcacacccagcaaggcagaccgccttatcacggaacgtctggtacaggcactggccctggttgatatccgggtaccggaccatctgatagtcggtggcagccaggttttctcctttgccgaacacggtctgctttaa

SEQ ID NO: 472548 - DNA, 222 bp, Shigella flexneri; identical to SEQ ID NO: 463060

SEQ ID NO: 472549 - DNA, 369 bp, Shigella flexneri
gtgtcagacacactttccgggacaacgcatcccgatgacaatgacgatcatccctggtggggactaccctgcacagtgacgccctgtttcggcgcccgtctggtgcaggagggtaaccgcctgcattaccttgccgaccgcgccggtatcagaggcctgttcagcgatgcagatgcgtaccacctggaccaggcctttccgctactgatgaaacaactggaactcatgctcaccagcggtgaactgaatccccgccatcagcataccgtcacgctgtatgcaaaaggtctgacctgcaaagctgacactctcggtagcggtggttacgtttatctggctgtttatccgacgcccgaaacgaaaaagtaa

SEQ ID NO: 472550 - DNA, 375 bp, Shigella flexneri
atgaaaacattacccgacacacacgtacgggaggcatcgagctgcccgtctcccgtcaccatctggcagactctgctctcccgactactgggccagcattacggccttacactgaatgacacaccgttcgccgatgaacgtgtgattgagcagcatattgaagctggcatttcactgtgtgatgcggtgaattttctcgtggaaaaatacgcgctggtgcgtaccgaccagccgggattcagcacttgtccccgctctcagttaataaacagtattgatatcctccgggctcgccgggcgaccggcctgatgacccgcgacaattacagaacggtaaataacattaccctgggtaagcatccggagaaacgatga

SEQ ID NO: 472551 - DNA, 489 bp, Shigella flexneri
atgaaactttccctgatgctggaagccgacagaattaatgtgcaggcactgaacatggggcgaattgtcgttgacgtcgatggtgttaatctcactgaactgattaacaaggtcgctgaaaacggttattcactccgcgtggtggaggaatccgaccaacagtcaacctgcacactaccaccgtttgcaacccttgccggcatacgctgcagtaccgcacatatcacggaaaaggataacgcctggctgtactcgctgtcgcatcagaccagtgacgttggtgaatcagaatggattcatttcacaggtagcggatatctgttacgtaccgatgcgtggtcatatccggttctgcggcttaaacgcctggggctgtcaaaaacgttccgtcgtctggttatcacacttacccgacgttatggcgtcagtctcattcatctggatgccagcgctgaatgcctgccgggtttacccactttcaactggtaa

SEQ ID NO: 472552 - DNA, 198 bp, Shigella flexneri; identical to SEQ ID NO: 4462

SEQ ID NO: 472553 - DNA, 153 bp, Shigella flexneri; identical to SEQ ID NO: 463055

SEQ ID NO: 472554 - DNA, 210 bp, Shigella flexneri; identical to SEQ ID NO: 23003

SEQ ID NO: 472555 - DNA, 1212 bp, Shigella flexneri
atggctctgagtgatgtgaaggttcgttcggctaagcctgaagcaaaagcctataagctgaccgacggtgaaggcatggttttgctggttcaccctaacggctccaaatactggcggctacgttatcgctttggcggcaaagagaagatgctggcattggggaaataccccgaagtgtcgttggcggatgccagggcacgccgggatgaggctcgtaagcttttagctaatggtgtcgatcccagtgaaaacaagaaagctgttaaggtagaacaggaacaagaggcgataacgtttgaagtagtcgccagagactggcacgccagcaatcagaagtggtcggcatcgcatagcgctcgtgttttgaaaagtctggaggataatctctttactgctatcggtaagcggaacattgcggaactgaagacgcgggatcttcttgtacccattaaagcagtcgagtcatccgggcggctcgaagttgccgcccgtttacagcagcgtactaccgcgattatgcgctttgccgttcagagcggcttaatcgactacaaccccgcgcaagagattgcaggtgcggttgctacggcgaaaagacagcaccgtgcagctcttgaactgaaccgtatacctgaattacttcatcgcatagatcactattctggcagaccgttaactcgactggcggttgaactcactttattggttttcatccgttcgagcgagctgcgttttgcccgctggtcagaaatagattttgaaacggctatgtggacaatcccaggtgagcgtgagcaactggaaggagtcaagcattctcagcgtggctcgaagatgcggacaccacaccttgtacctttgtcgcggcaggccctaagtattttggaaaagatcaaaagcatgagcggaaatcgagagctgatttttgtgggcgatcacgatccacgtaagccgatgagtgagaatacggtgaacaaggctttgcgcgtaatggggtatgacacgaaggtcgaggtttgtgggcatggcttcaggacgatggcttgtagttcgttgattgagtcgggattatggtcgagggatgcggtagagcggcagatgagtcaccaggagcgtagctctgtgcgagcagcttacatccataaggcggaacatcttggggagcgtaggttgatgtttgaagtggtcaacaaaaactggccaccgagttag

SEQ ID NO: 472556 - DNA, 141 bp, Shigella flexneri
atgaaaatcaagagcatcagtaaggctgtattgctgcttgcactgctaacctccacgagctttgctgcgggtaagaatgtcaatgttgagttcagcaaaggccatagtgatcctacccacgtaatatggacacaggcctaa

SEQ ID NO: 472557 - DNA, 294 bp, Shigella flexneri
atgttttgtgtgatttatcgaagcagcaagcgtgaccagacctatttatatgtcgaaaaaaaagacgatttttcgcgtgttcctgaggaactgatgaaaggttttggtcagcctcagttagcgatgattctgccgttggatgggcggaagaaactggtcaatgctgatattgaaaaggttaaactggcattaaccgagcaaggttactatttgcagttaccgccaccacccgaagatttgctgaagcaacatctttccgtcatggggcagaaaacagacgacactaacaaataa

SEQ ID NO: 472558 - DNA, 660 bp, Shigella flexneri
atgtatcaacatcacaactggcaaggtgcgctgctggattatccggtgagtaaagtagtctgtgttggcagtaactatgccaaacatattaaagagatgggcagcgcagtgcccgaagagccagtgctgtttattaaaccagaaacggcactgtgcgatctgcggcagccattggcgatcccatccgatttcggttcagttcatcatgaagtcgaactggcggtgttgattggcgcgacgctgcgtcaggcaacggaagagcatgtccgcaaagccattgccggttacggcgtggcgcttgatctgacattgcgtgatgttcagggaaaaatgaagaaagccgggcagccgtgggaaaaggctaaagcgtttgataactcttgtccgctttccgggtttatccccgcggcggaatttaccggcgatccacaaaatacaacgctgggcctgagcgtaaacggcgaaaaacgccagcaaggtacgactgcggacatgatccataaaatcgttccgttgatcgcttatatgagcaagttttttaccctcaaggccggtgacgttgtgttgacaggcacgcctgatggcgtcggcccgttgcaaagcggtgatgagctgacagtcactttcgatgggcattctttgacaactcgcgttttgtaa

SEQ ID NO: 472559 - DNA, 447 bp, Shigella flexneri
atgagcgatgtacctttctggcaaagtaaaaccctggacgaaatgagcgatgcggaatgggagtcgttgtgtgatggttgcggtcagtgttgcttgcataaactgatggatgaagacaccgacgaaatctacttcactaacgtcgcctgtcgccagctcaatattaaaacctgtcaatgtcggaactacgaacgtcgtttcgagtttgaacccgactgcattaaattaacccgtgaaaatctgccaacattcgaatggctgccaatgacctgcgcttatcggttgctggcggaaggtaaagatttacctgcgtggcatccgctacttactggttcgaaagcggcaatgcatggtgaacgtatctctgtgcgtcatatcgcagtgaaagaatcagaagtgattgactggcaggatcatatcttaaataaacctgactgggcgcagtga

SEQ ID NO: 472560 - DNA, 588 bp, Shigella flexneri
atgagaagaaagcatccgcccctcattaaggtactggatgacggcatcacgaagctgaatgaagcgcaaaaatccctgctggtaagctcacaaagtttcaacaacgcttccgggaaactgctggcgttagatagccagttaaccaatgatttttcagaaaaaagcagctatttccagtcacaggtagataaaatcaggaaggaagcgtatgccggtgccgcagccgatgtcgtcgccggtccatttggtttaatcatttcctattctattgctgcgggcgtagttgaagggaaactgattccagaattgaagaacaagttaaaatctgtgcagagtttctttaccaccctgtctaacacggttaaacaagcgaataaagatatcgatgccgccaaattgaaattaaccaccgaaatagccgccatcggggagataaaaacggaaactgaaacaaccagattctatgttgattatgatgatttaatgctttctttgctaaaagcagcggccaaaaaaatgattaacacctgtaatgagtatcagaaaagacacggtaaaaagacactctttgaagtacctgaagtctga

SEQ ID NO: 472561 - DNA, 342 bp, Shigella flexneri
atgactgaaatcgttgcagataaaacggtagaagtagttaaaaacgcaatcgaaaccgcagatggagcattagatctttataataaatatctcgatcaggtcatcccctggcagacctttgatgaaaccataaaagagttaagtcgctttaaacaggagtattcacaggcagcctccgttttagtcggcgatattaaaaccttacttatggatagccaggataagtattttgaagcaacccaaacagtgtatgaatggtgtggtgttgcgacgcaattgctcgcagcgtatattttgctatttgatgagtacaatgagaagaaagcatccgcccctcattaa

SEQ ID NO: 472562 - DNA, 420 bp, Shigella flexneri
atgttgtttatcaagcctgcggatctccgcgaaattgtgacttttccgctatttagcgatcttgttcagtgtggctttccttcaccggcagcagattacgttgaacagcgcatcgatctgaatcaactgttgatccagcatcccagcgcgacttacttcgtcaaagcaagtggtgattctatgattgatggtggaattagtgacggtgatttactgattgtcgatagcgctattaccgccagccatggtgatattgtcatcgctgctgttgacggcgagtttacggtgaaaaaattgcaactacgcccgacggtacagcttattcccatgaacagtgcgtactcgcccattaccatcagtagcgaagatacgctggatgtctttggtgtggtgatccacgtcgttaaggcgatgcgctga

SEQ ID NO: 472563 - DNA, 1269 bp, Shigella flexneri
atgtttgccctctgtgatgtaaacgcgttttatgccagctgtgagacggtgtttcgccctgatttatggggtaaaccggtggttgtgctatcgaataatgacggttgcgttatcgcccgaaacgctgaggcaaaggcgctgggcgttaaaatgggcgatccctggttcaaacaaaaagatctgtttcgtcgctgtggtgtggtttgctttagcagcaattatgagctttacgcagacatgagcaatcgggtgatgtcgacgctggaagaactatcgccccgcgtcgagatttacagtattgatgaagcattctgcgatctgacaggtgtgcgtaattgtcgcgatctgactgattttggcagagaaattcgcgcaacggtgctacaacgtacccatcttactgttggtgtggggatcgcccagaccaaaacgttggctaagcttgccaatcatgcggcaaaaaaatggcagcggcagacgggtggggtggtggatttatcaaatctggaacgccagcgtaaattaatgtctgctctccccgtggatgacgtctgggggattggacggcggatcagcaaaaaactggacgcgatggggatcaaaaccgttctcgatttggcggatacagatatccggtttatccgtaaacattttaatgtcatgctcgaaagaacggtgcgtgaactgcgcggcgaaccctgtttgcaactggaagagtttgcaccgacgaagcaggaaattatctgttcccgctcgtttggtgaacgcatcacggattatacgtcgatgcggcaggccatttgtagttacgctgcccgggcggcggaaaaacttcgcagtgagcatcaatattgtcggtttatctccacatttattaagacgtcaccatttgcgctcaatgaaccttattacggcaatagcgcgtcggtaaaactgctgacgcccactcaggacagcagggatatcattaacgctgctacgcgatctctggatgccatctggcaagcgggccatcgctaccaaaaagcgggcgtgatgctgggggatttcttcagtcagggagtcgcgcagctcaatttattcgatgacaacgcaccgcgccccgggagtgagcaattgatggcggtaatggatactctgaatgctaaagagggcagaggaacactctattttgccgggcaggggatccaacaacaatggcagatgaagcgagctatgctttcaccacgttatacaacgcgaagttctgatttactgcgggtcaaataa

SEQ ID NO: 472564 - DNA, 531 bp, Shigella flexneri
atgttgcgatttttgaaccaatgttcacaaggccggggcgcgtggctgttgatggcgtttactgctctggcactggaactgacggcgctgtggttccagcatgtgatgttactgaaaccttgcgtgctctgtatttatgaacgctgcgcgttattcggcgttctgggtgctgcgctgattggcgcgatcgccccgaaaactccgctgcgttatgtagcgatggttatctggttgtatagtgcgttccgcggtgtgcagttaacttacgagcacaccatgcttcagctctatccttcgccatttgccacctgtgattttatggttcgtttcccggaatggctgccgctggataaatgggtgccgcaagtgtttgtcgcctctggcgattgcgccgagcgtcagtgggattttttaggtatggaaatgccgcagtggctgctcggtatttttatcgcttacctgattgtcgcggtgctggtggtgatttcccagccgtttaaagcgaaaaaacgtgatctgttcggtcgctaa

SEQ ID NO: 472565 - DNA, 1542 bp, Shigella flexneri
atggagatctcctggggccgcgcgctatggcgcaattttttgggccagtcccccgactggtacaaactcgccctcatcattttcttaatcgtaaacccgttaattttcctcatcagccctttcgtcgcgggctggttgctggtagcggaatttattttcactctggcgatggccctgaaatgctacccgctactccccggtggtctgttggctatcgaagcggtattcatcggcatgaccagcgcggaacacgtccgtgaagaggtggcggcaaatcttgaagtcttgctgttattgatgtttatggtggcgggtatctattttatgaaacagctgttgctgttcatatttacccgtttgctgttaagcattcgctccaaaatgctgctgtcgctctctttttgcgtggcggcagcgttcctctccgcgttcctcgatgccttaaccgtcgtggcggtggtgatcagcgttgcagtcggtttttatggtatttatcatcgcgtagcctcttcccgtaccgaagacaccgacctgcaagacgatagtcatatcgacaagcattacaacgtggttctggaacagttccgtggctttctgcgtagcctgatgatgcatgccggtgtcggcaccgcattaggcggcgtaatgaccatggtgggcgaaccacagaacctgatcatcgctaaagcggctggctggcattttggcgatttcttcctgcgcatgtcgccggtgaccgttccggttctgatttgtggcctgttaacctgcctgctggtagagaagctgcgttggtttggctacggtgaaacgctgccggagaaagtccgcgaagtgttgcaacagtttgacgatcaaagccgccaccagcgtacccgtcaggataaaatccgtctgattgtccaggcgattattggcgtctggctggtgactgcgctggcgttgcatctggcggaagttggcttgattggtttgtcagtcattattctggcaacatcattgaccggtgtcaccgatgaacatgctatcggtaaagccttcaccgaatctctgccattcaccgcactgttgacggtgtttttctcggtagtcgcggtgattatcgaccaacaactgttttcgccgattattcagtttgtgttgcaggcatctgaacatgctcagctgtcgctgttctatattttcaacggtctgctgtcatccatttcggataacgtcttcgtggggacgatttatatcaacgaagcgaaagcggcaatggaaagtggcgctatcacgttgaagcaatacgagctgctggcggtcgccattaataccggtaccaatctgccctctgtcgctacgccgaacggtcaggctgcgttcctgttcctgctgacctctgcactcgcgccattgattcgcctctcttatggccgcatggtgtggatggctctgccttacaccctcgtactgacactcgtcggcttgctctgcgtcgagtttacgcttgcccctgtaaccgaatggtttatgcaaatgggctggatagcaacgctttga

SEQ ID NO: 472566 - DNA, 720 bp, Shigella flexneri
atggtcattaaggcgcaaagcccggcgggtttcgcggaagagtacattattgaaagtatctggaataaccgcttccctcccgggactattttgcccgcagaacgtgaactttcagaattaattggcgtaacgcgtactacgttacgtgaagtgttacagcgtctggcacgagatggctggttgaccattcaacatggcaagccgacgaaggtgaataatttctgggaaacttccggtttaaatatccttgaaacactggcgcgactggatcacgaaagtgtgccgcagcttattgataatttgctgtcggtgcgtaccaatatttccactatttttattcgcaccgcgtttcgtcagcatcccgataaagcgcaggaagtgctggctaccgctaatgaagtggccgatcacgccgatgcctttgccgagctggattacaacatattccgcggcctggcgtttgcttccggcaacccgatttacggtctgatccttaacgggatgaaagggctgtatacgcgcattggtcgtcactatttcgccaatccggaagcgcgcagtctggcgctgggcttctaccacaaactgtcggcgttgtgcagtgaaggcgcgcacgatcaggtgtacgaaacagtgcgtcgctatgggcatgagagtggcgagatttggcaccggatgcagaaaaatctgccgggtgatttagccattcaggggcgataa

SEQ ID NO: 472567 - DNA, 1533 bp, Shigella flexneri
atggcgacgatcgattctatgaataaggacaccacacgtttgagcgatggacccgactggacgttcgacctgctggatgtttatctggcagagatagaccgggtggcgaaactctaccggctggatacctacccgcaccagattgaagtgataacctcagaacagatgatggatgcctattccagcgtcggcatgccaattaactatccgcactggtcattcggtaaaaagtttatcgagactgaacggctgtataagcacggtcagcaagggctggcctatgaaatcgtcattaactctaacccgtgtatcgcttacttgatggaagagaacaccattactatgcaggcgctggtgatggcacacgcctgctatggacataactctttctttaaaaacaattgcttattccgcagttggaccgacgccagttcgattgtcgattatctgatttttgcccgtaaatatattaccgagtgcgaagaacgttatggcgttgatgaagtagaacggcttctggactcgtgccacgcgctgatgaactacggcgtggaccggtacaaacgcccgcaaaaaatctcgctgcaagaagagaaagcccggcagaaaagtcgcgaagagtatctacaaagtcaggtcaatatgctctggcgtaccctgccgaagcgcgaggaagagaaaacggttgctgaagcgcgccgctatccgtccgaaccacaagaaaacctgctctattttatggagaaaaatgcgccactgctggaatcatggcagcgtgaaatcctgcgtattgtgcgtaaggtgagccagtatttttatccgcaaaaacagactcaggtgatgaacgaaggctgtgcgaccttctggcactataccatccttaaccatctgtatgatgaagggaaagtaacggaacgttttatgctggagtttttgcacagccacaccaatgtggtcttccagcccccctataacagcccgtggtacagcggcatcaacccgtatgccctcgggttcgccatgttccaggatattaaacggatttgtcagtcgccaacggaagaagacaaatactggttcccggatatcgccggttccgactggctggaaacgctgcatttcgcgatgcgtgatttcaaagatgagagttttatcagccagtttctgtcaccgaaagtgatgcgtgatttccgcttcttcaccgtgctggatgatgatcggcataattatctggagatttccgctattcataatgaagaaggttatcgggagatccataaccggttatcgtcgcaatataacttaagtaatctggagccgaatattcagatctggaacgtggatttgcgcggcgaccgttcgctgacgctgcgttatattccacataatcgcgcaccgctggatcgggggcgcaaagaagtcctgaagcatgtgcatcgcctgtggggatttgatgtgatgctcgaacagcaaaacgaagacggcagcatcgagttgctggaacgttgcccgccaagaatgggaaatctgtaa

SEQ ID NO: 472568 - DNA, 1299 bp, Shigella flexneri
atgcgagttgtcatactgggaagtggtgtggtaggcgttgccagcgcctggtacttaaatcaggcaggacatgaggtcaccgtcattgatcgggagccgggggccgccctggaaaccagtgccgcgaatgccgggcaaatctcccccggatatgctgcaccgtgggcagcaccaggtgtgcctttaaaagcgattaaatggatgttccagcgccatgcgccgctggcggttcgtctcgacggtacgcagtttcagttgaaatggatgtggcaaatgttacgtaactgcgacaccagccactacatggaaaacaaagggcggatggtgcgtctggcggaatacagccgtgattgcctgaaagcattgcgcgccgaaaccaatattcagtatgaagggcgtcagggtgggacgctgcaactgttccgtaccgaacaacagtatgaaaatgcgacccgcgatatcgccgtgctggaagatgccggcgtaccgtatcagctgctggaatccagccgcctggcggaagtggatcccgcgctggcagaagtagcgcacaaactgacgggcggcctgcagttacccaatgatgaaaccggagactgccagctgtttacccagaatctggcgcggatggcagagcaggcgggggttaaattccgctttaatacgcccgttgaccaactgctttgcgacggcgagcaaatctacggcgtgaagtttggcgatgaagtgattaaggccgatgcgtatgtgatggcgtttggttcttactcgacggcgatgctcaaaggcattgttgatattccggtgtatccgctgaaaggctactcgctgactattccaattgcgcaggaagatggtgcgccagtatccaccattcttgatgaaacctacaaaatcgccattacccgtttcgataaccgcattcgtgttggcggaatggcggaaattgttggttttaacaccgagctgttgcaaccgcgtcgtgaaacgctggaaatggtggttcgcgatctctatccacgcggcggtcatgtcgagcaggcgactttctggacgggtttgcgcccgatgacgccagacggtacgccggttgtcgggagtacacgctttaaaaatctgtggctgaataccggtcacggcacgctcggctggacgatggcttgcggttccggtcagttgttaagcgatctgctctctggtcgcacgccagcgatcccatatgaggatctaagcgtagcgcgctacagccgtggatttacgccatcacgtccgggccatttacatggcgcacacagctaa

SEQ ID NO: 472569 - DNA, 1071 bp, Shigella flexneri
atgacccgtccgatacaggccagcctcgatctgcaggcattaaaacagaatctgtccattgtccgccaggccgcgccgcacgcgcgcgtctggtcggtggtaaaagcgaacgcttacgggcatggtattgagcgtatctggagcgcgctcggggccaccgatggctttgcattacttaacctggaagaggcaataacgttacgtgagcgcggctggaaggggccgatcctgatgctggaaggatttttccatgctcaggatctggagatttatgaccagcaccgcctgaccacctgcgtacacagcaactggcagctcaaagcactgcaaaatgcgcggctaaaagcaccgttggatatttatcttaaagtgaacagtgggatgaatcggttgggcttccagtccgatcgcgtgcttaccgtctggcagcagttgcgggcaatggcgaatgttggcgaaatgaccctgatgtcgcattttgctgaagcggaacatcctgatggaatttccggcgcgatggcgcgtattgagcaggcggcggaggggctggagtgtcggcgttcgttgtccaattcggcggcgactctgtggcacccggaagcgcattttgactgggttcggcctggcattattttgtatggcgcttcgccgtccggtcagtggcgtgatatcgccaataccggattacgtccggtgatgacgctaagcagtgagattattggtgtccagacgctaaaagcgggcgagcgtgtgggctacggcggtcgctatactgcgcgcgatgaacagcgaatcggcattgtcgccgcaggatacgccgacggttatccgcgccatgcgcctaccggtactcctgttttagtggacggcgtgcgcaccatgacggtggggaccgtctcgatggatatgctggcggttgatttaacgccttgcccgcaggcggggattggtacgccggttgagctgtggggcaaggagatcaaaattgatgatgtcgccgccgctgccggaacggtgggctatgagttgatgtgcgcgctggcgttacgcgtcccggttgtgacagtgtaa

SEQ ID NO: 472570 - DNA, 228 bp, Shigella flexneri
atggatctggagttcctggatgacccggaactcctggagcgcgtgaaggtacaggaggacctggagctcctggatcaacagttgggcctgttgagtctggaaagacaacaggactcgcagcctgttaatcaacaatctgaacatgaacccgaatctgcatcaagggtgaagcgtgatttatctgaagtcgactccgagtcaacaatgaagcgtaagcgttttatgtag

SEQ ID NO: 472571 - DNA, 1035 bp, Shigella flexneri
atgaagtatctcagcccgcaaaaattcagctggggtgatgccccctggcagatcattgacctcagtatcgcgggcaaagtgaacatacaggtggacaacaataccatcatcacgttggggactcgtctgaatcagcaacataacgagttcatgatggtcgccaaatggtgcgaatgggctatacagcaggatggtttgcaagaaaacctgcaaaaaaacctgtacgaaatcctggaagaaaaccagcaaaacaaacagtcagaaattccccaagaagacctgaaagaaagtctggaagaaatcaaggaaaatatcctggaagaaaacctgccagcaagccggattgaaaaccgggcagaagcattgcgcagaatgaaggaatgtctcattacaagacggagtatgctcaatcttagcaacctgggattgacttcactccctgagaatttgcctccacatctgattgaattttactgcagtaaaaacgtgttgaccgcgttaccgaaggtgatgccaaagtggctgctggtgcttgactgtacagataacgtcttgatcttgttaccgaaggtgcagccctcaaaactgatggtactgaagtgctatgaaaacagtattatctggctgcctgagctgtcgactaacctgagagtgattaactgttctgaaaacttcttgcaatttttaccgccgtcgatgccccagtacctgtataaactatcctgtgccggcaacaatattaactcaatacctgatgagatgctggagaacttgactcgcctgaaagtatttgactgttctagtaacgatttgatctcttcaccacggctgccgcccaaactaataatttactactgtggagaaaacaagtttaaaacggtacaggtgccgcagccccagagcctgaaggtgtttgactgtaatggtaacccgtgggacaaagacaatttaccgacgctgctcaaagccgtcgagggcctgaaaaaacagcagggcctgaaggaccttttggactttttgcacaaggaaggctag

SEQ ID NO: 472572 - DNA, 1737 bp, Shigella flexneri
ttggatgccacaacaataattagccttttcatcttaggatccatccttgtcaccagcagtatattacttagttcattttcttcccgtcttggcattcctattctggttatttttctggcgatcggcatgctggcgggagtcgatggcgtcggcggtatcccgtttgataattaccccttcgcctacatggtaagtaacctggcgctggcgattattttgctcgacggcgggatgcgcactcaggccagttcctttcgtgtggcgttaggaccggcgctgtcgctggcgacgctgggcgtacttatcacctctggtttaaccggcatgatggcggcgtggctgtttaatcttgatttgattgaaggcttattaatcggcgctatcgtcggctccaccgatgctgcagcggtcttttctctgctgggtggtaaggggcttaacgaacgtgttggctcgacgctggaaattgaatccggcagtaatgatccaatggcggtctttctgacgattaccctgattgcaatgatccagcagcatgaaagcagtgtcagttggatgttcgtggtcgatattctgcagcaatttggcctcgggattgtcatcggtcttggcggtggttatttactgctgcaaatgattaatcgcatcgccctgcctgccggattatatccattgctggcattaagcggcggtattttaatttttgctttaaccacggcgctggaaggcagcggtattctggctgtttatctgtgcggttttctgctgggtaatcggccgattcgcaaccgctacggcatcctgcaaaatttcgacggcctcgcctggctggcgcaaatcgccatgttcctggtgctggggctattggttaacccaagcgatctgctgcctattgccattccggcgctcattttgtcggcatggatgatattcttcgcccgtcccctttcggtatttgctggattgctccctttccgcggtttcaatctgcgtgagcgcgtgtttatcagctgggtgggattacgcggcgcggtgccaatcatcctagccgtgttcccgatgatggcggggctggagaatgcgcgactgttctttaatgtcgccttctttgtggttctggtttcactgctcttgcagggaacatcactctcgtgggcggcgaaaaaagccaaagtggtggttccgcccgtcggacgtccggtgtcacgcgttggcctggatattcatccggaaaatccgtgggagcagtttgtttatcaattgagtgctgataaatggtgtgtaggtgcggcactgcgcgatttgcatatgccaaaagagacgcgtattgcagccctgtttcgtgataaccagttgcttcatcctaccggcagcacccgactgcgcgaaggcgatgtattgtgtgtaattggtcgggaacgcgatctcccggcgctcggtaaactgttcagccagtcgccaccggtcgcgctggatcaacgcttctttggtgacttcattctcgaagccagcgccaaatatgctgatgttgcgctgatatatggcctggaagacgggcgagaatatcgtgataaacagcaaacactgggtgaaattgtccagcagttgctaggcgcggcaccggttgtcggtgaccaggtagagtttgccgggatgatctggacggtggccgagaaagaagataatgaagtgttgaagattggcgttcgggtggctgaagaggaagctgaatcttaa

SEQ ID NO: 472573 - DNA, 915 bp, Shigella flexneri
atgtctctgtttcacttaattgccccatcgggttacagcattaaacagcacgccgcgctgcgtggtatccagcgccttaccgacgcggggcatcaagtcaataacgtcgaggttattgcccgtcgttgtgagcgttttgcgggtacggaaacggagcgtctggaagatctcaattcccttgccagactgactacccccaacaccatcgtgctggctgtacgcggcggttacggtgccagtcgtttactggcagatattgactggcaggcactggtggctcgccaacaacatgacccgttactcatttgcggacatagcgattttaccgccattcagtgcggtcttctggcgcaaggcaatgtcatcacctttagcggccccatgctggtagcaaactttggtgcggatgaactgaacgcctttaccgagcaccatttctggctggcgttacgcaatgaaaccttcaccattgaatggcaaggggaaggcccgacatgtcagaccgaaggcacgttgtggggaggcaatcttgcgatgctgatttcactgattggtacaccgtggatgccaaaaattgagaacggtattctggtgctggaagatattaacgtgcaccctttccgcgtcgaacgtatgctgttgcagctctatcatgcgggaattttgccacgtcagaaggcgattattctcggtagctttagcggcagcacgcccaatgattatgacgcaggttacaacctggagtcagtgtacgcgtttttgcgttcccgcctgtcgattccactcattaccggcctcgattttggtcatgaacaacgcacggttacgctgccgttgggcgcacatgccattctgaataacacccgggaaggcgctcagttgacgattagcggtcatcctgttcttaaaatgtaa

SEQ ID NO: 472574 - DNA, 612 bp, Shigella flexneri
gtgaaattgagatggtttgcctttttgattgtgttattagcgggttgttcatcaaagcatgactatacgaacccgccgtggaacgcgaaagttccggtgcaacgtgcgatgcagtggatgccaataagccagaaagccggtgcagcctggggcgtcgatccacaattgatcacggcgattatcgctatcgaatcgggtggtaatccgaacgcggtgagtaaatcgaatgccattggtttgatgcagttaaaagcttcaacctccggacgtgatgtttatcgccgtatgggctggagtggtgagccgacgaccagcgagctgaaaaatccagagcgtaatatttcaatgggggcggcttacctgaatattctggaaaccggcccgctggcaggcattgaagatccgaaggtactgcaatatgcgctggtggtgtcatacgctaacggggcaggtgcgctgctacggactttctcgtcagatcggaaaaaggcgatcagcaaaatcaacgatttggatgctgacgagttcctcgatcacgtagcgcgaaatcatcctgcgccgcaggctccgcgctatatctacaaacttgagcaggcactggacgcgatgtaa

SEQ ID NO: 472575 - DNA, 735 bp, Shigella flexneri
gtgagtcattaccatgagcagttcctgaaacaaaatccgttagccgtcctgggcgtgttacgcgatttgcacaaaaccgcaattcctttgcgtctcagttggaatggcgggcagctgatcagcaaaatactggcaataaccccggataaactggtgctggatttcggcagtcaagccgaagacaacatcgccgtgctaaaggcacagcacattaccattaccgccgaaactcagggtgcgaaagtcgagtttactgttgaacaactacagcagagtgaatacttgcagcttccggcatttattaccgtaccgcctcccaccttatggtttgtacaacgacgccgatatttccgcatctccgccccactccatccgccttatttttgccagaccaaactggcggataacagtacgttacgtttccgcttgtatgatttgtcgttaggcggcatgggcgcattactggaaacagcaaagcctgccgaattacaagaaggtatgcgcttcgctcaaattgaagtcaacatggggcaatggggtgtttttcactttgacgcccagttaatctccaccagcgagcgcaaagtgattgatggcaagaatgaaaccatcaccactccccgtctgagcttccgttttcttaacgtcagcccgacggtggagcggcaattacagcggattattttctctctcgagcgagaagcccgggaaaaagcggacaaagtgcgcgactga

SEQ ID NO: 472576 - DNA, 255 bp, Shigella flexneri
atgggaattattgcctggattatttttggcctgatagccggcattatcggcaagctaatcatgccggggcgtgatggtggtggatttttcctgacctgtattctcgggatagtcggtgcggtggtcggcggctggctggcgaccatgtttggcattgacggctccatcagcggttttaatttgcacagcttcctggtggcggtggtgggcgctatcctggtgctgggcgtattccgcctcctgcgaagagaataa

SEQ ID NO: 472577 - DNA, 1422 bp, Shigella flexneri
ttgcaagtcagcggtagccagctaaagcaggattttctcggcctgccgcatggtgtaaataatgatattgcaggcaaacacggcaagatgattaattcatcggctgatgataaacgcggcattgtgaagctcggttttacaccgcgcgaaaacgatgaatacacgctgacttacattaagcaggatggtgaaaaagataacccgccatacagcggaaattgtggtcaaaaatcacgctactggcagtggccagagtatgacaaagaaagtttttattatcagggagcgacccaactaaacgaccgttttaccctgaaaagtcggctgtatcgcgacacctttgaaaatacgctgatgatgtacaactcgctggctgatttgaaaaataaaaaaggcagctacagccattattccgattacagcgacggtgccggattacaactggcagccgatgtgcgtgaaaacgatctgctgtcgtttgccgttaactggaaagatgacgtacaccgggaaaaaggtgcgccgcacgccgcttacgatcgctatgaagatcgtacctggtcgctcgccagtgaatatcaatgggctgctgctgataatgtcgatgtcgtggcgggaatcagctatgactggcgcgatagcgtagaagcgaaaaaacacgagaaagatggcagcatcacccattatgacgacaacaatcagtcagcttttaactggcaggtgatggggaaataccactttgccaatgaagacactctggcgctttcgtactatgaccgcacacgctttccgacgctgaaagaacgctataccacatccaaacctgcgtataaccagatagcgattgttaacccgcagctcaagccggaacgcgctcgcggggtggatttaacctggaatggtgccttcacgcgcgactggggatttgaggtcagcgtttactataaccgggtgagtgatgccatcctctcgcacaatatcaatgccgataccattcaaaatcagaacagcggcacggtggattacagcggtctggatgccggtattaaggggaaaatcagcaatatactggatgtaggattgagctacgctctgatccacgctgacgccaaacgcaaagacatcggcaagataaccgatcttccaacgcagacaatgaccgcatggatgacactcaaaccatgggagccgttaagcgtaacgctgtcggaagaggcgcgttcctccagctacagcaacagtgacggttcacaaaaagccgccggttttgcggtgacccacattcgagccgattacaccttaggtcatggcttcagcgtcaatgcgtcggtcaataacctgtttgatacccaatatgcctacagtgaagggtttattgaagaaggtcgcaatttctgggcaggtgtcgagtatacgttctga

SEQ ID NO: 472578 - DNA, 558 bp, Shigella flexneri
atgagactcaaaaaacgttatctctgcacagcattatcacttgcctttacccagcaggccgtagcggctcaggagagcgacacgctgaccgtatggtccagtccggtatcatcgacgacgaccaccgttctcgatcaacccaccatgaaggccttggataaacagaatgtcgctcaggcattaagtgtcgtccccggcgtggtgctgcaaaagtcaggcagccgcaacgaagaacaggtaaaagttcgtggctttgatagtcggcaggtgccggtctatttcgacggtgtgcccatttatgtcccctatgacggcaacctcgatctggcgcggattctgaccaacaatctgggggcagtcgaagtttccaaagggtattcgtcgctgcttcatgggcctaatcagatgggcggagccattaatatcaccaccctgaagaagcaagtctgggatatcgccagggatggagccgtagtcaggacaatgcctacgatatgcatgcttcatttgccgccagcagcgatcttgggtatttgcaagtcagcggtagccagctaa

SEQ ID NO: 472579 - DNA, 855 bp, Shigella flexneri
atgattttcctttctcaggcacaaatcgatgcgttactgctggaagatatccagggaggtgacctgaccacgcgagcattaaatattggacaccagcctggctatatagcgttttttcaccgtcagggcggctgcgtcagcggcgtttctgtcgcgtgtaagatgttaactacgctgggattaactattgatgacgcggtcagcgacggttcacaagcgaacgcgggtcaacggctaatccgtgcgcagggtaatgccgcagcacttcatcagggatggaaggcagtccagaatgtgctggagtggagttgcggtgtttctgattatctcgctcaaatgctggcattgcttcgtgaacgttatcctgacggcaatatcgcctgcacccgaaaagcaattccgggcacccgcttactggcttcgcaggcaattctggctgccggaggactaattcatcgtgccggatgtgcggaaaccatattattgtttgccaaccaccgccattttcttcatgacaatcagggctggtcaggcgcaatcgctcagttacgtcgccacgcacccgagaagaaaattgttgttgaagccgacacgccgaaagaggctatcgccgcgttacgcgcacaaccagacgtacttcagctcgacaaatttagtccgcaacaggcaactgaaattgcgcaaatagcgccgtcgctggctcctcactgcacgctggctctgaccggcggaattaatctgacgacactcaaaaattacctcgactgcggcattcgcctttttattacctccgcgccttattacgcggcaccagctgacattaaagtcagtctgcaacccacagcctctatttaa

SEQ ID NO: 472580 - DNA, 810 bp, Shigella flexneri
atgctcattgatgatattgattttgcagacctttatctgcagcaactcaaactggctcaccgcacagaaaaaacgcccgatcactgggatcaacgggcggagaaaatggcggaaaattgcgcctcgccaacggacagctacctgcaacaactgatcgctaaaattgacctgcaaggcgctcagaccttattcgatatgggctgcggaccaggcaccgtatcgctggcgctggctgacaaactcactacggtttatggcgttgattacagtcaggggatgctgaacgttgccgcccgccgcgccgccgcactgaaggctgacaatgtccactggatccagcgcgcctgggaagaggactggagtgacctgccacgctgcgatattgccgtggcttcctgctccactctggtggctgatatgcgccatgcaatgagcaaactgaataatcaggcacggcttcgcgtctatacaactcatctggtcagcacctcgttcgtctctccagccattcagcgggcggctggtcgggaagtgatcgaattacccaactatatctttgcgctcaacgtcctgtatcagatgggaatttatgcccacgttgattttatccgtggacaaaattgccaacaggataacagcacctgggaacgttttgagcagaacgtcagctggagtcttggcgcgcttaacgacgatgagcgtgagcggttatatcactggtatcaacaacaagatgctcgtgccctcgcccctgccagccgcgactgggcgctcatctggtgggatagcgtaccgcaggaggcactgtga

SEQ ID NO: 472581 - DNA, 759 bp, Shigella flexneri
gtgactttgcttgccgttcgtcatgcgtctctgggttactcccgccatccagtgctacgcgacgtgtccttcaccctgtcgcaaggaacaatttgttgtctgcttggcgcgaatggttgcggcaaaaccacactcatgcgctccattcttggcgttataccgttattaaaaggcgagatcctactggatagcctctctgtgcagacactcagccatcgccagcgcgcacaggctattgcctgggtgccgcaggcgcacgacggtatttttgctttcagtgtgctggatatggtgttgatgggcctggcccccaccataggcgctttttccgttcccggtaagcaagaacgcctgaaagccacggagcaactggaaaagctgggcattttgcatctggcgacacgacgctggaatacgcttagcggcggtgaacgtcagctggctttaatcgcccgtgcactcgtccaacaaccgcgcttgttgttactggatgagcccgcctccagcctcgatttcggtcatcagatccaacttctggacacgctggcgcagctcaaaaataacggcatgacaatgttaatgtcgactcaccatccgctccatgccaacgccattgccgacagcattatccaagtagagccagatggacgagtaacacaaggcttaccgaccgaacagttaacaacgaacaaactggcggccctgtatcgggtttctgccgaccaaattcatcatcacctctctgcaattagccgctaa

SEQ ID NO: 472582 - DNA, 981 bp, Shigella flexneri
atgagaatcgtaaacggatgtattttgctgctggcagctatcagtatcacttttgccgccgtaagtggggcttatcatctcgatatgcagcaactgctggcgctaattcttcgtcaagaaaatgagtctgtgcaggaacaaattgtcttctggcaaatccgcgtgccgcgtattcttgctgcgctgttactgggcgcagcgctggcaggagccggaaccacctatcagggaatgttgcgtaatcccttagtttcaccggatattttaggcgtctccgccggtgccggacttggtgcctgcgcggcaatcctgtggggattacccattgtttacatccagctgtacgcattttgcggcgggctgatggtggtcgcgggcgtctggttgattacgcgtcgggtgacccgccacgatccgatcttaaccctggtgctggtaggcattgcgttaggaacgttgtgcggagcggggatatcgctaattaaaacgctggccgatccttacacccagttaccgtcaattaccttctggttgctggggggactgtccaccgtgaccttacgcgatctctgctatgctgcaccgatcattctcataggctccttgcccctgttttttctccgctggcgcatgaatttactcacgctttccgacgacgaagcccgttcgctgggactgaacgtgacgcgtctgcgctttggattgattgtctgcgccacactaatcaccgccagcacggtagcaatagcgggcataattggttggatcggtctggtcgttccgcacattgcccgcttgttgaccggtcataaccatcagcagctgttgcctatggcaatgtgtactggtgctattctgctcctgcttaccgatacgctggcgcgcagcattggaacaacagaaatcccacttggcattctgaccgcttttgttggcgcaccgtttttcctgcttttgttgttacgcggaggtcgccagtga

SEQ ID NO: 472583 - DNA, 1023 bp, Shigella flexneri
atgcccataaccagacggacgtttgcgcaggcacttgcatctaccctgctcctgcagtctctaccgtccttttcacaaacagttaatcgttttgcttcgcaatctcttcccgaagcccaaaacattacacgcatcgtcagcgcaggcgcgcccgccgatttgctcttgctggctgtcgcgccagaaaaaatggtcggtttttcctcttttgattttgcccgtcaggcattaattccattgccagagcacattcgccagttacccaggctgggacgactcgccgggcgcgccagcacactatcgctggaagggcttatggcgttacatcccgatttggtcgttgattgcggcaatacggatgaaaccttgatctcccaggcacggcaggttagcgaacagacacaaatcccctggttattgcttaacggaaaactggcgcaatcagcagaacagttaacaacgcttggcaaaacgttaggcgaagagcaccgcgccgcagaacaagccaatctcgccagccacttcgttggtgaagctcaggcattcgccacctcacccgccgctaacctccgcttttatgctgcgcgcggtccccgagggctggaaacgggcttacagggttcgttgcataccgaggcggcggaattattaggtttgcacaacgtcgcgcaaatagccgatcgccacggcctgacacaggtttccatggaaaatctcctgcgctggcagccggatattattctggttcaggaggccgttactgcagattttattcgtcgtgatcctctctggcagggcgtgaaagccgttgcggaacaacgcatcttatttttaagtggcttgccctttggctggctcgatgccccgccgggaatcaaccgtcttctgggattacgcagacttcacgcctggctggatcccgccatcaatcgccagtttaaaagtgacatgcagcattacgcccaactgttctggcattgttcactcagtgatgccgactatcaaaaattggtggcgagctaa

SEQ ID NO: 472584 - DNA, 834 bp, Shigella flexneri
atgatggctgaaatgggagctgcttatcgcaaagaagaaggtggtatctattcctggatgaataatagtgtcggaccacgttttgccttcattggtacgtttatgtggttttcctcttatatcatctggatggtgagtacctccgcgaaagtttgggtaccgttctcaacattcctctatggtagtgacatgacccagcactggcgtattgccggactggagcctacgcaggtggttggtctgctggcagtagcatggatgattctggtcaccgtcgttgcttcaaaggggattaataaaattgcccgcattactgcggtgggcggtattgcagtaatgtgtctgaatttagtattgctgttagtaagcattactattttgttattaaatggtgggcatttcgcgcaggatattaatttccttgcatcaccgaacccgggttatcagtccggtctggcaatgctatcgtttgtggtatttgctatttttgcctatggcggaattgaagcggttggtggtctggtcgataaaacggaaaatccagaaaagaactttgccaaaggtattgtttttgccgctattgttatttcaatcggttattcgctggcaatatttttatggggcgtcagcacaaactggcagcaggtattaagtaatggttccgttaaccttggcaatattacctatgtgctgatgaagagcctcggggtgacgctgggtaacgcactgcatttgtcacctgaagcgtcattgtcgctgggcgtatggtttgcgcgtattaccggactttcgatgttcctcgcttataccggtgcgtttgctattcaccgctga

SEQ ID NO: 472585 - DNA, 450 bp, Shigella flexneri
atgacgcgcctgaatgcgatggggatgccgtctatcgccatgtggatgcagtgcgggttggttactgtcttcattctgctggtttcgtttggtggcggtaccgcatcggcgttctttaacaagctgacgctgatggcgaacgtgtctatgacgcttccttacctgttcctcgcgctggctttcccgttttttaaagcacgtcaggatctcgacagaccatttgtgattttcaaaacgcgtatgtcggcaatgattgcgacggtggttgtcgttctggtggtgacatttgcgaacgtcttcaccattattcagcctgtggttgaagccggagactgggacagcacattgtggatgattggcggccctgtcttcttctcgctgttagcgatggcgatttaccagaactattgcagtcgcatggcgaataaacctgagttagctctcgactga

SEQ ID NO: 472586 - DNA, 1104 bp, Shigella flexneri
atgttagcgcaacgtgcgcgtggcgaagaggaagcgcatcatcacagtagcccggaaggagcaattgaagtcgatgaaagcgaagtcgatctcgatgccatcagtgcgcaatccttgcggctggtgcgctcaattttgatgttgatcgccctgctttcggtcattgtgctgtggtcagaaatccattccgctttcggcttcctcgaaaatatttcgctgtgggatgtcacctccacggtacagggcgtagaaagtctggagccaattaccctcggtgcggtgctgattgccattctggtatttatcatcaccacgcagctggtgcgcaacctgcccgcgctgctggaactggcgattttgcagcacctggatttaacgccgggtacgggttacgccatcaccaccatcacaaaatatctgctgatgctgattggcgggctggtcggcttctcaatgattggtattgagtggtcgaaattgcagtggctggttgccgcgctcggtgttggtctcggttttggtttgcaggaaattttcgccaactttatctctggcctgatcatcctgttcgaaaaaccgattcgcattggcgatacggtaacgatccgcgatcttactggtagcgtgacaaaaattaacacccgcgccaccaccatcagcgactgggaccgtaaagagataatcgtgccgaacaaggcgtttattaccgagcagtttatcaactggtcgctctctgactcggtcacgcgcgtagtgttgacgattccggcccctgccgatgccaacagtgaagaagtgacggaaatcctgctcaccgcagcgcgtcgctgctcgctggtgatcgacaacccggcaccggaagtcttcctggtggatctgcaacaggggattcagattttcgagctgcgtatttacgccgctgagatgggtcaccgtatgccgctacgccatgagatccaccagctgattctggcaggcttccacgcccacggtatcgatatgccattcccgcccttccagatgcgtctggaaagcctcaacggtaaacaaacggggagaacgctgacgtctgcgggcaaaggtcgtcaggcgggaagtttgtaa

SEQ ID NO: 472587 - DNA, 2247 bp, Shigella flexneri
gtgcgcctgattatcacttttctgatggcctggtgcctcagttggggggcgtacgccgcgacggcccccgatagcaaacaaatcactcaggaactggagcaggcaaaagcggcgaaacccgcacagccggaagtcgtagaggcgctccagtctgccttaaatgcgcttgaggaacgaaaaggttcccttgagcgcatcaaacaatatcagcaagttatcgataattatccgaaactctccgctactctgcgcgcacaattaaacaacattcgtgacgagccgcgcagcgtgtcgccgggaatgtctaccgacgcgctgaatcaggaaattctccaggtcagcagccagttgctggataaaagccgtcaggcccagcaagagcaggagcgcgcccgcgagattgccgattcgctgaatcaactgccgcaacagcaaaccgacgcccgccgtcagttaaatgagatcgagcgccgcctgggaacgcttaccggcaatactccgctcaatcaggcacaaaatttcgcgttgcagtctgactctgcacgtcttaaggcgctcgttgatgaactggagctggcgcagctgtctgccaataaccgccaggaattagcgcgcttacgctcagagctggcggaaaaagagagccagcaactggatgcgtatttgcaggccttacgtaatcagttgaatagccaacgtcagcttgaggcggagcgggcgctggaaagtaccgaattactggcagaaaacagtgccgatttgccgaaagatatcgtcgcgcaattcaaaattaaccgcgaactatcggcagcgctgaatcaacaggcgcagcggatggagctcgttgcctcgcaacagcgtcaggctgccagccagacgttacaggtccggcaggcgttgaatacgctgcgtgaacagtcgcaatggctgggatcgtccaacctgctcggcgaagcgctgcgggcgcaggtggcacggctaccagaaatgccaaaaccacaacagcttgataccaaaatggcgcagttgcgtgtgcaacggttacgttatgaggatttacttaataaacagccgctgctacggcaaatccatcaggccgacggtcagccgctgaccgccgagcaaaaccgtattctggaagcacaactgcgcactcagcgtgagttgctgaactcattgttgcagggtggcgacacgctactattggaactgaccaagatgaaagtctccaacgggcaactggaggatgcgctgaaagaggtgaacgaagcaacgcaccgctatctgttctgggcctctgacgtgcgcccgatgaccatcgcctggccgctggaaatcgcccaggatctgcgtcgtctcatttcgctggacaccttcagtcagttgggcaaagccagtgtgatgatgctgaccagcaaagagacaattttgccgctgtttggcgcgttgattctggtcggttgcagtatttactcgcgccgctatttcacccgttttcttgaacgttcggcggcgaaagtcggcaaagtgactcaggatcacttctggctgacgttgcgcactcttttctggtcgattctcgtcgcgtcaccgttaccggtgctgtggatgacgctgggttacggcttgcgcgaggcgtggccttatccgctggcggtcgcgattggcgatggtgtaacggccaccgtgccgctgctgtgggtagtgatgatttgcgccacctttgcccgcccgaacggcttgtttatcgctcattttggctggccgcgcgaacgtgtttcccgtgggatgcgctactacctgatgagcatcgggctgattatggcgctgatgatgttcgataacctcgacgaccgcgaattttccggttcgctgggacggctttgctttatcctcatttgcggtgcgctggcggtggtcaccctaagcctgaaaaaagccggtattccgttgtatctcaacaaagaaggcagcggcgacaacattaccaaccatatgctgtggaacatgatgattggcgcaccactggttgccattctggcgtcggcggtgggttatctggcaacggcgcaggcactgttagcgaggcttgaaacctcggttgccatctggttcctgctactggtggtttatcacgttatccgccgctggatgctgatccagcgtcgcaggctggcgtttgaccgggcgaagcatcgccgggcagagcgtttgaccgggcgaagcatcgccgggcagagatgttag

SEQ ID NO: 472588 - DNA, 969 bp, Shigella flexneri
ttgttaaattcatttaaactttcgctacagtacattctgccgaaactatggcttactcgcctggcgggttggggcgcaagcaagcgggcaggatggctgacaaaactggttatcgatctgttcgttaaatactacaaggtcgacatgaaagaggcgcaaaagccggacaccgccagctaccgcacctttaacgaattctttgtccgtccgctgcgtgacgaagtacgcccaatcgataccgatccgaatgtactggtcatgcctgccgatggcgttatcagccagttgggtaaaatcgaagaagataaaatcctgcaagccaaaggccacaactacagcctcgaagccctgctggcaggcaactatctgatggcggacctgttccgcaacggtacgtttgtgaccacttacctctccccgcgtgactaccatcgcgtacacatgccgtgcaacggtattctgcgtgagatgatctacgtgccgggcgatctcttttccgttaaccatctcaccgctcagaacgtgccgaatctgtttgcccgtaacgaacgcgtgatttgccttttcgataccgaatttggcccaatggcgcagattctggtcggagcgacgattgttggcagcattgagacggtctgggcgggcaccattacgccgccgcgcgaaggtatcatcaagcgctggacctggcctgccggggaaaacgacggttctgtggcactgctgaaaggccaggaaatgggtcgctttaaactcggttccaccgttatcaacctgtttgcaccgggtaaagtgaatctggttgagcaactggaaagcctgtctgtcacgaaaattggccagccgctggcagtatctaccgaaacctttgttacgccagacgctgaacccgccccacttcctgctgaagagatcgaagcagaacacgacgccagcccattggttgacgataaaaaagaccaggtctaa

SEQ ID NO: 472589 - DNA, 1053 bp, Shigella flexneri
ttgagtaaaaataaactctccaaaggccagcagcgccgcgtgaacgccaatcaccagcgtcgtcttaaaacgtctaaggagaagcccgactacgacgacaatctgtttggcgagcctgatgaaggtatcgtcatcagccgctttggtatgcacgctgatgtggaatccgccgatggcgacgttcaccgctgcaatattcgccgtaccatccgttcgctggtaaccggcgaccgcgtagtctggcgtccgggtaaaccggcggcggaaggcgtaaatgtcaaagggatcgtggaagcggtgcatgagcgcacctcggtgttaacgcgtccggatttctacgacggcgtgaaacccatagccgccaacatcgaccagattgtcattgtctccgccattttgccggagctgtcgctcaatattatcgaccgttacctggtggcctgcgaaaccttgcagattgagccgattatcgtgctcaacaagatagacctgctggacgacgaaggcatggcgttcgtcaacgagcagatggatatctaccgcaacatcggttatcgcgtattgatggtttccagccatactcaggatgggctgaaaccgctggaagaggcgttgaccgggcgcatcagcatttttgccgggcagtctggcgtcggtaaatccagcctgctgaacgcgttgctggggctgcaaaaagagatcctgaccaacgatgtctctgacaactcggggctcggtcagcacaccacgaccgccgctcggctgtatcacttcccgcacggcggtgatgtgattgattcccctggtgtgcgtgagttcggcctctggcacctggagccggaacaaatcactcagggctttgtcgaattccatgactatttaggtctgtgtaaatatcgcgattgcaaacacgataccgatccgggctgcgctatccgggaagcggttgaggaagggaaaatcgcggaaacccgtttcgaaaactatcaccgtattctggaaagcatggcgcaggtaaaaacgcgtaaaaacttttctgatacggatgactga

SEQ ID NO: 472590 - DNA, 546 bp, Shigella flexneri
atgagtgccaatgaaaacaacctgatttggatcgatcttgagatgaccggtctggatcccgagcgcgatcgcattattgagattgccacgctggtgaccgatgccaatctgaatattctggcagaagggccgaccattgcagtacatcagtccgatgaacagctggcgctgatggatgactggaacgtgcgcacccataccgccagcgggctggtagagcgcgtgaaagcgagcacgatgggcgatcgggaagctgaactggcaacgctcgaattcttaaaacagtgggtgcctgcgggaaaatcgccgatttgcggtaacagcatcggacaggaccgtcgtttcctgtttaaatacatgccggagctggaagtctacttccactaccgttatctcgatgtcagcaccctgaaagagctggcgcgccgctggaagccggaaattctggatggttttaccaagcaggggacgcatcaggcgatggatgatatccgtgaatcggtggcggagctggcttactaccgcgagcattttatcaagctgtaa

SEQ ID NO: 472591 - DNA, 1140 bp, Shigella flexneri
atgtcagagcccctcgatctcaatcagttagcgcaaaaaattaaacagtgggggctggaactgggctttcagcaggtaggtattaccgataccgatctcagcgagtccgagcccaaactgcaagcatggctggacaaacaataccacggcgaaatggactggatggcacgtcacggtatgctgcgcgctcgcccccatgagttattacccggtacgctgcgtgtaatcagcgtgcggatgaattaccttcctgctaacgccgcatttgccagcacgctgaaaaaccccaaactcggctatgttagccgttatgcgctgggccgtgactatcacaaacttctgcgcaaccgactcaaaaagctgggcgagatgattcagcaacattgtgtttcgctgaattttagaccgtttgtcgattctgcgcctattctcgagcgcccgttagctgaaaaagctgggctcggctggacaggtaagcactcacttatcctcaatcgcgaggccggttcgttcttctttttaggcgaattgctggtcgatattccgctgcccgtggatcaaccagtcgaggaaggatgcggcaaatgcgtggcctgtatgacgatttgcccgaccggtgccatcgtcgagccatataccgtcgatgctcgccgctgtatctcttatctcaccatcgaacttgaaggggcgctcccggaagagttgcgaccgttaatgggaaaccgtatttacggttgcgatgactgccagcttatctgcccgtggaatcgctattcgcaactcactacagaagacgatttcagcccgcgtaagccgctacacgcaccggaactcattgagttatttgcctggagcgaagagaagtttttaaaagtcacggaaggatcggcgattcgccgtataggtcacctgcgctggctgcgtaatatcgccgtggcattaggcaatgccccttgggatgaaacgattttgacagcgctggaaagtcgtaaaggtgagcacccacttctcgatgagcacatagcgtgggcgattgcgcagcaaatagagagacgaaatgcgtgcatagtcgaagtgcaattgccgaaaaaacagcgtctggttcgggtgattgaaaaagggttaccgcgtgacgcctga

SEQ ID NO: 472592 - DNA, 1533 bp, Shigella flexneri
atgaagaaaaaccccgtaagtataccacacaccgtctggtacgccgacgatatccgccgcggagaacgcgaggcggcagatgtgctggggctcacactctatgagctgatgcttcgcgctggcgaggccgcattccaggtgtgtcgttcggcgtatcctgacgcccgccactggctggtgctgtgcggtcatggtaataacggcggcgatggctacgtggtcgcgcgactggccaaagcggtcggcattgaggtcacgttgttggcccaggagagcgacaaaccgttgccggaagaggccgcgctggcacgcgaagcatggttaaacgcgggtggcgagatccatgcttcgaatattgtctggcccgaatcggtagatctgattgttgatgcgctgctcggtaccggcttgcagcaagcgccccgcgaatccattagccagttaatcgaccacgctaattcccatcctgcgccgattgtggcggttgatatcccttccggcctgctggctgaaaccggcgctacgccaggcgcagtgatcaacgccgatcacaccatcacttttattgcgctgaaactaggcttgctcactggaaaagcgcgggatgttacaggacaactgcattttgactcactggggctggatagctggctggcaggtcaggagacgaaaattcagcggttttcggcagaacaactttctcactggctgaaaccgcgtcgcccgacttcgcataaaggcgatcacgggcggctggtgattatcggtggcgatcacggcacggcgggggctattcgtatgacgggggaagcggcgctacgtgctggtgctggtttagtccgagtactgacccgcagtgagaacattgcgccgctgctgactgcacgaccagaattgatggtgcatgaactgactatggactctcttaccgaaagcctggaatgggccgatgtggtggtgattggtcccggtctgggccagcaagagtgggggaaaaaagccctgcaaaaagttgagaattttcgcaaaccgatgttgtgggatgccgatgcattgaacctgctggcaatcaatcccgataagcgtcacaatcgcgtgattacgccgcatcctagcgaggccgcacggttgttaggctgttccgtcgctgaaattgaaagtgaccgcttacattgcgccaaacgtctggtacaacgttatggcggcgtagcggtgctgaaaggtgccggaaccgtggtcgccgcccatcctgacgctttaggcattattgatgccggaaatgcaggcatggcgagcggcggcatgggcgatgtgctctctggtattattggcgcattgcttgggcaaaaactgtcgccgtatgatgcagcctgtgcaggctgtgtcgcgcacggtgcggcagctgacgtactggcggcgcgttttggaacgcgcgggatgctggcaaccgatctcttttccacgctacagcgtattgttaacccggaagtgactgataaaaaccatgatgaatcgagtaattccgctccctga

SEQ ID NO: 472593 - DNA, 462 bp, Shigella flexneri
atgatgaatcgagtaattccgctccctgatgagcaggcaacattagacctgggcgagcgggtagcgaaagcctgcgatggcgcaaccgtaatctatctgtatggcgatttaggcgcaggtaaaaccacctttagccggggctttttacaggctctgggtcatcagggtaatgtcaaaagccccacttatacgctggtcgaaccctatacgctcgacaacttaatggtctatcactttgatttgtaccgccttgccgatcccgaggagctggagtttatggggatccgcgattattttgccaacgatgccatctgcctggtggagtggccacaacaaggtacaggtgttcttcctgacccggatgtcgaaatacacattgattatcaggcacaaggccgtgaggcgcgcgtgagtgcggtttcctctgcgggtgaattgttgctggcgcgtttagccggttaa

SEQ ID NO: 472594 - DNA, 1338 bp, Shigella flexneri
atgatgtatcgcatcagaaattggttggtagcgacgctgctgctgctgtgcacgccggtgggtgccgcgacgctctctgatattcaggtttctaacggtaatcaacaggcgcggataacgttgagttttattggcgatcctgattatgcgtttagccatcaaagcaaacgcaccgtggcgctcgatatcaaacaaacgggcgtgattcagggactgccgttgttgttcagcggcaataatctggtgaaggcgattcgctctggaacgcctaaagatgcacaaacgctacggctggtggtcgatcttaccgaaaacggtaaaaccgaagcggtgaagcggcagaatggcagcaattacactgtcgtctttacgattaacgccgatgtgccgccaccgcctcctccgccgcccgtggttgcgaaacgcgttgaaacgcctgcggttgtcgcaccgcgcgtcagcgaaccggcgcgcaatccgtttaaaacggaaagtaaccgcactacgggtgttatcagcagtaatacggtaacgcgtccggcagcgcgcgcgacggctaacactggcgataaaattatcatcgctattgatgccggacacggcggtcaggaccctggcgctatcggccccggtggtacgcgggagaaaaatgtcaccatcgccatcgcgcgtaaattgcgtactttgctcaatgacgatccgatgtttaaaggcgttttaacccgtgacggggattactttatctcggtgatggggcgcagtgatgtggcacataagcaaaacgccaatttcctcgtgtcgattcacgctgatgccgcaccgaaccgtagtgcgactggcgcttccgtatgggtgctctctaaccgtcgcgccaacagtgaaatggccagctggctggagcagtacgagaaactgtcggagctgctgggtggggcgggtgatgtgctggcgaacagtcagtctgacccctatttaagccaggcggtgctggatttacagttcggtcattcccagcgggtagggtatgatgtagcgaccagtatgatcagtcagttgcaacgcattggcgaaatacataaacgtcgaccagaacacgccagccttggcgttctgcgctcgccggatatcccatcagtactggtcgaaaccggttttatcagcaacaacagcgaagaacgtttgctggcgagcgacgattaccaacaacagctggcagaagccatttacaaaggcctgtgcaattacttccttgcgcatccgatgcaatctgcgccgcagggtgcaacggcacaaactgccagtacggtgacgacgccagatcgcacgctgccaaactaa

SEQ ID NO: 472595 - DNA, 1848 bp, Shigella flexneri
atgccaattcaggtcttaccgccacaactggcgaaccagattgccgcaggtgaggtggtcgagcgacctgcgtcggtagtcaaagaactagtggaaaacagcctcgatgcaggtgcgacgcgtatcgatattgatatcgaacgcggtggggcgaaacttatccgcattcgtgataacggctgcggtatcaaaaaagatgagctggcgctggcgctggctcgtcatgccaccagtaaaatcgcctctctggacgatctcgaagccattatcagcctgggctttcgcggtgaggcgctggcgagtatcagttcggtttcccgcctgacgctcacttcacgcaccgcagaacagcaggaagcctggcaggcctatgccgaaggacgcgacatggacgtgacggttaaaccggcagcgcatccggtgggaacgacgctggaggtgctggatctgttctacaacaccccggcgcggcgcaaattcctgcgcaccgagaaaaccgaatttagccatattgatgaaatcatccgccgcattgcgctggcgcgtttcgacgtcacgatcaacctgtcgcataacggtaaaattgtgcgtcagtaccgcgcagtgccggaaggcgggcaaaaagaacggcgcttaggcgcgatttgcggcaccgcttttctcgaacaagcgctggcgattgaatggcaacacggcgatctcaccctgcgcggctgggtggccgatccaaatcacactacgcccgcactggcggaaattcagtattgctacgtgaatggtcgcatgatgcgcgatcgcctgatcaatcatgcgatccgccaggcctgcgaagacaaactgggggccgatcagcaaccggcatttgtgttgtatctggagatcgacccgcatcaggtggacgtcaacgtacaccccgccaaacacgaagtgcgtttccatcagtcgcgtctggtgcatgattttatctatcagggcgtgctgagcgtgctacaacagcaactggaaacgccgctaccgctggacgatgaaccacaacccgcaccgcgtgccatcccggaaaaccgcgtggcggcggggcgcaatcactttgcagaaccggcagctcgtgagccggtagctccgcgctactctcctgcgcccgcctcaggcagtcgtccggctgccccctggccgaatgcgcagccaggctaccagaaacagcaaggtgaagtgtatcgccagcttttgcaaacgcccgcgccgatgcaaaaaccaaaagcgccggaaccgcaggaacctgcacttgcggcgaacagtcagagttttggtcgggtactgactatcgtccattccgactgtgcgttgctggagcgcgatggcaacatttcacttttatccttgccagtggcagaacgttggctgcgtcaggcacaattgacgccgggtgaagcgcccgtttgcgcccagccgctgctgattccgttgcggctaaaagtttctggcgaagaaaaatcggcattagaaaaagcgcagtctgccctagcggaattgggtattgatttccagtcagatgcacagcatgtgaccatcagggccgtgcctttacccttacgccaacaaaatttacaaatcttgattcctgaactgataggctacctggcgaagcagtccgtattcgaacctggcaatattgcgcagtggattgcacgaaatctgatgagcgaacatgcgcagtggtcaatggcacaggccataaccctgctggcggacgtggaacggttatgtccgcaacttgtgaaaacgccgccgggtggtctgttacaatctgttgatttacatccggcgataaaagccctgaaagatgagtga

SEQ ID NO: 472596 - DNA, 951 bp, Shigella flexneri
atgagtgatatcagtaaggcgagcctgcctaaggcgatttttttgatggggccgacggcctccggtaaaacggcgttagccattgagctgcgtaaaattttaccagtagagttgataagcgttgattctgcccttatttacaaagggatggttatcgggacggcgaagccgaacgctgaagagttactcgccgcgccgcaccgattgctggatattcgcgatccgtcgcaggcttactcggctgctgattttcgccgcgatgcgctggcggaaatggccgatatcaccgcggcggggcggatcccactgttagtgggcggtacgatgttgtatttcaaggcattgctggaagggttgtcgccgctaccgtcggcagacccggaagtgcgggccagaattgagcaacaggcggcagagcaaggttgggagtcattgcatcgtcaacttcaggaggtagatccggttgcggcagcaaggattcatccaaatgatccacaaaggctttcccgggcactggaagtttttttcatttcgggtaaaactttaacggaactgacgcaaacgtcaggagacgctctaccgtatcaggtgcatcagttcgccatcgccccggcgagccgtgaactgctccatcaacgcattgagcagcgttttcatcagatgttggcttcaggttttgaagcagaagtccgggcgctttttgcccgaggagatttgcatacggacttgccttccattcgttgcgtgggttatcgccagatgtggtcttaccttgaaggcgaaatctcatacgatgaaatggtttatcgaggtgtttgcgccacgagacagttggcgaagcggcagataacctggctgcgtggttgggaaggggttcactggcttgacagtgaaaaaccagaacaggcgcgtgacgaagtattacaggttgttggtgctatcgcaggctga

SEQ ID NO: 472597 - DNA, 309 bp, Shigella flexneri
atggctaaggggcaatctttacaagatccgttcctgaacgcactgcgtcgggaacgtgttccagtttctatttatttggtgaatggtattaagctgcaagggcaaatcgagtcttttgatcagttcgtgatcctgttgaaaaacacggtcagccagatggtttacaagcacgcgatttctactgttgtcccatctcgcccggtttctcatcacagtaacaacgccggtggcggtaccagcagtaactaccatcatggtagcagcgcgcagaatacttccgcgcaacaggacagcgaagaaaccgaataa

SEQ ID NO: 472598 - DNA, 1281 bp, Shigella flexneri
ttgtttgaccgttatgatgctggtgagcaggcggtactggtacacatctattttacgcaagacaaagatatggaagacctccaggagtttgaatctctggtctcttccgccggtgtcgaagcattgcaggtgattaccggtagccgtaaagcgccgcacccaaagtattttgtaggtgaaggtaaagcagttgaaattgcggaagctgtcaaagcgatgggtgcttcggtcgttctttttgaccatgccctgagcccggcgcaagagcgtaacctggagcgtttgtgcgagtgtcgtgttatcgaccgcaccggccttattttagatattttcgcccaacgtgcgcgtacccatgagggtaagttgcaggttgagctggcgcagctgcgccatctggctacgcgcctggtgcgtggctggacccaccttgaaagacagaaaggcgggataggtttgcgtggtccgggtgaaacccagctcgaaaccgaccgtcgtttgttgcgtaatcgcatcgtgcagatacagtcgcgcctggaaagagttgaaaagcagcgtgagcaggggcggcaatcgcgtatcaaagccgacgttcctactgtttcgctggtgggatataccaacgccggtaaatctacccttttcaatcgcatcaccgaagcgcgggtctacgcggcagaccagttgtttgccaccctcgacccgacgttgcggcgtattgacgttgcagatgtcggtgaaaccgtacttgcagataccgtagggtttattcgccacctgccgcacgatctggtggcggcatttaaagccacgttacaagagacgcggcaagccacattactgctgcacgtcattgatgcggcggatgtgcgtgtacaagaaaacatcgaagcggtgaatacggttcttgaagagatcgacgctcacgagatcccaaccctgctggtgatgaacaagatcgatatgctggaagatttcgaaccgcgtattgatcgggacgaagagaacaaaccgatccgtgtctggctttccgcacagaccggagcggggataccacagctttttcaggctttgacggagcggctttccggcgaggtggcgcagcatacattgcgtctgccaccgcaggaagggcgtctgaggagtcgtttttatcagcttcaggcaatagaaaaagagtggatggaggaggacggcagcgtaagtctgcaagttcgtatgccgatcgttgactggcgtcgcctctgtaaacaagaaccggcgttgatcgattacctgatctaa

SEQ ID NO: 472599 - DNA, 1260 bp, Shigella flexneri
atggcgtggaatcagcccggtaataacggacaagaccgcgacccgtggggaagcagcaaacctggcggcaactctgagggaaatggaaacaaaggcggtcgcgatcaagggccacctgatttagatgatatcttccgcaaactgagcaaaaagctcggtggtctgggcggcggtaaaggcaccggatctggcggtggcagttcatcgcaaggcccgcgcccgcagcttggcggtcgtgtcgttaccatcgcagcggcagcgattgtcattatctgggcggccagtggtttctataccattaaagaagccgaacgcggcgtggtaacacgctttggtaaattcagccatctggttgagccgggtctgaactggaaaccgacgtttatcgacgaagtcaaaccggtgaacgtggaagccgtgcgtgaactggccgcttctggtgtgatgctgacgtcggacgagaacgtagtgcgcgttgagatgaacgtgcagtaccgcgtcaccaatccggaaaaatatctgtatagcgtgaccagcccggatgacagcctgcgtcaggctaccgacagcgccctgcgtggagttatcggtaaatacaccatggaccgcattctgacggaaggtcgtaccgtgattcgtagcgatactcagcgcgaactggaagagacgattcgtccgtatgacatgggtatcacgctgctggacgtcaacttccaggctgctcgtccgccggaagaagtaaaagctgcgtttgacgatgcgattgccgcgcgtgaaaacgaacagcaatacattcgtgaagcagaagcgtataccaacgaagttcagccgcgtgcgaacggtcaggcgcaacgtatcctcgaagaggcgcgtgcgtacaaggcccagaccatcctggaagctcagggtgaagtggcgcgctttgctaaacttctgccggaatataaagccgcgccggaaattactcgcgagcgtctgtatatcgagacgatggaaaaagtgttgggtaacacccgcaaagtgctggttaacgataaaggtggcaacctgatggttctgccgttagaccagatgctgaaaggtggtaacgcccctgcggcgaagagcgataacggtgccagcaatctgctgcgtctgccgccagcctcttcctccacaaccagtggagcaagcaacacgtcgtccaccagtcagggcgatattatggaccaacgccgcgccaacgcgcagcgtaacgactaccagcgtcagggggaataa

SEQ ID NO: 472600 - DNA, 1005 bp, Shigella flexneri
atgcgtaagtcagttatcgcgattatcatcatcgtgctggtagtgctttacatgtctgtctttgtcgtcaaagaaggtgagcgcggtattacgctgcgttttggtaaggtactgcgtgacgatgacaacaaacctttggtttatgagcctggtctgcatttcaagataccgttcattgaaacggtgaaaatgctcgacgcacgtattcagaccatggacaaccaggccgaccgctttgtgaccaaagagaagaaagacctgatcgtcgactcttacatcaaatggcgcatcagcgatttcagccgttactacctggcaacgggtggtggcgacatttcgcaagcggaagtgctgttgaaacgtaagttctctgaccgtctgcgttctgaaattggtcgcctggacgtgaaagatatcgtcaccgattcccgtggtcgtctgaccctcgaagtacgtgacgcgctgaactccggttctgcgggtacagaagatgaagttactaccccggcagcagataacgccattgccgaagcggcagagcgcgtaacggctgagacgaagggcaaagttccggtcatcaacccgaacagtatggcggcgctgggtattgaagttgtcgatgtgcgtatcaagcagatcaacctgccgaccgaagtgtctgaagcgatctacaaccgtatgcgcgccgagcgtgaagcggtagcgcgtcgtcaccgttcacaaggtcaggaagaagcggaaaaactgcgcgcgactgccgactatgaagtgaccagaacgctggcagaagctgagcgtcagggccgcattatgcgtggtgaaggcgatgccgaagcagccaaactgtttgctgatgcattcagtaaagatccggacttctacgcattcatccgtagcctgcgtgcttatgagaacagcttctctggcaatcaggacgtgatggtcatgagcccggatagcgatttcttccgctacatgaagacgccgacttccgcaacgcgttaa

SEQ ID NO: 472601 - DNA, 198 bp, Shigella flexneri; identical to SEQ ID NO: 1878

SEQ ID NO: 472602 - DNA, 1299 bp, Shigella flexneri
atgggtaacaacgtcgtcgtactgggcacccaatggggtgacgaaggtaaaggtaagatcgtcgatcttctgactgaacgggctaaatatgttgtacgctaccagggcggtcacaacgcaggccatactctcgtaatcaacggtgaaaaaaccgttctccatcttattccatcaggtattctccgcgagaatgtaaccagcatcatcggtaacggtgttgtgctgtctccggccgcgctgatgaaagagatgaaagaactggaagaccgtggcatccccgttcgtgagcgtctgctgctgtctgaagcatgtccgctgatccttgattatcacgttgctctggataacgcgcgtgagaaagcgcgtggcgcgaaagcgatcggcaccaccggtcgtggtatcgggcctgcttatgaagataaagtggcacgtcgcggtctgcgtgttggcgaccttttcgacaaagaaaccttcgctgaaaaactgaaagaagtgatggaatatcacaacttccagttggttaactactacaaagctgaagcggttgattaccagaaagttctggatgatacgatggctgttgccgacatcctgacttctatggtggttgacgtttctgacctgctcgaccaggcgcgtcagcgtggcgatttcgtcatgttcgaaggtgcgcagggtacgctgctggatatcgaccacggtacttatccgtacgtaacttcttccaacaccactgctggtggcgtggcgaccggttccggcctgggcccgcgttatgttgattacgttctgggtatcctcaaagcttactcaactcgtgtaggtgcaggtcctttcccggccgaactgtttgatgaaactggcgagttcctctgcaagcagggtaacgaattcggtgcaactacgggtcgtcgtcgtcgtaccggctggctggacaccgttgccgttcgtcgtgcggtacagctgaactccctgtctggcttctgcctgactaaactggacgttctggatggcctgaaagaggttaaactctgcgtggcttaccgtatgccggatggtcgcgaagtgactaccactccgctggcagctgacgactggaaaggtgtagagccgatttacgaaaccatgccgggctggtctgaatccactttcggcgtgaaagatcgtagcggcctgccgcaggcggcgctgaactacatcaagcgtattgaagagctgaccggtgtgccgatcgatatcatctctaccggtccggatcgtactgaaaccatgattctgcgcgacccgttcgacgcgtaa

SEQ ID NO: 472603 - DNA, 426 bp, Shigella flexneri
gtgcagttaacgagtttcactgattacggattacgtgcgctgatctacatggcgtcattgccagaagggcggatgaccagtatttctgaagtgactgacgtctacggcgtctcccgtaatcatatggtcaaaataatcaatcaacttagtcgtgccggctacgtgactgctgttcgtggaaaaaatggcggcattcgcctgggtaaaccggcgagtgcgatacgtattggtgatgtggtgcgcgagctggagcccttatcgctggtgaattgcagcagtgagttttgccacattacacctgcctgtcggttgaaacaggcgctttctaaggccgtgcaaagttttcttacggaactggataactacacgcttgccgatttggttgaagagaatcaaccgctttataaattattgctggtggagtga

SEQ ID NO: 472604 - DNA, 2442 bp, Shigella flexneri
atgtcacaagatcctttccaggaacgcgaagctgaaaaatacgcgaatcccatccctagtcgggaatttatcctcgaacatttaaccaaacgtgaaaaaccggccagccgtgatgagctggcggtagaactgcacattgaaggcgaagagcagcttgaaggcctgcgtcgccgcctgcgcgcgatggagcgcgatggtcaactggtcttcactcgtcgtcagtgctatgcgctgccggaacgcctcgacctggtgaaaggtaccgttattggtcaccgtgatggctacggctttctgcgggttgaagggcgtaaagatgatttgtatctctccagcgagcagatgaaaacctgcattcatggcgatcaggtgctggcgcagccgctgggtgctgaccgtaaaggtcgtcgtgaagcgcgtattgtccgcgtactggtgccaaaaaccagccagattgttggtcgctactttaccgaagcgggcgtcggctttgtggttcctgacgatagccgtctgagcttcgatatcttaatcccgcccgatcagatcatgggcgcgcggatgggctttgtggtcgtagtcgaactgactcagcgtccgactcgccgcaccaaagcggtgggtaaaatcgtcgaagtgctgggcgacaatatgggcaccggcatggcggttgatatcgctctgcgtacccatgaaattccgtatatctggccgcaggctgttgagcaacaggttgcggggctgaaagaagaagtgccggaagaagcaaaagcgggccgtgtcgatttgcgcgatttaccgctggtcaccattgatggcgaagacgcccgtgactttgacgatgcagtttactgcgagaaaaaacgcggcggcggctggcgtttatgggtcgcgattgccgacgtcagctactatgtgcgtccgccaacgccgctggacagagaagcgcgtaaccgtggcacgtcggtgtacttcccttcgcaggttatcccgatgctgccggaagtgctctctaacggcctgtgttcgctcaacccgcaggtagaccgcctgtgtatggtgtgcgagatgacggtttcgtcgaaaggccgcctgacgggctacaaattctacgaagcggtgatgagctctcacgcgcgtctgacctacaccaaagtctggcatattctgcagggcgatcaggatctgcgcgagcagtacgccccgctggttaagcatctcgaagagttgcataacctctataaagtgctggataaagcccgtgaagaacgcggtgggatctcatttgagagcgaagaagcgaagttcattttcaacgctgaacgccgtattgaacgtatcgaacagacccagcgtaacgacgcgcacaaattaattgaagagtgcatgattctggcgaatatctcggcggcgcgtttcgttgagaaagcgaaagaaccggcactgttccgtattcacgacaagccgagcaccgaagcgattacctctttccgttcagtgctggcggagctggggctggagctgccgggtggtaacaagccggaaccgcgtgactacgcggaactgctggagtcggttgccgaccgtcctgatgcagaaatgctgcaaaccatgctgctacgctcgatgaaacaggcgatttacgatccagaaaaccgtggtcacttcggtctggcattgcagtcctatgcgcactttacttcgccgattcgtcgttatcctgacctgacgctgcaccgcgccattaaatatctgctggcgaaagagcaggggcatcagggcaacaccactgaaaccggcggctaccattattcgatggaagagatgttgcaactgggtcagcactgttcgatggcggaacgtcgtgccgacgaagcaacgcgcgatgtcgctgactggctgaagtgtgacttcatgctcgaccaggtaggtaacgtctttaaaggcgtaatttccagcgtcactggctttggcttcttcgtccgtctggacgacttgttcattgatggtctggtccatgtctcttcgctggacaatgactactatcgctttgaccaggtagggcaacgcctgatgggggaatccagcggccagacttatcgcctgggcgatcgcgtggaagttcgcgtcgaagcggttaatatggacgagcgcaaaatcgactttagtctgatctccagtgaacgcgcaccgcgcaacgtcggtaaaacggcgcgcgagaaagcgaaaaaaggcgatgcaggcaaaaaaggcggcaagcgtcgtcaggtcggtaaaaaggtaaactttgagccagacagcgccttccgcggtgagaaaaaaacgaagccgaaagcggcgaagaaagacgcgagaaaagcgaaaaagccatcggcgaaaacgcagaaaatagccgcagcgaccaaagcgaagcgtgcggcgaagaaaaaagtggcagagtga

SEQ ID NO: 472605 - DNA, 732 bp, Shigella flexneri
atgagcgaaatgatttacggcatccacgcagtgcaggccctgctggagcgcgcccctgaacgttttcaggaagtctttattttaaaaggccgtgaagataaacgtctgttaccgctgattcacgcccttgagtctcagggcgtggttatccagttggcaaaccgccaatatctcgacgagaaaagcgacggtgccgtgcatcagggcattatcgcccgcgtgaagccaggacgtcagtatcaggaaaacgatctgccggatctgatcgcttcgctcgatcaaccgttcctgctgatcctcgacggcgtaaccgatccgcacaacctcggcgcgtgcctgcgtagtgcggacgccgcaggcgttcatgcggtgattgtgccgaaagatcgctccgcacagctcaacgctacggcgaaaaaagtagcctgcggcgcggcagaaagcgttccgctgattcgggtgactaaccttgcgcgcaccatgcgtatgttgcaggaagagaatatctggatcgtcggtacggcaggcgaggcggatcatacactctatcagagcaaaatgaccggacgcctggcgctggtgatgggcgcggaaggtgaaggtatgcgtcgcctgacccgtgaacattgcgatgagttgatcagcatcccaatggcaggaagtgtttcttccctgaacgtttcggttgcaaccggaatttgcttatttgaagcggttcgtcagcgcagctag

SEQ ID NO: 472606 - DNA, 1197 bp, Shigella flexneri
atggctcaagttattaatgaaatggatgttccgtcccattcttttgtttttcatggtacaggtgagagatattttcttatttgtgtggtgaatgtgttgttaacgattataacgctaggtatctatttaccatgggcattaatgaaatgtaagcgttatctttatgctaatatggaagttaacggacaacgattttcttatggaattaccggtgggaatgtttttgttagttgtcttgtttttgtttttttctatttcgcaatcttaatgacagtgtcagcagatatgccgcttgttggctgtgttttgactttgttactgttggttttgcttatatttatggcagcaaaaggactgcgttatcaggccttaatgaccagtctcaacggcgtaagatttagttttaattgctctttgaaagggttctggtgggtaacctttttcttgccgattttaatggccattgggatggggactgttttctttatctcgacaaagatgctacatgccaatagttcaagtagtgttattatatctgtggttctgatggcaatagttggtattgtttccattggtatttttaatggtactttatatagcctggtaatgagttttctctggagcaataccagtttcggtatacatcgtttcaaggtgaaattagatactgcgtattgtataaaatatgccatcctcgcatttttagctttattaccttttctcgctgttgctggttatattatcttcgatcaaatattaaatgagtatgatagttctgggtatgcaaatgatgatattgagaatttacagcaatttatggaaatgcaacgtaaaatgataatcgcgcagttaatttattattttgggattgctgttagcaccagttatttaacggtgtcgttgcgaaatcattttatgagcaacctgtcactgaatgatgggcgtattcgttttcgctcaactttaacgtaccacggtatgctttatcgcatgtgtgcgttggtggtgatatccgggattacgggtggtctggcttacccactgctgaaaatatggatgattgactggcaggcaaaaaatacgtatttgctgggcgatttggatgaccttcctttaatcaataaagaagaacaaccagataaaggcttcttagccagtatttctcggggagttatgccttctttaccatttctgtaa

SEQ ID NO: 472607 - DNA, 2856 bp, Shigella flexneri
atggaaaagacatacaacccacaagatatcgaacagccgctttacgagcactgggaaaagcagggctactttaagcctaatggcgatgaaagccaggaaagtttctgcatcatgatcccgccgccgaacgtcaccggcagtttgcatatgggtcacgccttccagcaaaccatcatggataccatgatccgctatcagcgcatgcagggcaaaaacaccctgtggcaggtcggtactgaccacgccgggatcgctacccagatggtcgttgagcgcaagattgccgcagaagaaggtaaaacccgtcacgactacggccgcgaagctttcatcgacaaaatctgggaatggaaagcggaatctggcggcaccattacccgtcagatgcgccgtctcggcaactccgtcgactgggagcgtgaacgcttcaccatggacgaaggcctgtccaatgcggtgaaagaagttttcgttcgtctgtataaagaagacctgatttaccgtggcaagcgcctggtaaactgggacccgaaactgcgtaccgctatttctgacctggaagtggaaaaccgcgaatcgaaaggttcgatgtggcacatccgctatccgctggctgacggcgcgaaaaccgcagacggtaaagattatctggtggttgcgaccactcgcccggaaaccctgctgggcgataccggtgtagctgttaacccggaagatccgcgttacaaagatctgattggcaaatatgtcattctgccgctggttaaccgtcgtattccgatcgttggcgacgaacacgccgacatggaaaaaggcaccggctgcgtgaagatcaccccggcgcacgactttaacgactatgaagtcggtaaacgtcacgccctgccgatgatcaacatcctgacctttgacggtgatatctgtgaaagcgcccaggtgttcgataccaaaggtaacgaatctgacgtttattccagcgagatcccggcagagttccagaaactcgagcgttttgctgcacgtaaagcagtcgttgctgcggttgatgcactcggcctgctggaagaaattaaaccgcacgacctgaccgttccttacggcgaccgtggcggcgtggttatcgaaccgatgctgaccgaccagtggtacgtgcgtgccgatgtactggcgaaaccggcagttgaagcggttgagaacggcgacattcagttcgtaccgaagcagtacgaaaacatgtacttctcctggatgcgcgatattcaggactggtgtatctctcgtcagctgtggtggggtcaccgtatcccggcatggtatgacgaagcgggtaatgtttatgttggccgcaacgaagaagaagtgcgcaaggaaaataacctcggtgccaacgttgccctgcgtcaggacgaagacgttctcgacacctggttctcttctgcactgtggaccttctctacccttggctggccggaaaataccgacgccctgcgtcagttccacccaaccagcgtgatggtatctggtttcgacatcatcttcttctggattgcccgcatgatcatgatgaccatgcacttcatcaaagatgaaaatggcaaaccgcaggtgccgttccacactgtttacatgaccggtctgattcgtgacgacgaaggtcagaagatgtccaaatccaagggtaacgttatcgacccgctggatatggttgacggtatttcgctgccagaactgctggaaaaacgcaccggcaatatgatgcagccgcagctggcggacaaaatccgtaagcgcaccgagaaacagttcccgaacggcattgagccgcacggcaccgatgccctgcgcttcaccctggcggcgctggcgtctaccggtcgtgacatcaactgggatatgaagcgtctggaaggctaccgtaacttctgtaacaagctgtggaacgccagccgctttgtgctgatgaacacagaaggtcaggattgcggcttcaacggcggcgaaatgacgctatcgctggcggaccgctggattctggcggagttcaaccagactatcaaagcgtaccgcgaagccctggacagcttccgcttcgatatcgccgcaggcattttgtatgagttcacctggaaccagttctgcgactggtatctggagctgaccaagccggtaatgaacggtggaacagaagccgaactgcgcggtactcgccatacgctggtgactgtactggaaggtctgctgcgcctcgcgcatccgatcattccgttcatcaccgaaaccatctggcagcgtgtgaaagtactttgcggtatcactgccgacaccatcatgctgcagccgttcccgcagtatgatgcatctcaggttgatgaagccgcactggccgacaccgagtggctgaaacaggcgatcgttgctgtacgtaacatccgtgcagaaatgaacatcgcgccgggcaaaccgctggagctgctgctgcgtggttgcagcgcggatgcagaacgtcgcgtaaatgaaaaccgtggcttcctgcaaacgctggcgcgtctggaaagcatcaccgtgctgcctgccgatgacaaaggtccggtttccgttaccaagatcatcgacggcgcagagctgctgatcccgatggctggcctcatcaacaaagaagatgagctggcgcgcctggcgaaagaagtggcgaagatcgaaggtgaaatcagccgcatcgagaacaagctggcaaatgaaggctttgtcgcccgcgcaccggaagcggttatcgcgaaagagcgtgagaagctggaaggttatgcagaagcgaaagccaagctgattgaacagcaggctgttatcgccgcactgtaa

SEQ ID NO: 472608 - DNA, 483 bp, Shigella flexneri
atgcagcaatatttaaatccaccacaagaagccccatatatgaaaaacgcaacgttctaccttctggacaatgacaccaccgtcgatggcttaagcgccgttgagcaactggtgtgtgaaattgccgcagaacgttggcgcagcggtaagcgcgtactcatcgcctgtgaagatgaaaagcaggcttaccggctggatgaagccctgtgggcgcgtccggcagaaagctttgttccgcataatttagcgggagaaggaccgcgcggcagtgcgccggtggagatcgcctggccgcaaaaacgcagcagcagcccgcgcgatatattgattagtctgcgaacaagctttgcagattttgccaccgctttcacagaagtggtagacttcgttccttatgaagattctctgaaacaactggcgcgcgaacgctataaagcctaccgcgtggctggtttcaacctgaatacggcaacctggaaataa

SEQ ID NO: 472609 - DNA, 1512 bp, Shigella flexneri
atggagtttagtgtaaaaagcggtagcccggagaaacagcggagtgcctgcatcgtcgtgggcgtcttcgaaccacgtcgcctttctccgattgcagaacagctcgataaaatcagcgatgggtacatcagcgccctgctacgccggggcgaactggaaggaaaaccggggcagacattgttgctgcaccatgttccgaatgtactttccgagcgaattctccttattggttgcggcaaagaacgtgagctggatgagcgtcagtacaagcaggttattcagaaaaccattaatacgctgaatgatactggctcgatggaagcggtctgctttctgactgaactgcacgttaaaggccgtaacaactactggaaagtgcgtcaggctgtcgagacagcaaaagagacgctctacagtttcgatcagttgaaaacgaataagagcgaaccgcgtcgtccgctgcgtaaaatggtgttcaacgtgccgacccgccgtgaactgaccagcggtgagcgcgcgatccagcacggtctggcgattgccgccgggataaaagcagcgaaagatctcggtaatatgccgccgaatatctgtaacgccgcttatctcgcctctcaggcgcgccagctggctgacagctacagcaagaatgtcatcacccgcgttatcggcgaacagcagatgaaagagctgggaatgcactcttatctggcggtcggtcagggttcacaaaacgaatcgctgatgtcggtgattgagtacaaaggcaacgcgtcggaagatgcacgcccaatcgtgctggtgggtaaaggtttaaccttcgactccggcggtatctccatcaagccttcagaaggcatggatgagatgaagtacgatatgtgcggcgcggcggcagtttacggcgtgatgcgtatggtcgcggagctgcaactgccgattaacgttattggcgtgctggcaggctgtgaaaacatgcctggcgggcgtgcctatcgtccgggcgatgtgttaaccaccatgtccggtcaaaccgttgaagtgctgaacaccgatgccgaaggccgcctggtactgtgcgacgtgttaacttacgttgaacgttttgagccggaagcagtgattgacgtggcgacgctgaccggtgcctgcgtgatcgcgctgggtcatcatattactggtctgatggcgaaccataatccgctggcccatgaactgattgccgcgtctgaacaatccggtgaccgcgcatggcgcttaccgctgggtgacgagtatcaggaacagctggagtccaattttgccgatatggcgaacattggcggtcgtcctggtggggcgattaccgcaggttgcttcctgtcacgctttacccgtaagtataactgggcgcacctggatattgcaggaaccgcctggcgttctggtaaagcaaaaggcgcaaccggtcgtccggtagcgttgctggcacagttcctgttaaaccgcgctgggtttaacggcgaagagtaa

SEQ ID NO: 472610 - DNA, 1080 bp, Shigella flexneri
gtgcgggagacgctcaaaagccagctggcgatactcttcatcttgcttttgatcttcttctgtcaaaagttagtgaggatcctcggcgcagcggttgacggcgatattccggcgaatctggtgctctcccttctcgggttgggcgtgccggaaatggcgcagcttatcctgccattaagcctgttcctcgggctgctgatgacgctgggcaaactgtataccgaaagtgaaattacggtaatgcatgcctgcggcttgagcaaagcggttctggtgaaagcggcaatgatccttgcggtattcacggcaatcgtcgcggcggttaacgtgatgtgggcgggaccgtggtcatcgcgtcatcaggatgaagtgttagcagaagcgaaagcgaaccctggcatggcggcgctggcgcaagggcaattccagcaagcgactaatggcagctcggtgctgttcatcgaaagcgttgacggcagcgatttcaaagatgtgttcctcgcacaaattcgaccaaaaggtaatgcacgtccttctgtggtggtggccgattccggacatttaacccagctgcgcgacggctcccaggtcgtcactctcaaccagggaacgcgcttcgaaggcactgcactgttacgtgatttccgcattacggatttccaggattatcaggcgatcattggtcaccaggcggtggcgctcgacccgaacgataccgaccagatggacatgcgcacattgtggaacactgacaccgatcgtgctcgcgcagaactgaactggcgtatcacgttggtattcaccgtgtttatgatggcacttatggttgtaccgttgagcgtggttaacccgcgtcagggacgcgtactgtcgatgctgccagccatgctgctgtatctacttttcttcctgatccagacctccctgaaatcgaacggcggtaaaggtaagctggacccgacactgtggatgtggaccgttaacctgatttatctggctttggcgattgttctcaacctttgggacaccgtgccggtccgccgcctgcgcgccagtttttcgcgtaaaggagcggtgtga

SEQ ID NO: 472611 - DNA, 1083 bp, Shigella flexneri
atgcaaccttttggcgtacttgaccgctatatcggtaaaactattttcaccaccatcatgatgacgctgttcatgctggtgtcgctgtcgggcattatcaaatttgtcgatcagctgaaaaaagccgggcaggggagttacgacgcgttaggcgcaggaatgtataccttgctgagcgtgccgaaagatgtgcagatcttcttcccgatggcggctcttcttggggcgttgcttggtcttgggatgctggcgcagcgcagcgaactggtggtgatgcaggcttctggttttacccgtatgcaggtagcgctgtcggtgatgaaaaccgccattccactggtcttgctgacgatggcgattggcgaatgggtcgcgccgcagggcgaacagatggcgcgtaactaccgtgcgcaggcgatgtacggcggctcgttgctctctacccagcaaggtttatgggcgaaagatggcaacaacttcgtctacattgagcgggttaaaggtgacgaggtgttaggtggcatcagtatttatgcctttaacgagaatcgtcgtctgcaatccgtacgttatgccgctaccgcgaagtttgacccggaacataaagtctggcgtctgtcgcaggttgatgaatctgatctgaccaatccgaaacagattaccggttcgcagacggtgagcggcacctggaaaaccgacctcacgccagacaaactgggcgtggtggcgctggacccggatgcactctccatcagtggtttgcacaactacgtgaagtatctgaagtcgagcggtcaggatgccggacgttatcagctcaacatgtggagcaaaatcttccagccgctatccgtggcggtgatgatgctgatggcgctgtcgtttatctttggcccactgcgtagcgtaccgatgggcgtgcgtgtggtcacaggtatcagcttcggttttgtcttctacgtactggaccagatcttcggcccgctgacgttggtttacggcatcccgccgatcatcggcgcactgttgccaagtgccagcttcttcttaatcagcctgtggctgttaatgagaaaatcgtaa

SEQ ID NO: 472612 - DNA, 1503 bp, Shigella flexneri
atgagcgaacccctgttaattgcccgcacgccggacacagaactgtttttactgccgggaatggctaaccgtcacgggctgattactggcgcaacggggacgggtaaaaccgttacgctgcaaaaactggcagagtcattgtcggaaatcggcgtgccggtgtttatggctgatgtgaaaggcgatctgaccggtatcgcgcaggcaggaacggcgtcggaaaaactgctcacaaggcttaaaaatatcggcgtcaatgactggcaaccgcatgccaatccggtggtggtgtgggatatctttggcgagaaaggccacacggtgcgggcgacggtttcggatctggggccgctgttgctggcgcgactgttgaatctcaacgatgtgcaatctggcgtgctgaatattatcttccgcattgcggacgatcagggattgttgctgctcgactttaaagatttgcgggcgattacccagtacatcggcgataacgccaaatccttccagaatcagtacggaaatatcagtagcgcatcggttggtgccatccagcgcggattactgtcgctggaacagcaaggcgcagcacacttctttggtgagccgatgctggatatcaaagactggatgcgcaccgatgccaacggtaaaggcgttatcaatatcctcagcgccgagaaactttatcagatgccgaaactgtacgccgccagcctgctgtggatgctttcagagttgtatgaacaattgccggaagcgggcgatctggagaaaccaaaactggtgtttttcttcgacgaggcacatctgctgtttaacgatgcaccgcaggtactgctggataagattgagcaggtgataaggcttattcgctcaaaaggcgtgggcgtctggttcgtttcgcaaaacccgtctgatattccggataatgtgttcgtccagctcggtaatcgtgttcagcacgctttgcgggcttttacgccaaaagatcagaaagcagtgaagacagcggcgcaaaccatgcgggccaatccggcatttgataccgaaaaggcaatccaggaactggggaccggcgaggcgttaatctcgtttctcgatgcaaaaggaagtccttctgtggtggaacgggcgatggtgatcgcaccttgttcgcgaatggggccggtgacggaagatgagcgtaatggcctgattaatcactccccggtgtatggcaaatatgaagatgaggtggaccgcgagtccgcctatgagatgctgcaaaaaggctttcaggccagtaccgagcagcaaaataatccccccgtgaaagggaaagaggtggcggtggatgacggtattcttggtggattgaaggatattttgtttggcactaccggaccacgcggcgggaagaaagatggtgtggtgcaaacaatggcgaaaagcgccgctcgccaggtgacgaatcagattgtacgcgggatgttggggagtttgctgggggggagaaaaagataa

SEQ ID NO: 472613 - DNA, 1020 bp, Shigella flexneri
atgtcgatgataaaaagctatgccgcaaaagaagcgggcggcgaactggaagtttatgagtacgatcccggtgagctgaagccacaagatgttgaagtgcaggtggattactgcgggatttgtcattccgatctgtcgatgatcgataacgaatggggattttcacaatatccgctggttgccgggcatgaggtgattgggcgcgtagtggcactcgggagcgccgcgcaggataaaggtttgcaggtcggtcagcgtgtcgggattggctggacggcgcgtagctgtggtcactgcgacgcctgtattagcggtaatcagatcaactgcgagcaaggtgcggtgccgacaattatgaatcgcggtggctttgccgagaagttgcgtgcggactggcaatgggtgattccactgccagaaaatattgatatcgagtccgccgggccgctgttgtgcggcggtatcacggtctttaaaccactgttgatgcaccatatcactgctaccagccgcgttggggtaattggtattggcgggctggggcatatcgctataaaacttctgcacgcaatgggatgcgaggtgacggcctttagttctaatccggcgaaagagcaggaagtactggcgatgggtgccgataaagtggtgaatagccgcgatccgcaggcactgaaagccctgtcggggcagtttgatctcattatcaatactgtgaacgtcagcctcgactggcagccttattttgaggcgctgacctatggcggtaatttccatacggtcggtgcggttctcacgccgctgtctgttccggcctttacgttaattgcgggcgaccgcagcatctctggttctgctaccggcacgccttatgagctgcgaaagctgatgcgctttgccgcccgcagcaaggttgcgccgacaaccgaactgttcccgatgtcgaaaattaacgacgccattcagcatgtacgcgatggtaaagcgcgctaccgagtagtcctgaaagccgacttctga

SEQ ID NO: 472614 - DNA, 1266 bp, Shigella flexneri
atggcattaacagatatcaaagtcagagcagccaagccaacggataagcaatataagctgactgatggtggcggtatgcatctgcttgtccatccaaatggttctaagtactggcgtttgcagtaccgttatgagggaaagcaaaaaatgctggcacttggggtttatcctgaaatcacactagcggatgccagagtacgtcgtgacgaggcgcgtaacctgcttgcgaatggcgtcgatccgggagacaaaaagaaaaatgataaggttgaacagagtaaagcacgaacctttaaagaagtcgcgattgagtggcatggcaccaataaaaagtggtctgaagatcacgcccatcgtgtgctaaaaagtcttgaagataatctttttgcagcgcttggtgaacgtaatatcgctgagttaaaaactcgagatttattagcacctattaaggccgtagaaatgtctggacgtcttgaagtggccgctcgtcttcagcagcgcactacagccatcatgcgctatgcagtgcaaagtgggttaattgattataacccggcacaagagatggctggggcggttgcttcctgtaatcgacaacatcgtcccgcgcttgaattaaagcgcatccctgagttgcttacaaaaatagatagctatactggtaggccgctaacccgatgggcgatagaactcactttgctgatctttattcggtccagtgagctgcgttttgctcgttggtcagagatcgatttcgaagcgtctatatggactatcccaccggagcgggagcctattcctggagtgaaacattcccatagaggctcaaaaatgcgtacaacgcatctagtgcctctttcaacgcaagctcttgcaattttaaagcagataaaacagttttatggggcccatgacttgatatttattggtgatcacgattcgcacaaacccatgagtgagaatacggtaaatagtgcgttacgggtcatggggtatgatacaaaagtagaggtttgtggtcatggctttcgaacaatggcctgtagttcattggtcgaatcaggtttgtggtctcgtgatgctgttgaacgtcagatgagccacatggagcgaaattcagtgagggccgcgtatatccataaagcagagcatctggaagaacggcgattgatgctacagtggtgggccgattttctggatgtaaacagagaaagatttatcagtccatttgaatatgcaaagattaataatccattaaaacagtaa

SEQ ID NO: 472615 - DNA, 333 bp, Shigella flexneri; identical to SEQ ID NO: 463218

SEQ ID NO: 472616 - DNA, 1218 bp, Shigella flexneri
atggcaacagcatggtataaacaagttaatccaccacaacggaaagctcttttttccgcatggcttggatatgtatttgatggctttgattttatgatgatattttacattcttcatattataaaagcagatcttggcattacggatattcaggctactttaatagggacagtggccttcatagccagacctattggaggtggtttttttggtgccatggctgataaatatggtcgtaagccaatgatgatgtgggcaattatcatttattcagtcggaacaggccttagcggtattgctacaaacttatatatgctcgcagtttgccgttttattgttggcttagggatgtctggtgaatatgcatgtgcttcaacttatgcggtagaaagttggcctaaaaatcttcaatctaaagctagtgcttttttggtaagtggtttttctgttggaaatattattgcggcacaaataatccctcagtttgctgaagtatatggatggagaaactctttttttataggcctgttaccagttttactagttctttggatcagaaaaagtgctccagaaagtcaggagtggattgaagataaatataaggataaatcaacttttttgtctgtcttcagaaaaccacatctttcaatctctatgatcgttttcctcgtctgtttttgtctatttggtgcaaactggccgataaacggactacttccttcctacctggcagataatggagttaatacagtggttatttcaactctgatgacaatagcaggtttaggaacactgacaggtacaatattttttggttttgttggtgataagattggtgtaaaaaaagcctttgtagtcggtctaataacttcatttgttttcctttgtcctcttttttttatttctgtgaaaaactcttctcttataggattatgtctctttggattaatgtttacaaatttaggtattgcagggttggttccaaaatttatatatgattactttccaacaaaattaagaggattagggaccggtcttatttataacttaggggcaactggaggaatggccgcacctgtattagctacatacatttcaggatattatggcttaggtgtttcattattcattgttacggttgcattctctgccttattaattttgttagttggttttgatattccaggtaaaatttataaactatccgtggctaaataa

SEQ ID NO: 472617 - DNA, 1119 bp, Shigella flexneri
atgattaattatggcgttgttggtgttggatactttggcgctgaattagctcgttttatgaatatgcatgataatgcaaaaattacatgtgtatacgatcctgaaaatggagaaaatattgcccgtgaattgcagtgtatcaatatgtcaagcttggatgctttagtctcaagtaaattagtcgattgcgtgatcgtagccaccccaaattatctgcataaagaaccagtaattaaagcagcaaagaataagaagcatgttttttgtgaaaaaccaattgcattaagttatgaagattgtgtggatatggtcaaagcgtgtaaagaagctggtgtgacctttatggccgggcatattatgaattttttcaatggggttcaatatgcacggaagttaattaaagaaggtgttatcggcgaaatattatcatgtcatactaagagaaatggctgggaaaacaaacaagagagactttcctggaaaaagatgaaagaacaatctggtggacatctatatcatcatatacatgagttagattgtgttcagcatttacttggagaaataccagagacggttactatgattggtggaaatttggcccattctggtccaggatttggcaatgaagatgatatgttatttatgaccttggaattcccgtcaggaaaactagcaaccttagagtgggggagtgcatttaactggccggaacattatgtcatcatcaatggaactaaaggctctattaaaattgatatgcaagaaacagcagggtcacttaggattggcggtcagacaaagcattttttggtccatgaaacacaagaagaagatgatgatcgtcggaaaggcaatatgacctcagaaatggatggcgctatagcatatggtcatccaggaaaaaaaacaccattatggcttgccagtttaataagaaaggaaacgttattcctccataatatcctctgtggtgcaaaacctgaagaagattatattgaccttctcaatggtgaggcggccatgtcggcgattgctactgctgatgctgccactctttcaagatcgcaggacaggaaagtgaaaatcagtgagatcattaaacatacatcagtaatgtaa

SEQ ID NO: 472618 - DNA, 126 bp, Shigella flexneri
atgatcaagaattttatcttcgataatctcataattttagcagtgccatttatgataaaaacatcccttaaaaccaatctaatctttttcttcctctgcgtatttgttccccgtatggcgtcataa

SEQ ID NO: 472619 - DNA, 303 bp, Shigella flexneri
atgtcggcgacagcggaaccggcgttcatcaatccgctggcaattcccacatacttcggcgtaatatccatcgggacagcccggataggcccaatggtcagctcatcggccagcaatgtcgtgaactgtgagacgaaacagcgtacacagtttgaatgtatctacttttcccaatactgggcgaagggagatgttattgcgaatcgcgcgccaattggtcagtgggaaccttattcggaagagccactacttggcatcatcgtcaccagcgtctgtcgtattaatcgcgatgctaaaacctga

SEQ ID NO: 472620 - DNA, 177 bp, Shigella flexneri
atgaaaagaagaaatttcagtcctgaattcaaacgtgaatccgctcagttggttgtcgatcaaaattacactgtttctgacgctgctaaggctatggatgttggtctttccacgatgacggaatggttcaaacaactgcgtgatgagcgtcagggcaaacgccaaaagccttcctga

SEQ ID NO: 472621 - DNA, 744 bp, Shigella flexneri; identical to SEQ ID NO: 17530

SEQ ID NO: 472622 - DNA, 171 bp, Shigella flexneri
atgtggcgttatcggatcaaggagagtatgagtcgtcggggaaactgctgggatattagcctaatggtacgtttcttcagaagtctgaagaacgagtgggcaccagtgactggttactttagccttaacgaaggtgtccatacaataacagagtatataattgaatattaa

SEQ ID NO: 472623 - DNA, 1014 bp, Shigella flexneri
atgagtacgcgtattaatttgtggcgggcgctttttggcgagaaacctcgtatcttgctggaaaatagtgattttactgtcacgtcttttcgctatgacagcggtgtcgaggggcttaaaattgcaaacagtcgtggacatttgattattcttccctggatggggcagatgatttgggatgcgcaatttgatggacacggcctcaccatgtgcaatatgtttcgccagcctaaaccggcgacagaggtgatagagacctatggctgttttgcttttcattcaggtttgctggctaatggctgcccatctgcggaagatactcatctgctacacggtgaaatggcctgtgccgcgatggatgaagcatggctggaattagacggagatatgttacgccttaacgggcgttacgagtatgtaatgggtttcggtcatcattatctggctcaaccaacagtggtccttcacaaatcctctacactgttcgatattaagatggccgtaaccaatctggcttctgtagatatgccactacaatatatgtgccacatgaattatgcatatataccaaatgctacattcagccagaatatcccggacgaaatattaagattacgtgaatcagtgccttcgcatgttaatcccaccgctcagtggctggcgtttaatcaacggattatgcagggagaagcctctctgtcgacgctgagtcaaccggaattttatgatccagaaattgtcttctttgcagacaaactggacgcttatacagatcagccagagtttcgcatgatctctcccgatggcactacgtttgttactcgtttctacagtgctgaactaaattatgtgacacgctggatcctttataacggagagcaacaggtagccgcctttgcattacctgcaacctgtcggcctgaggggtatcttgccgcgcaacgtaatggcacgctgattcaggttgcaccgcagcaaacgcgcacttttacagtcaccacaggaattgaataa

SEQ ID NO: 472624 - DNA, 1086 bp, Shigella flexneri; identical to SEQ ID NO: 29380

SEQ ID NO: 472625 - DNA, 981 bp, Shigella flexneri; identical to SEQ ID NO: 463219

SEQ ID NO: 472626 - DNA, 231 bp, Shigella flexneri; identical to SEQ ID NO: 129443

SEQ ID NO: 472627 - DNA, 495 bp, Shigella flexneri
atggagttacaacactggcaggcacagttcgagaactggttgaaaaaccatcatcaacatcaggacgcggcgcatgacctgtgtcattttcgccgtgtctgggctacggcacagaaactggcggcagatgacgatgtcgatatgctggtgattttaaccgcctgttattttcacgatatcgtgagcctggcgaaaaatcatccgcaacggcagcgttcttcaatcctggcggcagaagagacgcgtcgcctgctccgtgaagagttcgtgcaatttccggcggagaaaattgaggccgtttgtcatgccattgccgctcacagtttcagcgcgcaaatcgcccccttaacaacggaagctaaaatcgtccaggatgcggatcggctggaagccctgggggcgattggcctggcgcgcgtatttgccgtttcaggggcattgagcttggcgctgtttgatggcgaagctcggtgccgaactggcgggggagaatga

SEQ ID NO: 472628 - DNA, 1419 bp, Shigella flexneri
atgcaggaaaatatatcagtaaccgattcatacagcaccgggaatgccgcacaggcaatgctggagaaactgctgcaaatttatgatgttaaaatgctggtggcgcagcttaatggtgtgggtgagaatcactggagcgcggcaattttaaaacgtgcgctggcgaatgactcggcatggcaccgtttaagtgagaaagagtttgcccatctgcaaacgttgttacccaaaccaccggaacatcatccgcattatgcgtttcgctttatcgatctatttgccggaattggcggcatccgtcgtggttttgaatcgattggtggacagtgcgtgtttaccagcgaatggaacaaacatgcggtacgcacttataaagccaaccattattgcgacccggcgacgcatcattttaatgaagatatccgcgacatcaccctcagtcatcaagaaggcgtgagtgatgaggcggcggcggaacatattcgtcaacacattcctgaacacgatgttttactggccggtttcccttgtcagccattttcgctggctggcgtatcgaaaaagaactcgctcgggcgggcgcacggttttgcctgcgatacccagggcacgctgttctttgatgtggtgcgcattatcgacgcgcgtcgtccggcgatgtttgtgctcgaaaacgtcaaaaacctgaagagtcacgataagggaaaaacgttccgcatcatcatgcagacgctggacgaactgggctatgacgttgccgatgcagaagataacgggccggacgatccgaaaatcatcgatggtaaacatttcctgccgcagcaccgtgaacgcatcgtgctggtgggttttcgtcgcgatctgaatctgaaagccgattttactctgcgtgatatcagcgaatgtttccctgcacagcgagtgacgctggcgcagctgctggacccgatggttgaggcgaaatatatcctgacgccggtgctgtggaagtacctctatcgatatgcgaaaaaacatcaggcgcgcggtaacggcttcggttatggaatggtttatccgaacaatccgcaaagcgtcacccgtacgctgtctgctcgttattacaaagatggcgcggaaattttaatcgatcgcggttgggatatggccacgggtgagaaagactttgacgatccgctgaatcagcaacatcgtccacgtcggttaacgcctcgtgaatgcgcgcgcttaatgggttttgaagcgccgggagaagcgaaattccgcattccggtttcggacactcaggcctatcgccagttcggcaactcggtggtcgtgccggtctttgccgcggtggcaaaactgcttgagccaaaaatcaaacaggcggtggcgttgcgtcagcaagaggcacaacatggtcgacgttcacgataa

SEQ ID NO: 472629 - DNA, 471 bp, Shigella flexneri
atggtcgacgttcacgataaggccacccgcagcaaaaatatgcgcgcgattgccacgcgtgatacggcgattgagaagcgcctcgccagtttgttaaccgggcagggccttgcgtttcgcgttcaggacgccagtctgcccggacgcccggattttgtcgttgatgaatatcgctgcgtgatatttacccacggctgcttctggcatcatcatcactgctatctgtttaaagtgcctgcgactcgaactgagttctggctggagaagataggtaaaaatgttgaacgcgatcgccgcgatatcagtcgcttgcaggagctcggctggcgcgtactgattgtctgggagtgtgcgttacgtaggcgcgagaagctgacggatgcggcgcttaccgagcgtctggaagagtggatctgcggcgaaggtgccagcgcgcagatcgacacgcaggggattcatttactcgcttga

SEQ ID NO: 472630 - DNA, 921 bp, Shigella flexneri
atgcgtttccgccagttgttaccgctttttggcgcgctgtttgcgttgtatatcatttggggctcaacctattttgtcattcggattggcgtgggaagctggcctccgttaatgatggcgggcgttcgattccaggcagccggtattttattgctggcatttttgctactgcgcggacacaaacttcccccgctacgtccgctgctcaatgccgcgctgattggcctgttattgctggctgtcggtaatggcatggtgacggttgccgaacatcaaaatgttccttccggcatcgccgccgtagtgattgcaaccgtgcccctctttaccctgtgcttcagtcgcctgtttggcattaaaacgcgcaaactggaatgggtgggtattgccattgggcttgccggaatcatcatgctcaatagcggtggaaatttaagcggcaatccgtggggcgcgattctgattttaatcggctcgattagctgggcgtttggctcagtttatggctcgcgcattaccttacctgtagggatgatggcgggtgcgattgagatgctggcggcaggcgtggtgttaatgatcgcatcgatgattgcgggtgaaaaactgacggcgctcccttccctgtcaggcttccttgcggtcggctatctggcgctgtttggttcgattatcgccattaacgcttatatgtatttaatccgtaatgtcagtccggctctcgccaccagctacgcctacgttaacccggtggtcgcggtcttgctgggtacgggactgggtggcgaaacgctgtcgaagattgaatggctggcgctcggcgtaattgttttcgcggtggtactggtcacgttgggaaaatatctcttcccggccaaacccgttgtcgcgccagttattcaggatgcatcaagcgagtaa

SEQ ID NO: 472631 - DNA, 918 bp, Shigella flexneri
atgcttttggccgggagtagtttactgacgttgctcgatgatatcgccacactgctggacgatatctctgtgatgggcaaactggcggcgaagaaaaccgccggtgtattaggggatgatttatcgctcaatgcgcaacaagtttcaggcgtgcgggccaaccgggaacttcccgtggtctggggcgtggcgaaaggatcgctgatcaataaagtgattctggtgccgctggcgctgatcatcagtgcgtttatcccgtgggcgattacgccactgttgatgattggtggcgcgtttctctgctttgaaggggtagagaaagtgctgcatatgctggaggcgcgtaaacataaagaagatccagcgcagagccagcagcgtctggagaagctggcggcgcaggatccgctgaagtttgaaaaggacaaaattaaaggggcgattcgtaccgattttattttgtctgcggaaatcgtcgccatcacgctggggattgtggcagaggcgccgttgcttaatcaggtgctggtgctttcaggcatcgcgctggtagtgaccgtgggcgtctacggtctggtaggggttatcgttaagattgatgacctagggtattggctggcggaaaaatctagcgcgctgatgcaggcattaggtaaagggttattgattatcgcgccttggctgatgaaagcattatcgattgtcggcacgctggcgatgttcctcgtcggcggcgggattgtggtacatggtattgcgccgctgcatcacgctattgaacatatcgccgggcagcaaagtgcagtggtggcgatgatattaccgactgttttaaatctgattcttggatttatcatcggcggcatcgtggtgctgggagtgaaagcagtagcgaaaatgcgcggtcaggcacattaa

SEQ ID NO: 472632 - DNA, 183 bp, Shigella flexneri; identical to SEQ ID NO: 1615

SEQ ID NO: 472633 - DNA, 168 bp, Shigella flexneri
gtgcagcacgagacaaaaatggaaaaccagagctggttgaaaaaactcgcacgccgcctggggcccggtcatgtcgttaatctctgctttatcgtggtattgcttttttccaccttgctcacctggcgtgaagtggtggtgctggaagatgcctatatctccagctag

SEQ ID NO: 472634 - DNA, 1485 bp, Shigella flexneri
ttgcagtataacgtcgacaaactgatctttttgcgtaatggcatgcgcgaagctctcgtggcgccactggatttcacctctctgcgtaatgccgtaaccgagttcgaacagcatcgcgacgagcacgcctggcaaatcgaactcaaccgacggcgcaccctgccagtcaatggcgtatcggatgcattagtcagcgaggggaatttcctgtctcgcgaaaatgaaagcctcgacaatgaaattaccgctgcactggaagttggttacttgctgcgactggcgcacaactcctcgtcgatggttgaacaggcgatgtatgtctcgcgtgctggattttacgtttcgacgcagccgaccttgtttacgcgcaatgtaccaacgcgttattacggctatgtcacccaaccctggtttatcggccattcgcaacgagaaaatcgtcaccgcgcggtacgctggttcacttcgcaaccggaacacgccagcaatactgaaccgcaggttaccgtcagtgttccggtagacagtaataactactggtatggcgtgctggggatgagtattcccgtgcgtactatgcagcaatttttaagaaacgccatcgataaaaacctcgatggtgagtatcagctctatgacagtaagctgagatttttgacctcttccaatcctgaccatccaacagggaatatttttgatcctcgtgaactggccttgctggcgcaggcaatggaacatgacacgcggggcggcattcgtatggacagtcgctatgttagctgggaacgtctggaccatttcgacggtgtgctggcgcgcgtccatacgctaagcgaaggcgtgcgcggcgatttcggcagtatcagcattgcattaaccctgctgtgggcgctctttaccaccatgttactcctctcctggtatgtgattcgccggatggtcagcaacatgtatgttctgcaaagctcgttgcagtggcaggcgtggcacgacaccttaacgcgtttatataaccgtggcgcactgttcgaaaaagcccgtccgctcgctaaattgtgtcagacgcaccaacatcctttttctgtcattcaggtcgatcttgaccattttaaagcgattaatgaccgctttggtcatcaggcgggcgaccgtgttctttctcatgctgccggattaattagcagttccttgcgtgcgcaggacgttgccgggcgggtcggtggtgaggagttttgtgtgattctgccaggcgcgaatctgacgcaggctgcggaggtcgcagaacgtattcgcctgaagttaaatgaaaaagagatgctgatcgccaagagtacaacgatacgcatcagtgcctcgctgggggtaagtagcagcgaggaaaccggtgattatgattttgaacaactccagtcattggccgaccgtcggctttacctcgcaaaacaggccgggcgcaatcgggtattcgcgagcgataacgcttaa

SEQ ID NO: 472635 - DNA, 345 bp, Shigella flexneri
atggcacaatttatcgctcgtctgaacgaactgggcttgcagtttatgcagggtgcgcgcttctggcacgtactggatgcctctgccggaaaagatcaggctgccaactggattatcgcgacctatcaacaattgtcaggcagacgcccaaccacacttggcctgggcgatgggccaaacgatgcgcctttactggaggtaatggattacgcggtgattgtgaaagggctaaaccgtgaaggggtacatctgcatgatgaggatccggcccgcgtctggcgaacgcagcgtgaaggaccggaaggctggcgtgaagggctggaccattttttctccgcccgttaa

SEQ ID NO: 472636 - DNA, 408 bp, Shigella flexneri
atgttttcaattcaacaaccactactggtttttagcgatcttgatggcaccctgctggacagtcatagttatgactggcaaccggcagccccctggctcagccgtttacacgaagccaatattcccgtcattctctgtagcagtaaaactttagcggaaatgctgtacttgcaaaaaatgttggggctacaaggcttaccgctgattgcagagaatggcgcagtgatccagcttgctgaacaatggcaggatatagacggttttccacgcatcatctcaggtattagccatggcgaaatctgccaggttttaaatacgctacgcgagaaagaacattttaaattcacgacttttgatgatgtcgacgatgcaaccattgccgaatggacgggattaagccgtagctag

SEQ ID NO: 472637 - DNA, 228 bp, Shigella flexneri
atgaaaaccgcaaaagtgtacagcgataccgcaaaacgtgaggtcagcgtcgatgtcgatgccctgctggcggcgatcaatgaaattagcgaaagcgaagttcatcgcagccagaacgattctgaacacgttagcgtcgatggacgtgaatatcatacatggcgtgaattggcggatgccttcgaactggatattcatgacttcagcgtctctgaagtgaatcgttga

SEQ ID NO: 472638 - DNA, 189 bp, Shigella flexneri
atgaaggtgaatgatcgggtaacagtcaaaacggatggcggtccgcgtcgtcctggagtggtactggcagttgaggagtttagtgaaggcacaatgtacctggttgcgctggaagactacccgctcggcatctggttctttaatgaagcagggcatcaggacggtatctttgttgagaaagcagagtaa

SEQ ID NO: 472639 - DNA, 624 bp, Shigella flexneri
atgtcaacgattattatggatttatgtagttacacccgactaggtttaaccgggtatctgttgagtagaggggttaaaaaaagagaaatcaacgacattgaaaccgttgatgaccttgccatagcttgtgattcacagcgtccttcagtggtgtttattaatgaggactgtttcatccacgatgcttctaacagtcagcgcatcaagcacatcattaatcaacatcccaatacgttatttatcgtttttatggcaattgccaatgttcattttgatgaatatctattggtcagaaaaaatttattgatcagttctaaatcgattaaaccggaatctctcgacgatatccttggcgatattctgaaaaaagagacaacgataacctcgtttttaaatatgccgacgttatcattgagccgaaccgaatcgagtatgttgcgaatgtggatggcaggtcagggaaccattcaaatctccgaccaaatgaatatcaaagccaagaccgtttcatcgcataaaggtaatattaaacgtaagatcaaaacgcataataaacaggttatctaccatgtcgtccgactgacggataatgtgactaatggtatttttgtcaacatgcgctaa

SEQ ID NO: 472640 - DNA, 786 bp, Shigella flexneri
atgatgcaggagacaagcgatcaatggctttcctggttaagcctgtacttctggccgttactgcgcgtgctggcgctcatttctaccgcgccaattctgagcgaacgcagcgtgccgaaacgggtaaaactgggtctggcaatgatgatcacgttcgccattgccccatcattacctgccaacgatgttcctgttttttcgttctttgctctgtggctggccgtacagcagatcctgatcggcattgcgcttggttttaccatgcaatttgcctttgccgctgtgcgaaccgctggcgaaattatcggtctgcaaatggggctgtcatttgcgacatttgtcgatcctggcagccatctcaatatgcccgttttagcgcgcatcatggatatgctggcattactgctgttcctgacatttaacggtcatttatggttgatttcactgctggtcgatacctttcacaccctgccgattggtagcgaaccgttgaacagcaatgcgtttctggcacccaccaaagcagggagtttgattttccttaacgggctgatgctggcgttaccgctcattactctgttgctgaccctgaatctggcattaggtttactgaatcgtatggccccgcaattatccatttttgttattggatttccattaactctgactgtcggcatctctttaatggcggcattaatgccgttaattgcgcctttttgcgaacatttattcagtgaaatttttaatttgctggctgatattattagtgaattaccattaatataa

SEQ ID NO: 472641 - DNA, 270 bp, Shigella flexneri
atgacacctgaatcggtcatgatgatgggaactgaagcgatgaaagtcgcgctggcactggcagccccgctgttgctggtagcgctggtcacgggccttatcatcagtattttgcaggcagccacgcagattaacgaaatgacgctgtcgtttattccgaaaatcatcgccgtatttatcgccatcattattgccggaccgtggatgctcaatctgttgctggattacgtccgcaccttgttcactaacctgccgtatatcatcgggtag

SEQ ID NO: 472642 - DNA, 738 bp, Shigella flexneri
atgcgtcgtttgttttctgtcgcaccggtccttctctggctgattacgcccctcgccttcgcgcaactgccgggtatcaccagccagccgctacctggcggtggacaaagctggtcgctcccggtgcagacgctggtgttcatcacctcgttgacgttcattccagcgattttactgatgatgaccagtttcacccgcatcattattgtttttggtttattgcgtaacgcgctgggaacgccctccgcgccacctaaccaggtattgctggggctggcactgtttttgaccttttttattatgtcgccagtgatcaacaaaatttatgtcgatgcgtaccagccattcagcgaagagaaaatctcaatgcaggaggcgctggaaaaaggggcgcagccgctgcgtgagtttatgctgcgtcagacccgcgaggcagatttagggttgtttgccagactggcgaataccggcccgttgcaggggcctgaagctgtgccgatgcgcattttgctcccggcctacgtgaccagcgagttgaaaaccgcatttcagataggcttcacgattttcatcccttttttgattatcgacctggtgattgccagcgtgttgatggcattggggatgatgatggttccccccgccaccattgctctgccctttaaactgatgctgtttgtactggtggatggctggcaattgctggtcggttcgctggcgcagagcttttacagctag

SEQ ID NO: 472643 - DNA, 366 bp, Shigella flexneri
atgaataaccatgctactgtgcaatcttccgcgccggtttctgctgagccactgctgcaggtgagcggcgcactcatcgccattattgccctgatcctcgctgctgcctggctggtaaaacggctgggatttgcccctaaacgcactggcgttaacggtctgaaaattagcgccagtgcttcgctgggcgcgcgtgaacgggtcgtggtggtcgatgtggaagatgcacggctggtgctcggcgttaccgcagggcaaatcaatctgctgcataaacttcccccttcagcaccaacggaagagataccgcagaccgattttcagtcggtcatgaaaaatttgcttaagcgtggcgggagatcctga

SEQ ID NO: 472644 - DNA, 414 bp, Shigella flexneri
atgagtgacatgaataatccggccgatgacaacaacggcgcaatggacgatctgtgggctgaagcgttgagcgagcaaaaatcaaccagcgaaaaaagcgctgccgacgcggtgttccagcaatttggcggtggtgatgtcagcggaacgttgcaggatatcgacctgattatggatattccggtcaagctgaccgtcgagctgggccgtacgcggatgaccatcaaagagctgttgcgtctgacgcaagggtcagtcgtggcgctggacggtctggcgggcgaaccgctggatattctgatcaacggttatttaatcgcccagggcgaagtggtggttgttgccgataaatatggcgtgcggatcaccgatatcattaccccgtccgagcggatgcgccgcctgagccgttag

SEQ ID NO: 472645 - DNA, 1005 bp, Shigella flexneri
atgggcgatagtattctttctcaagctgaaattgatgcgctgttgaatggtgacagcgaagtcaaagacgaaccgacagccagtgttagcggcgaaagtgacattcgtccgtacgatccgaatacccaacgacgggttgtgcgcgaacgtttgcaggcgctggaaatcattaatgagcgctttgcccaccattttcgtatggggctgttcaacctgctgcgccgtagcccggacattaccgtcggggccatccgcattcagccgtaccatgaatttgcccgcaacctgccggtgccgaccaacctgaacctaatccacctgaaaccgctacgcggcacagggctggtagtgttctcgccgagtctggtgtttatcgccgtggataacctgtttggcggcgatggacgcttcccgaccaaagtggaaggtcgcgagtttacccatactgaacagcgcgtcatcaaccgtatgttgaagctggcgctggaaggctatagcgacgcctggaaagcgattaatccgctggaagttgagtacgtgcgttcggaaatgcaggtggaatttaccaatatcaccacctcgccgaacgacattgtggttaacacgccgttccatgtggagattggcaacctgaccggcgaatttaatatctgcctgccattcagcatgatcgagccgctacgggaattgttggttaacccgccgctggaaaactcgcgtaatgaagatcagaactggcgcgataacctggtgcgccaggtgcagcattcacagctggaactggtggccaactttgccgatatctcgctacgcctgtcgcagattttaaaactgaaacccggcgacgtcctgccgatagaaaaacccgatcgcatcatcgcccatgttgacggcgtcccggttctgaccagtcagtacggtactctcaacggtcagtatgcgttacggatagaacatttgattaacccgattttaaattctctgaacgaggaacagcccaaatga

SEQ ID NO: 472646 - DNA, 465 bp, Shigella flexneri
atgactgattacgcgataagcaagaaaagcaagcgatcgctttggatcccgattctggtattcattaccctcgcggcctgtgccagcgcaggttacagctactggcattcgcatcaggttgccgctgacgacaaagcgcagcaacgcgtcgtgccctccccggtcttctatgcgctggatacctttacggtcaatttgggcgatgcggatcgcgtgctttatatcggcataaccctgcgactgaaagatgaagcaacccgctcgcggctgagtgagtatttgccggaagtccgtagtcgcttgctgttactgttttcacgtcaggatgctgccgtactggcgacagaagaagtcaagaaaaacctgattgccgagattaaaaccacactttccaccccgcttgttgccgggcaaccgaaacaggatgtcaccgacgtgctgtataccgcttttattctgcgataa

SEQ ID NO: 472647 - DNA, 1128 bp, Shigella flexneri
atgattcgcttagcgcccttgattaccgccgacgttgacaccaccacattgcctggcggcaaagccagcgatgctgcacaagattttctcacgttgttgagcgaagcattagcaggcgagacaacaactgacaaagcggccccccagttgctggtagcaacagataagcccacgacaaaaggcgagccgctggtcagcgatattcttgccgatgcgcaacaagcggatttactgatccctgtggatgaaacacttcctgtcatcaacgacgaacaatccacatcaacaccgttaaccaccgctcagacgatgacgttggctgcggtggctgacaaaaatacgacaaaagacgaaaaagcggatgatcttaatgaagacgtcaccgcaagtctgagcgccctttttgcgatgttgccgggttttgacaatacgcccaaagtgactgatgcaccgtcaaccgtgttaccggcagagaaaccaacgctcttcacaaaactgacttctgcgcaactcactacagcacagcctgatgacgcccccggcacaccagctcagccattaacaccgctggtagcagaagcccagagtaaagcggaagtcatcagcacgccttcgccggtgaccgctgacgccagcccgctaatcactccacaccagacacagccactgcccaccgtcgccgcgcctgttttgagtgtaccgctgggttctcacgaatggcaacaatcattgagccagcatatttcgctgttcacccgccaggggcaacaaagtgcagagttgcgtctgcacccacaggatttaggtgaagtgcaaatttccctcaaagtggatgataaccaggcgcagatccagatgatttcaccgcatcagcacgtacgcgccgccctggaagcagcgctgccggtactgcgtacgcagctggccgaaagtggcattcagttagggcaaagcaacattagtggcgaaagctttagtggtcagcagcaggccgcttcccagcaacagcaaagccaacgcacagcaaaccatgaacctctggcgggggaagacgacgatacgcttccggttcccgtctctttacaagggcgtgtaacaggtaacagcggcgttgatattttcgcctaa

SEQ ID NO: 472648 - DNA, 345 bp, Shigella flexneri
atggcggaagaacagctcaaaatgttgatcgattatcagaatgaatatcgcaataacctcaatagcgatatgagtgccgggatgaccagcaaccgctggatcaactatcagcagtttatccagacgctggaaaaagccattactcagcatcgccagcaacttaatcagtggacgcagaaagttgacattgccctgaacagctggcgagaaaagaaacaacgtttgcaggcctggcagacactgcaggaacggcaatccacggcggcactgcttgcagaaaaccgcctcgatcagaaaaagatggatgagttcgcccagcgcgccgccatgaggaaacctgaatga

SEQ ID NO: 472649 - DNA, 1374 bp, Shigella flexneri
atgaccacgcgcctgactcgctggctaaccacgctggataactttgaagccaaaatggcgcagttgcctgcggtacgtcgctacgggcgattaacccgcgctaccgggctggtgctggaagccaccggattacaattgccgctcggcgcaacctgtgtcattgagcgccagaacggcagcgaaacgcacgaagtagaaagcgaagtcgttggctttaacggtcaacggctgtttttaatgccgctggaggaagtggaaggtgtcctgcccggcgcgcgtgtatatgccaaaaacatttcggcagaagggctgcaaagcggcaagcagttgccgctcggtccggcgttattaggtcgtgttctggacggtagcggtaaaccgctcgatggcctgcccttccccgatacgacggaaaccggtgcgctgattaccccgccatttaacccgttgcaacgtacaccgattgaacatgtgctggacaccggcgtgcgcccaatcaatgccctgcttaccgtcggacgcgggcagcgtatggggctgtttgccgggtcgggcgttggtaaaagtgtgctgctggggatgatggcacgctacacccgcgccgatgtcattgtcgtgggtttgattggtgaacgtgggcgcgaagtaaaagattttattgagaatatcctcggtgccgaaggacgtgcacgctcagtggtgattgccgctccggcggatgtttctccgctcctgcgaatgcaaggtgccgcctatgccacgcgcattgccgaagattttcgcgatcgtggtcagcatgtgttgctgattatggactccctcacccgctacgcgatggcccagcgtgaaattgcgctggcgattggcgaaccacctgccactaaaggttatccaccgtcggtgtttgccaaattaccggcactggtcgagcgtgccggtaatggcattagcggcggcggctcgattaccgcgttttataccgtgctcaccgaaggcgatgaccagcaggaccccattgctgactccgcgcgggcaatcctcgacggtcacattgtgctgtctcgccgactggcggaagccgggcactatccggctatcgatattgaagcgtcgatcagtcgcgcaatgacggcgttgatcagtgagcaacattacgcgcgagtgcgcaccttcaaacagctgttgtcgagttttcagcgtaaccgcgatctggttagcgtcggcgcgtatgccaaaggcagcgatccgatgctcgataaagccatcgccctgtggccgcagctggagggctatttgcaacaaggcatttttgaacgcgcggactgggaagcgtctctccaggggctggagcgtattttcccgacagtgtcataa

SEQ ID NO: 472650 - DNA, 687 bp, Shigella flexneri
atgtctgataatctgccgtggaaaacctggacgccggacgatctcgcgccaccaccggcagagtttgtgccaatggtcgagtcggaagaaaccattattgaagaggccgaacccagccttgagcagcaactggcgcaactgcaaatgcaggcccacgagcagggttatcaggcggggattgccgaaggtcgccagcaaggtcacgaacagggctatcaggaaggactggcccaggggctggaacaaggtctggcagaggcgaaggctcaacaagcgccaattcatgcccggatgcagcaactggtcagcgaatttcaaactacccttgatgcgcttgatagtgtgatagcttcgcgcctgatgcagatggcgctggaggcagcacgtcaggtgatcggtcagacaccaacggtggataactcggcactgatcaaacagatccaacagttgttgcagcaagaaccgttattcagcgggaaaccacagctgcgcgtacacccggatgatctgcaacgtgtggatgatatgctcggcgcaactttaagtttgcatggctggcgcttgcggggcgatcccaccctccaccctggcggatgtaaagtctccgccgatgaaggcgatctcgacgccagtgtcgccactcgctggcaagaactctgccgtctggcagcaccaggagtggtgtaa

SEQ ID NO: 472651 - DNA, 525 bp, Shigella flexneri
atgttgcgtatcgccacctttggcggcgtgcagccagccgcgctggccgaactgaccgaagtactgaatggcttgctcgacggtcagaatctcaagcgcagcaaaatgggcggcgtgagaacggcagccgaaattatcaacctgatgaaaacgcagcaggaagaagccgttattaccgccgtgcgtgaattcgacggcgagctggcgcagaaaatcatcgacgagatgttcctgttcgagaatctggtggatgtcgatgatcgcagcattcagcgtctgttgcaggaagtggattccgaatcgctgctgatcgcgctgaaaggggccgagcagccactgcgcgagaaattcctgcgcaatatgtcgcagcgtgccgccgatattctgcgcgacgatctcgccaaccgtggtccggtgcgtctgtcgcaggtcgaaaacgaacagaaagcgattctgctgattgtgcgccgtcttgccgaaactggcgagatggtgattggcagcggcgaggatacctatgtctga

SEQ ID NO: 472652 - DNA, 423 bp, Shigella flexneri
atgagtaacctgacaggcaccgataaaagcgtcatcctgctgatgaccattggcgaagaccgggcggcagaggtgttcaagcacctctcccagcgcgaagtgcaaaccctgagcgctgcaatggcgaacgtcacgcagatctccaacaagcagctaaccgatgtgctggcggagtttgagcaagaagctgaacagtttgctgcactgaatatcaacgccaacgattatctgcgttcggtattggtcaaagctctgggtgaagaacgtgccgccagcctgctggaagatattctcgaaacccgcgataccgccagcggtattgaaacgctcaactttatggagccgcagagcgccgccgatctgattcgcgatgagcatccgcaaattatcgccaccattctggtgcatctgaagcgcgcctag

SEQ ID NO: 472653 - DNA, 399 bp, Shigella flexneri
atgttgttaactcgccgttcaatagcagtgacgaaagcggcggagcactgccgttttggcaacagcaagtgtttatcgatcagttgctggctgccggtcgctggttgctggttgctggtactgctggtggcgtggttgctgtggcggaaagcggtacgcccgcagctaacacgtcgcgccgaggcggtgaagactgtgcagcaacaggcgcaggcccacgaggaagtggaagatgcggtggaagtccgtctgagcaaagacgaacaactccaacaacggcgcgctaaccaacgactgggggcagaagtcatgagccagcgtatccgtgaaatgtctgataacgatccgcgcgtggtggcgctggtcattcgccagtggataaataacgatcatgagtaa

SEQ ID NO: 472654 - DNA, 786 bp, Shigella flexneri
atgaatgcgactgcagcccagacaaaatctcttgagtggcttaatcgcctgcgtgcgaatccgaaaattccattgattgttaccggttccgcggcagtggcggtcatggtcgcactgatcctgtgggcgaaagcccccgactaccgcacattattcagcaatctttccgatcaggatggtggcgcaattgtcagccaactgacgcaaatgaatattccttaccgcttcagcgaagccagcggcgctattgaggttccggcagataaagttcacgaactgcgcctgcgcctggcgcaacaaggtttgcccaaaggcggcgcggtcggtttcgaactgctcgatcaggaaaagtttggtatcagccagttcagcgaacaggtgaattatcagcgggcgctggaaggcgagctttctcgtaccatcgaaactatcggcccggtaaaaggggcgcgcgtacatctggcaatgccgaaaccgtctttattcgtccgtgaacaaaaatccccttctgcatcggtgacggtaaatctgttacccggccgcgcactcgatgaagggcaaattagcgctattgtacatctggtttccagcgcggttgctggtctgccgcctggaaacgtcacgctggtggatcagggcgggcatctgttaacccagtccaataccagcgggcgcgatcttaatgacgctcagttgaaatatgccagcgatgtcgaaggccgtattcagcagcgtattgaagcgatcctgtcacctattgttggtaacggtaatattcacgcctag

SEQ ID NO: 472655 - DNA, 315 bp, Shigella flexneri; identical to SEQ ID NO: 1596

SEQ ID NO: 472656 - DNA, 333 bp, Shigella flexneri
atgaacccttatatttatcttggtggcgcaatacttgcagaggtcattggtacaaccttaatgaagttttcagaggggtttacacggttatggccctctgttggcacaattatttgctattgtgcatcattctggttattagctcagacgctggcttatatacctacagggattgcttatgctatctggtcaggagtcggtatcgttctgattagtttgctttcctggggattttttggtcaacgactggacctgccagctatcataggcatgatgttgatttgtgccggtgtgttagtcattaacttgttgtcacgaagtgcaccgcattaa

SEQ ID NO: 472657 - DNA, 552 bp, Shigella flexneri
atgaaaaaacttatcgtttcaagtgtattggcattcataacattttctgcgcaggccgcagcatttcaggtcactagtaatgaaataaaaacaggagagcaacttacaacgtctcatgtattttctggatttgggtgtgaaggtggtaatacatcgccctcattaacctggtctggtgctcctgaaggcaccaaaagctttgccgtaactgtgtatgatccagatgctcctacaggcagtggatggtggcactggactgttgctaatattccagcaactgtaacatatttgcccactgatgcaggaagacgtgatggtacaaaacttccgactggtgctgttcaaggccgaaatgattttggttatgcaggatttggtggagcatgtcctcccaaaggagataaaccccatcattaccagtttaaagtatgggctctaaaaactgataagattcctgtggattctaattccagcggagcgttagttggttatatgcttaatgccaataaaattgcaaccgctgagataacaccagtttatgagataaaatag

SEQ ID NO: 472658 - DNA, 738 bp, Shigella flexneri
atgctggcaagagataagtctaacctaaagattgaagaaatacggatgcataaacatcatgagattcacagggttaagcctcttatgccagctttatgtcgtatccgtcagggaaaaaaagttatcaattgggagacgcatagtctaactgttgataataatcagataatattatttccctgtggatatgaattttatattgtgaattatccagaagcaggtctttatcttgcagaaatgctttattatcccattgatctaattgaaaagtttcaaaaattttatgcgataactgatcaaattcgtaacacgacaggtttctgcttacctcagaaccccgagttaatatattgttgggagcaactaaaaacatctatttcccgaggcttctcaacgcaaattcaggaacacttagcaatgggcgttctactttcattaggagcacatcatgttaattgtttacttttatcagatagtaaacaatcattaataagtcgttgttataacctaatgctatccgaacctagaacaaaatggacagcaaacaaggtagcgagatatctctacatttctgtttccacattgcatcgccgtctggcaagcgagggaataagttttcaaagtatattggacgacgtgaggttaaataatgcgttgtcctgctatacaaacgacagtaaaacccatcagcgagattgccagggaaaatggttacaagtgtccttctcgttttactga

SEQ ID NO: 472659 - DNA, 1083 bp, Shigella flexneri
atgaaaaaattaacagtggcaatttctgctgtagctgcatcagtactgatggcgatgtctgctcaggcagcagagatttacaataaagacagtaacaagctggatctgtacggaaaagttaatgctaagcactacttctcttctaacgatgcagatgatggcgacacaacttatgttcgtctgggcttcaaaggcgaaactcaaatcaacgatcaactgactggtttcggtcagtgggaatatgaattcaaaggcaaccgtgctgaatctcaaggttcttccaaagataaaacccgtcttgccttcgctggcctgaaattcggtgactacggctccatcgattatggccgtaactacggtgtagcatacgatatcggtgcatggaccgacgttctgccagaattcggtggcgatacctggacccaaacagatgtgttcatgactggtcgcaccacaggtgttgcaacctatcgtaacaacgacttctttggtctggttgatggtctgaactttgctgctcagtatcagggtaaaaatgaccgcactgacgtaactgaagctaacggtgatggtttcggtttctccactacttatgagtatgaaggattcggtgtaggtgcaacctatgctaaatctgaccgcactaatgatcaggttatctacggtaacaacagcctgaatgcatctggtcaaaatgctgaagtatgggcagctggtctgaaatatgatgcgaacaacatctatctggctaccacctattctgaaacccagaacatgactgtttttggtaataaccatattgccaacaaagcacaaaacttcgaagtagttgcacaatatcagttcgacttcggtctgcgtccgtccgttgcttacctgcaatctaaaggaaaagacttgggtgcgtggggtgatcaggacctgattgaatatattgatgtaggtgcaacctattacttcaacaaaaatatgtccacttttgttgattacaaaatcaacctgattgataagagcgatttcacgaaagcatctggcgttgctaccgatgatatcgttgctgtaggattggtttaccagttctaa

SEQ ID NO: 472660 - DNA, 501 bp, Shigella flexneri
atgtatcaacgctgttttgataatgccagtgaaacgctgtttgtcgccggtaaaacgccacggctttcacgttttgcatttagcgatgatccaaaatgggagtctggacatcacgttcatgacaatgaaaccgagctgatttacgtcaagaaaggggttgcaaggtttaccatcgattcttcgttatatgtcgcacatgcggatgacattgtggtgatagaacgcggcaggctgcatgcggtggcctctgacgttaacgatccggcaacgacgtgtacctgtgcgctgtacggctttcagtttcagggggctgaggaaaatcagttactgcaaccgcattcttgtccggtaattgccgcggggcagggaaaagaagtcataaaaaccttatttaatgagctaagtgtgattttgccgcaaagtaaaaatagccaaacatcttcgttatgggatgcatttgcctatacattagcaattctggtaatgctgccaacttactga

SEQ ID NO: 472661 - DNA, 177 bp, Shigella flexneri
atggaaggtaaaaatggcctgaaaatagtgtgcgatagcggtgcggggggttcgacggagcaagctgttttccttgccaacaatcttgcaaaaaaaatgcgattgctaaaacaaaagtgcaatttgcggcaatatagttattccatgaccgtacaatcttgcattcagtgtaaataa

SEQ ID NO: 472662 - DNA, 765 bp, Shigella flexneri
atgaaaataataacctgctttaagctggtgcctgaagaacaggacattgttgtcactccagaatacaccctgaatttcgacaatgccgacgccaaaatcagccagttcgatctcaatgccattgaagctgcaagccagctcgcaacagatgacgatgagatagccgcgctgaccgttggcggctcattgttgcagaactcgaaagtgcgcaaagacgtgctatcccgcgggccgcacagcctgtatttggtgcaggatgcgcaacttgaacatgcactgcctctcgataccgcaaaagcgctggcagcagcaattgaaaagatcggcttcgatttactgatctttggtgaaggttccggcgacctttatgcccagcaggttggcttgctggtcggagaaattctgcaacttccggtgattaatgcagtgagtgctattcagcgtcagggcaatacactggtgattgaacgcacgcttgaagatgatgttgaagttattgaactctctgttccagccgtgctctgcgtcacctccgatattaacgtgccacgcattccttcgatgaaagccattctcggcgcgggtaaaaaaccggtaaatcagtggcaggcaagtgatattgactggagccagagcgcgccacttgctgaactggtcggcattcgcgtaccgccgcaaacagaacgtaagcacatcattctcgataacgattcgccggaggccattgccgagctggcggaacatctgaagaaagccctgaactga

SEQ ID NO: 472663 - DNA, 402 bp, Shigella flexneri
atgagtcaattaaacagcgtctgggtctttagcgataatcctgaacgttatgctgaactgtttggcggcgctcagcaatggggccaacaggtgtatgccattgtacaaaataccgaccaggcgcaggcagttatgccttatggtccaaaatgtatttatgttcttgagcaaaacgacgcgctgcaacgcactgaaaattacgccgaaagcattgctgccctgctgaaagataaacaccccgctatgttgctgttggccgcgacgaaacgtggtaaagctctggcagcacggttaagtgtgcaactgaatgcggcgctggtgaacgatgccacggcggtggatattgtcgatggtcacatttgcgccgaacaccggatgtatggcgggttagcgttcgcttag

SEQ ID NO: 472664 - DNA, 375 bp, Shigella flexneri
gtggacctgagcaaagcaaaacgtgtggttggcgtcggtcgtggtctggcggcgcaggatgacctgaaaatggtccacgaactggcggcggtgctgaatgctgaagtcggctgttcacgtccaattgccgaaggcgagaactggatggagcgtgaacgttatatcggtgtctccggcgtgttgctgaaatccgatctctacctgacgctggggatctccgggcagatccaacatatggttggcggcaacggcgtaaaagtgattgtcgccatcaataaagataaaaatgcgccaatcttcaactatgccgactacggtctggtgggcgatatctacaaagtcgtccctgccctgattagccagttgagccgctaa

SEQ ID NO: 472665 - DNA, 1290 bp, Shigella flexneri
atgtcggatgacaaatttgatgccattgtggtcggtgcgggcgttgctggtagcgttgccgcactggtcatggcacgagccgggctggatgtcctggtgatagaacgcggcgacagtgccggatgtaaaaacatgaccggcgggcgtctttatgcccacacacttgaagcaatcattccaggctttgcagtatcagcgccggtagaacgcaaggtcacacgcgagaaaatctccttcttaaccgaagaaagcgccgttaccctcgattttcaccgcgagcaaccagatgttcctcaacacgcatcttataccgtattgcgtaatcgtctggacccgtggttgatggaacaagccgagcaggcgggcgcgcagtttatcccaggcgttcgcgtcgacgcgctggttcgtgaaggaaacaaggtcactggcgtgcaggctggggatgatattctcgaagcgaatgtggtgattctggctgatggcgttaactcgatgcttggccgctcgctgggaatggttcccgcttccgatccgcatcattacgctgttggtgttaaagaggttattggcctcacaccagaacagatcaacgatcgctttaatattacgggcgaggaaggtgccgcctggctgtttgccggttccccttctgacggcctgatgggcgggggatttctctataccaacaaggattccatatccttggggctggtttgtggattgggtgatatcgcccatgcgcaaaaaagcgtgccgcaaatgctggaagattttaaacaacaccccgccattcgcccgctgattagcggcggcaaactgcttgaatattccgcgcatatggtgccggaaggcggtctggcaatggtgccgcaactggttaacgagggcgtgatgatcgttggtgacgccgcaggcttctgcctgaatttgggttttacggtccgcggcatggatttagccattgcatcggctcaggctgccgccacaacggtgatcgccgccaaagaacgcgcggatttctccgccaacagtctggcgcaatacaaacgtgagctggaacaaagctgcgtcatgcgtgatatgcagcattttcgcaagatcccggcgctgatggaaaacccgcgcctgtttagccaatacccacgaatggtagccgacatcatgaacgagatgttcaccattgacggcaaaccaaaccagccggtacgcaaaatgatcatgggacacgcgaagaaaattgggctgatcaacttgctgaaagatggcattaagggagcaaccgcgctatga

SEQ ID NO: 472666 - DNA, 294 bp, Shigella flexneri
atgagccagaacgctacggttaacgtcgacatcaaattaggcgtcaataaattccatgttgatgagggccacccgcatatcattctgacggaaaatcccgatatcaatgaattccgtaaattaatgaaagcctgccctgccggactttataagcaggatgacgtaggaaacattcattttgatcccgccggttgtctggagtgcggcacctgtcgggtgctgtgcggtaacactattctcgaacagtggcaatatcccgcaggcaccttcggtattgattttcgctacggctaa

SEQ ID NO: 472667 - DNA, 1647 bp, Shigella flexneri
atgaaagtgacattaacgtttaacgaacaacgtcgtgcggcgtatcgtcagcaagggctatggggcgatgcttcactggccgattactggcagcagaccgctcgtgcgatgccagacaaaattgccgtggtcgataatcatggtgcatcgtacacctatagcgcgctcgatcacgccgcgagctgtctggcaaactggatgttagcgaagggtattgaatcaggcgatcgcatcgcatttcaactgcctggctggtgtgaatttaccgttatctatcttgcctgcctgaaaatcggtgcggtttccgtgccgctgttgccttcctggcgggaagcagaactggtgtgggtgctcaataagtgtcaggcaaaaatgttctttgcaccgacgttgtttaaacaaacgcgtccggtagatttaatcctgccgctgcaaaatcagcttccacaactacaacaaattgtcggcgtggacaaactggctcccgccacctcttccctctcattaagtcagattatcgccgacaatatcccactgaccacggcgataacgacccacggcgatgaattagctgcggtgctgtttacctccggaaccgagggtctgccaaagggcgtgatgctaacgcataacaatattctcgccagtgagcgggcttattgcgcgcggctgaatctgacctggctggatgtctttatgatgcctgcgccacttggtcacgcaacgggctttctgcatggcgtaacggcaccattcttaattggcgctcgcagcgtgttgttagatattttcactcctgatgcgtgtctcgcgctgcttgagcagcagcgttgcacctgtatgctaggcgcaacgccgtttgtctatgatcttttgaatttactagagaaacaacccgcagacctttcagcgctgcgcttctttctttgcggcggtaccacaatccccaaaaaagtggcgcgcgaatgccagcagcgcagcattaaattattaagtgtttatggttccacagaaagttcgccgcatgcggtggtgaatctcgataattctttgtcgcgctttatgcataccgatggttacgctgccgcaggtgtagagattaaagtggtcgatgacgcacgcaagaccttaccgccaggttgcgaaggtgaagaagcatcgcgtggccccaatgtgtttatggggtattttgatgaacctgaattaaccgcccgtgcgctggatgaagaaggctggtattacagcggcgatctctgccgtatggatgaggctggctatataaaaattaccggacgcaaaaaagatattattgtccgaggcggcgaaaatattagcagccgtgaagtggaagatattttattgcagcatcctaaaattcacgatgcctgtgtggttgcaatgcccgatgaacgtttaggtgaacgatcatgcgcttatgtcgtgctgaaagcgccgcatcattcattatcgctggaagagatggcggctttttttagccgtaaacgggtcgcaaaatataaatatcctgaacatatcgtggtaatcgaaaaactaccgcgcactgcctcagataaaatacaaaagtttttgttaagaaaagatattatacggcgattaacgcaggatgtctgtgaagagattgaataa

SEQ ID NO: 472668 - DNA, 2379 bp, Shigella flexneri
atgtccaacaatggctcgtcaccgctggtgctttggtataaccaactcggcatgaatgatgtagacagggttgggggcaaaaatgcctccctgggtgaaatgattactaatctttccggaatgggtgtttccgttccgaatggtttcgccacaaccgccgacgcgtttaaccagtttctggaccaaagcggcgtaaaccagcgcatttatgaactgctggataaaacggatattgacgatgttactcagcttgcgaaagcgggcgcgcaaatccgccagtggattatcgacactcccttccagcctgagctggaaaacgccatacgcgaagcctatgcacagctttccgccgatgacgaaaacgcctcttttgcggtacgctcctccgccaccgcagaagacatgccggacgcttcctttgccggtcagcaggaaaccttcctcaacgttcagggttttgacgccgttctcgtggcagtgaaacatgtatttgcttctctgtttaacgatcgcgccatctcttatcgtgtgcaccagggttacgatcaccgtggcgtggcgctctccgccggtgttcagcggatggtgcgctccgacctcgcatcttctggcgtgatgttctccattgataccgaatccggctttgaccaggtggtgtttatcacttccgcatggggccttggggaaatggtcgtgcagggtgcggttaacccggatgagttttacgtgcataaaccgacactggcggcgaatcgcccggctatcgtgcgccgcaccatggggtcgaaaaaaatccgcatggtttacgcgccgacccaggagcacggcaagcaggttaaaatcgaagacgtaccgcaggaacagcgtgacatcttctcgctgaccaacgaagaagtgcaggaactggcaaaacaggccgtacaaattgagaaacactacggtcgcccaatggatattgagtgggcgaaagatggccacaccggcaaactgttcattgtgcaggcgcgtccggaaaccgtgcgctcacgcggtcaggtcatggagcgttatacgctgcattcacagggtaagattatcgccgaaggccgtgctatcggtcatcgcatcggcgcgggtccggtgaaagtcatccatgacatcagcgaaatgaaccgcatcgaacctggcgacgtgctggttactgacatgaccgacccggactgggaaccgatcatgaagaaagcatctgccatcgtcaccaaccgtggcggtcgtacctgtcacgcggcgatcatcgctcgtgaactgggcattccggcggtagtgggctgtggagatgcaacagaacggatgaaagacggtgagaacgtcactgtttcttgtgccgaaggtgataccggttacgtctatgcggagttgctggaatttagcgtgaaaagctccagcgtagaaacgatgccggatctgccgttgaaagtgatgatgaacgtcggtaacccggaccgtgctttcgacttcgcctgcctgccgagcgaaggcgtgggccttgcgcgtctggaatttatcatcaaccgtatgattggcgtccacccacgcgcactgcttgagtttgacgatcaggaaccgcagttgcaaaacgaaatccgcgagatgatgaaaggttttgattctccgcgtgaattttacgttggtcgtctgactgaagggatcgcgacgctgggtgccgcgttttatccgaagcgcgtcattgtccgtctctctgattttaaatcgaacgaatatgccaacctggtcggtggtgagcgttacgagccagatgaagagaacccgatgctcggcttccgtggcgcgggccgctatgtttccgacagcttccgcgactgcttcgcactggagtgtgaagcagtgaaacgtgtgcgcaacgacatggggctgaccaacgttgagatcatgatcccgttcgtgcgtaccgtagatcaggcgaaagcggtggttgaagaactggcgcgtcaggggctgaaacgtggcgagaacgggctgaaaatcatcatgatgtgtgaaatcccgtccaacgccttgctggccgagcagttcctcgaatatttcgacggcttctcaattggctcaaacgatatgacgcagctggcgctcggtctggaccgtgactccggcgtggtgtctgaattgttcgatgagcgcaacgatgcggtgaaagcactgctgtcgatggctatccgtgccgcgaagaaacagggcaaatatgtcgggatttgcggtcagggtccgtccgaccacgaagactttgccgcatggttgatggaagaggggatcgatagcctgtctctgaacccggacaccgtggtgcaaacctggttaagcctggctgaactgaagaaataa

SEQ ID NO: 472669 - DNA, 834 bp, Shigella flexneri
atggataatgctgttgatcgccacgttttttatatttctgatggtacggcaataactgcggaggtattaggacacgcagtaatgtcacaatttcccgtcactatcagcagcatcacgctgccgtttgtcgaaaatgagagccgtgcacgggcagtgaaggatcagattgacgcaatttatcaccagacaggcgtgcgcccgctggtcttctactccatcgtgttgccggagattcgcgccatcatcttgcaaagtgaaggcttttgccaggatatcgttcaggcgctggttgccccgctacaacaagagatgaaactggatccaacgccgattgctcatcgtacccatggccttaaccctaataatctcaataaatatgatgcgcgcattgcggcgattgattacaccctcgcccacgatgacggcatttcgttgcgcaatctggatcaggctcaggtgatcctgctcggtgtttctcgctgtggtaaaacccccaccagtctgtatctggcaatgcaatttggtatccgcgcggcaaactacccctttattgccgacgatatggataatctggtgctacccgcgtcgctcaaaccgcttcagcataaattgttcggcctgactatcgacccggaacgtctggcggcgattcgcgaggaacgtcgggagaacagtcgctatgcctcgcttcgtcagtgcaggatggaagtcgcggaagtggaagccttgtaccgtaaaaatcagatcccgtggattaacagtaccaattattcggtagaagagattgccaccaagatcctcgatatcatgggccttagtcgccgaatgtactag

SEQ ID NO: 472670 - DNA, 1047 bp, Shigella flexneri
atgaacagaactgacgaactccgtactgcgcgtattgagagcctggtaacgcccgccgaactcgcgctacggtatcccgtaacgcctggcgtcgccacccatgtcaccgactcccgccgcagaattgaaaaaatactgaatggtgaagataagcgactgttggtcattattggcccctgctcgatccacgatctcaccgctgcaatggagtacgccacccgtctgcagtcgctgcgcaaccagtaccagtcacggctggaaatcgtaatgcgcacctattttgaaaaaccacgaactgttgtcggctggaaagggctaatctccgatccggatttaaacggcagctatcgggtaaatcacggtctggagctggcgcgcaaattacttttacaggtaaatgagctgggtgtccctaccgcgactgagttcctcgatatggtaaccggtcagtttattgctgatttaatcagttggggcgcgattggcgctcgtactaccgaaagtcagatccaccgcgaaatggcttcagcactctcctgtccggtaggttttaaaaatggtaccgatggcaacacgcggattgccgtggatgctatccgcgcagcccgcgccagccatatgttcctctcgccagacaaaaatggtcagatgaccatctatcagaccagcggcaacccgtatggccacattattatgcgtggcggcaaaaaaccgaattatcatgccgatgatatcgccgcagcctgcgatacgctgcacgagtttgatttacctgaacatctggtggtggatttcagccacggtaactgccagaagcagcaccgtcgccagttagaagtttgtgaggatatttgtcagcaaatccgcaatggctctacggagattgctggaattatggcggaaagtttcctgcgcgaaggaacgcaaaaaatcgtcggcggtcagccgctcacttacggtcaatccattaccgacccgtgtctgggctgggaagataccgaacgcctggtcgaaaaactcgcctttgcggtagatacccgcttctga

SEQ ID NO: 472671 - DNA, 192 bp, Shigella flexneri
atgcgttatacggatagcagaaaactcacgcctgaaacggatgccaatcacaagaccgcttccccgcagcccatccggcgaattaccagccagacactgttaggtccggatggcaaactgattatcgatcatgacgggcaagaatatctgctccgtaaaactcaggctggcaagctgctgttaactaagtag

SEQ ID NO: 472672 - DNA, 1437 bp, Shigella flexneri
atgaccctgtcttttattacccgctggcgcgatgaattgccagaaacctatacagcactttcccctacgcctttaaataatgcccggctgatttggcataataccgaactcgctaacacgctgagtattccatcgtcgctgtttaaaaatgccgcaggtgtctggggcggcgaaaccctactgcctagtatgtcaccactggcacaggtttacagtggtcatcagttcgtcgtctgggcgggccaactgggtgatgggcgcggcattttacttggcgaacaactgcttgctgatggcactacaatggactggcatctgaaaggtgctggcctgacgccttattcgcgaatgggtgatggacgggcggttttacgttcgacgatacgagaaagtctcgccagtgaggcgatgcattatctgggcattccgacgacccgcgcgttaagtatcgtcaccagcgattcgccagtgtatcgggaaacggtggagccaggcgcgatgctgatgcgtgtggcaccaagtcatctgcgctttggtcatttcgaacatttttactatcgccgcgagccggaaaaggttcgtcagttggctgactttgccattcgtcattactggtcacatcttgaagacgatgaggacaaataccgtctctggtttaacgatgttgtcgcacgtaccgcgtcgttaattgcccaatggcagacggtcggctttgcacatggtgtgatgaataccgacaacatgtcgctgctgggactgacgcttgattacgggccgtttggttttcttgatgattacgaacccggttttatttgtaatcactcggatcatcaagggcgttatagctttgataatcaacctgctgtcgcgttgtggaatttacagcgtctggcgcagacattgtcaccatttgttgccgtagatgccctgaatgaggccctggacagctatcagcaggttttgttgacgcattatggacaacggatgcggcagaaactgggcttcatgacggagcaaaaagaggataacgcgctactgaatgaattattcagtctgatggcgcgagagcgcagcgattatacccgcacattccgcatgctgagtctgaccgagcagcacagcgcggcgtcaccgctacgtgaggagtttattgatcgtgcggcatttgatgactggtttgcccgttatcgggggcgtttgcaacaagacgaggttagcgatagtgagcgtcagcaactgatgcaaagcgttaacccagctctggtattgcgcaactggttggcgcaacgggcgattgaagcggcagaaaagggtgatatgatggaattgcaccgcctgcatgaggcgttgcgaaatcctttcagcgacagagatgatgactatgtcagtcgtccacctgactggggtaaacggctggaagtcagctgctcgagttaa

SEQ ID NO: 472673 - DNA, 714 bp, Shigella flexneri
atgaagatttttttggagaatctttatcattctgattgctatttcctgccgataagagataaccagcaactccttgtcggcgttgagttaattacccatttctccagtgaagatggcacggttcgtatcccgacgagtcgggttatagcgcaacttaccgaggagcaacattggcaattattttcagagcagttggaattactaaaatcatgccaacacttttttattcaacataaactctttgcctggcttaatttaacgccacaagtggctacattattattagacagggataattacgcaggcgaactattaaaatatccgtttattgagctgttgattaatgagaattacccgcatctcaatgaaggaaaagataatcgcgatcttttgtccttatcgcaaatgtatccccttgtgttaggcaatttgggagcaggtaatagcacaatgaaagcggtttttgatggtcttttcacccgcgtaatgctggagaaaggttttattcagcaacaaatcacgcatcgctccttcgaaccgtttattcgtgcgatccaggcgcaaatttccccttgttgcaattgcatcatcgcggggggcattgatacgccagaaatattggcacagattacccccttcgatttccatgctctccagggatgcctgtggcctgccgttcctataaatcagataacgacgttggttcagcgataa

SEQ ID NO: 472674 - DNA, 465 bp, Shigella flexneri
atgcgtttctgccttattttgatcacagcactgtttctggccgggtgtagccaccataaagcaccgccgccaaatgccagactttctgattcgattaccgttattgccggtttgaacgaccagctacaaagctggcatggcacgccgtatcgttatggtggcatgacgcggcgcggtgtggactgttcgggatttgtggttgtgacgatgcgcgatcgtttcgatttgcatctgccccgtgaaaccaaacaacaagcctctattggcacgcaaattgataaagacgagttgctgcctggtgacctggtctttttcaaaacgggttccggacaaaatggtttgcatgtaggtatttacgataccaacaaccaatttatccacgcctctaccagcaagggagtgatgcgttcctcacttgataatgtctattggcagaaaaatttctggcaggcgagacgaatctag

SEQ ID NO: 472675 - DNA, 750 bp, Shigella flexneri
atgtctattgtgatgcagttacaggatgttgcggaatctacccgcctggggccgctttcaggcgaggttcgggctggggaaatcctgcacctggtggggccgaatggcgcgggtaagagtaccttactggcgcaaatggccggaatgaccagcggtaagggaagcattcagttcgcggggcaaccactggaagcatggtccgcaacaaaactcgcgctgcatcgcgcctatctttcacaacagcagacgccgccgtttgcaatgccggtctggcactacctgacactgcatcagcacgataaaacgcgtaccgaactactgaatgatgtcgcaggggcgctggctcttgatgacaaactcggtcgtagcaccaatcaactttccggcggtgaatggcaacgcgtacgtcttgctgcggtggtgttgcaaatcacaccacaagccaatcccgcaggccaattgctgcttcttgatgagccgatgaacagtcttgatgttgcgcaacaaagtgcgttagacaaaattctgagcgcgctgtgtcagcaaggactggcgattgtgatgagcagtcacgatctcaaccacacgttgcgtcatgcgcatcgggcgtggttgctaaaaggtggaaaaatgctggccagtggacgcagagaagaggtgctcacgccgccaaatctggcgcaggcctatgggatgaattttcgccgtctggatatcgaaggtcacagaatgctgatttcgaccatctga

SEQ ID NO: 472676 - DNA, 552 bp, Shigella flexneri
atgcaagattccattctgacgaccgtagtgaaagatatcgacggtgaagtgaccacgctggagaagtacgccggtaatgtgctgttaattgtcaatgtcgcctcaaagtgtggcttaacgccgcaatatgagcagttggagaatattcaaaaagcctgggccgatcgaggttttgtggcgctgggattcccgtgcaaccagtttctggaacaagaaccgggcagcgatgaagagattaaaacttactgtaccaccacatggggggtgacgttcccgatgttcagtaagattgaagttaatggcgaaggacgccatccgctgtatcaaaaattgattgccgcagcgccgaccgcagtcgcgccggaagagagcggattctatgcccgtatggtcagcaaaggccgtgcaccgctgtacccggatgatattttatggaattttgaaaaattcctggttggcagggacggaaaagtcatccagcgtttttccccggatatgacgccggaagatcccattgtgatggaaagcattaaactggcgttggcaaaataa

SEQ ID NO: 472677 - DNA, 981 bp, Shigella flexneri
atgctgacacttgcccgccaacaacagcgacaaaatattcgctggttattatgcctgtcagttttgatgctgctggcgcttctcttaagcctttgcgccggtgaacaatggatttcgccaggtgactggtttactcctcgtggcgaactgttcgtctggcaaattcgcctgccacgtacgctggctgtattgctggttggtgcggcgctggctatatccggcgctgtaatgcaggcgttgtttgaaaatcctctggcagaacctggactacttggcgtctctaacggcgcaggcgtggggcttatcgccgcggtattgcttgggcaagggcaactccccaactgggcgctagggctgtgtgcgattgctggcgcgcttatcatcactttaatactcttacgtttcgcccgtcgtcatctttcgaccagtcggttattgctggctggcgttgcattagggattatctgcagcgcactaatgacgtgggctatctacttttccacctctgttgatttacgtcagctgatgtactggatgatgggcggttttggcggcgtagactggcggcaaagctggctgatgctggcattgatccccgtgttgttgtggatctgttgtcagtccaggccgatgaatatgttagcacttggcgagatctcggcgcggcaactgggtttacccatgtggttctggcgcaatgtgctggtggcagcgaccggctggatggttggcgtcagtgtggcgctggcgggtgctatcggctttattggtctggtgatcccacatattcttcggttgtgtggtttaaccgatcatcgcgtattacttcccggctgcgcgctggcaggggcgagcgcattgctgctggccgatattgtagcgcgcctggcattagctgccgcagagctgcctattggcgtggtcaccgcaacgttgggtgcgccggtgtttatctggttattgttaaaagcaggacgttag

SEQ ID NO: 472678 - DNA, 300 bp, Shigella flexneri; identical to SEQ ID NO: 1385

SEQ ID NO: 472679 - DNA, 2388 bp, Shigella flexneri
atgaaattcagtgaactgtggttacgcgaatgggtgaacccggcgattgatagcgatacgctggcgaatcaaatcactatggcgggcctggaagttgacggtgtagaaccggttgccggtagcttccacggcgtggtcgttggtgaagtggttgagtgtgcgcagcatccgaacgctgacaaactgcgtgtgacaaaagtgaatgtcggcggcgatcgcctgctggacatcgtctgcggtgcgccaaactgccgtcagggcctgcgtgtggcggtagctaccattggtgctgttctgccgggtgatttcaaaattaaagcggcgaaactgcgtggcgaaccgtctgaagggatgctgtgctccttttctgagctgggaatttctgacgatcacagtggcattatcgaactgcctgcggatgcgccgattggcaccgacatccgcgaatacctgaaactcgatgataacaccatcgaaatcagcgtgacaccaaaccgtgccgactgcttaggtatcattggtgttgcgcgtgacgttgccgtgctgaatcagctgccgctggttgaaccggaaatcgttccggttggtgcgaccatcgacgacacgttgccgattacagtcgaagcgccggaagcctgcccgcgctatcttggccgtgtggtaaaaggcattaacgttaaagcgccaactccgctgtggatgaaagaaaaactgcgtcgttgcgggatccgttctatcgatgcagttgttgacgtcaccaactatgtactgctcgaactgggccagccgatgcacgctttcgataaagatcgcattgaaggcggcattgtggtgcggatggcaaaagagggcgaaacgctggtgctgcttgatggcactgaagcgaagctgaatgctgacactctggtcatcgccgaccacaacaaggcgctggcgatgggcggcatctttggtggcgaacactctggcgtgaatgacgaaacgcaaaacgtcttgctggaatgcgctttcttcagcccgctgtctatcaccggtcgtgctcgtcgtcatggcctgcatactgatgcgtctcaccgttatgagcgtggcgttgatccggtactgcagcacaaagcgatggaacgtgcgacccgtctgctgatcgacatctgcggtggtgaggctggcccggtaattgatatcaccaacgaagcaacgctgccgaagcgtgcaaccatcactctacgtcgtagcaaactggatcgcctgataggccatcatattgctgatgagcaggtaactgacattctgcgtcgtctcggctgcgaagtgaccgaaggcaaagacgaatggcaggcagttgcgccgagctggcgtttcgatatggagattgaagaagatctggtcgaagaagtcgcgcgtgtttacggctacaacaacatcccggatgagccggtacaggcaagcctgattatgggtactcaccgtgaagctgacctgtcgctcaagcgcgtgaaaacgctgctcaacgacaaaggctatcaggaagtgatcacctacagcttcgttgatccgaaagtgcagcagatgatccatccaggcgttgaagccttactgctggcaagcccgatctctgttgaaatgtcagcaatgcgtctttctctgtggaccggcctgctggcaaccgtggtgtacaaccagaaccgtcagcagaaccgtgtgcgcattttcgaaagcggtctgcgtttcgtaccagatactcaggcaccgttgggcattcgtcaggatctgatgttagccggtgtgatttgcggtaaccgttacgaagagcactggaacctggcaaaagagaccgttgatttctatgatttgaaaggcgaccttgaatccgttctcgacctgaccggtaaactgaatgaggttgagttccgtgcagaagcgaatccggcactgcatccggggcaatccgcagcgatttatctgaaaggtgaacgtattggttttgttggagttgttcatcctgaactggaacgtaaactggatcttaacggtcgcactctggtgttcgaactggagtggaacaagctcgcagaccgcgtggtgcctcaggcgcgcgagatttctcgcttcccggcgaaccgtcgtgacatcgcggtggtggtcgcagaaaacgttcccgcagcggatattttatccgaatgtaagaaagttggcgtaaatcaggtagttggcgtaaacttatttgacgtgtaccgcggtaagggtgttgcggaggggtataagagcctcgccataagcctgatcctgcaagataccagccgtacactcgaagaagaggagattgccgctaccgtcgccaaatgtgtagaggcattaaaagagcgattccaggcatcattgagggattga

SEQ ID NO: 472680 - DNA, 984 bp, Shigella flexneri
atgtcacatctcgcagaactggttgccagtgcgaaggcggccattagccaggcgtcagatgttgccgcgttagataatgtgcgcgtcgaatatttgggtaaaaaagggcacttaacccttcagatgacgaccctgcgtgagctgccgccagaagagcgtccggcagctggtgcggttatcaacgaagcgaaagagcaggttcagcaggcgctgaatgcgcgtaaagcggaactggaaagcgctgcactgaatgcgcgtctggcggcggaaacgattgatgtctctctgccaggtcgtcgcattgaaaacggcggtctgcatccggttacccgtaccatcgaccgtatcgaaagtttcttcggtgagcttggctttaccgtggcaaccgggccggaaatcgaagacgattatcataacttcgatgctctgaacattcctggtcaccacccggcgcgcgctgaccacgacactttctggtttgacgctacccgcctgctgcgtacccagacctctggcgtacagatccgcaccatgaaagcccagcagccaccgattcgtatcatcgcgcctggccgtgtttatcgtaacgactacgaccagactcacacgccgatgttccatcagatggaaggtctgattgttgataccaacatcagctttaccaacctgaaaggcacgctgcacgacttcctgcgtaacttctttgaggaagatttgcagattcgcttccgtccttcctacttcccgtttaccgagccttctgcagaagttgacgtcatgggtaaaaacggtaaatggctggaagtgctgggctgcgggatggtgcatccgaacgtgctgcgtaacgttggcatcgacccggaagtttactctggtttcgccttcgggatggggatggagcgtctgactatgttgcgttacggcgtcaccgacctgcgttcattcttcgaaaacgatctgcgtttcctcaaacagtttaaataa

SEQ ID NO: 472681 - DNA, 357 bp, Shigella flexneri
atggctcgcgtaaaacgtggtgttattgcacgcgcacgtcacaagaaaattttgaaacaagctaaaggctactacggtgcgcgttctcgcgtataccgcgttgccttccaggctgttatcaaagctggtcagtatgcttaccgtgaccgtcgtcaacgtaagcgtcagttccgtcaactgtggattgcgcgtatcaacgcagcagcacgtcagaacggtatttcttacagcaaattcatcaatggcctgaaaaaagcctctgttgaaatcgaccgtaagatcctggctgatatcgcagtattcgacaaagtagcgttcaccactctggttgaaaaagcgaaagcagctctggcataa

SEQ ID NO: 472682 - DNA, 198 bp, Shigella flexneri
atgccaaaaattaagaccgtacgcggtgctgctaagcgcttcaaaaaaaccggtaaaggtggttttaagcacaagcacgctaacctgcgtcacattctgactaaaaaaacgaccaaacgtaaacgtcacctgcgtccgaaagccatggtttccaaaggcgatctgggcctggtaatcgcgtgcctgccgtacgcataa

SEQ ID NO: 472683 - DNA, 435 bp, Shigella flexneri
gtgagtctgagagaagctctggagaaagcagaagaagccggagtagacttagtcgagatcagccctaacgccgagccgccggtttgtcgtataatggattacggcaaattcctctatgaaaagagcaagtcttctaaggaacagaagaaaaagcaaaaagttatccaggttaaggaaattaaattccgtcctagtacagatgaaggcgactatcaggtaaaactccgcagcctgattcgctttctcgaagagggtgataaagccaaaatcacgctgcgtttccgcggtcgtgagatggcgcaccagcaaatcggtatggaagtgcttaatcgcgtgaaagacgatttgcaagaactggcagtagtcgaatccttcccaacgaagatcgaaggccgccagatgatcatggtgctcgctcctaagaagaaacagtaa

SEQ ID NO: 472684 - DNA, 1929 bp, Shigella flexneri
atgcctgttataactcttcctgatggcagccaacgccattacgaccacgctgtaagccccatggatgttgcgctggacattggtccaggtctggcgaaagcctgtatcgcagggcgcgttaatggcgaactggttgatgcttgcgatctgattgaaaacgacgcacaactgtcgatcattaccgccaaagacgaagaaggtctggagatcattcgtcactcctgtgcgcacctgttagggcatgcgattaaacaactttggccgcataccaaaatggcaatcggcccggttattgacaacggtttttattacgacgttgatcttgaccgcacgttaacccaggaagatgtcgaagcactcgagaagcggatgcatgagcttgctgagaaaaactacgacgtcattaagaagaaagtcagctggcacgaagcgcgtgaaactttcgccaaccgtggggagagctacaaagtttccattcttgacgaaaacatcgcccatgatgacaagccaggtctgtacttccatgaagaatatgtcgatatgtgccgcggtccgcacgtaccgaacatgcgtttctgccatcatttcaaactaatgaaaacggcaggggcttactggcgtggcgacagcaacaacaaaatgttgcaacgtatttacggtacggcgtgggcagacaaaaaagcacttaacgcttacctgcagcgcctggaagaagccgcgaaacgcgaccaccgtaaaatcggtaaacagctcgacctgtaccatatgcaggaagaagcgccgggtatggtattctggcacaacgacggctggaccatcttccgtgaactggaagtgtttgttcgttctaaactgaaagagtaccagtatcaggaagttaaaggtccgttcatgatggaccgtgtcctgtgggaaaaaaccggtcactgggacaactacaaagatgcaatgttcaccacatcttctgagaaccgtgaatactgcattaagccgatgaactgcccgggtcacgtacaaattttcaaccaggggctgaagtcttatcgcgatctgccgctgcgtatggccgagtttggtagctgccaccgtaacgagccgtcaggttcgctgcatggcctgatgcgcgtgcgtggatttacccaggatgacgcgcatatcttctgtactgaagaacaaattcgcgatgaagttaacggatgtatccgtttagtctatgatatgtacagcacttttggcttcgagaagatcgtcgtcaaactctccactcgtcctgaaaaacgtattggcagcgacgaaatgtgggatcgtgctgaggcggacctggcggttgcgctggaagaaaacaacatcccgtttgaatatcaactgggtgaaggcgctttctacggtccgaaaattgaatttaccctgtatgactgcctcgatcgtgcatggcagtgcggtacagtacagctggacttctccttgccgtctcgtctgagcgcctcctatgtgggcgaagacaacgagcgtaaggtaccggtaatgattcaccgcgcaattctggggtcgatggagcgtttcatcggtatcctgaccgaagaattcgctggtttcttcccgacctggcttgcgccagttcaggttgttatcatgaatattaccgattcacagtctgaatacgttaacgaattgacgcaaaaactatcaaatgcgggcattcgtgttaaagcagacttgagaaatgagaagattggctttaaaatccgcgagcacactttgcgtcgcgtcccatatatgctggtctgtggtgataaagaggtggaatcaggcaaagttgccgttcgcacccgccgtggtaaagacctaggaagcatggacgtaaatgaagtgatcgagaagctgcaacaagagattcgcagccgcagtcttaaacaattggaggaataa

SEQ ID NO: 472685 - DNA, 444 bp, Shigella flexneri
atggttattagtattcgccgctcacggcatgaggaaggggaggaactcgttgcgatttggtgtcgatctgtcgatgccacccacgattttttatcagcagagtatcgggccgagctggaagagctggtgcgttcctttctgccggaagcaccgttgtgggtcgcggttaatgaacgggagcagccggttgggtttatgttgttaagtgggcagcatatggatgcgctgtttatcgatcctgatgtgtgcggctgcggcgtgggtcggatgctggtggagcatgcgctctcgatggcaccggaactgacaaccaacgttaatgagcaaaatgagcaggcggttgggttctataagaaggtgggttttaaggttacgggacgctctgaggtggacgatttggggaaaccgtatccgttgctgaatctggcgtatgtgggggaataa

SEQ ID NO: 472686 - DNA, 930 bp, Shigella flexneri
atgccgattcgtgtgccggacgagctacccgccgtcaatttcttgcgtgaagaaaacgtctttgtgatgacaacttctcgtgcgtctggtcaggaaattcgtccacttaaggttctgatccttaacctgatgccgaagaagattgaaactgaaaatcagtttctgcgcctgctttcaaactcacctttgcaggtcgatattcagctgttgcgcatcgattcccgtgaatcgcgcaacacgcccgcagagcatctgaacaacttctactgtaactttgaagatattcaggaacagaactttgacggtctgattgtaaccggtgcgccgctgggcctggtggagtttaatgatgtcgcttactggccgcagatcaaacaggtgctggagtggtcgaaagatcacgtcacctcgacgctgtttgtctgctgggcggtacaggccgcgctcaatatcctctacggcattcctaagcaaactcgcaccgacaaactctctggcgtttacgagcatcatattctccatcctcatgcgcttctgacgcgtggctttgatgattcattcctggcaccgcattcgcgctatgctgactttccggcagcgttgattcgtgattacaccgatctggaaattctggcagagacggaagaaggggatgcatatctgtttgccagcaaagataagcgcattgcctttgtgacgggccatcccgaatatgatgcgcaaacgctggcgcaggaatatttacgcgatgtggaagccggactagacccggatgtaccgtataactatttcccgcacaacgatccgcaaaacaaaccgcgagcgagctggcgtagtcacggtaatttgctgtttaccaactggctcaactattacgtctatcagatcacgccatacgatctacggcacatgaatccaacgctggattaa

SEQ ID NO: 472687 - DNA, 657 bp, Shigella flexneri
atgactgaacaggcaacaacaaccgatgaactggctttcacaaggccgtatggcgagcaggagaagcaaattcttactgccgaagcggtagaatttctgactgagctggtgacgcattttacgccacaacgcaataaacttctggcagcgcgcattcagcagcagcaagatattgataacggaacgttgcctgattttatttcggaaacggcttccattcgcgatgctgattggaaaattcgcgggattcctgcggacttagaagaccgccgcgtagagataactggcccggtagagcgcaagatggtgatcaacgcactgaacgccaatgtgaaagtctttatggccgatttcgaagattcactggcaccagactggaacaaagtgatcgacgggcaaattaacctgcgcgatgcggttaacggtaccatcagctataccaatgaagcaggcaaaatttatcagctcaagcccaatccagcggttttgatttgtcgggtacgcggtctgcacttgccggaaaaacatgtcacctggcgtggtgaggcaatccccggtagcctgtttgattttgcgctctatttcttccacaactatcaggcactgttggcaaagggcagcggtccctatttctatctgccgaaaacccagtcctag

SEQ ID NO: 472688 - DNA, 864 bp, Shigella flexneri
ttgctgattgaaacgctgcccgccgtgttccagatggacgaaatccttcacgcgctgcgcgaccatattgttggtctgaactgcggtcgctgggattacatcttcagctatatcaaaacgttgaaaaactatcccgatcgtgtcctgccagacagacaggccgtgacgatggataaaccattcctgaatgcttactcacgcctgctgattaaaacctgccataaacgcggtgcttttgcgatgggcggcatggccgcgtttattccgagcaaagatgaagagcgtaataaccaggtgctcaacaaagtaaaagcggataaagcgctggaagccaataacggtcacgatggcacatggatcgctcacccaggccttgcggacacggcaatggcggtattcaacgacattctcggctcccgtaaaaatcagcttgaagtattgcgcgaacaagacgcgccgattactgccgatcagctgctggcaccttgtgatggtgaacgcaccgaagaaggtatgcgcgctaacattcgcgtggctgtgcagtacatcgaagcgtggatctccggcaacggctgcgtgccgatttatggcctgatggaagatgcggcgacggctgaaatttcccgtacctcgatctggcagtggatccatcatcaaaaaacgttgagcaatggcaaaccggtgaccaaagccttgttccgccagatgctgggcgaagagatgaaagtcattgccagcgaactgggcgaagaacgtttctccctgggccgttttgacgatgccgcacgcttgatggaacagatcaccacttccgatgagttaattgatttcctgaccctgccaggctaccgcctgttagcgtaa

SEQ ID NO: 472689 - DNA, 1305 bp, Shigella flexneri
atgaaaacccgtacacaacaaattgaagaattacagaaagagtggactcaaccgcgttgggaaggcattactcgcccatacagtgcggaagatgtggtgaaattacgcggttcagtcaatcctgaatgcacgctggcgcaactgggcgcagcgaaaatgtggcgtctgctgcacggtgagtcgaaaaaaggctacatcaacagcctcggtgcactgactggcggtcaggcgctgcaacaggcgaaagcgggtattgaagcagtctatctgtcgggatggcaggtagcggcggacgctaacctggcggccagcatgtatccggatcagtcgctctatccggcaaactcggtgccagctgtggtggagcggatcaacaacaccttccgtcgtgccgatcagatccaatggtccgtgggcattgagccgggcgatccgcgctatgtcgattacttcctgccgatcgttgccgatgcggaagccggttttggcggtgtcctgaatgcctttgaactgatgaaagcgatgattgaagccggtgctgcggcagttcacttcgaagatcagctggcgtcagtgaagaaatgcggtcacatgggcggcaaagttttagtgccaactcaggaagctattcagaaactggtcgcggcgcgtctggcagctgacgtgacgggcgttccaaccctgctggttgcacgtaccgatgctgatgcggcggatctgatcacctcagattgcgacccgtatgacagcgaatttattaccggcgagcgtaccagtgaaggcttcttccgtactcatgcgggcattgagcaagcgatcagccgtggcctggcgtatgcgccatatgctgacctagtctggtgtgaaacctccacgccggatctggaactggcgcgtcgctttgcacaagctatccacgcgaaatatccgggcaaactgctggcttataactgctcgccgtcgttcaactggcagaaaaacctcgacgacaaaactattgccagcttccagcagcagctgtcggatatgggctacaagttccagttcatcaccctggcaggtatccacagcatgtggtttaacatgttcgacctggcaaacgcttatgcgcagggcgaaggtatgaagcactatgttgagaaagtgcagcagccggaatttgccgccgcgaaagatggctataccttcgtatctcaccagcaggaagtgggtacaggttacttcgataaagtgacgactattattcagggcggcacgtcttcagtcaccgcgctgactggctccactgaagaatcgcagttctaa

SEQ ID NO: 472690 - DNA, 1317 bp, Shigella flexneri
atgccgcgtggcctggaattactgattgctcaaaccattttgcaaggcttcgacgctcagtatggtcgattcctcgaagtgacttccggggcgcagcagcgtttcgaacaggccgactggcatgctgtccagcaggcgatgaaaaaccgtatccatctttacgatcatcacgttggtctggtcgtggagcaactgcgctgcattactaacggccaaagtacggacgcggcatttttactgcgcgttaaagagcattacacgcggctgttgccggattacccgcgcttcgagattgcggagagcttttttaactccgtgtactgtcggttatttgaccaccgctcgcttactcccgagcggctttttatctttagctctcagccagagcgccgctttcgtaccattccccgcccgctggcgaaagactttcaccccgatcacggctgggaatctctactgatgcgcgttatcagcgacctgccgctgcgcctgcgctggcagaataaaagccgtgacattcattacatcattcgccatctgacggaaacgctggggacagacaacctcgcggaaagtcatttacaggtggcgaacgaactgttttaccgcaataaagccgcctggctggtgggcaaactgatcacgccttccggcacgttgcccttcttactgccgatccaccagacggacgacggcgagttatttattgatacctgcctgacgacgaccgccgaagcgagcattgtttttggctttgcgcgttcttattttatggtttatgcaccgctgcccgcagcgctggtcgagtggctacgggaaattctgccaggtaaaaccactgctgaattgtatatggctatcggctgccagaagcacgccaaaaccgaaagctaccgcgaatatctcgtttatctacagggctgtaatgagcagttcattgaagcgccgggtattcgtggaatggtgatgttggtgtttacgctgccgggctttgatcgggtattcaaagtcatcaaagacaagttcgcgccgcagaaagagatgtctgccgctcacgttcgtgcctgctatcaactggtgaaagagcacgaccgtgtgggccgaatggcggacacccaggagtttgaaaactttgtgctggagaagcggcatatttccccggtattaatggaattactgctccaggaagcagcggaaaaaatcaccgatcttggtgagcagattgtaattcgccatctctataatcgagcggcggatggtgccgctcaatatctggctggaacaagtggaaggtcagcagttgcgcgacgccattga

SEQ ID NO: 472691 - DNA, 483 bp, Shigella flexneri
atggtgccgctcaatatctggctggaacaagtggaaggtcagcagttgcgcgacgccattgaagaatacggtaacgctattcgccagcttgccgctgctaacattttccctggcgacatgctgtttaaaaacttcggtgtcacccgtcacgggcgtgtggttttttatgattacgatgaaatttgctacatgacggaagtgaatttccgcgacatcccgccgccgcgctatccggaagatgaacttgccagcgaaccgtggtacagcgtctcgccgggcgatgttttcccggaagagtttcgccactggctatgcgccgacccgcgtattggtccgctgtttgaagagatgcacgccgacctgttccgcgctgattactggcgcgcactacaaaaccgcatacgtgaagggcatgtggaagatgtttatgcgtatcggcgcaggcaaagatttagcgtacggtatggggagatgcttttttga

SEQ ID NO: 472692 - DNA, 357 bp, Shigella flexneri
atgaagcccctcctcctggcaaataattctaatgaatatcccggtttgttttcagcgatacagcataaacaacaaaacgttgtagagacggtttatcttgctttatctgaccatgcacgcctgtttggatttaccgctgaagatattatggatttttggcaacacaaagcgccacaaaaatactctgcctttgagttggcttttgaatttggtcaccgggttattgctgaattaatccttaatacattaaataagatggctgaaagctttggctttacggataaccctcgatacattgcggagaaaaattatatggaagctttactcaaaaaagcatctccccataccgtacgctaa

SEQ ID NO: 472693 - DNA, 1407 bp, Shigella flexneri
atgttatttcccggggcgccccaaaaccgtatagtataccgacacattgctgcacaatatattaatgatatttatcagaatgttgattacaaaccccatcaagatgattactcttcagctgaaaaatttctcactcacttcaacaaaaaatgcaaaaaccagactttggcgttgatttccagccgtcctgaggggcgttgcgttgctgcctgcggtgatttcgggctagttatgaaagcatattttgacaagatggaatcaaatggcatcagtgttatggcagccatattactggtggataaccatgctttgacggtccggctaagaataaagaacacaactgaaggatgtacccattacgtggtttcggtttatgatcctaatgtaactaacgataaaataagaattatgagcgaaagcaaagaggatattaaacactattctctgatggattttatgaatgtagattatagcctcctgaaatggtcaaatgatcatgttattaaccaatctgttgcaataattccagcacttccgaaagaacagctattgatgttaaaaggaactgtggatgaaataacccctccattatcaccagcaacgatgaatttgctaatggcaattggtcagaatcaccaacttacgcaactgatgattcagctccagaaaatgccagaactacatagaacagaaatgttgactgcctataatagtattaacctccccggtttatatttggctataaattatggcaatgcggatatcgttgagactattttcaattcattgtcagaaacaggatatgaagggttactctcgaaaaaaaatctcatgcatattctggaggcaaaagataaaaatggtttttctggattatttttagcgatatcacgtaaggataaaaatgttgtaacctcgattctgaacgtcttacctaaactggccacaacacatcatttagataatgaacaggtgtataaattcctgagtgccaaaaatagaacgtccagccatgttttataccatgttatggcgaatggtgatgccgacatgctgaaaatttttttggtcgcgttacctttgttaattcgcacatgtcatttgactaaagaacaggtactcgatctcctgaaggcaaaggatttttatggttgcccaagactatacctggcgatgcaaaatggacatagcgatatcgtgaaagttattctcgaagcattgccctgtctggcccaggaaattaacatttcagcttccgatattgtagatcttctgaccgctaaaagtcttgcgcgcgacacgggtttgtttatggccatgcagcgcggacatatgaacgttattaatactatttttaacacattacccactctttttaatacgtttaaattcgataaaaaaatatga

SEQ ID NO: 472694 - DNA, 459 bp, Shigella flexneri
atgattactcgtattcctcgtagttctttctctgcaaatattaataatacagcccagacaaatgaacaccaaaccctgagtgaattgttttataaagaactcgaggataaattttctggcaaggagctggcgacgcctctattaaaaagcttctcagagaactgtagacaaaatgttcgtcatatctttagcaacaaggattttgtcattaaattttccacgtccgtcttacaagctgataagaaagaaattacgataattaataaaaacgaaaacacgacactcactcaaaccattgctacaatatttgaagaatacctaatggaaattttacctcaacgctcagacactcttgataaacaagaattaaacctaaaatcagatagaaaagaaaaagaattcccaagaattaaacttaatggtcaatgttatttcccggggcgccccaaaaccgtatag

SEQ ID NO: 472695 - DNA, 825 bp, Shigella flexneri
atggtcgcacccattcccgcgaaacgcggcagaaaacccgccgttgccaccgcaccagcgactggacaggttcagtctttaacgcgtggcctgaaattactggagtggattgccgaatccaatggcagcgtggcactcacagagctggcgcaacaagccgggttacccaattccacgacccaccgcctgctaaccacgatgcaacagcagggtttcgtgcgtcaggtcggcgaactgggacactgggcaatcggcgcacatgcctttatggtcggcagcagctttctccagagccgtaatttgttagcaattgttcaccctatcctgcgcaatctaatggaagagtctggcgaaacggtcaatatggcggtgcttgatcaaagcgatcacgaagcgattattatcgaccaggtacagtgtacccacctgatgcgaatgtccgcgcctatcggcggtaaattgccgatgcacgcttccggtgcgggtaaagcctttttagcccaactgagcgaagaacaggtgacgaagctgctgcaccgcaaagggttacatgcctatacccacgcaactctggtgtctcctgtgcatttaaaagaagatctcgcccaaacgcgcaaacggggttattcatttgacgatgaggaacatgcgctggggctacgttgccttgcagcgtgtattttcgatgagcaccgcgaaccgtttgccgcaatttctatttccggaccgatttcacgtattaccgatgatcgcgtgaccgagtttggcgcgatggtgattaaagcggcgaaggaagtgacgctggcgtacggtggaatgcgctga

SEQ ID NO: 472696 - DNA, 3684 bp, Shigella flexneri
gtgagcagcaaagtggaacaactgcgtgcgcagttaaatgaacgtattctggtgttggacggcggtatgggcaccatgatccagagctatcgactgaacgaagccgattttcgtggtgaacgctttgccgactggccatgcgacctcaaaggcaacaacgacctgctggtactcagtaaaccggaagtgatcgccgctatccacaacgcctactttgaagcgggcgcggatatcatcgaaaccaacaccttcaactccacgaccattgcgatggcggattaccagatggaatccctgtcggcggaaatcaactttgcggcggcgaaactggcgcgcgcctgtgctgacgagtggaccgcgcgcacgccggagaaaccgcgctacgttgccggtgttcttggcccaaccaaccgcacggcgtctatttctccggacgtcaacgatccggcattccgcaacatcacttttgaccagctggcggcggcctatcgcgaatccaccaaagcgctggtggaaggtggtgcggatctgatcctgattgaaaccgttttcgacacccttaacgccaaagcggcggtctttgcggtgaaaacggagtttgaagcgctgggcgttgagctgccgattatgatctccggcaccatcaccgacgcctccgggcgcacgctctccgggcagaccaccgaagcattttacaactcattgcgccacgccgaagcgctgacctttggcctgaactgtgcgctggggcccgatgaactgcgccagtacgtgcaggaactatcacggattgcggaatgctacgtcaccgcccacccgaacgccgggctgcctaacgcctttggtgaatacgatctcgacgccgacacgatggcaaaacagatacgtgaatgggcgcaagcgggctttctcaatatcgtcggtggttgctgcgggaccacgccgcaacatattgcagcgatgagtcgtgcagtagaaggattagcgccgcgcaaactgccggaaattcccgtagcctgccgtttgtctggcctggagccgctgaacattggcgacgatagcctgtttgtgaacgtgggtgaacgcaccaacgtcaccggctctgctaagttcaagcgcctgatcaaagaagagaaatacagcgaggcgctggatgtggcgcgtcagcaggtggaaaacggcgcgcagattatcgatatcaacatggatgaagggatgctcgatgccgaagcggcgatggtgcgttttctcaatctgattgccggtgaaccggatatcgctcgcgtgccgattatgatcgactcctcaaaatgggatgtcattgaaaaaggtctgaagtgtatccagggcaaaggcattgttaactctatctcgatgaaagagggcgtcgacgcctttatccatcacgcgaaattgttgcgtcgctacggtgcggcagtggtggtgatggcctttgacgaacagggacaggccgatactcgcgcacggaaaatcgagatttgccgtcgggcgtacaaaatcctcaccgaagaggttggcttcccgccagaagatatcatcttcgacccgaacatcttcgcggtcgccaccggtattgaagagcacaacaactacgcgcaggactttatcggcgcgtgtgaagacatcaaacgcgaactgccgcacgcgctgatttccggcggcgtatctaacgtttctttctcattccgtggcaacgatccggtgcgcgaagccattcacgcagtgttcctctactacgctattcgcaatggcatggatatggggatcgtcaacgccgggcaactggcgatttacgacgacctacccgctgaactgcgcgacgcggtggaagatgtgattcttaatcgtcgtgacgatggcactgagcgtttactggagcttgccgagaaatatcgcggcagtaaagcggacgacactgctaacgcccagcaagcggagtggcgctcgtgggacgtgaataaacgtctggaatactcgctggtcaaaggcataaccgagtttatcgagcaggatactgaagaagcccgccagcaggctacgcgcccgattgaagtgattgaaggcccgttgatggacggcatgaacgtggtcggcgatctgtttggcgaaggcaaaatgttcctgccacaggtggtcaaatcggcgcgcgtcatgaaacaggcagtggcgtatctcgaaccgtttattgaagccagcaaagagcagggtaaaaccaacggcaagatggtgatcgccaccgtgaaaggcgatgtccacgacatcggtaaaaatatcgttggtgtggtgctgcaatgtaacaactacgaaattgtcgatctcggcgttatggtgcctgcggaaaaaattctccgtatcgccaaagaagtgaatgctgatttgattggcctttcggggcttatcacgccgtcgctggacgagatggttaacgtggcgaaagagatggagcgtcagggcttcgccattccgttactgattggcggcgcgaccacctcaaaagcgcacacggcggtgaaaatcgagcagaactacagcggccctacggtgtatgtgcagaatgcctcgcgcaccgttggtgtggtagcggcgctgctttccgatactcagcgtgatgattttgtcgctcgtacctgcaaggagtacgaaaccgtgcgtattcagcacgggcgcaagaaaccacgcacaccaccggtcacgctggaagcggcgcgcgataacgatttcgcatttgactggcaggcttacacgccgccggtggcgcaccgtctcggcgtgcaggaagtggaagccagcatcgaaacgctgcgtaattacatcgactggacaccgttctttatgacctggtcgctggccgggaagtatccgcgcattctggaagatgaagtggtgggcgttgaggcgcagcggctgtttaaagacgccaacgacatgctggataaattaagcgccgagaaaacgctgaatccgcgtggcgtggtgggcctgttcccggcaaaccgtgtgggcgatgacattgaaatctaccgtgacgaaacgcgcacccatgtgatcaacgtcagccaccatctgcgtcaacagaccgaaaaaacgggattcgctaactactgtctcgctgacttcgttgcgccgaagctttctggtaaagcagattacatcggcgcatttgccgtgactggcgggctggaagaggacgcactggctgatgcctttgaagcgcagcacgatgattacaacaaaatcatggtgaaagcgcttgccgaccgtttagccgaagcctttgcggagtatctccatgagcgtgtgcgtaaagtctactggggctatgcgccgaacgagaacctcagcaacgaagaactgatccgcgaaaactaccagggcatccgtccggcaccgggctatccggcctgcccggaacatacggaaaaagccaccatctgggagctgctggaagtggaaaaacatactggcatgaaactcacagaatctttcgcgatgtggcctggtgcatcggtttcgggttggtatttcagtcatccggacagcaagtactacgcggtggcgcaaattcagcgcgatcaggttgaagactatgcccgccgtaaaggtatgagcgtctccgatgttgagcgctggctggcaccgaatctggggtatgacgcggactga

SEQ ID NO: 472697 - DNA, 1632 bp, Shigella flexneri
gtgttaacgctgcttcacctgctttctgccgtcgccctgctggtctgggggactcatattgttcgaaccggcgtaatgcgcgtcttcggcgcgcgtttgcgtactgtccttagccggagcgtcgaaaaaaagccgctcgccttttgcgcggggatcggcgttaccgcactggtacagagcagtaatgccaccaccatgctggtgacctcgttcgtcgctcaggatctggtagccctcgcaccggctctggtcattgtgctgggggcagatgtcgggacggcgctaatggcgcgtattctcaccttcgacttatcctggctgtcaccgttacttatttttatcggcgtgatttttttcctcggacgcaaacagtcacgcgccgggcaactgggccgcgtcggtattggtcttgggctgattttgctggcgctggagttgattgtgcaggccgtaacgccgatcacccaggcaaacggcgttcaggtgatctttgcctcgctgaccggcgatattctgctggatgcgctgattggcgcgatgttcgccattatcagctactccagccttgctgctgtactgctgaccgcgactctgaccgctgcaggcattatctccttccccgtggcgctctgtctggtgattggagctaacctcggttccggcctgctggcgatgctcaacaacagtgccgccaatgccgcagcccgccgtgtcgcgctgggtagtctgctgtttaagctggtgggtagcctgattatcctgccgtttgtccatttgctggcagagacaatggggaagctgtcattgccaaaagcggaactggtgatctatttccacgtcttctacaaccttgtacgttgcctggtcatgctgccatttgttgacccgatggcacggttttgcaaaacgattattcgcgatgaaccggaactggatacccagctacggcctaaacatctggatgtcagcgcgctggacacgcccacgcttgctctggcgaacgccgcgcgcgaaaccctgcgcattggcgacgccatggaacagatgatggaagggctgaataaagtgatgcacggcgagccacggcaggagaaagagctgcgtaagctggcagatgatatcaacgttctctacaccgccattaagctgtatctggcgcggatgccaaaagaagagttggcggaggaagagtcgcgccgctgggcggagatcatcgaaatgtcgctcaaccttgaacaggcctccgatatcgtcgagcgcatgggcagcgaaattgccgataaatcgctggcagcacggcgggcattttcgcttgatgggttgaaggaactggatgcgctctatgagcaattgctcagtaatttaaagctggcaatgtcggtgttcttctctggcgatgtcaccagcgctcgtcgtttgcgtcgcagcaaacatcgttttcgcattcttaatcgccgctattcccacgcccacgtcgatcgcctgcatcagcaaaacgtgcagagcattgaaaccagttcgctacatttaggcttactgggagatatgcagcgcctgaactcgctgttttgttcggtggcttacagtgtgctggaacagccggatgaagatgaaggacgggacgagtattaa

SEQ ID NO: 472698 - DNA, 690 bp, Shigella flexneri
atggaactgcttttattgagtaactcgacgctgccgggtaaagcctggctggaacatgcactgccgctaattgctgaacagttgcagggtcgccgctcagcggtgtttatccctttcgctggcgtaacgcagacctgggatgattacacagagaaaacggctgcggttctcgctccgctgggtgtttctgtcaccggtattcatagcgttgtcgatcccgttgccgcgattgaaaatgcggaaattgtgattgtcggcggcggtaatactttccagttgctgaaacagtgccgcgagcgcgggctgctggctccaattactgacgtggttaaacgtggcgcgctgtatattggctggagcgcaggcgctaaccttgcttgcccaaccattcgtaccaccaacgatatgccgattgtcgatccgcaaggtttcgatgcgctaaatctgttcccgttgcaaatcaacccgcacttcaccaacgcgctgccggaaggccataaaggtgaaacccgtgagcagcgtattcgcgaactgctggtcgtcgcgccagaactgacgattattggtctgccggaaggtaactggatcacagtgagtaaaggtcacgctacgctgggtggcccgaacaccacttatgtgtttaaggctggtgaagaagcggttccgctggaagctggtcaccgtttttaa

SEQ ID NO: 472699 - DNA, 1230 bp, Shigella flexneri
atgaaaacaacagctctgcgtctttatggtaaacgtgatttacgcctggaaacctttgaccttcctgaaatgcaggaggatgaaatcctcgcaacggtggtcactgacagcctgtgcctctcttcctggaaagaggccaatctgggtgaaaaccataaaaaagtacccgacgatgtgacgaccaacccaatcatcatcggccacgaattttgcggcgatattctggccgtgggtaaaaagtggcagcacaaattccagccgggtcagcgttatgtgattcaggccaacctgcaactccccgaccgcccggattgccccggctactccttcccgtgggtagacggcgaagcgacgcatgtggttattcccaacgaggtcatggaacaatattgcctgctggcatacgacggcgaaacctattttgaaggctcactggttgaaccgctttcctgcgtgattggcgcgttcaacgccaactatcatcttcaggaaggtagttataaccacacgatggggattcgcccgcaagggcgcacgctgatcctcggcggcaccggaccaatgggactgttggcgattgattatgcgctgcatggaccagttaacccgtcgctgctcgtcattaccgataccgacaacgacaaattgagttatgcgcgcaagcactatccatcagaaccgcaaacactgattcattatctcaatgccaccgatgcagcatttgatacgttaatggcgctgagtggcggtcacggcttcgatgatattttcgtctttgtgcctaatgaaggactggtgactctcgcctcttccttgctggcgacagatggttgcctgaatttcttcgccggaccgcaggataaacatttcagcgcgccaattaatttctacgatgtgcattatgcatttacccactacgtgggcacgtcaggcggcaataccgacgacatgcgcgcggcggtcaaactgatcgaagagaaaaaagtgcaggccgcaaaagtggtaacacatattcttgggctgaatgccgcgggcgaaaccacgcttgaattgcctgccgtcggcggcggcaaaaagctggtgtataccgggaaatacctgccgctgacgtcactcacgcagattcaggatcaagcactggcggcgattctggcgcgtcatcaggggatctggtccggtgaggcggagcaatacctgctcgcccatgcagaggcaatttcccatgattaa

SEQ ID NO: 472700 - DNA, 789 bp, Shigella flexneri
atggaacagagaaaaattacacgcagcgatctggtgagcatgtttctgcgctccaacctgcaacaggcgtcctttaactttgaatgtattcacgggctgggcttttgctacgacatgatccccgccatcaagcgactttacccattaaaagaggatcaggttgcggcgctcaggctacacctggtgttcttcaataccacgccagccgtatgtggcccggtcatcggcgcggaaattgatgacggtaccatcaacggcatcaaagtcggtctgatgggaccattggcaggagttggcgatccactggtctggggaacgctgcgcccgattaccgccgcgctcggcgcatctctggcactttcgggcaacattctcggcccgctgctgttcttctttattttcaacgcggtgcgtctggcgatgaagtggtatggcctacagctcggctttcgcaaaggggtgaatatcgtcagcgatatgggcgggaatgtgctgcaaaaactcaccgaaggcgcgtcgattctcggactgtttgtgatgggcgtgctggtgaccaaatggacgtcaatcaacgtaccgttggtggtttcacaaacgcatgccgccgatggctccaccgtcaccatgaccgtgcagaacattctcgaccaactttgccctggtttgctggcgctcggtctgacgctactaatggttcgtctgctcaacaaaaaaattaacccggtatggctgattttcgccctgtttggcttagggattatcggcaatgctctgggcttcctgtcctga

SEQ ID NO: 472701 - DNA, 798 bp, Shigella flexneri
atggaaataagtaccctacaaatcattgctatatttcttttttcctgtattgccggaatgggcagcgtgctggatgaatttcagactcatcgcccgttaattgcctgtacggtgattggtttaattctcggtgatttaaaaaccggaataatactcggcggtacgctggaattgatagctctctgctggatgaacgtcggcgcggcgcaatctccggattctgcactcgccagcataatctccgccattctggttatcgttggtcagcaaagcatcgccaccggaatcgccatcgcgttgcctgtggctgcggcaggccaggtgctgacggtgtttgcccgtaccatcaccgtagtgttccagcacgcggcggataaagcagcagaagaggcgcggtttcgcactctcgatattctgcatgtctccgcgcttggcgtgcaggcgctgcgcgtcgccattccggcactgattgtctcactgttcgtcagcgccgatatggtcagcaatatgttaaacgccattcccgaatttgtgacccgaggactacagattgctggcggttttatcgtggtggtcggttacgccatggtgctacgtatgatgggcgtgaaatatttgatgcctttctttttcctcggtttcctcgcaggtggctacctcgatctcagcctgctggcgttcggtggcgtcggcgtgatcatggccctggtctacatccagctaaatccacagtggcgtaaagctgaacctcaactccaggccaccgcctccaccgcccttgaccaacttgacgattaa

SEQ ID NO: 472702 - DNA, 495 bp, Shigella flexneri
atgaacattacgctcgcccgcattgatgaccgtctgatccacggccaggtcactaccgtctggtcgaaagtggctaacgcccagcgcattattatctgcaatgacgaagtttataacgatgaagtgcgccggacattattgcgtcaggctgcgccaccgggaatgaaggttaacgtggtcaatattgaaaaagccgtcgcggtttatcacaacccgcaatatcaggacgaaaccgttttttatcttttcactcgcccacaggatgccttagcgatggttcgccagggggtaaaaataggcaccctgaatattggcggcatggcctggcggcccggtaaaaaacagttaaccaaagcggtttcattagatgatgatgatattaacgcatttcatgagttaaataatcttggtgtcatactggatttacgcgtcgtagcgtcagatccctcaatcaatattatcgacaaaataaacgaacagttaatcgcaaattaa

SEQ ID NO: 472703 - DNA, 183 bp, Shigella flexneri
atgcttgcgatgcgcaatcctcgtttgcgggtaatcagcggcctttctctgccgctggcgctcgaactggttgataaccaggacagcatgaatgttgatgaactgtgtgaacacctgacgcaaatcgcaaagcaaacctgcgttgtctggaaacaactggcaacgacagaggaggatttctga

SEQ ID NO: 472704 - DNA, 213 bp, Shigella flexneri
atggtcaacgccattttttgtgcccacggcaaattagcttgcgccatgctggaatcggttcagatggtttacggcaacgccaatgttgaagccgttgcatttgtgcccggtgaaaacgccggagacattgcggtaaagctggaaaagttagtaagcattcacaatcaagatgagtggctgattgccgtggatttacagtgcggcagcccgtag

SEQ ID NO: 472705 - DNA, 807 bp, Shigella flexneri
atgcaaacgtggttaaatttgcaggataaaatcattattgtcaccggcggcgcatccggtattggtctggcgattgtagaggaattattagcacaaggcgcgaatgtacagatggtcgatattcacggtggcgatggtcaatatgaaggtcataaaggctatcagttttggccgaccgatatttctagcacaaaagaggtaaatcatacggtagcggaaattatccagcgttttggtcgcatcgacggtctggtcaataacgccggggtcaatttcccgcgtctgctggtcgatgagaaagcgcctgccgggcagtatgaactcaacgaagctgcattcgaaaaaatggtcaatatcaaccagaaaggtgtttttctgatgtcgcaggcggtggcgcgacagatggtcaaacaacatgatggcgtgattgtgaatgtttcctcagaaagtgggctggaaggctcagaaggacaaagctgttacgccgctaccaaagccgcgctcaatagcttcacgcgctcctggtcgaaagagctgggtaaacacggtatccgtgtggtcggtatcgcgcccgggattctggaaaaaaccgggctacgcacgccggaatatgaagaggcgctggcgtggacgcgcaatatcaccgtcgagcagctgcgtgaaggctataccaaaaacgccattcctattgggcgcgccggaagattagcagaagtagctgattttgtttgttatctgttgtctgaacgcgccagctacatcaccggagtaaccactaacattgcgggcggcaaaacgcgcggctaa

SEQ ID NO: 472706 - DNA, 948 bp, Shigella flexneri
atggaaaacagtgacgatatccgtttgattgtgaagattgcccaactctattacgaacaggatatgacgcaggcgcaaatcgcgcgcgaactgggtatttaccgcaccaccatcagccgcttgcttaaacgaggccgcgatcagggaatggtcaccatcgccatcaactatgactacaacgaaaatctctggctggagcagcaactgaagcaaaagtttggcctgaaagacgttgtggtggtgtcgggaaatgatgaggatgaagagactcaactggcgatgatggggttacacggcgcgcaactgctggatcgcttgctggagcctggcgatattgtcggtttttcctggggtcgcgcggtgagcgcactggttgaaaacttgccgcaggcggggcaatcgcggcagttaatctgcgtaccaattattggcggaccgtccggtaaactcgaaagccgctatcatgtaaacacattaacctacagcgcggcagcgaagctgaaaggggaatcgcatctcgcggattttccggctctgctggataacccattaattcgtaatgggatcatgcagtctcagcactttaaaaccatctctgcctactgggataatctggatatcgccctggtgggaattggctcaccggccattcgcgacggcgctaactggcatgcgttttatggtggtgaagagagtgacgacctgaatgcccgccaggttgctggcgatatttgctcgcgcttttttgatattcacggcgcaatggttgaaacgaatatgagcgaaaaaacgctctctatcgaaatgaataaattaaagcaggcgcgatattccattggcattgccatgagtgaagaaaaatacagcggaattattggtgcactgcgtggaaaatatattaattgtctggtaacgaatagcagcacagctgaactattactgaaataa

SEQ ID NO: 472707 - DNA, 873 bp, Shigella flexneri
atgctgcccgactcatcagtccgtttaaataaatacatcagcgaaagcggaatttgctcacgccgcgaagcggatcgctatatcgagcaaggcaatgtgttccttaatggcaagcgagccaccattggcgatcaggtgaaacccggcgacattgtgaaagtaaacggtcagttgattgagcctcgggaagccgaagatttggtacttatcgccctgaacaagcccgtcggtattgtcagcaccaccgaagatggcgagcgcgataacattgtcgatttcgttaaccacagcaaacgcgtgttcccgattggccgcctggataaagactcccaggggctgattttcctcaccaatcacggcgatctggtgaataagatcctccgtgcgggtaacgatcatgagaaagagtatctggtgacggtcgataaaccgattaccgatgaatttattcgtggtatgggggcgggggtgccgatcctcgggacggtgacgaaaaagtgcaaagtcaaaaaagaagcgccgtttgtcttccgcattaccctagtgcaggggctgaaccgtcagatccggcgcatgtgcgagcatttcggctatgaagtgaaaaagctggaacgtacgcgcattatgaacgtcagcttaagcggcattccgctgggggagtggcgcgatttaaccgacgatgagttaatcgacctctttaagctcatcgaaaattcctcttccgaggcaaaacctaaagcgaaggccaaaccgaaaacagcgggcatcaaacgtccagtcgttaagatggaaaaaacggcggaaaaaggcggtcgcccggcgtccaacggtaagcgttttacctcgccggggcgtaaaaagaagggacgctga

SEQ ID NO: 472708 - DNA, 1476 bp, Shigella flexneri
atgtccagtcaatatttacgtatttttcaacagccgcgttcagccatattgctgatcctgggttttgcttccgggctaccgctcgccctgacatccggcaccttacaggcctggatgacggtcgaaaatatcgatctcaaaaccattggtttcttctctctggtaggccaggcttacgtttttaaattcctctggtcaccgctgatggaccgctacacgcccccattttttgggcggcggcgcggttggctgctcgccacgcaaatcctgttattagtcgccattgcggcgatgggttttctcgaaccaggcacccaactccgctggatggcggcgctggcggtggtgatcgctttttgctctgcctcccaggatattgtcttcgatgcgtggaaaaccgatgtgctcccggcagaagaacgtggtgcgggcgcggcaatcagcgtgctgggttaccgtttagggatgctggtttccggcggcctagccctgtggctggcagataaatggttgggctggcagggcatgtactggttgatggcggcgctgttgatcccctgtattatcgcgacgttgcttgcaccagaaccaaccgacaccattcctgtgcccaaaacgctggaacaagcggttgttgcacctctgcgagatttctttggtcgcaataatgcctggcttattttgcttcttatcgtgctgtataagctgggcgacgcattcgccatgagcctgacaaccacgtttttgattcgcggcgtcgggtttgatgcgggtgaagtaggcgtggtaaacaaaacgcttggcttactggcgaccattgttggcgcattgtacggtgggattttgatgcagcgcctgtcgctgttccgggcgctgctgattttcggcattttacaaggtgcgtctaacgctggttactggctgctgtcgattactgataagcatctctacagcatgggcgcagccgtctttttcgaaaacctctgtggcgggatgggcacatcagcctttgtcgcgctgttaatgacgctgtgtaataagtcattttccgctactcaatttgccctgctctcagcgctttccgctgtagggcgagtttatgtcggccccgtggcgggttggtttgttgaagcacacggctggtcgacattctatctattctccgtcgccgctgccgtaccggggcttattttgctgctggtttgccgccagacgcttgaatatacacgagtaaatgacaactttatctcccgtaccgaatatccggcaggttatgcctttgccatgtggacactggcggcgggcgtcagcctgttggccgtgtggttacttctgttgacgatggacgcgctggatttgacgcacttctctttcctgcctgctctgctggaagtcggggttttagtcgccctttctggcgtcgtgcttggtggtttgctggattatctggcgctacgaaaaacgcatctgacgtaa

SEQ ID NO: 472709 - DNA, 579 bp, Shigella flexneri
atgttcaaaaaaatcctcttcccgttagttgctctgtttatgcttgcaggatgcgcaaaaccgccaacaactattgaagtttccccgacgattacactgccacagcaggatccaagcctgatgggcgtcaccgtaagcattaatggtgccgatcagcgtaccgatcaggcgctggcaaaagtcacccgcgataatcaaatcgttaccctgaccgcctcccgcgctctgcgtttcctgctgcaagaagtgctggaaaaacagatgaccgcgcgtggttacatggttggtccgaatggcccggttaatctgcaaatcatcgttagccaactgtatgctgacgtgtcccagggcaacgtgcgctacaacatcgctaccaaagcggatatcaccatcatcgctaccgcgcagaatggcaacaaaatgaccaaaaactatcgtgccagctacaacgttgaaggtgcgttccaggcctccaacaaaaatatcgccgatgcggttaacagtgtgctgaccgataccatcgctgatatgtctcaggacaccagcattcacgaattcatcaagcagaacgcgcgttaa

SEQ ID NO: 472710 - DNA, 315 bp, Shigella flexneri; identical to SEQ ID NO: 138

SEQ ID NO: 472711 - DNA, 1299 bp, Shigella flexneri
atgcaagtttcagttgaaaccactcaaggccttggccgccgtgtaacgattactatcgctgctgacagcatcgagaccgctgttaaaagcgagctggtcaacgttgcgaaaaaagtacgtattgacggcttccgcaaaggcaaagtgccaatgaatatcgttgctcagcgttatggcgcgtctgtacgccaggacgttctgggtgacctgatgagccgtaacttcattgacgccatcattaaagaaaaaatcaatccggctggcgcaccgacttatgttccgggcgaatacaagctgggtgaagacttcacttactctgtagagtttgaagtttatccggaagttgaactgcagggtctggaagcgatcgaagttgaaaaaccgatcgttgaagtgaccgacgctgacgttgacggcatgctggatactctgcgtaaacagcaggcgacctggaaagaaaaagacggcgctgttgaagcagaagaccgcgtaaccatcgacttcaccggttctgtagacggcgaagagttcgaaggcggtaaagcgtctgatttcgtactggcgatgggccagggtcgtatgatcccgggctttgaagacggtatcaaaggccacaaagctggcgaagagttcaccatcgacgtgaccttcccggaagaataccacgcagaaaacctgaaaggtaaagcagcgaaattcgctatcaacctgaagaaagttgaagagcgtgaactgccggaactgactgcagaattcatcaaacgtttcggcgttgaagatggttccgtagaaggtctgcgcgctgaagtgcgtaaaaacatggagcgcgagctgaagagcgccatccgtaaccgcgttaagtctcaggcgatcgaaggtctggtaaaagctaacgacatcgacgtaccggctgcgctgatcgacagcgaaatcgacgttctgcgtcgccaggctgcacagcgtttcggtggcaacgaaaaacaagctctggaactgccgcgcgaactgttcgaagaacaggctaaacgccgcgtagttgttggcctgctgctgggcgaagttatccgcaccaacgagctgaaagctgacgaagagcgcgtgaaaggcctgatcgaagagatggcttctgcgtacgaagatccgaaagaagttatcgagttctacagcaaaaacaaagaactgatggacaacatgcgcaatgttgctctggaagaacaggctgttgaagctgtactggcgaaagcgaaagtgactgaaaaagaaaccactttcaacgagctgatgaaccagcaggcgtaa

SEQ ID NO: 472712 - DNA, 624 bp, Shigella flexneri
atgtcatacagcggcgaacgagataactttgcaccccatatggcgctggtgccgatggtcattgaacagacctcacgcggtgagcgctcttttgatatctattctcgtctacttaaggaacgcgtcatttttctgactggccaggttgaagaccacatggctaacctgattgtggcgcagatgctgttcctggaagcggaaaacccagaaaaagatatctatctgtacattaactccccaggcggggtgatcactgccgggatgtctatctatgacaccatgcagtttatcaagcctgatgttagcaccatctgtatgggccaggcggcctcgatgggcgctttcttgttgaccgcaggggcaaaaggtaaacgtttttgcctgccgaattcgcgcgtgatgattcaccaaccgttgggcggctaccagggccaggcgaccgatatcgaaattcatgcccgtgaaattctgaaagttaaagggcgcatgaatgaacttatggcgcttcatacgggtcaatcattagaacagattgaacgtgataccgagcgcgatcgcttcctttccgcccctgaagcggtggaatacggtctggtcgattcgattctgacccatcgtaattga

SEQ ID NO: 472713 - DNA, 1275 bp, Shigella flexneri
atgacagataaacgcaaagatggctcaggcaaattgctgtattgctctttttgcggcaaaagccagcatgaagtgcgcaagctgattgccggtccatccgtgtatatctgcgacgaatgtgttgatttatgtaacgacatcattcgcgaagagattaaagaagttgcaccgcatcgtgaacgcagtgcgctaccgacgccgcatgaaattcgcaaccacctggacgattacgttatcggccaggaacaggcgaaaaaagtgctggcggtcgcggtatacaaccattacaaacgtctgcgcaacggcgataccagcaatggtgtcgagttgggcaaaagtaacattctgctgatcggtccgaccggttccggtaaaacgctgctggctgaaacgctggcgcgcctgctggacgtcccgttcaccatggccgacgcaaccacgctgaccgaagccggttatgtgggcgaagacgttgaaaacatcattcagaagctgttgcaaaagtgcgattacgacgtacagaaagcgcagcgcgggattgtctacatcgatgaaatcgacaagatttctcgtaagtcagacaacccgtccattacccgagacgtttccggtgaaggagtacagcaggcactgttgaaactgatcgaaggtacggtagctgctgttccaccgcaaggtgggcgtaaacatccgcagcaggaattcttgcaggttgatacctctaagatcctgtttatttgtggcggtgcgtttgccggtctggataaagtgatttcccaccgtgtagaaaccggctccggcattggttttggcgcgacggtaaaagcgaagtccgacaaagcaagcgaaggcgagctgctggcgcaggttgaaccggaagatctgatcaagtttggtcttatccctgagttcattggtcgtctgccggttgtagcaacgttgaatgaactgagcgaagaagctctgattcagatcctcaaagagccgaaaaacgccctgaccaagcagtatcaggcgctgtttaatctggaaggcgtggatctggaattccgtgacgaggcgctggatgctatcgctaagaaagcgatggcgcgtaaaaccggtgcccgtggcctgcgttccatcgtagaagccgcactgctcgataccatgtacgatctgccgtccatggaagacgtcgaaaaagtggttatcgacgagtcggtaattgatggtcaaagcaaaccgttgctgatttatggtaagccggaagcgcaacaggcatctggtgaataa

SEQ ID NO: 472714 - DNA, 2355 bp, Shigella flexneri
atgaatcctgagcgttctgaacgcattgaaatccccgtattgccgctgcgcgatgtggtggtttatccgcacatggtcatccccttatttgtcgggcgggaaaaatctatccgttgtctggaagcggcgatggaccatgataaaaaaattatgctggtcgcgcagaaagaagcttcaacggatgagccgggtgtaaacgatcttttcaccgtcgggaccgtggcctctatattgcagatgctgaaactgcctgacggcaccgtcaaagtgctggtcgaggggttacagcgcgcgcgtatttctgcgctctctgacaatggcgaacacttttctgcgaaggcggagtatctggagtcgccgaccattgatgagcgggaacaggaagtgctggtgcgtactgcaatcagccagttcgaaggctacatcaagctgaacaaaaaaatcccaccagaagtgctgacgtcgctgaatagcatcgacgatccggcgcgtctggcggataccattgctgcacatatgccgctgaaactggctgacaaacagtccgttctggagatgtccgacgttaacgaacgtctggaatacctgatggcaatgatggaatcggaaatcgatctgctgcaggttgagaaacgcattcgcaaccgcgttaaaaagcagatggagaaatcccagcgtgagtactatctgaacgagcaaatgaaagctattcagaaagaactcggtgaaatggacgacgtgccggacgaaaacgaagccctgaagcgcaaaatcgacgcggcgaagatgccgaaagaggcaaaagagaaagcggaagcagagttgcagaagctgaaaatgatgtctccgatgtcggcagaagcgaccgtagtgcgtggttatatcgactggatggtacaggtaccgtggaatgcgcgcagcaaggtcaaaaaagacctgcgtcaggcgcaggaaatccttgataccgaccattatggtctggagcgcgtgaaagatcgcatccttgagtaccttgcggttcaaagccgtgtcaacaaaatcaagggaccgatcctctgcctggtagggccgccgggggtaggtaaaacctctcttggtcagtccattgccaaagccaccgggcgtaaatatgtccgtatggcgctgggcggcgtgcgtgatgaagcggaaatccgtggtcaccgccgtacttacatcggttctatgccgggtaaactgatccagaaaatggcgaaagtgggcgtgaaaaatccgctgttcctgctcgatgagatcgacaaaatgtcttctgacatgcgaggcgatccggcctctgcactgcttgaagtgctggatccagagcagaacgtagcgttcagcgaccactacctggaagtggattacgatctcagcgacgtgatgtttgtcgcgacgtcgaactccatgaacattccggcaccgctgctggatcgtatggaagtgattcgcctctccggttataccgaagatgaaaaactgaacatcgccaaacgtcacctgctgccgaagcagattgaacgtaatgcactgaaaaaaggtgagctgaccgtcgacgatagcgccattatcggcattattcgttactacacccgtgaggcgggcgtgcgtggtctggagcgtgaaatctccaaactgtgccgcaaagcggttaagcagttactgctcgataagtcattaaaacatatcgaaattaacggcgataacctgcatgactacctcggtgttcagcgtttcgactatggtcgcgctgataacgaaaaccgtgtcggtcaggtaatcggtctggcgtggacggaagtgggcggtgacttgctgaccattgaaaccgcatgtgttccgggtaaaggcaaactgacctataccggttcgctcggcgaagtgatgcaggagtctattcaggcggcgttaacggtggttcgtgcgcgtgcggaaaaactggggatcaaccctgatttttacgaaaaacgtgacatccacgtccacgtaccggaaggtgcgacgccgaaagatggtccgagtgccggtattgctatgtgcaccgcgctggtttcttgcctgaccggtaacccggttcgtgccgatgtggcaatgaccggtgagatcactctgcgtggtcaggtactgccgatcggtggtttgaaagaaaaactcctggcagcgcatcgcggcgggattaaaacagtgctaattccgttcgaaaataaacgcgatctggaagagattcctgacaacgtaattgccgatctggacattcatcctgtgaagcgcattgaggaagttctgactctggcgctgcaaaatgaaccgtctggcatgcaggttgtgactgcaaaatag

SEQ ID NO: 472715 - DNA, 273 bp, Shigella flexneri; identical to SEQ ID NO: 41042

SEQ ID NO: 472716 - DNA, 1872 bp, Shigella flexneri
atgatggacagcttacgcacggctgcaaacagtctcgtgctcaagattattttcggtatcattatcgtgtcgttcatattgaccggcgtgagtggttacctgattggcggaggcaataactacgccgcaaaagtgaatgaccaggaaatcagccgtgggcagttcgagaacgcctttaacagcgagcgtaatcgtatgcagcaacagctgggcgatcaatactccgagctggcagcgaacgaaggctatatgaaaaccctgcgtcaacaggtgctgaatcgtctgatcgacgaggcgctgttggatcagtacgctcgtgagctgaaactgggtatcagtgatgagcaggttaaacaggcgattttcgcgaccccagccttccaggttgacggcaaatttgataacagccgctataacggtatcctcaaccagatggggatgaccgccgatcagtacgcccaggcgctgcgtaaccagctcactacccaacagctgattaacggcgttgccggtaccgattttatgctgaaaggtgaaaccgacgagctggcggcactggtcgcgcaacaacgcgtggtgcgtgaggcgactatcgatgttaacgcgctggcggcgaagcagcctgtgaccgaacaggagattgccagctactacgaacaaaacaaaaacaatttcatgacgccggaacaattccgcgtgagttacatcaagctggttgccgcaacgatgcagcaaccggttagcgatgcggatatccagagctactacgatcagcatcaggatcaattcacccagccgcagcgtacccgctacagcatcatccagaccaaaactgaagatgaagcgaaagcggtacttgatgagctgaataaaggcggtgattttgctgcattagccaaagaaaaatctgccgatattatctctgcccgtaacggcggcgatatgggttggttagaagatgccactatccccgacgaactgaaaaatgctggtctgaaagaaaaaggccaactgtctggtgtcatcaaatcttcggtcggtttcctgattgtacgtctggacgacattcagccagcgaaagtgaaatcgttagacgaagtacgtgacgacattgcggcgaaagtgaaacacgaaaaagccctcgatgcgtactatgcgctgcagcagaaagtgagcgatgcggcaagcaacgacaccgagtctctggccggtgcagagcaagctgccggcgttaaagccactcagacgggttggttcagcaaagataacctgccggaagagttgaacttcaagccggttgccgacgctatctttaacggcggtctggtaggtgaaaacggcgcgtcgggcatcaactctgacatcatcaccgtagacggcgaccgcgcattcgtgctgcgcgtcagcgagcacaaaccggaagcggtgaaaccgttggcagatgttcaggaacaagttaaggcactggttcagcacaacaaagctgaacaacaggcgaaagtggatgctgagaaactgctggttgatttgaaagccggcaaaggtgcggaagctatgcaggctgccggtctgaaatttggcgagccgaaaaccttaagccgttccggtcgtgacccgattagccaggcggcgtttgcactgccactgccagcgaaagacaaaccgagctacggtatggcgaccgatatgcaaggtaatgtggttctgctggcgctggatgaagtgaaacaaggttcaatgccggaagatcagaaaaaagcgatggtgcagggtatcacccagaacaacgcacaaatcgtctttgaagctctgatgagtaacctgcgtaaagaggcgaaaatcaaaattggcgatgcgctggaacagcaataa

SEQ ID NO: 472717 - DNA, 372 bp, Shigella flexneri
atgaaacacggaattaaagcactgctcattaccctgtccctggcctgtgccggaatgtctcatagcgcgctggcggcagcttctgtggcgaaaccgacggcggtagaaaccaaagcggaagctcctgcagcacaaagtaaagcagcagtaccggcgaaagccagtgacgaagaaggcacccgggtcagcattaataatgccagcgcggaagagctagcccgcgcgatgaatggcgttggcctgaagaaagcgcaggcgattgtcagttatcgcgaagagtacggtccgtttaaaacggtggaggatctaaagcaggtgccggggatgggcaattcgctggtggaacgtaatctggcggtattaaccctgtaa

SEQ ID NO: 472718 - DNA, 399 bp, Shigella flexneri
atgcaaacacaaatcaaagttcgtggatatcatctcgacgtttaccagcacgtcaacaacgcccgctaccttgaatttctcgaagaagcccgctgggatggggtggaaaatagcgacagttttcagtggatgacggcccataacatcgccttcgtcgtggtcaatatcaatattaactatcgtcgcccagcggtattaagcgacctgttaactattaccagtcagttgcagcaattaaacggtaaaagcggcatcttaaaccaggtcattacactggagccggaagggcaggtggtagcggatgcgcttattacgtttgtttgtattgatcttaaaacgcagaaagcattagctctggaaggggaattgcgcgaaaagctggagcagatggttaagtaa

SEQ ID NO: 472719 - DNA, 696 bp, Shigella flexneri; identical to SEQ ID NO: 458016

SEQ ID NO: 472720 - DNA, 1572 bp, Shigella flexneri
ttgcgtcaggcacaggaggcgggatggctggagtggcaggcgcagtcaggacgcggaaagcgcggacaattacgctttctggtcacgccggaatcgctacgcaatgcgatgatggaacaggcactggaaaccggaaagcagcaagatgtgctggagctggcgcaactggccccaggtgagctgcgcactctgttacagccatttatgggcggacaatggcaaaacgatacacccacgttgcgtattccctactatcgcccgctcgaaccgctacaaccaggctttttgcccggccgtgccgagcagcatctcgccgggcagatattttccggcctgacccgcttcgataataatactcagcgcccgattggcgatttagcgcatcactgggaaacctctactgacaggttacgctgggacttttatcttcgttcaaccctacactggcataacggcgatgcagtaaaagcctcacacttacaccagcgattattgatgctgttacaactgccagcactggatcaattatttattagcgtgaagcgtattgaagtcacccatccgcagtgtctgaccttctttttacatcgccccgattactggcttgcgcaccggctggcgagctattgcagccatctggcgcatccgcaattcccactgatcggcactggtccttttcgcttaacacaattcacagcggagctggtgcgcctggagagccatgattattaccatttgcgtcatccgctgcttaaagcggttgagtactggataactccgccgcttttcgaaaaagatttgggaaccagttgtcggcatcccgtgcaaatcaccatcggcaaaccggaggagctgcaacgggtcagccaagtcagtagtggcatcagtttaggtttttgctatttaacgttgcgcaaaagtccccgactctccctctggcaggcgcgaaaagtgatctccattattcatcaatccggtttattacaaacgttagaagtcggagaaaacctgatcaccgccagtcatgcattactgccaggctggactattccgcactggcaagtaccggatgaagtcaaactaccgaaaaccttgacgctggtttatcacctaccgatagaacttcataccatggcagaacgcctacaggcgacactggcagcggaaggctgtgaactcacaattatttttcataacgcaaaaaactgggacgacacgaccctactggcacacgcagacctcatgatgggcgacagattaattggcgaagcaccggaatatactctggagcaatggctacgttgcgatccactatggccacatgttttcgacgctccagcatatgcacatctgcaatcgacgctggacgcggtgcaagtaatgcctgatgaggaaaaccgatttaatgccctgaaagcggtttttagccagttaatggcagacgcgacgctgacgccgctgttcaactatcactatcgcattagtgcccctcccggcgtgaacggtgtgcgactgacaccgcgcggctggtttgaatttaccgaagcctggcttcccgcgccgtcgcaatga

SEQ ID NO: 472721 - DNA, 819 bp, Shigella flexneri
atggctcgtctggtagcatttgatatggatggcactttattgatgcctgaccatcatttaggtgagaaaaccctctctactttggcgcgactgcgtgaacgcgacattaccctcacttttgccacggggcgtcatgcgctggagatgcagcatattctcggggcgctatcgctggatgcatatttgattaccggcaacggaacgcgcgtgcattctctggaaggtgaacttttacatcgtgatgatttacctgcggatgtcgcggagctggtgctgtatcagcaatgggatacccgagccagcatgcatatcttcaatgacgacggttggtttaccgggaaagagagccctgcgttgttgcaggtatttgtctatagcggttttcgttatcagataatcgatgtcaaaaaaatgccactcggcagcgtcaccaagatctgcttctgtggcgatcacgacgatcttacacgcttgcagatccagctatacgaagcattaggcgagcgtgcacatttgtgtttttccgccacggattgcctcgaagtgctgccggtgggctgcaataaaggcgctgcattgacggtgcggacccaacatttaggtttatcgttgcgcgattgcatggcctttggtgatgcgatgaacgatcgcgaaatgttaggcagcgtcggtagcgggtttattatgggcaatgcgatgccgcaactgcgcgcggagctcccgcatttaccggtgattggacattgccgaaatcaggctgtctctcactatttgacgcactggctggactatccacatctaccttattcccccgaataa

SEQ ID NO: 472722 - DNA, 459 bp, Shigella flexneri
atgttagataaaattgaccgtaagctgctggccttactgcagcaggattgcaccctctctttgcaggcactggctgaagccgttaatctgacaaccaccccctgctggaagcgtctgaaacggctggaggacgacggtatccttatcggcaaagtcgccctgctggatccggaaaaaataggcctcggcctgaccgcctttgtgctgataaaaacgcaacatcacagcagcgaatggtattgccgctttgtcacggtggttaccgaaatgccagaagtgctgggggtctggcgcatggctggtgaatacgattatctgatgcgcgtccaggttgccgacatgaaacgctacgacgagttttataagcgtctggtaaacagcgtgccggggctgtcggacgtcacttccagcttcgcgatggaacagattaaatacaccacttctttacccatcgaataa

SEQ ID NO: 472723 - DNA, 1773 bp, Shigella flexneri
gtgcgattatttgctcaattaagctggtatttccgtcgggaatggcgtcgctatcttggggctgtcgccttgcttgtcattatcgcgatgctgcaactggttccgccaaaagtggttggtattgttgtcgatggcgtgacagaacaacactttactaccgggctgagcctgatgtggatcgccaccatggtgctgattgccgttgtggtttatctcctgcgttatgtctggcgcgtattgctgtttggcgcgtcttaccaactggctgttgaactgcgtgaagattattaccgtcagctaagccggcagcacccggagttttacctgcgtcatcgcacgggtgatctcatggctcgtgcgaccaatgacgtcgatcgcgtcgtgtttgccgccggagaaggggtgctgacgctggtggattcactggtaatgggctgcgctgtgttgattatgatgtctacgcaaattagctggcagttgaccttatttgccctgttaccgatgccagtgatggcgatcatgattaagcgcaacggcgatgccttgcatgaacgctttaagctggcacaggcggcgttttccagtcttaatgaccgcacccaggaaagcctcaccagtatccgcatgatcaaagcctttggtctggaagatcgccagtcggcgttatttgccgcggatgccgaagataccggcaaaaaaaacatgcgggtggcgcgtattgatgctcgcttcgacccgaccatctatatcgcgattggtatggcgaacttgctggcgattggcggcggtagttggatggtggtgcagggcagtttaacgctgggccagctcaccagttttatgatgtatttaggtctgatgatttggccaatgctggcgctggcatggatgtttaacattgtggaacgtggtagtgctgcatacagccgtattcgcgcgatgctggcggaagcgccggtggtgaacgatggtagcgaacccgtgccggaagggcgtggcgaactggatgtaaatattcaccagttcacgtatccgcagactgaccatcctgcgctggaaaacgtcaatttcgccctgaaacccggtcagatgctgggtatttgcgggccgactggttccggcaaaagtaccctgttgtcgctcattcagcgtcatttcgacgtcagcgagggggatattcgctttcatgatattcctctgacgaagttacaactcgatagctggcgtagccgcctggcggtggtcagccagacgccattccttttttctgacaccgtggcgaataacatcgcgctgggttgcccgaatgccacccagcaagagattgagcatgtcgcgcggttagccagcgtacatgacgatattttgcgtctaccgcaaggttacgatacagaagtgggcgagcgcggcgtgatgctttccggtgggcaaaaacagcgtatctccattgctcgagcgttattagtcaacgcggaaatcctcatccttgatgatgcgctttcggcggtggacggacgcacagagcaccagatcctgcataacctgcgtcagtggggacagggaagaacggtaatcatcagtgcccatcgcctttcggcactgacggaagccagtgaaattattgtgatgcagcacggacatatcgcccagcgtggcaatcatgatgagctggcgcaacaaagcggttggtatcgcgatatgtatcgctatcaacaactggaggcggcgctcgacgacgttccggaaattcgcgaggaggccgtcgatgcgtag

SEQ ID NO: 472724 - DNA, 1782 bp, Shigella flexneri
atgcgtagttttagccaactgtggccgactctcaagcgcctgttagcgtatggttcgccgtggcgtaaaccgctggggattgcggtcctgatgatgtgggttgcggcggcggcagaagtcagtgggccgctgcttatcagctattttatcgacaatatggtagcgaaaaataacctgccgttgaaagtggttgcagggctggctgcggcgtatgttgggctacaactgtttgccgccgggctacattacgcgcagtcgctgctgtttaatcgggcggcagtaggcgcagtgcaacagttgcgtaccgacgtgatggatgctgcgttacgccagccattaagcgagtttgatacccaacccgtcgggcaggtgatttcccgcgtcactaatgacactgaagtgatccgcgatctctacgttaccgtagtggcaactgtcctgcgcagtgccgcactggtgggcgcgatgctggtggcgatgttcagcctcgactggcgaatggcgctggtggcgataatgattttcccggtggtgctggtggtaatggtgatataccagcgttacagcacgccgattgtccgccgtgtgcgcgcctatctggcggatatcaacgacggctttaacgaaatcatcaatggcatgagcgttatccagcagtttcgtcagcaggcgcgatttggcgaacgtatgggggaggccagtcgttcacactatatggctaggatgcaaaccctgcgcctcgacggttttctgctgcgtccgctgctgagtctgttttcatcgctcattctttgtggcttattgatgctgtttggcttctccgccagcggcaccattgaagtgggcgtgttgtatgcgtttatcagctatcttgggcgacttaacgaacccttaatcgaactgaccacgcaacaggcgatgctgcaacaggctgttgttgctggtgagcgcgtgtttgaactgatggacggaccgcgccagcaatatggcaatgatgattacccgttacagagtggcaccatcgaagtcgataacgtgtcatttgcttatcgcgatgacaatctggtgctaaagaacattaatctctctgtgccttcgcgtaactttgtggcgctggtcgggcataccggcagtggtaaaagtaccctcgccagtttattgatgggctattacccgctaacggaaggtgagattcaccttgatggtcgtccattaagttcgctaagtcatagcgcgctgcgccagggcgtggcaatggtgcagcaagatccggtggtgctggcggataccttcctcgctaatgtgacgctggggcgggatatctccgaagaacgcgtctggcaggcgctggaaaccgtgcaactggcggagctggcgcgcagcatgagtgattgtatttatacgccgctgggcgagcagggaaataatctctcagtcgggcaaaagcaactgctggcactggcgcgcgtgctggtggagacgccgcaaatcctgatccttgatgaggcaaccgccagcattgactccggtactgaacaggcgattcaacatgctctggcggcggtgcgtgaacataccacgctggtggtgattgctcaccgcttatcaactattattgatgccgacaccattctggtgcttcatcgtgggcaagccgtggagcagggcactcaccagcaactgctggcggcccagggacgctactggcagatgtatcaactgcaacttgcgggcgaagagctggcagccagcgtgcgtgaagaggaatcattgagcgcctga

SEQ ID NO: 472725 - DNA, 339 bp, Shigella flexneri; identical to SEQ ID NO: 41052

SEQ ID NO: 472726 - DNA, 1287 bp, Shigella flexneri
atgaagatagcgacgataaaaactgggcttgcttcactggcgatgctgccgggactggtaatggctgcacctgcggtggccgataaagccgacaatgcgtttatgatgatttgtactgcgctggtgctgtttatgactattccggggattgccctgttttacggtgggttgattcgcggcaaaaacgtgctgtcgatgctgacgcaggtgacggtgacgtttgcactggtctgtattctctgggtggtttacggttattcgctggcgtttggtgagggcaacaacttcttcggcaacattaactggttgatgctaaaaaacatcgaactgacggcggtgatgggcagcatttatcagtatatccacgtagcgtttcagggatcgtttgcctgcattaccgtaggcttgatagttggggcgctggcggaacgaatccgcttctcagctgtgttgattttcgtggtggtatggctgacgctctcttacattccgattgcgcatatggtgtggggcggtggtttgctggcttctcacggtgcgctggatttcgcgggtggcacggtggtgcacattaacgcagcaatcgccggtctggtgggcgcgtatctgataggcaaacgcgtaggcttcggtaaagaggcgtttaaaccgcacaacctgccgatggtcttcaccgggactgccattctctatatcggttggtttggctttaacgccgggtcagtgggcacggcgaatgaaatcgcggcactggcatttgtgaatactgtggtcgcaacggcggcggcaattcttggctggatcttcggtgaatgggcgctgcgtggtaagccttctctgctgggagcgtgttctggcgcgattgccggtctggtcggcgtgacgccagcgtgcggctacattggggttggcggcgcgttgattatcggcgtggtagctggtctggcgggtttgtggggcgttaccatgctcaaacgcttgctgcgggtggatgatccctgcgatgtcttcggtgtgcacggcgtttgtggcattgtcggctgtatcatgaccgggatttttgccgccagttctctgggcggcgtgggcttcgctgaaggtgtgacgatgggccatcagttgctggtacagttggaaagcatcgccattacgatcgtctggtccggtgtggtggcatttattggctacaaactggcggatctgacggttggcctacgtgtgccggaagaacaagagcgagaagggctggacgtcaacagccacggcgagaatgcctataacgcgtaa

SEQ ID NO: 472727 - DNA, 861 bp, Shigella flexneri
atgagtcaggcgctaaaaaatttactgacattgttaaatctggaaaaaattgaggaaggactctttcgcggccagagtgaagatttaggtttacgccaggtgtttggcggccaggtcgtgggtcaggccttgtatgctgcaaaagagaccgtcccggaagagcggctggtacattcgtttcacagctactttcttcgcccaggcgatagtaagaaaccgattatttatgatgtcgaaacgctgcgtgacggtaacagcttcagcgcccgccgggttgctgctattcaaaacggcaaaccgattttttatatgacggcctctttccaggcaccagaagcgggtttcgaacatcaaaaaacaatgccgtccgcgccagcgcctgatggcctgccttcggaaacgcaaatcgcccaatcgctggcgcacctgctgccgccagtgcttaaagataaattcatctgcgatcgtccgctggaagtccgtccggtggagtttcataacccactgaaaggtcacgtcgcagaaccacatcgtcaggtgtggatccgcgcaaatggtagcgtgccggatgacctgcgcgttcatcagtatctgctcggttacgcttctgatcttaacttcctgccggtagctctacagccgcactgcatcggttttctcgaaccggggattcagattgccaccattgaccattccatgtggttccatcgcccgtttaatttgaatgaatggctgctgtatagcgtggagagcacctcggcgtccagcgcacgcggctttgtgcgcggtgagttttatacccaagacggcgtgctggttgcctcgaccgttcaggaaggggtaatgcgtaatcacaattaa

SEQ ID NO: 472728 - DNA, 573 bp, Shigella flexneri
atgaaactcgtgcacatggccagtggtttagcggttgcgattgcgttggcggcttgcgcagataaaagcgcggatattcagacgccagccccggctgcaaatacgtctatttcagcaacacaacaacctgctatccagcaaccgaatgtctccggtaccgtctggatccgtcagaaagtcgcactgccgcctgatgctgtgctgaccgtgacactttctgacgcgtcgttagccgatgcaccgtcaaaagtgctggcgcagaaagcggtgcgtactgaaggtaaacagtcaccattcagctttgttctgccatttaacccggcagatgttcagccgaacgcgcgtattctgttgagtgcggcgattaccgtgaatgacaaactggtatttatcaccgataccgttcagccggtgatcaaccagggcggaactaaagccgacctgacattggtgccggtacagcaaaccgccgtgccggttcaggccagcggtggcgcaacgactaccgtaccttcgacttcaccaactcaggtgaatccgtcttcggcagttcccgctcctacgcaatattaa

SEQ ID NO: 472729 - DNA, 528 bp, Shigella flexneri
atggcaggaaaaacgatgataccgttactcgcctttgccgcgtggagtggtaccggaaaaactacgcttttgaaaaaactgatcccggcattatgcgccagagggatccgtccggggctgattaagcatacgcaccatgatatggatgttgataagccaggcaaagatagctatgagctgcgcaaggctggcgcggcacaaaccatcgttgccagccagcaacgatgggccttgatgacggaaacaccagacgaagaagagctggatctacattttctcgcaagtcgaatggatacctcaaagctggatttgattctggtcgaagggtttaagcatgaagagatcgcaaagattgtgctgtttcgcgatggagccggacatcgacctgaagaattagtgatagacaggcatgttattgctgtagccagtgatgtgccgcttaatcttgatgtcgcattactggatattaatgatgttgaggggctggctgattttgtggtggagtggatgcaaaagcagaacggataa

SEQ ID NO: 472730 - DNA, 585 bp, Shigella flexneri
gtgaatctgatgacgacgataacaggcgttgtgctggcaggcggtaaagccagacgaatgggcggcgtagataaaggattgctggacttaaatggcaaaccgctgtggcaacatgtcgctgacgcgcttaagacgcagctctctcacgtcgtggttaatgctaatcgtcatcaggaaatctatcaggcaggcggtctgaaagtgattgaagattcactggcggattacccaggccctctggcaggaatgctttcagtaatgcagcaggaagctggtgagtggtttttgttttgtccgtgcgatacgccttacattccccatgatttagccgcccggcttaatcatcagcgcaaagatgcgcctgtcgtgtgggtccatgacggtgaacgcgatcacccgactattgctctggtaaaccacgctattgagcctttattactggaatatctgcaagcaggagaacgccgggtaatggcatttatgcgtctggctggcggtcatgcggttgatttcagcgatcataaagatgcatttgttaacgtgaatacgccagaggagcttgcccgatggcaggaaaaacgatga

SEQ ID NO: 472731 - DNA, 270 bp, Shigella flexneri
atgaaatgtaaacgtctgaatgaagttattgaactcctccagccagcctggcaaaaagagccagactttaacttgttgcaatttttgcagaaactggcgaaagagtcaggttttgacggcgaactggcggatttgacggatgacattctgatctatcacctgaaaatgcgtgattccgcgaaagatgcggtgatcccgggtttgcagaaagattatgaagaagacttcaaaacggcgctgttacgcgctcgcggcgtaattaaagagtaa

SEQ ID NO: 472732 - DNA, 987 bp, Shigella flexneri
atgaacaacagcgcttttactttccagacactacacccggataccatcatggacgctctgtttgagcaagggatccgggtggattccggtcttaccccgcttaacagctatgaaaaccgtgtctatcaatttcaggacgaagagcgtcgacgttttgtcgtcaaattttatcgccctgaacgttggacagccgatcaaatcctcgaagaacatcaatttgcgttgcagctggtaaatgatgaagttccggtcgcagcacctgtggcctttaacggtcagactttattgaatcatcagggattttatttcgctgtttttccaagcgtcggtggtcgccagttcgaagctgataatatcgatcagatggaagcggttgggcgttatttagggcgtatgcaccagacggggcgcaaacagctttttattcatcgcccgaccatcggtctgaatgaatatctcattgagcctcgcaagctgtttgaggacgctacactgataccttccgggttgaaagcggcatttctgaaagcgacagatgagctgatcgccgccgttacagcacactggcgggaagatttcaccgttctgcggctacatggagactgccacgccgggaatattctctggcgcgatggtccaatgtttgttgatctggatgatgcacgtaatggtccagctattcaggatttgtggatgttgctcaatggcgataaagcccagcagcggatgcaactggaaactattattgaagcttatgaagaatttagcgagttcgacaccgctgaaatcggactgattgaacctttacgcgccatgcgtttggtttattatcttgcctggctaatgcggcattgggctgatcccgcgttcccgaaaaatttcccgtggttaaccggggaagattactggctacgacagacggcgacttttatagaacaggcaaaagttctacaagaaccccctttgcaattaacacctatgtattaa

SEQ ID NO: 472733 - DNA, 627 bp, Shigella flexneri
atgaaaaagatttggctggcgctggctggtttagttttagcgtttagcgcatcggcggcgcagtatgaagatggtaaacagtacactaccctggaaaaaccggtagctggcgcgccgcaagtgctggagtttttctctttcttctgcccgcactgctatcagtttgaagaagttctgcatatttctgataatgtgaagaaaaaactgccggaaggcgtgaagatgactaaataccacgtcaacttcatgggtggtgacctgggcaaagatctgactcaggcatgggctgtggcgatggcgctgggcgtggaagacaaagtgactgttccgctgtttgaaggcgtacagaaaacccagaccattcgttcagcatctgatatccgcgatgtatttatcaatgcaggtattaaaggtgaagagtacgacgcggcgtggaacagcttcgtggtgaaatctctggtcgctcagcaggaaaaagccgcagctgatgtgcaattgcgtggtgttccggcgatgtttgttaacggtaaatatcagctgaatccgcagggtatggataccagcaatatggatgtttttgttcagcagtatgctgatacggtgaaatatctgtccgaggaaaaataa

SEQ ID NO: 472734 - DNA, 1431 bp, Shigella flexneri
atgatacgtaagtcagctacaggtgttattgttgcgttagccgtaatctggggtggtggcacatggtacacaggtacgcaaattcagcctggtatcgaaaagtttattaaagattttaacgatgcgaaaaagaaaggtgaacatgcctacgatatgacgttaagttataaaaactttgacaaaggcttttttaattcccgttttcaaatgcaaatgacattcgataacggtgcacccgatctcaatatcaagccaggccagaaagttgtatttgatgtggatgttgagcacggtccgttgcccatcacaatgttaatgcatggtaatgtcatcccagcactggcagcggcaaaagtgaacttagtgaataatgaactgacacaaccgctatttatcgccgcgaaaaataaatcgcccgtggaagcgacattgcgattcgcgtttggtggctcattctctacgacattagatgttgcccctgcagagtatggaaaattttcttttggtgagggccagtttacttttaatggtgatggtagttcattgtctaacctggatattgaaggcaaagtcgaagatattgttctgcaattatcaccaatgaacaaagtaacggcaaaaagttttaccattgattctctggcgcgattagaagaaaagaaatttccggttggtgaaagcgagtcgaaatttaatcagattaacattatcaatcacggggaagacgttgcccaaatcgatgctttcgttgcaaaaaccaggctggatcgcgttaaagacaaagattatatcaatgtcaatctgacctacgaacttgataagttaacaaaagggaatcagcaactcggtagtggtgagtggtcattgattgctgaatctattgatccctcagcagtgcgccaatttatcatccagtataacattgcgatgcagaagcagcttgctgcacaccctgagttagcaaacgatgaagttgctctgcaagaagtgaatgctgcattgttcaaagagtatttaccgttattacaaaaaagtgagccgaccattaaacaaccggtaagatggaagaacgcactcggcgaactaaatgccaatctggatatcagtattgccgacccagccaaatcttcatcatccacaaacaaagatatcaaatcgctcaattttgatgtgaagttaccgcttaatgtcgtcacagaaaccgcaaaacagcttaatttatctgaaggaatggatgcggaaaaagcgcaaaagcaggctgataaacaaatcagcgggatgatgacattaggtcagatgtttcagttaatcacgattgacaacaataccgcctcgctgcagctgcgttatacaccgggtaaagttgtttttaacggacaggagatgagcgaagaagaatttatgtctcgtgccggacgttttgttcattaa

SEQ ID NO: 472735 - DNA, 933 bp, Shigella flexneri
atggctaaccttttgaataaattcattatgacgagaatactcgctgcgataacccttttgctgagtatcgtattgaccattttggtcactattttttgttccgtcccgatcatcattgccgggattgtaaaactattgctacctgtgccagtcatttggcgaaaggtttcgcgtttttgtgattttatgatgtattgctggtgtgaaggtctggcggtattactgcatctgaacccacacctgcaatgggaagttcacgggctggaagggttaagtaagaagaactggtatctgcttatttgtaaccaccgtagttgggcagatattgtcgtactgtgcgtgctgtttcgtaagcacattccgatgaataaatatttcctcaagcaacagctggcctgggtgccatttcttggcctggcgtgctgggcgctggatatgccgtttatgaagcgttattcccgcgcttatttattacgtcatccggagcgacgtggtcaagatgttgaaaccactcggcgttcttgtgaaaagtttcgcctgcatcccaccaccattgtcaatttcgttgaaggctcccgtttcacgcaagaaaaacatcagcaaacccactccacttttcaaaacttgttgccaccaaaggcggcaggcattgcgatggcgctaaatgtactgggtaaacaattcgataaactgcttaatgttacgctgtgttatccggacaataaccgtcagccgttcttcgatatgttaagcggtaaactgacgcggattgtcgtacatgtggatttacagcctattgccgatgagttacatggcgactacatcaatgacaaaagctttaagcgccattttcagcaatggctgaactcattgtggcaggaaaaagaccggcttctgacgtctctcatgtcatcacagcgtcagaataagtaa

SEQ ID NO: 472736 - DNA, 2787 bp, Shigella flexneri
atggttcagatcccccaaaatccacttatccttgtagatggttcatcttatctttatcgcgcatatcacgcgtttcccccgctgactaacagcgcaggcgagccgaccggtgcgatgtatggtgtcctcaacatgctgcgcagtctgatcatgcaatataaaccgacgcatgcagcggtggtctttgacgccaagggaaaaacctttcgtgatgaactgtttgaacattacaaatcacatcgcccgccaatgccggacgatctgcgagcacaaatcgaacctctgcacgcgatggttaaagcgatgggactgccgctgctggcggtttctggcgtagaagcggacgacgttatcggtactctggcgcgcgaagccgaaaaagccgggcgtccggtgctgattagcactggcgataaagatatggcgcagctggtgacgccaaatattacgcttatcaataccatgacgaataccatcctcggaccggaagaggtggtgaataagtacggcgtgccgccagaattgatcatcgacttcctggcgctgatgggtgactcctctgataacattcctggcgtaccgggcgtcggtgaaaaaaccgcgcaggcattgctgcaaggtcttggcgggctggatacgctgtatgccgagccagaaaaaattgctgggttgagcttccgtggcgcgaaaacaatggcagcgaagctcgagcaaaacaaagaagttgcttatctctcataccagttggcgacgattaaaaccgatgttgaactggagctgacctgtgaacaactggaagtgcagcaaccggcagcggaagagttgttggggctgttcaaaaagtatgagttcaaacgctggactgctgatgtcgaagcgggcaaatggttacaggccaaaggggcaaaaacagccgcgaagccgcaggaaaccagtgttgcagacgaagcgccagaagtgacggcaacggtgatttcttatgacaactacgtcactatccttgatgaagaaacactgaaagcgtggattgcgaagctggaaaaagcgccggtatttgcatttgataccgaaaccgacagccttgataacatctctgctaacctggtcgggctttcttttgctatcgagccaggcgtagcggcatatattccggttgctcatgattatcttgatgcgcccgatcaaatctctcacgagcgtgcactcgagttgctaaaaccgctgctggaagatgaaaaggcgctgaaggtcgggcaaaacctgaaatacgatcgcggtattctggcgaattacggcattgaactgcgtgggattgcgtttgataccatgctggagtcctacattctcaatagcgttgccgggcgtcacgatatggacagcctcgcggaacgttggttgaagcacaaaaccatcacttttgaagagattgcgggtaaaggcaaaaatcaactgacctttaaccagattgccctcgaagaggccggacgttacgccgccgaagatgcagatgtcaccttgcagttgcatctgaaaatgtggccggatctgcagaaacacaaagggccgttgaacgtcttcgagaatatcgaaatgccgctggtgccggtgctttcacgcattgaacgtaacggtgtgaagatcgatccgaaagtgctgcacaatcattctgaagagctcaccttgcgtctggctgagctggaaaagaaagcgcatgaaattgcaggtgaagaatttaacctttcttccaccaagcagttgcaaaccattctgtttgaaaaacagggtattaaaccgctgaagaaaacgccgggtggcgcgccgtcaacgtcggaagaggtactggaagaactggcgctggactatccgttgccaaaagtgattctggagtatcgtggtctggcgaagctgaagtcgacttacaccgacaagctgccgctgatgatcaacccgaaaaccgggcgtgtgcatacctcttatcaccaggcagtaactgcaacgggacgtttatcgtcaaccgatcctaacctgcaaaacattccggtgcgtaacgaagaaggtcgtcgtatccgccaggcgtttattgcgccagaggattatgtgattgtctcagcggactactcgcagattgaactgcgcattatggcgcatctctcgcgtgataaaggcttgctgaccgcattcgcggaaggaaaagatatccaccgggcaacggcggcagaagtgtttggtttgccactggaaaccgtcaccagcgagcaacgccgtagcgcgaaagcgatcaactttggtctgatttatggcatgagtgctttcggtctggcgcggcaattgaacattccacgtaaagaagcgcagaagtacatggacctttacttcgaacgctaccctggcgtgctggagtatatggaacgcacccgtgctcaggcgaaagagctgggctacgttgaaacgctggacggacgccgtctgtatctgccggatatcaaatccagcaatggtgctcgtcgtgcagcggctgaacgtgcagccattaacgcgccaatgcagggaaccgccgccgacattatcaaacgggcgatgattgccgttgatgcgtggttacaggctgagcaaccgcgtgtacgtatgatcatgcaggtacacgatgaactggtatttgaagttcataaagatgatgttgatgccgtcgcgaagcagattcatcaactgatggaaaactgtacccgtctggatgtgccgttgctggtggaagtggggagtggcgaaaactgggatcaggcgcactaa

SEQ ID NO: 472737 - DNA, 633 bp, Shigella flexneri
ttgactaatttgaattatcaacagacgcattttgtgatgagtgcgcctgatattcgccacctaccttccgataccggaattgaagtggcttttgcaggccgttccaacgcaggtaaatccagcgcgctgaacacgctgactaaccagaaaagcctggctcgtacctcaaaaaccccagggcgcacccagcttatcaacctgtttgaagtggctgacggcaagcgtctggttgacttgcctgggtacggttatgcggaagtcccggaagagatgaagcgcaaatggcagcgtgcgctcggcgaatacctcgaaaaacgtcagagcctgcaaggtctggtggtgctaatggatattcgccatccgctgaaagatttggatcagcagatgattgagtgggcggtagacagcaatatcgccgttctggtgctgctgaccaaagcggacaaactggcaagcggcgcacgtaaagcgctattgaatatggtgcgtgaagctgtactggcgtttaacggtgatgtgcaggttgaaacgttttcttcgttgaagaaacaaggcgtagacaagctgaggcagaaactggatacctggtttagcgagatgcagcctgtagaagaaacgcaggacggcgaataa

SEQ ID NO: 472738 - DNA, 510 bp, Shigella flexneri
atgaaaccatcatcttcaaactcacgcagcaaaggtcatgcaaaagcgcgtcgaaaaacacgcgaggagctggatcaggaagctcgtgaccgtaagcgtcagaaaaaacgtcgtggtcatgcgccgggcagccgcgcagcgggcggaaacaccacgtcaggcagcaaaggccagaacgcaccaaaagatccacgtattggcagtaaaacccctattccattgggagtgactgaaaaagtcaccaaacagcacaaaccgaagagtgagaaacctatgctttcaccgcaggcggagttggaattactggaaacggatgagcgtctggatgcgctgctggaacgtctggaagcaggcgaaaccctgagcgccgaagagcaatcctgggtggatgctaaactggatcgtattgatgagttgatgcagaaactcggcctctcttatgacgatgacgaagaagaggaagaagacgagaagcaagaagacatgatgcgtctgctgcggggcaactaa

SEQ ID NO: 472739 - DNA, 1374 bp, Shigella flexneri
atgtctgtacagcaaatcgactgggatctggccctgatccagaaatataactattccgggccacgatacacctcgtacccgaccgcgctggagttttcagaagacttcggcgaacaggcgtttttacaagccgtggcgcgctatcctgagcgtccattatctctctacgtacatatcccgttctgccataagctttgttacttctgcggttgcaataagattgttactcgccagcagcacaaggccgatcagtatctggacgcgctggagcaagaaatcgtccatcgtgcaccgctgttcgccgggcgtcacgtcagccaattgcactggggcggcggaacgccgacgtatctgaataaagcgcaaatcagccgtctgatgaagctgctgcgcgaaaacttccatttcaataccgatgcggagatttcgatcgaagtcgatccgcgggaaatcgaactggatgtactcgatcatttacgcgccgaaggctttaatcgcctgagcatgggcgtgcaggacttcaacaaagaagtgcaacgtctggttaaccgcgagcaggatgaagagttcatctttgcactgcttaaccatgcgcgtgagattggttttacctccaccaacatcgacctgatttacggcctgccgaaacagacgccggagagtttcgcctttaccctgaaacgtgtggcggagctgaaccccgatcgtctgagcgtttttaactacgcgcatctgccgaccatttttgctgctcagcgcaaaatcaaagatgctgacctgccgagtccgcagcaaaaactcgatatcctgcaggaaaccatcgccttcctgacgcaatcgggctatcagtttatcggtatggatcactttgcccgtcctgatgacgagctggcggtggcccagcgtgaaggcgtgctgcatcgtaacttccagggctacaccactcagggcgataccgatctgctggggatgggcgtttccgccatcagcatgattggcgactgctacgcgcagaaccagaaagagttgaagcagtactatcagcaagtgtatgaacaaggcaatgcgctgtggcgtggtattgcgctaacgcgtgatgactgtattcgccgcgatgtgattaagtcgctcatctgcaacttccgtctggattacgcccctcttgagaaacagtgggatttgcacttcgctgattactttgaggaagatctcaagctgctcgccccgttagcaaaagatgggctggtggatgtggatgagaagggaatacaggtgacggcgaaaggtcgcttgctgatccgcaacatttgcatgtgctttgatacctatctgcgccagaaagcgcggatgcagcagttctcacgggtgatttaa

SEQ ID NO: 472740 - DNA, 1410 bp, Shigella flexneri
atgcaacgagggatagtctgggtagtcgatgacgatagttccatccgttgggtgcttgaacgtgcgctcgctggagcgggtttaacctgtacgacatttgagaacggcgcggaagtactggaggcgctggcgagcaaaacgccggatgtgctgctttcagatatccgtatgccgggaatggacgggctggcgctgctcaagcagattaaacagcgccatccaatgcttccggtcatcattatgaccgcacattccgatctggatgctgccgtcagcgcctatcaacaaggggcgtttgattatctgcccaaaccgtttgatatcgacgaagcagtggcgctggttgagcgcgctatcagtcattaccaggaacagcagcagccgcgtaatattcagcttaacggcccaacgaccgatatcatcggcgaagcgcaagccatgcaggacgtgttccgtattatcggtcggctttcgcgttcttctattagcgtgctgattaacggcgaatccggcaccggtaaagaactggtcgctcatgccctgcatcgccacagtccgcgcaccaaagcgccgtttatcgcgctgaatatggcagctatcccaaaagatttgatcgaatcagaactgtttggccacgagaaaggcgcgtttactggcgcgaataccattcgtcaggggcgttttgaacaggccgatggcggcacgttatttctcgacgaaattggtgatatgccgctggatgtgcagacgcgtttgctgcgcgtgctggcagacggtcagttttatcgcgttggcggctatgcgccggtgaaagtggatgtgcggattatcgctgccactcaccagaatcttgaacagcgggtgcaggaaggtaagttccgtgaggatctgttccaccgcctgaacgttatccgcgttcatctgccgccgctgcgcgaacgtcgggaagatattccccgtctggcgcgccattttttacaggttgccgcgcgcgaactgggcgtagaagcgaagttgctgcatccggaaaccgaagctgctctgacgcgtctggcgtggccaggcaacgtgcgccagctggaaaacacctgccgctggctaacggtgatggccgccgggcaggaagtgttgattcaggatttgcccggcgaactgtttgaatcaacggttgcggagagtacttcgcaaatgcaaccggacagttgggcgacacttttagcgcagtgggcagacagagcgctgcgttccggtcatcaaaatctgctttccgaagcgcagccagagctggagcggacgttactgacgaccgcgttgcgacatacgcaggggcataaacaggaagcggcgcggctactcggctggggccgcaacactctgacgcgtaagttaaaagagctggggatggagtga

SEQ ID NO: 472741 - DNA, 1050 bp, Shigella flexneri
atggcaacaggcacgcagcccgatgctgggcagatcctcaactcgctgattaacagtattttgttaattgatgacaatctggcgatccattacgccaaccccgccgcgcaacaactgctcgcccaaagctcccgcaaattgtttggtacgccgttaccggaactgttgagctacttctcattaaatatcgagctgatgcaagaaagtctggaggcggggcaaggctttaccgataacgaagtgacgctggtcatcgatggtcgctcgcatatcctttctgtgacggcccagcgtatgccggacggcatgatcctgctggagatggcaccgatggataaccagcgccgcttaagccaggaacaactacaacatgctcaacaagtagctgcccgtgatttagtgcgcggcctggcacatgagattaaaaatccgcttggcggtttacgtggcgcggcgcagttactcagcaaagcgttacctgacccatcactactcgaatataccaaagtgattatcgaacaggcggaccggctgcgaaatttggtcgaccgtctgttggggccgcagctgcccggtacgcgcgttaccgaaagtattcacaaagtggctgaacgcgtggtaacgctggtgtcgatggaactgccggacaacgtgcggttgattcgtgattacgatcccagcctgccggaactggcgcacgacccggatcaaattgaacaggtcttgctgaatattgtgcgcaatgcgctacaggcgctggggccggaaggcggtgaaatcattctgcgtacccgcaccgcgtttcaactgaccttacacggcgagcgctaccggctggcggcgcggattgatgtggaagataacgggccgggcattccgcctcatttgcaggatacgctgttttacccgatggtcagcggccgcgaaggtggcaccgggcttggcttatccatcgcccgtaatttgattgatcagcattcaggcaaaattgaatttaccagttggccaggtcataccgagttctcggtttacctgcctatcaggaaataa

SEQ ID NO: 472742 - DNA, 1410 bp, Shigella flexneri
atgtccgctgaacacgtactgacgatgctgaacgagcacgaagtgaagtttgttgatttgcgcttcaccgataccaaaggtaaagaacaacacgtcactatccctgctcatcaggtgaatgctgaattcttcgaagaaggcaaaatgtttgacggctcctcgattggcggctggaaaggcattaacgaatccgacatggtgctgatgccagacgcatccactgcagtgattgacccgttcttcgccgactccaccctgattatccgttgcgacatccttgaacctggcaccctgcaaggctatgaccgtgacccgcgctctattgcgaagcgcgccgaagattacctgcgttccactggcattgccgacaccgtactgttcgggccagaacctgaattcttcctgttcgatgacatccgtttcggatcatctatctccggttcccacgttgctatcgacgatatcgaaggcgcatggaactcctccacccaatacgaaggtggtaacaaaggtcaccgtccggcagtgaaaggcggttacttcccggttccgccggtagactctgctcaggatattcgttctgaaatgtgtctggtgatggaacagatgggtctggtggttgaagcccatcaccacgaagtagcgactgctggtcagaacgaagtggctacccgcttcaataccatgaccaaaaaagctgacgaaattcagatctacaaatatgtcgtgcataacgtagcgcaccgcttcggtaaaaccgcgacctttatgccaaaaccgatgttcggtgataacggctccggtatgcactgccacatgtctctgtctaaaaacggcgttaacctgttcgcaggcgacaaatacgcaggtctgtctgagcaggcgctgtactacattggcggcgtaatcaaacacgctaaagcgattaacgccctggcaaacccgaccaccaactcttataagcgtctggtcccgggctacgaagcaccggtaatgctggcttactctgcgcgtaaccgttctgcgtctatccgtattccggtggtttcttctccgaaagcacgtcgtatcgaagtacgtttcccagatccggcagctaacccgtacctgtgctttgctgccctgctgatggccggtcttgatggtatcaagaacaagatccatccgggcgaagccatggacaaaaacctgtatgacctgccgccagaagaagcgaaagagatcccacaggttgcaggctctctggaagaagcactgaacgaactggatctggaccgcgagttcctgaaagccggtggcgtgttcacggatgaagcgatcgatgcgtacatcgctctgcgtcgcgaagaagatgaccgcgtgcgtatgactccgcatccggtagagtttgagctgtactacagcgtctaa

SEQ ID NO: 472743 - DNA, 1824 bp, Shigella flexneri
gtgatcgaaaaattgcgtaatatcgccatcatcgcgcacgtagaccatggtaaaaccaccctggtagacaagctgctccaacaatccggtacgttcgactctcgtgccgaaacccaagagcgcgtgatggactccaacgatttggagaaagagcgtgggattaccatcctcgcgaaaaacaccgctatcaaatggaatgattaccgtatcaacatcgttgataccccggggcacgccgacttcggtggtgaagttgaacgtgtaatgtccatggtagactcagtgctgctggtggttgacgcatttgacggcccgatgccgcaaacgcgcttcgtaaccaaaaaagcgtttgcttacggcctgaagccgattgttgttatcaacaaagttgaccgccctggcgcgcgtcctgattgggttgtggatcaggtattcgatctgttcgttaacctcgacgcgaccgacgagcagctggacttcccggtcgtttacgcttctgcgctgaacggtatcgcgggtctggaccacgaagatatggcggaagacatgaccccgctgtatcaggcgattgttgaccacgttcctgcgccggacgttgaccttgacggtccgttccagatgcagatttctcagctcgattacaacagctatgttggcgttatcggcattggccgcatcaagcgtggtaaagtgaagccgaaccagcaggttactatcatcgatagcgaaggcaaaacccgtaacgcgaaagtcggtaaagtgctgggccacctcggtctggaacgtatcgaaaccgatctggcggaagctggcgatatcgtggcgatcacgggcctgggcgaactgaacatttctgacaccgtttgcgacacgcaaaacgttgaagcgctgccggcactctccgttgatgagccgaccgtttctatgttcttctgcgttaacacctcgccgttctgcggtaaagaaggtaagttcgtaacgtctcgtcagatcctcgatcgtctgaacaaagaactggtacacaacgttgcgctgcgcgtagaagaaaccgaagacgccgatgcgttccgcgtttctggtcgtggtgaactgcacctctctgttcttatcgaaaacatgcgtcgtgaaggtttcgaactggcggtatcccgtccgaaagtaatcttccgtgaaatagacggtcgtaaacaagagccgtatgaaaacgtgacgctggacgttgaagaacagcatcagggttctgtgatgcaggcgctgggcgaacgtaaaggcgacctgaaaaacatgaatccagacggtaaaggccgcgtacgtctcgactacgtgatcccaagccgtggtctgattggcttccgttctgagttcatgaccatgacttccggtactggtctgctgtactccaccttcagccactacgacgacgtacgtccgggcgaagtgggtcagcgtcagaacggtgtactgatctctaacggtcagggtaaagctgtcgcgttcgcgctgttcggtctgcaggatcgcggtaagctgttcctcggtcacggtgcagaagtttacgaaggtcagattatcggtattcatagccgctctaacgacctgactgtaaactgcctgaccggtaagaaactgaccaacatgcgtgcttccggtactgacgaagctgttgttctggttccgcctatccgcatgactctggaacaagctctggagttcatcgatgatgacgaactggtagaagtgactccgacctctatccgtattcgtaaacgtcacctgacggaaaacgatcgtcgccgcgccaaccgcgcaccgaaagacgattaa

SEQ ID NO: 472744 - DNA, 711 bp, Shigella flexneri
atggcggagaatcaatccaccgtagaaaatgcaaaagagaaactggatcggtggttgaaagatggcatcaccacgccgggtggaaaactcccttcagaaagagagctgggagaactgctgggcattaaacgtatgacgctgcgccaggcgttgttgaacctcgaggcagaatccaaaatcttccgtaaggatcgtaaggggtggttcgtgacccagccgcgatttaattacagtccggagctgtcggcgagctttcagcgggccgcaattgagcaagggcgagagccttcttgggggtttaccgagaaaaaccgtaccagcgatattcccgagacgctcgcgccactgattgcagtgacgccatcaactgaactctatcgcatcaccggctggggggcgctggaaggacataaagttttctatcacgaaacatatattaatcctgaagttgccccgggttttattgaacaacttgaaaaccactcattttctgcagtctgggaaaagtgctaccaaaaagagacggtagtaaaaaaattgattttcaaacccgtcagaatgccgggcgatatcagcaagtatcttggcggttctgcgggtatgccagcgatcttaattgaaaagcatcgcgccgaccagcaaggcaatattgtccagatagatattgaatattggcgatttgaggccgtagacctcatcattaatctgtag

SEQ ID NO: 472745 - DNA, 981 bp, Shigella flexneri
atggtgacaataaataacgcaagaaagattctacaacgtgtcgacactcttcctctttatttacatgcttatgcctttcatttaaatatgcggctggaaagagtgttgcctgctgatttacttgatatcgcaagtgaaaataatctacgtggcgtcaaaatccatgttctggatggcgagcgtttttctcttggtaatatggacgataaagaactctctgcctttggggataaagcccgccgtctgaaccttgatattcatattgaaaccagcgcttcagataaggcatctattgacgaagccgtcgccatcgcgttgaaaactgaggcaacgtccgtacgtttttatccacgttatgaaggtaatttgcgcgacgtattatcgattatcgctaacgacattgcctatgtacgggaaacgtatcaggacagcggcctgacttttacgattgagcagcatgaagatttaaaaagtcatgagctggtgtcgctggtcaaagaaagtgagatggagtctctttccttactgtttgattttgctaacatgatcaatgcaaatgagcatcccatcgacgccttaaaaacgatggcaccgcatattacccaggtccatattaaagatgccttgatcgttaaagaacagggtggcctgggtcataaagcctgtatttcaggtcagggtgatatgccattcaaagcgttattaacgcaccttatctgccttggcgatgatgagccgcaggtgacggcatatggcctggaagaagaggttgattactatgcgtcggcgttccgctttgaagacgaagatgataatccgtggatcccttatcgccagatgagtgaaacacccctaccagaaaatcatttactggatgcgcggttacgtaaagaaaaagaagatgcaattaatcagataaatcatgtgcgtaacgtactacaacaaatcaaacaagaggcaaaccatcttctgaaccactaa

SEQ ID NO: 472746 - DNA, 1059 bp, Shigella flexneri
atgctcacgaaaaagaaatgggcgttatttagtctattaacactgtgtggcggtacaatttataaattaccgtcgctgaaagatgcgttttatatcccgatgcaggaatatttccatttgaccaatggtcaaattggtaatgctatgtcggtaaactcatttgtcaccacagtgggcttttttctgtctatttattttgccgataaactaccgcgcagatacaccatgtcattctcactcattgcgacaggattactgggtgtttatttgacgacaatgccggggtattggggcatcctctttgtctgggcgctatttggcgttacttgcgacatgatgaactggccggtcttgctcaagtcggtaagtcgattgggcaatagcgaacaacaaggtcggttgtttggcttcttcgaaacagggcgtggcattgtcgataccgtggtggcattttctgcgttggcagtatttacctggtttggcagtggcttattaggttttaaagcaggcatctggttctattcccttattgtgattgccgtaggcattattattttctttgtcctgaatgacaaagaagaggcaccgtccgttgaggtgaaaaaagaagacggagcatcgcaaaacaccagtatgacctcggtgctgagagacaaaaccatctggcttatcgctttcaacgtcttcttcgtttacgcggtttactgtggcctgacattcttcattccattcctgaaaaacatctatctattgcccgttgcgctggtgggggcttacggcatcattaaccaatactgtctgaaaatgattggtggaccgattggtggcatgatttcagataagatcctgaaatcgccgagtaaatatctatgctacacctttatcatcagtaccgctgcgctcgtactgttgattatgctgccgcacgaaagtatgccggtctatttagggatggcatgtacgctgggctttggcgcgatagtctttacacagcgagccgtattttttgcacctatcggcgaagcaaaaattggtaatgctgccaacttactgatttag

SEQ ID NO: 472747 - DNA, 909 bp, Shigella flexneri
atgacgcttgagcaggagcagcaggttaaaacccgtactgccgaacagaatgcacgtattgcggcttttgaagctgaacgtcgtcgtgaagcagagcagacgcgaattctggctgaacgacaaattcaggaaacggagatcgagcgcgagcaggccgtccgctcaagaaaggttgaggctgaacgtgaagttcgtattaaagagatcgaacagcagcaggtcaccgaaatcgccaaccagacgaaatcgatcgctattgccgccaaatcggaacaacagtcccaggcagaagcgcgtgctaaccttgcactcgcagaagcagtaagtgcgcaacaaaacgtagaaaccactcgccagaccgcagaagccgatcgtgctaaacaagttgccctaatcgctgccgcgcaggatgcagaaaccaaagcggttgaactgaccgtgcgggcgaaagcagaaaaagaagccgcagagatgcaggcggcggctatcgttgagttagccgaagctacacgtaaaaagggtctggcggaagcagaagcacaacgtgcgctgaacgatgctatcaacgtactttctgatgaacaaaccagccttaaattcaaactggccttgttgcaggcgctacctgcggtaatagaaaaatccgttgagccgatgaaatctattgacggtatcaagattattcaggtcgatggtctgaatagtggcagcgctgcgggtgatgcaaacacgggtaatgtggggggcggaaacctagcggaacaagcattatcagccgctctctcttaccgcacacaggctccgctgattgactccttgctcaatgaaattggcgtttcaggcggttcactggcggcattgacttcacccttaatctcaacaactcccgtcgccgaaaacgtaaaataa

SEQ ID NO: 472748 - DNA, 1434 bp, Shigella flexneri
atgaaagtaacgctgccagagtttgaacgtgcaggagtgatggtggttggtgatgtgatgctggatcgttactggtacggccccaccagtcgtatctcgccggaagcgccggtgcccgtggttaaagtgaataccatcgaagaacgtccgggcggcgcggctaacgtggcgatgaatatcgcttctctcggtgctaatgcacgcctggtcgggttgacgggcattgacgatgcagcgcgcgcgctgagtaaatctctggccgacgtcaacgtcaaatgcgacttcgtttctgtaccgacgcatccgaccatcaccaaattacgggtactttcccgcaaccaacagctgatccgtctggattttgaagaaggtttcgaaggtgttgatccgcagccgctgcacgagcggattaatcaggcgctgagttcgattggcgcgctggtgctttctgactacgccaaaggtgcgctggcaagcgtacagcagatgatccaactggcgcgtaaagcgggcgttccggtgctgattgatccaaaaggtaccgattttgagcgctaccgcggcgctacgctgctgacaccgaatctctcggaatttgaagctgttgtcggtaaatgtaagaccgaagaagagattgttgagcgcggcatgaaactgattgccgattacgaactctcggctctgttagtgacccgttccgaacagggtatgtcgctgctgcaaccgggtaaagcgccgctgcatatgccaacccaggcgcaggaagtgtatgacgttaccggtgcgggcgacacggtgattggcgtcctggcggcaacgctggcagcgggtaattcgctggaagaagcctgcttctttgccaatgcggcggctggcgtggtggtcggcaaactgggaacctccacggtttcgccgatcgagctggaaaatgcagtgcgtgggcgcgcagataccggctttggcgtgatgaccgaagaggaactgaagctggccgtagcggcagcgcgtaaacgtggtgaaaaagtggtgatgaccaatggcgtctttgacatcctgcacgccggacacgtcttctatctggcaaatgcccgcaaactgggtgaccgcttgattgtcgctgtgaacagcgatgcctccaccaaacggctgaaaggggattctcgccccgttaacccgctcgaacagcgtatgattgtgctgggcgcactggaagcggtcgactgggtggtgtcgtttgaagaagacacgccgcagcgcttgatcgccgggatcctgccagatttactggtgaagggcggcgactataaaccagaagagatcgccgggagtaaagaagtctgggccaacggcggcgaagtgctggtgctcaacttcgaagacggttgctcgaccactaacatcatcaagaagatccaacaggataaaaaaggctaa

SEQ ID NO: 472749 - DNA, 2841 bp, Shigella flexneri
atgaagccgctctcttcaccgttacagcagtactggcagaccgttgttgagcggctgccagagcttttagccgaggaatcacttagtgcacaggcgaagtcagtacttactttcagtgattttgtgcaggacagcgtgattgcgcatccagagtggctgacggaactggaaagccaaccgccacaggctgacgaatggcaacattacagcgtgtggttgcaggaggcgctcagtaatgtgagcgacgaagccgggttaatgcgcgagctgcggctattccggcggcgcattatggtgcgcatcgcatgggcgcaaacgctggcactggttactgaagagagcatattgcagcagctcagttatctggcggagacgctgattgttgcggcgcgtgactggctgtatgacgcctgctgccgcgagtggggaacgccgtgcaatgcgcagggcgaagcgcaaccgctgctgatcttaggcatgggtaagctgggcggcggggaactgaatttctcctctgatatcgatctgatttttgcctggccggaacatggttgtacgcagggcggacgccgggaactggataacgcgcagttttttacccgcatggggcagcggctgattaaagtgctggatcaaccaacgcaggatggcttcgtctatcgcgtggatatgcgactgcgtccgtttggcgaaagtggcccgctggtgctgagctttgccgcgttggaggattattaccaggagcagggacgcgactgggagcgttacgcgatggtcaaagcgcggattatgggcgatagcgaaggcgtctatgctaacgagttgcgtgcgatgctgcgcccgtttgttttccgtcgttacatcgatttcagcgtgattcagtcgctgcgcaacatgaaagggatgattgcccgtgaagtgcgtcgacgtggtttgaccgacaatatcaaactcggcgcaggcggcattcgcgaaattgaatttatcgttcaggtgttccagctcattcgcggtgggcgcgaaccgttgctgcagtcgcgctctttactgccaacgctcagcgccattgccgcgctgcatctgctttctgaaaacgatgctgaacaattgcgagtggcatatctgttcctgcggcgtctggaaaacctgctgcaaagcattaacgacgaacaaacccaaacgcttccttctgatgagcttaaccgtgcgcggctggcgtgggcgatggactttgctgactggccgcaactgaccggggcgctgaccgcacatatgaccaatgtgcgccgggtgtttaatgaattgattggcgacgacgaaagtgaaactcaggaagagtcgctgtcggaacagtggcgtgagctgtggcaggatgcgttgcaggaagatgacactacgccagtgctggcgcatcttagcgaggatgatcgcaaacaggtcctaacgctgattgctgatttccgcaaagagctggataagcgtactatcggaccgcgaggacgtcaggtgctcgaccatctgatgccacatctgctaagtgatgtctgtgcgcgtgaagacgctgctgtcacgctgtcgcgcattaccgccttgctggtggggattgttacccgcacaacctatttagaattgctcagtgaattccctgcggcgcttaaacatttgatttctctgtgtgccgcatcgccgatgattgccagccagctagcgcgttatccattattgctggatgaattgctcgatccaaataccctttatcagccgacggcgaccgatgcctaccgtgatgaactgcgccagtatttgctgcgcgtgccggaagatgacgaagaacaacagcttgaggcgctgcgtcagttcaaacaggcgcagctgttacgcattgcggcagcggatatcgccggtacgctaccggtaatgaaagtgagcgatcacttaacctggctggcagaagctatgatagatgccgtcgttcagcaggcgtggggtcaaatggtggcccgctacggtaagccaaatcacctcaacgaacgtgaagggcgcggttttgcggtggtcggctacggcaagctgggcggctgggagttaggctacagttccgatcttgaccttatcttcctccatgattgcccaatggatgcgatgactgacggcgagcgggaaatcgacgggcggcagttttatctgcgtctggcgcaacgcattatgcatctgttcagtacgcgtacctcttccggcattttgtatgaagtggatgctcgactgcgtccgtccggggcggcgggaatgctggtgacatccgcagaagcatttgccgattatcagaaaaacgaggcctggacgtgggaacatcaggcgctggtgcgtgcgcgtgtagtgtacggcgatccgcagctcactgcgcactttgacgcggtgcgtcgtgagattatgacactgccgcgagaaggtaaaactctgcaaacggaagtgcgggaaatgcgcgagaaaatgcgcgctcatctcggcaataaacatcgtaatcgctttgatatcaaagccgatgaaggcggaattaccgatatcgaatttattacccaatatctggtgttgcgctacgctcatgaaaaaccgaagttaacgcgctggtcagacaacgtgcgtattctggagctgctggcgcaaaacgacattatggaagagcaggaagcgatggcgctgacccgtgcttacacgacgctgcgcgatgaacttcatcatctggcattacaggaattgccgggccatgtgtcggaggattgcttcaccgcagagcgtgatctggtgcgggcaagctggcagaagtggctggtggaagaatga

SEQ ID NO: 472750 - DNA, 1302 bp, Shigella flexneri
atggctcaggaaatcgaattaaagtttattgttaatcacagtgccgttgaggcgttgcgtgaccatctcaatacgctgggcggcgagcaccatgaccccgtgcagttgctgaatatttactacgaaacgccggataactggctgcgtaggcacgatatgggcttacgtattcgtggcgaaaacggtcgctatgagatgaccatgaaagttgcaggaagagtgacaggcggcttacaccagcgcccggaatataacgtggcgttgagcgaaccgacgctcgacctggcgcagttaccgacggaaatctggccgaacggcgaattgcctgccgatctcgcttcccgcgtgcagtcgctgtttagcaccgatttttatcgcgaaaaatggctggtagagatcgatggcagccgaattgaaatcgctctcgaccagggggaagtgaaagcgggtgaatttgctgagcctatctgcgagctggaactggagctgcttagcggcgacacgcgcgcggtgctgaaactggcgaaccaactggtatcgcaaaccggattacgccagggcagcctgagcaaagcggcgcgtggctatcatctggcgcagggcaatccggcgcgtgaaatcaaaccgaccaccattttgcatgttgcggcaaaagccgatgtggaacaggggctggaagcggcgctcgagctggtgttagcgcaatggcagtatcatgaagaactgtgggtacgcggcaacgatgcggcgaaagagcaggtgctggcagccattagcctagtccgtcatacactgatgctgttcggtggcattgtgccgcgtaaagcgagtactcacttacgtgatttgctgactcaatgcgaagcgaccatcgcttctgcggtttctgccgtgacggcggtctactctaccgaaacggcaatggcgaagctggcgttgaccgaatggctggtaagcaaagcatggcagccgtttttagatgccaaagcgcagggcaaaattagcgactccttcaaacgctttgccgatatccatctttcccgccatgccgctgaactgaaaagcgttttctgccagccgttaggcgatcgctaccgtgaccagttgccacgcctgatgcgtgatattgactcaatactgttgctggcgggttactatgatcctgtcgtcgcgcaagcctggctggagaactggcaggggctgcgtcacgctattgcgaccgggcaacgcattgaaattgaacatttccgtaatgaggcaaacaatcaggaaccgttctggttgcacagcggaaaacgttaa

SEQ ID NO: 472751 - DNA, 621 bp, Shigella flexneri
atgccaaaattacgcctgatcggattaactttactcgcacttagcgcgactgccgtctcacacgctgaagaaacgcgctatgtttctgacgaactgaatacctgggtccgtagcggtccgggagatcattatcgcctcgtgggcacggttaacgccggcgaggaagtgaccttattacaaactgacgccaacaccaattatgcccaggtgaaagacagctctggccgtaccgcctggatcccgttgaaacaacttagcactgagccaagcctgcgctcccgtgtgccagatctggaaaatcaggtcaaaaccctgaccgataaactcaccaatatcgataacacctggaatcagcgcaccgcagaaatgcagcaaaaagtggcgcagagcgacagcgtgatcaacgggttaaaagaagaaaatcagaaactgaaaaacgagctgattgtcgcgcagaaaaaggtcgatgccgccagcgtacagctggatgacaaacagcgcaccatcatcatgcaatggtttatgtatggcggtggcgtgctggggcttggcttgctgctcggtctggtactgccgcacctgatcccaagccgcaaacgcaaagatcgctggatgaactaa

SEQ ID NO: 472752 - DNA, 1239 bp, Shigella flexneri
gtgaagatttatctggtcggtggtgctgttcgggatgcattgttaggactatcggtcaaagacagagattgggtggtggtcggcagtacgccacaggagatgctcgacgcgggctaccagcaggtaggccgcgattttcctgtgtttctgcatccgcaaacgcatgaagagtatgcgctggcacgtaccgaacggaaatccggttccggttacaccggttttacttgctatgccgcaccggatgtcacgctggaagatgatcttaagcgtcgcgatctgaccattaatgcgctggcccaggacgataacggcgagattatcgacccgtacaacggtctgggcgatctgcaaaatcgtctgttgcgccatgtttcccccgcttttggcgaagatccgttacgcgtactgcgcgtggcgcgttttgctgcgcgttatgcccacctcggttttcgtattgccgatgaaactctgacgctgatgcgcgagatgacccatgcgggtgaactggaacacctgacgcctgaacgggtatggaaagagacggaaagcgccctcaccacccgcaatccccaggtgttcttccaggtactgcgcgattgcggcgcacttcgcgttttattcccggaaattgacgcactgtttggcgttccggcacctgccaggtggcatccggaaatcgacacgggtattcataccttaatgacgctctcaatggcggcgatgctgagtccgcaggttgatgtccgtttcgcaactttatgccacgatctcggtaaaggactgacgccgccagaactttggccgcgtcatcatgggcatggcccggcgggtgttaagttagtggaacaactatgccagcgtctgcgcgtgccaaatgaaattcgcgatttagccagactggtggctgagtttcacgatctcatccgcaccttcccaatgctgaacccaaaaaccatcgtcaaattatttgattccatcgatgcctggcgtaaaccgcagcgtgtcgagcaactggcgctgaccagcgaggctgacgtgcgcggcagaaccggttttgaatcagcggactacccgcaaggccgttggttgcgcgaaggctgggaagtggcgcagtcagtgccgacaaaagcggtcgttgaagcgggatttaaaggcgtggagattcgcgaggagctgacccgacggcggattgcggcggtagccagctggaaggaacaacgttgcccaaagcctgactga

SEQ ID NO: 472753 - DNA, 822 bp, Shigella flexneri
atgagcgatatgcactcgctgctgatagcggcaatattgggtgtggtcgaaggattgacagaatttctgccggtatccagcacgggccatatgattattgtcggtcacttgttggggtttgagggcgacacggcgaaaacctttgaagttgtgatccagttaggatcaattctggcggtagtagtgatgttctggcggcgtctgtttggcctgattggcatccactttggccgcccgttgcagcacgaaggtgaaagcaaaggtcgtttaacgctgatccacattttgctggggatgattccggcggtggtactggggctattattccacgacacgattaagtcattgtttaacccgataaatgtgatgtatgcgctggtcattggcggtttgttgctgattgccgccgaatgcctgaagccgaaagagccgcgtgcgccgggtcttgatgatatgacctatcgtcaggcgtttatgattggctgtttccagtgtctggcgctgtggccgggtttctcccgttccggggcgaccatttcaggtgggatgctgatgggcgtgagccgttacgctgcttccgagttctcgttcctgctggcggtaccgatgatgatgggcgcaacggcgctcgatctctacaaaagctggggcttcctgacaaccggcgatatcccgatgtttgccgttgggtttatcaccgcttttgtggtggcgctgatagcgattaaaaccttcctgcaattgattaagcgcatttcgtttatcccgttcgccatttatcgctttattgtggcggctgcggtgtatgtcgtgttcttttga

SEQ ID NO: 472754 - DNA, 369 bp, Shigella flexneri
atggatattgtatttatagagcaactttcggtaatcaccactattggtgtttacgactgggaacagaccatcgaacagaagttagtgttcgatatcgaaatggcatgggataaccgtaaagcggcgaaaagtgatgatgtggcggattgcctcagttacgctgacattgcagaaacggtggtcagccacgtcgagggggcgtgttttgcgctggtggaacgcgtggctgaagaggtggcggagctgctgttagcacgcttcaactcgccgtgggtgcgtatcaaactcagcaagccaggcgcagtggcgcgggcggcgaatgttggcgtaatcattgagcgtggcaataatctgaaagaaaataattaa

SEQ ID NO: 472755 - DNA, 618 bp, Shigella flexneri
atgagtgcaatcgcgcctggaatgatcctcatcgcgtacctctgcggctccatttccagtgccattctggtttgccgcttgtgtgggctgcccgatccgcgaaccagcggctccggcaatccaggcgcaaccaatgtgttacgtatcggtggcaagggagcagccgtagcagtactgattttcgacgttctgaaaggaatgttgcctgtctggggcgcgtatgaattaggtgtcagccccttctggctaggcttaattgccatcgccgcctgtcttggacacatctggcccgttttcttcggttttaaaggaggaaaaggcgttgctaccgcttttggagcaatcgcaccaattagctgggatctcaccggagtaatggcgggaacctggttactgaccgtgctattgagcggatactcgtcgctgggagcgattgtcagtgcactgattgctccgttttatgtctggtggtttaagccacaattcaccttcccggtttcgatgctctcttgcctgatcctgctgcgtcatcatgacaacatccagcgtctgtggcgtcgtcaggagacaaaaatctggacgaaattcaaaagaaagcgcgaaaaggatcccgagtga

SEQ ID NO: 472756 - DNA, 1002 bp, Shigella flexneri
atgctgaatagctggcctttagccaaagacttgcaggtactggtagaaatcgtccacagcgggagttttagtgctgcagcggcgacgcttgggcaaacgcctgcatttgtcaccaagcggatccaaatccttgaaaatacgctggcaacaacgctgctgaaccgctccgctcgcggcgtggcgctgactgaaagtggccaacgttgttacgaacatgcgctggaaatcctcacccaatatcagcgactggtcgatgacgtcacgcaaatcaaaacgcgcccggaggggatgattcgtattggttgcagttttggttttgggcgcagccatattgcgccagccattaccgaacttatgcgcaattatcctgagttacaggtgcattttgaattgttcgatcggcaaattgatttagtgcaggataatattgatctggatattcgtattaatgacgaaattcctgattattatattgcgcatctgttaacgaaaaataaaagaatattatgcgcagcacctgagtatctgcaaaaatatccgcagccacaatcattacaggaattaagtcgtcatgactgtctggtgaccaaagagcgcgatatgacccacggaatatgggagttggggaacggtcaggagaaaaaatcggtgaaggttagcgggcatctttcctccaatagcggcgagatagtgttgcaatgggcgctggagggcaaagggattatgctgcgttccgagtgggatgtgttgccgtttctggagagtggcaaactggtgcaagtattgccggagtatgcacaaagcgccaatatctgggctgtttaccgggagctgctctatcgcagcatgaaattcgtgtctgcgcggaatttctggcggcatggtgccagcaacggctgggcaagcccgatgaaggctatcaggtcatgtagatccaccagaaatcactcgggatccttttcgcgctttcttttgaatttcgtccagatttttgtctcctga

SEQ ID NO: 472757 - DNA, 813 bp, Shigella flexneri
atgatgagcgaaagtaataagcaacaggcagtgaataagttgacagagattgtcgctaactttaccgccatgatttctacccgaatgcctgatgacgtggtggataaactaaaacagctaaaggatgccgaaacgtcgtcgatggggaaaattatctaccatacgatgttcgacaacatgcaaaaagcgattgacctgaatcgtcctgcctgtcaggacaccggggagattatgttcttcgttaaagtcggttcccgcttcccactgcttggcgagctgcaaagcatactcaaacaagccgtggaagaggcaaccgtcaaagcgccactacgtcacaatgcggtagaaatttttgacgaagtaaacaccggcaaaaataccggtagcggcgtaccgtgggtcacctgggacatcatccccgacaatgacgatgcggaaatcgaagtttacatggcaggcggcggctgcacgctacctggccgctcgaaagtgttaatgccgtcagaaggctacgaaggcgtggtgaaattcgtcttcgaaaatatctccaccctcgccgtaaacgcctgtccaccggtactggtgggcgtgggcatcgccacctcggtggaaaccgccgccgtactctcgcgtaaagccattttgcgcccgattggcagccgccatcccaatccaaaagcggcagaactggagctacgcctggaagaaggactcaaccgtctggggattggtccacaagggctgaccggcaacagttcagtgatgggcgcatcgtcgcggcacgctgctggttcatgccgatctcacctttga

SEQ ID NO: 472758 - DNA, 606 bp, Shigella flexneri
atgaaaaagatcctgacaaccccgatcaaagctgaagatctgcaagatattcgcgtcggcgatgtgatctacctgaccggtacgctggtgacctgccgcgacgtttgtcaccgccgtttgatcgaactgaaacgtccgatcccttacgatctcaacggcaaagcgattttccacgctggccccatcgtgcgcaaaaacggtgacaaatgggagatggtctccgtcggcccgacaaccagtatgcgtatggaaagttttgaacgtgaatttattgagcagaccggcgtaaaactggtggttggcaaaggtggtatggggccgctgaccgaagaaggctgccagaaattcaaggcgttacatgtgattttcccagcaggctgcgcggtgctggcggcaacccaggtagaagagattgaagaagtgcactggacagaactcgggatgccggagtcactgtgggtctgccgggtcaaagagttcggcccgctgattgtctctattgatacccacggcaacaacctgatagccgaaaacaaaaagctgttcgccgaacgccgcgatcccatcgtggaagagatctgcgagcacgtccattacatcaaataa

SEQ ID NO: 472759 - DNA, 1464 bp, Shigella flexneri
atgaaaccttccactgaatggtggcgatatcttgcgccgctggcggtcatcgccattattgctctacttccggttcccgcagggctggagaaccatacctggctctactttgccgtttttactggcgtgatcgttggactgatcctcgaacccgtgccgggtgccgtggtggcgatggtgggtatctccatcatcgccatactctctccctggctgctgttcagccccgaacagctcgcccagccaggctttaagttcaccgccaaatccctctcctgggcagtttctggtttttctaattcggttatctggctcattttcgccgcctttatgtttggcacaggctatgaaaaaaccgggcttggacgccgcattgcgctgattctggtgaaaaagatggggcatcgcacgctgtttctcggctatgcggtgatgttctccgagctgatcctggcacctgtaacaccgtccaactcggcgcgtggtgcgggtattatctatcccatcatccgtaacctgccaccgctctatcaatcacaaccaaacgacagcagttcgcgcagcattggctcgtacatcatgtggatggggattgttgccgactgcgtgaccagcgccattttcctgacggcgatggcacctaacttgctgttaattggactgatgaaaagcgcatctcacgccacgctgagttggggcgactggttcctcgggatgttgccgctcagcattttactggttctgctggttccctggctggcttacgtgctgtacccgccggtactgaagtctggtgatcaggtgccgcgctgggcagagacggaactgcaggcaatgggcccgctctgttcgcgtgaaaaacggatgctggggctgatggtaggcgcgctggtgctgtggattttcggcggtgattatatcgatgccgcgatggtcggttacagcgtggtggcgctgatgctgcttctgcgcattatcagttgggacgacattgtcagtaataaagcggcatggaacgttttcttctggctggcctcgcttatcaccctcgcgaccggactcaacaataccggttttattagctggtttggcaaactgttagcaggcagcttaagtggttattcgccgacgatggtgatggtgacgttgattgtggtgttttatctactgcgctactttttcgccagcgccacggcgtatacctgcgccctcgcaccgatgatgatcgccgccgcgctggcgatgccggaaatcccgctgccggtgttctgcctgatggttggcgcggcaattggtctggggagcattcttacaccatacgccaccggacccagtccgatttactacggtagtggttatctgccaacggcggattactggcaactgggggcgatttttgggctgatattcctcgtgttgctggtgattaccggcttactgtggatgcccgtggtgttgctttaa

SEQ ID NO: 472760 - DNA, 1014 bp, Shigella flexneri
atgcgtgtactgggtattgaaacttcctgcgatgaaaccggcatcgccatttacgacgatgaaaaaggtttgttagccaaccaattgtatagtcaggtgaaattgcacgctgactacggcggcgtcgtgcctgaactggcctcccgcgatcatgtgcgtaaaaccgtaccgttgatccaggcggcgctaaaggagtctggtttaacggcaaaagacattgatgctgtggcctataccgcaggccctggattagtcggcgcactgctggttggcgcaaccgtggggcgttctctggcgtttgcctggaacgttccggcaatcccggtacaccatatggaagggcatctgttagcgccgatgctggaagataacccgccggaatttccgtttgtcgcgctgctggtgtccggcggtcatacgcagttaatcagcgtgactggcattggtcagtacgagctgctcggcgagtctatcgatgatgccgccggtgaagcgtttgataaaaccgcgaagctgctggggctggattatcctggcggaccgttactgtcgaaaatggcggctcagggtactgccgggcgctttgttttcccgcgtccgatgaccgaccgtccggggctggatttcagcttttctggtctgaaaacctttgcggcgaacacgattcgtgacaacggcaccgacgaccagacgcgtgctgatatcgcccgcgcctttgaagatgcggtggtcgatacgttgatgattaagtgtaagcgagcgttggatcagacgggctttaagcgactggtcatggcgggcggcgtgagtgctaaccgcacgttacgggcgaagctggctgaaatgatgaaaaaacgccgcggcgaagtgttctacgcgcgtccggaattttgtactgataacggcgcgatgatcgcctatgccggaatggtgcggtttaaagcaggcgcgacggcggatctcggcgttagcgtgcgtccgcgctggccgctggcggagttaccggctgcgtaa

SEQ ID NO: 472761 - DNA, 216 bp, Shigella flexneri; identical to SEQ ID NO: 1207

SEQ ID NO: 472762 - DNA, 1746 bp, Shigella flexneri
atggctggacgaatcccacgcgtattcattaatgatctgctggcacgcactgacatcgtcgatctgatcgatgcccgtgtgaagctgaaaaagcagggcaagaatttccacgcgtgttgtccattccacaacgagaaaaccccgtcattcaccgttaacggtgagaaacagttttaccactgctttggatgtggcgcgcacggcaacgcgatcgacttcctgatgaactacgacaagctcgagttcgtcgaaacggtcgaagagctggcagcaatgcacaatcttgaagtgccatttgaagcaggcagcggccccagccagatcgagcgccatcagaggcaaacgctttatcagttgatggacggtctgaatacgttttaccaacaatctttacaacaacctgttgccacgtctgcgcgccagtatctggaaaaacgcggattaagccacgaggttatcgctcgctttgcgattggttttgcgccccccggctgggacaacgtcctgaagcggtttggcggcaatccagaaaatcgccagtcattgattgatgcggggatgttggtcactaacgatcagggacgcagttacgatcgtttccgcgaacgggtgatgttccccattcgcgataaacgcggtcgggtgattggttttggcgggcgcgtgctgggcaacgatacccccaaatacctgaactcgccggaaacagacattttccataaaggccgccagctttacggtctttatgaagcgcagcaggataacgctgaacccaatcgtctgcttgtggtcgaaggctatatggacgtggtggcgctggcgcaatacggcattaattacgccgttgcgtcgttaggtacgtcaaccaccgccgatcacatacaactgttgttccgcgcgaccaacaatgtcatttgctgttatgacggcgaccgtgcaggccgcgatgccgcatggcgagcgctggaaacggcgctgccttacatgacagacggccgtcagctacgctttatgtttttgccggatggcgaagaccctgacacgctggtacgaaaagaaggtaaagaagcgtttgaagcgcggatggagcaggcgatgccactctccgcatttctgtttaacagtctgatgccgcaagttgatctgagtacccctgacgggcgcgcacgtttgagtacgctggcactgccattgatatcgcaagtgccgggcgaaacgctgcgaatatatcttcgtcaggaattaggcaacaaattaggcatacttgatgacagccagcttgaacgattaatgccaaaagcggcagagagcggcgtttctcgccctgttccgcagctaaaacgcacgaccatgcgtatacttatagggttgctggtgcaaaatccagaattagcgacgttggtcccgccgcttgagaatctggatgaaaataagctccctggacttggcttattcagagaactggtcaacacttgtctctcccagccaggtctgaccaccgggcaacttttagagcactatcgtggtacaaataatgctgccacccttgaaaaactgtcgatgtgggacgatatagcagataagaatattgctgagcaaaccttcaccgactcactcaaccatatgtttgattcgctgcttgaactgcgccaggaagagttaatcgctcgtgagcgcacgcatggtttaagcaacgaagaacgcctggagctctggacattaaaccaggagctggcgaaaaagtga

SEQ ID NO: 472763 - DNA, 1842 bp, Shigella flexneri
atggagcaaaacccgcagtcacagctgaaacttcttgtcacccgtggtaaggagcaaggctatctgacctatgccgaggtcaatgaccatctgccggaagatatcgtcgattcagatcagatcgaagacatcatccaaatgatcaacgacatgggcattcaggtgatggaagaagcaccggatgccgatgatctgatgctggctgaaaacaccgcggacgaagatgctgccgaagccgccgcgcaggtgctttccagcgtggaatctgaaatcgggcgcacgactgacccggtacgcatgtacatgcgtgaaatgggcaccgttgaactgttgacccgcgaaggcgaaattgacatcgctaagcgtattgaagacgggatcaaccaggttcaatgctccgttgctgaatatccggaagcgatcacctatctgctggaacagtacgatcgtgttgaagcagaagaagcgcgtctgtccgatctgatcaccggctttgttgacccgaacgcagaagaagatctggcacctaccgccactcacgtcggttctgagctttcccaggaagatctggacgatgacgaagatgaagacgaagaagatggcgatgacgacagcgccgatgatgacaacagcatcgacccggaactggctcgcgaaaaatttgcggaactacgcgctcagtacgttgtaacgcgtgacaccatcaaagcgaaaggtcgcagtcacgctgccgctcaggaagagatcctgaaactgtctgaagtattcaaacagttccgcctggtgccgaagcagtttgactacctggtcaacagcatgcgcgtcatgatggaccgcgttcgtacgcaagaacgtctgatcatgaagctctgcgttgagcagtgcaaaatgccgaagaaaaacttcattaccctgtttaccggcaacgaaaccagcgatacctggttcaacgcggcaattgcgatgaacaagccgtggtcggaaaaactgcacgatgtctctgaagaagtgcatcgcgccctgcaaaaactgcagcagattgaagaagaaaccggcctgaccatcgagcaggttaaagatatcaaccgtcgtatgtccatcggtgaagcgaaagcccgccgtgcgaagaaagagatggttgaagcgaacttacgtctggttatttctatcgccaagaaatacaccaaccgtggcttgcagttccttgacctgattcaggaaggtaacatcggcctgatgaaagcggttgataaattcgaataccgccgtggttacaagttctccacctacgcaacctggtggatccgtcaggcgatcacccgttctatcgcggatcaggcgcgcaccatccgtattccggtgcatatgattgagactatcaacaaactcaaccgtatttctcgccagatgctgcaagagatgggccgtgaaccgacgccggaagaactggctgaacgtatgctgatgccggaagacaagatccgcaaagtgctgaagatcgccaaagagccaatctccatggaaacgccgatcggtgatgatgaagattcgcatctgggggatttcatcgaggataccaccctcgagctgccgctggattctgcgaccaccgaaagcctgcgtgcggcaacgcacgacgtgctggctggcctgaccgcgcgtgaagcaaaagttctgcgtatgcgtttcggtatcgatatgaacaccgaccacacgctggaagaagtgggtaaacagttcgacgttacccgcgaacgtatccgtcagatcgaagcgaaggcgctgcgcaaactgcgtcacccgagccgttctgaagtgttgcgtagcttcctggacgattaa

SEQ ID NO: 472764 - DNA, 381 bp, Shigella flexneri
atgcacattggacaggctcttgatctggtatcccgttacgattctctgcgtaacccactgacttctctgggggattacctcgaccccgaactcatctctcgttgccttgccgaatcaggtactgtaacgctacgcaagcgccgtcttcccctcgaaatgatggtctggtgtattgttggcatggcgcttgagcgtaaagaacctcttcaccagattgtgaatcgcctggacatcatgctgccgggcaatcgccccttcgttgccccagtgccgttattcaggcccgccagcgcctgggaagtgaggctgtccgccgcgtgttcacgaaaacagcgcagctctggcataacgccacgccgcatccgcactggtgcggcctga

SEQ ID NO: 472765 - DNA, 408 bp, Shigella flexneri
atgaaaaaatgctttatttatcacgatgaaaaatcgaataaattttggtggatagattacgaaggggatagtttagctgtcaactatggcaaggtaggtagtattggtaaattccatacaaaagaattcgataatgaagaacagtgtctgaaagaagccagtaaattgattgccgcaaaaatgaaaaaaggatatcaagaaactccagactttaacttcatggatctctactattttgatgatgaagagattgggttacatcttaaaacgtcacacccaaacttccagtgccattttactgatccactttatatgtgttgctgggatgaagaatctccttttggtagcgatgaaggtgctgatgctctaaacgaacttgaaaatagcctccgttctggactgtgctga

SEQ ID NO: 472766 - DNA, 306 bp, Shigella flexneri
atgttaattgaaactatgtggggtatgaaatacatcgctatggacagtattcttgaagaggatgtgcgtgcgcaattactagccgatgaaatgagctctatccagagcaatatgattacctacgcgactgcattcggtcagatcaaagtcatgggtaaaatctcccataaacttaaaaagatgggactcaatgcactagcgcgtcatcagcttaccgcaaaaattcttcaatggggtgacggtcaggactcaccaatacttcaaaaaatgattgatgaccttactgcttttccacacgaaaattaa

SEQ ID NO: 472767 - DNA, 912 bp, Shigella flexneri
gtgagtacattagaacaaacaataggcaatacgcctctggtgaagttgcagcgaatggggccggataacggcagtgaagtgtggttaaaactggaaggcaataacccggcaggttcggtgaaagatcgtgcggcactttcgatgatcgtcgaggcggaaaagcgcggggaaattaaaccgggtgatgtcttaatcgaagccaccagtggtaacaccggcattgcgctggcaatgattgccgcgctgaaaggctatcgcatgaaattgctgatgcccgacaacatgagccaggaacgccgtgcggcgatgcgtgcttatggtgcggaactgattcttgtcaccaaagagcagggcatggaaggtgcgcgcgatctggcgctggagatggcgaatcgtggcgaaggaaagctgctcgatcagttcaataatcccgataacccttatgcgcattacaccaccaccgggccggaaatctggcagcaaaccggcgggcgcatcactcattttgtctccagcatggggacgaccggcactatcaccggcgtttcatgctttatgcgcgaacaatccaaaccggtgaccattgttggcctgcaaccggaagaaggcagcagtattccgggcattcgccgctggcctgcggaatatctgccggggattttcaacgctgcgctggtggatgaggtgctggatattcatcagcgcgatgcggaaaacaccatgcgcgaactggcggtgcgggaaggaatattctgtggcgtcagctcaggcggcgcggttgctggagcactgcgggtggcaaaagctaaccctggtgcggtggtggtagcgatcatctgcgatcgtggcgatcgctacctctccaccggagtgtttggggaagagcattttagtctgggggcagggatttaa

SEQ ID NO: 472768 - DNA, 1098 bp, Shigella flexneri
atgagcattgagattgccaatatcaagaagtcttttggtcgcacccaggtgctgaacgatatctcactggatattccttctggtcagatggtcgcgttgctggggccgtccggttccgggaaaaccacgctgctgcggattatcgccgggctggagcatcaaaccagcgggcatattcgcttccacggcaccgacgtgagtcgcctgcacgcgcgcgatcgtaaagtcggtttcgtgttccagcattacgcgctgttccgccatatgacggtattcgacaatatcacttttggcctgacggtgctgccgcgtcgcgagcgcccgaatgccgcagccatcaaagcgaaagtgacaaaattgctggaaatggtccagcttgcgcatctggcggatcgttatccggcgcagctttccggcggccagaaacagcgtgtggcgctggcgcgcgcgctggctgtagaaccgcaaattctgctgcttgatgaaccgttcggcgcgctggatgcgcaggtgcgtaaagagctgcgtcgctggctgcgtcaactgcatgaagagctgaaattcaccagcgtgtttgtgacccacgaccaggaagaggcgaccgaagtagccgatcgtgtagtggtgatgagtcaggggaatattgaacaggctgatgcgccgaatcaggtatggcgcgaaccagcgacccgttttgtactcgaatttatgggcgaagtgaaccgcctgcagggaaccattcgcggcgggcagttccatgttggcgcgcatcgctggccgctgggctacacacctgcgtatcaggggccggtggatctcttcctgcgcccgtgggaagtggatatcagccgccgtaccagtctcgattcgccgctgccggtacaggtactggaagccagcccgaaaggtcactacacccaattagtggtgcagccgctggggtggtacaacgaaccgctgacggtcgtgatgcatggcgacgatgccccgcagcatggcgagcgtttattcgttggtctgcaacatgcgcggctgtataacggcgacgagcgtattgaaacccgcgatgaggaacttgctctcgcacaaagcgcctga

SEQ ID NO: 472769 - DNA, 876 bp, Shigella flexneri
atggcggaagttacccaattgaagcgttatgacgcgcgcccgattaactggggcaaatggtttctgattggcatcgggatgctggtttcggcgttcatcctgctggtgccgatgatttacatcttcgtgcaggcattcagcaaggggctgatgccggttttacagaatctggccgatccggacatgctgcacgccatctggctgacggtgatgatcgcgctgattgccgtaccggtaaacctggtgttcggcattctgctggcctggctggtgacgcgctttaacttcccgggacgccagttactgctgacgctactggacattccgtttgctgtatcgccggtggttgccggtctggtgtatctgctgttctacggctccaacggcccgctcggcggctggctggatgaacataatctgcaaattatgttctcctggcccggaatggtgctggtcaccatctttgtgacgtgtccgtttgtggtgcgcgagctggtgccggtgatgttaagccagggcagccaggaagacgaagcggcgattttgcttggcgcgtccggctggcagatgttccgtcgcgtcacattgccgaatattcgctgggcgctgctttacggcgtggtgctgaccaacgcccgcgcgattggcgagtttggtgcagtgtcggtggtttccggctcgattcgcggcgaaacactttcgctgccgttacagattgaattgttggagcaggactacaacaccgtcggctcctttaccgccgccgcgctgttgacgttgatggcgattatcaccctgtttttaaagagtatgttgcagtggcgcctggagaatcaggaaaaacgcgcgcagcaggaggagcatcatgagcattga

SEQ ID NO: 472770 - DNA, 834 bp, Shigella flexneri
atgtttgcagtttcttcaagacgcgtgctgccgggctttactttaagccttggcaccagtctgctgtttgtgtgcctgatattgctgctgccgctctctgcgctggtgatgcagctttctgagatgagctgggcgcagtactgggaggtgatcaccaacccgcaggtggtcgcggcctacaaagtgacgctgctgtcggcgtttgtggcatcgatttttaacggcgttttcggtctgctgatggcgtggattttaacacgttatcgctttccgggccgcacgctgcttgatgcgctgatggatttaccctttgcgctgccaacggcagtcgccggtttaacgctggcctcgctcttttccgtaaacggtttttacggtgaatggctggcgaagtttgatatcaaagtcacctatacctggcttggtattgcggtggcgatggcctttaccagcattccgtttgtggtgcgtaccgtgcagccggtgctggaagagttaggcccggaatatgaagaagcggcggaaacgcttggtgcaacgcgctggcagagtttctgcaaagtggtgctgccggagctttctccggcgctggtggcgggcgtgacgctgtcgtttacccgtagtcttggtgaatttggcgcggtgatttttatcgccggaaatatcgcgtggaagacggaagtgacgtcgctgatgatttttgtgcgcttacaggagtttgattacccggcagcgagcgcgattgcttcggtgatcctcgcggcatctctgctgctgctgttctcaattaacactctgcaaagtcgctttggtcggcgtgtggtaggtcattaa

SEQ ID NO: 472771 - DNA, 1017 bp, Shigella flexneri
atggccgttaacttactgaaaaagaactcactcgcgctggtcgcttctctgctgctggcgggccatgtacaggcaacggaactgctgaacagttcttatgacgtctcccgcgagctgtttgccgccctgaatccgccgtttgaacagcaatgggcaaaagataacggcggcgacaaactgacgataaaacaatctcatgccgggtcatcaaaacaggcgctggcgattttgcagggcttaaaagcagacgttgtcacttataaccaggtgaccgacgtacaaatcctgcacgacaaaggcaagctgatcccggctgactggcagtcgcgcctgccgaataatagctcgccgttctactccaccatgggcttcctggtgcgtaagggcaacccgaagaatatccacgactggaacgacctggtgcgctccgacgtgaagctgattttcccgaacccgaaaacgtcgggtaacgcgcgttatacctatctggcggcatggggcgcagcggataaagctgacggtggcgataaagccaaaaccgaacagtttatgacccagttcctgaaaaacgttgaagtgttcgataccggcggtcgtggcgcaaccaccacttttgccgagcgtggcttgggcgatgtgctgattagctttgaatcggaagtgaacaacatccgtaaacagtatgaagcacagggctttgaagtggtgatcccgaaaaccaatattctggcggaattcccggtggcgtgggtcgataaaaatgtgcaggccaacggtacggaaaaagccgcaaaagcctacctgaactggctctacagcccacaggcgcagaccatcatcaccgactattactaccgtgtgaataacccggaagtcatggacaaactgaaagataaattcccgcagaccgaactgttccgcgtggaagacaaatttggctcatggccggaagtgatgaaaacccacttcaccagcggcggcgagttagacaagctgttagcggcggggcgtaagtaa

SEQ ID NO: 472772 - DNA, 792 bp, Shigella flexneri
atgggtaaactcacgggcaagacagcactgattacgggcgcattgcagggaattggcgaaggaattgccagaacttttgcacgtcatggcgcgaacctaatcttgctggatatctcccctgagatcgaaaagctagcggacgaactgtgtggtcgtggtcatcgctgtacggcggttgtcgccgatgtgcgtgacccggcgtcggtagccgcagctatcaaacgcgcgaaggaaaaagaagggcgcattgatatcctggtgaataacgcaggcgtttgtcgtctgggcagtttcctcgatatgagcgatgaagatcgcgatttccatattgatatcaatattaaaggcgtatggaacgtcacgaaggcggtgctgccggagatgattgcgcgcaaagatggtcgcattgtgatgatgtcttcagtcactggtgatatggtggccgatcctggcgaaacggcgtatgccttaacgaaagcggcgattgttggcctgactaaatcgctggcggtggagtacgcgcaatccggtattcgcgttaacgccatctgcccgggatacgtccgcacgccaatggcggaaagcattgcccgccagtcgaacccggaagatccagaatcggtgctgactgaaatggcaaaagcaatcccgctgtgtcgcctcgccgatccgctggaagtcggcgaactggcggccttcctcgcatcggatgaatccagctatttaaccggtacacagaatgtgattgatggcggcagcacactgccggagacggttagcgtcggtatctga

SEQ ID NO: 472773 - DNA, 801 bp, Shigella flexneri
atgttgtacctgacgaaaatacgcaatgcggaaagtgaatttaccgggaacgagcaaaaaattgctgactttctgcgggccagagtgagcgagctgaaatccgtctcttcacggcagatggcgaaacagctcggtatcagccagtcgagcattgtgaaatttgcccagaagctcggcgcgcaaggatttactgaattgcgtatggcgttaattggcgaatacagtgccagccgggagaaaacgaatgccacggcgctgcacctgcacagttcgattaccagtgatgattcgctggaagtgattgcccgcaaactgaatcgcgaaaaagagctggcgctggagcaaacctgtgcgttgttcgactacgcgcggctgcaaaaaatcattgaggtcatcagtaaagcaccgtttatccagataacgggcctgggcggatcggcgctggtggggcgcgatctgtcgttcaaactgatgaaaattggctatcgcgtggcctgcgaagccgacacgcacgtacaagccaccgtttcccaggcgttgaaaaaaggcgatgtacaaatcgctatctcttacagcggcagtaaaaaagagattgtcttgtgcgcagaagcggcacgaaagcagggggcaacggtgattgccattacttctctggctgactctccgctgcggcggctggcgcatttcacgctcgataccgtttccggtgaaaccgaatggcgtagctcgtcgatgtctacccgcacggcgcaaaattctgttaccgatttactgtttgttggtcttgtgcaacatcaatga

SEQ ID NO: 472774 - DNA, 897 bp, Shigella flexneri
atgcaactagaaaagatgattactgaaggctcgaacaccgcctcggctgaaattgaccgcgtatcgacgctggaaatgtgccggattatcaacgatgaagataaaaccgtaccgcctgccgttgatcgcgtcctgccggatatcgccgcggcgatcgatgttatccacgcccaggtcagcggcggcggtcgtctgatttatctcggtgcgggaacatccggtcgtctggggattctggatgccagcgaatgtccgcccacctacggcgtgaaaccgggtctggtggttggtttgattgctggaggcgaatatgccattcagcacgcggtggaaggagctgaagatagccgggaaggtggtgttaacgatctgaaaaatattaatttaacggcacaggatgtggtggttggcattgctgccagcggtcgcacgccgtatgtgattgccggactggaatacgcacgccagctcggctgccgcacagtgggaatttcctgtaatccggggagcgccgtttcaaccaccgctgagtttgccattacaccgattgtaggtgccgaagttgttaccggttcttcgcggatgaaagcaggtacagcgcagaaactggtgctcaatatgctttccaccgggctgatgattaaatccggcaaagtgttcggcaacctgatggtcgatgtggtcgccaccaacgaaaaactgcatgtgcgccaggtcaatatcgttaaaaacgccaccggatgtaatgccgaacaagcggaagcggcgttaattgcctgcgagcgcaactgtaaaacggccattgtgatggtgctgaaaaatctcgatgccgcagaagctaaaaaacgcctggatcaacacggcggctttattcgtcaggttttagacaaggaataa

SEQ ID NO: 472775 - DNA, 729 bp, Shigella flexneri
atggccaaagagatcagcagtgaacttctgaacaccattcttacccgtgtcggcggaccaggaaatatcgccagttgtggtaactgtatgacgcgcctgtgtctgggtgtacatgacagttcactggttgatcccaatatcaaaacgctggaaggcgtgaagggcgtcattttgaccagcgaccaggtgcaggtcgtttttgggcctggtaaagcgcatcgtgccgcaaaagcgatgagcgagctgctgggcgatgcaccggtacaggatgccgcagaaatcgccgcccagaacaaacgtcagttaaaagccaaacaaacctccggcgtgcaacaatttctcgccaaattcgccaccatcttcacgccgctgatccccggttttattgccgccggtctgctgctggggatagcgacgttaattgccacggtgatgcacgttccggcagatgctcagggcacgctacccgacgcgctgaattttatgaaggtgttcagcaaaggtttgttcaccttcctagtgattctggtgggctataacgccgcccaggcatttggcggcacgggcgtcaatggcgcaattattgccgcactctttttgctcggttataaccccgctgcaaccaccggttactacgccggttttcacgatttctttggtctgcccatcgatccgcgcggcaatattatcggcgtgctgattgccgcgtgggcctgcgcccgcatttaa

SEQ ID NO: 472776 - DNA, 660 bp, Shigella flexneri
atgctgctgacctcgttaatcaccctgctgatcaccgctacgcttgcgtacctgatcattatgccgctgggtggctggttattcgaaggtatgtcatggctgtttatgcacctgaacagtaatccgttcggttgtgcggttttagccgggctgttcctgatcgccgtggtatttggcgtgcatcagggctttattcctgtttacctcgcgttaatggacagccagggattcaacagcttatttcccatcctttcaatggcaggcgcgggccaggtgggcgcggcgctggcactctactggcgggcgcaaccgcacagtgcgctacgcagtcaggtacgcggggcgattattcccggcctgctgggcgttggtgaaccgctgatttacggtgtcaccctgccccgcatgaagccgtttgttaccgcctgtttaggcggcgcggcgggcggtttgtttatcggattgatagcctggtggggtctgccgatgggcttaaacagcgcctttgggccgtctggtctggtggcgctgccgctgatgacttccgcacaaggcatccttccggcaatggcggtttatgctggcgggattctggtggcatgggtttgcgggtttattttcaccacgctctttggctgccgtaacgtcaatctggactga

SEQ ID NO: 472777 - DNA, 900 bp, Shigella flexneri
atgtctcaggttcagagtggcattttgccagaacattgccgcgcggcgatttggatcgaagccaacgtgaaaggggaagttgacgccctgcgtgcggccagtaaaacatttgccgacaaactggcaacttttgaagcgaaattcccggacgcgcatcttggtgcggtggttgcctttggtaacaacacctggcgcgctctgagcggcggcgttggggcagaagagctgaaagattttccgggctacggtaaaggccttgcgccgacgacccagttcgatgtgttgatccacattctttctctgcgtcacgacgtaaacttctctgtcgctcaggcggcgatggaagcctttggtgactgcattgaagtgaaagaagagatccacggcttccgttgggtggaagagcgtgacctgagcggctttgttgacggtacagaaaacccggcgggtgaagagacgcgccgcgaagtggcggttatcaaagacggcgtggattccggcggcagctatgtgtttgtgcagcgttgggagcacaacctgaagcagctcaaccggatgagcgttcacgatcaggagatgatgatcgggcgcaccaaagaggccaacgaagagattgacggcgacgaacgtccggaaacctctcacctcacccgcgttgatctgaaagaagatggcaaagggctgaagattgttcgccagagcctgccgtacggcaccgccagtggcactcacggtctgtacttctgcgcctactgcgcgcgtctgcataacattgagcagcaactgctgagcatgtttggcgataccgatggcaaacgtgatgcgatgttgcgtttcaccaaaccggtaaccggcggctattatttcgcaccgtcgctggacaagttgatggcgctgtaa

SEQ ID NO: 472778 - DNA, 576 bp, Shigella flexneri
atgaaatcgctgcgtttaatgttatgcgctatgccgttgatgctgaccggctgttccacgatgtcgtcagttaactggtctgccgctaacccgtggaactggtttggatcgtccaccaaagtgagcgagcagggcgtgggtgaattaacggcgtccacaccactgcaagaacaagccattgctgatgcgcttgatggcgattatcgcctgcgcagcggaatgaaaaccgcgaacggcaacgtggtgcgcttttttgaagtgatgaaaggcgacaacgtggcgatggtgattaacggcgatcaaggcacgatcagtcgcattgacgtgctggatagcgatattcctgctgacaccggtgttaaaatcggtacaccgtttagcgacctttacagcaaagcatttggcaattgccaaaaagctgatggtgatgataatcgtgccgtcgaatgtaaagccgaaggcagtcaacatattagctaccagttcagcggggaatggcgtggtcctgaagggttaatgccttcggacgataccctgaaaaactggaaagtcagtaaaattatctggcggcgttaa

SEQ ID NO: 472779 - DNA, 450 bp, Shigella flexneri
atgaagagtactgagttccatcctgtccattatgatgcgcacggacgcctgcgtttacccttgctcttctggcttgtgctattgcttcaggcgcgaacctgggtgctgtttgtcattgccggtgcgtcgcgtgagcagggtactgcgctgctaaatctgttttatcccgatcacgataatttctggctggggctgattcccggtattccggcggtgctggcgtttttgttgagcggtcggcgggcttcgtttcctcgcacctggcatgtgctctattttctgttgctgttggcgcaggtggttttactttgctggcaaccgtggctgtggctgaacggtgaatccgttagcggtatcggtctggcgctggtagtggcggatattgtggcgttaatctggctgctgaccaatcgacgtttacgcgcttgttttaatgaagaaaaagaataa

SEQ ID NO: 472780 - DNA, 426 bp, Shigella flexneri
atggagatacgcgtatttcgccaggaagatttcgaagaggtcatcaccctttgggagcgttgcggcttgctgcgtccgtggaacgatccggaaatggacatcgagcgtaagatgaaccatgacgtcagtttgtttttggtcgctgaggtaaacggtgaagtggtcggaacggtgatgggcggttatgacgggcatcgcgggtctgcttattatcttggcgtgcatccagagtttcgtgggcgtggaattgccaatgcgttgcttaaccggctggagaaaaagctgattgctcgcggctgcccgaaaattcagatcaacgtgccggaagataacgacatggtgctcggaatgtatgaacgcctgggatatgaacacgccgacgtgctgagtctgggtaagcgtttgattgaagatgaagagtactga

SEQ ID NO: 472781 - DNA, 870 bp, Shigella flexneri
atgagcacttttaaaccactaaaaacactcacttcgcgccgccaggtgctgaaagccggtttagctgccctgacgttgtcaggaatgtcgcaagccattgccaaagacgaacctttaaaaaccagcaacggacacagcaagccgaaagccaaaaaatctggcggcaaacgtgtcgttgttctcgatccaggccacggcggaattgataccggagcgatcggacgcaacggttcgaaagaaaaacatgtggtgctggcgattgctaaaaacgtccgttccattttgcgtaatcatgggattgatgcgcgtttaacgcgttctggcgatacgtttatcccactttacgatcgcgttgaaatcgcccataaacatggcgcagatctgtttatgtcaattcatgccgatggctttaccaacccgaaagctgccggtgcttcggtatttgccctctctaaccgtggggcaagtagcgcaatggcgaaatacctgtctgaacgcgaaaaccgcgccgatgaagttgccggtaaaaaggcgactgacaaggatcacctattgcagcaagtactgtttgatctggtgcaaaccgatactattaaaaacagcctgacgcttggctcgcatattctgaaaaagattaagccggtgcataaactgcacagccgcaacaccgaacaagccgcgtttgtggtgttgaaatcgccgtcggttccttcggtgctggtggaaacctcgtttatcaccaacccggaagaagagcggctgttaggcacggcggcgtttcgtcagaaaatcgccacagcgattgctgaaggcgtgatcagttatttccactggttcgacaaccagaaagcacattcgaaaaagcgataa

SEQ ID NO: 472782 - DNA, 900 bp, Shigella flexneri
atgaaacccgacgcacaccaggttaaacagtttctgctcaaccttcaggatacgatttgtcagcagctgaccgccgtcgatggcgcagaatttgtcgaagatagttggcagcgcgaagctggcggcggcgggcgcagtcgggtgttgcgtaatggtggtgttttcgaacaggcgggcgtcaacttttctcacgtccacggtgaggcgatgcctgcttccgccaccgctcatcgcccggaacttgccgggcgcagtttcgaggcgatgggcgtttcactggtagtgcatccgcataacccgtatgttcccaccagccacgcgaatgtgcgtttttttattgccgaaaaaccgggtgcagagcccgtttggtggtttggcggcggcttcgatttaacccctttctatggttttgaagaagacgccattcactggcaccgcaccgcccgtgacctgtgccagccatttggtgaagacgtttatccccgttacaaaaagtggtgcgacgattacttctacctcaaacatcgcaacgaacagcgcggcattggcgggctgttctttgatgatctgaacacgccagatttcgaccactgttttgcctttatgcaggcggtaggcaaaggctacaccgacgcttatttaccaattgtagagcgacgtaaagcgatggcctacggcgagcgcgagcgcaattttcagctctaccgtcgcggtcgttatgtcgagttcaatctggtctgggatcgcggcacgctgtttggcctgcaaactggcgggcgcaccgagtcgatcctgatgtcaatgccgccactggtacgctgggagtatgattatcagccaaaagatggcagcccagaagcggcgttaagtgagtttattaaggtcagggattgggtgtaa

SEQ ID NO: 472783 - DNA, 627 bp, Shigella flexneri
gtgctgtctgaagatgtcatcacctgtcaggctaactttttgcacaatccggatcgggtattacatatgctgcgtagccagtcggcgctggaagtgaaagagcagcataaagccgcgctgtggggctttgtccaacaggcgctggcgacgttttgcgagaacccggaaaatctccatcagcctgcagtgcgaaaagtgctgggggataatttgctaatggcgatgggggcgatgctggaagaagcgcaaccaatggtgacggcggaaagcatcagtcatcagagttaccgtcggttgctttcccgcgcccgtgaatatgtgctggaaaacatgtccgaaccggtgacggtgctggatttgtgtaatcaactgcatgtcagtcgccgcacgctacaaaacgcgtttcacgctattttaggcattggcccaaacgcgtggctgaaacgcattcgcctgaacgccgtacgccgcgaactgataagcccgtggtcgcaaagcacaacggtaaaagacgccgccatgcagtggggattctggcatctggggcaatttgccacggattaccagcagctgtttgccgagaagccgtcgttgacgttgcatcagcggatgcgggaatgggggtga

SEQ ID NO: 472784 - DNA, 501 bp, Shigella flexneri
atgatcaatgcactgggattgctggaagtggacggcatggtcgccgcgatagatgcagcggatgccatgctcaaagcagctaacgttcgtctgctcagtcacgaagtgcttgaccctggtcgcttaacgctggtggtggaaggcgatctggcggcgtgtcgtgcggcgctggacgcaggttgtgctgccgcgatgcgtaccgggcgtgtcatcagccgtaaggagatcggtcggccagacgatgacacccagtggctggttactggctttaaccgccagccgaagcaacccgtaaaggaacccgacgcgccagttatcgtcgcggaatctgctgacgagttgttggcgctgttaacatcagtatgtcagggaatgacggcaggagaagtggccgcccactttggctggccgctggaaaaagccagaaatgcgctcgaacagctcttttctgccgggacgttacgtaaacgcagtagtcgttatcgtctcaagccccattaa

SEQ ID NO: 472785 - DNA, 660 bp, Shigella flexneri
atgccagctttagatttgattcgaccgtcggtaaccgccatgcgggtgattgcctccgttaacgctgaatttgcgcgtgaactaaaattgccgccgcatattcgtagcctcgggctgatttctgccgattctgacgacgtaacctacattgcggctgacgaagcgaccaaacaagcgatggtcgaagtggtatatggtcgctcgctgtatgcgggagcggcacacggcccgtcaccgactgccggtgaagtgctgattatgcttggtgggccaaacccggcggaagtgcgtgccggtctggatgcgatggttgcacatattgaaaatggcgcagctttccagtgggccaatgacgcagaaaacaccgccttcctggcgcatgtggtttcgcgtaccggttcttatctttcatcaaccgccgggatcacgcttggcgatccgatggcgtatctggtggcaccgccgctggaagcgacctacggcattgatgccgcgttgaaatctgccgacgtacagctggtgacctacgtcccgccaccgtctgaaaccaactactcggcagcatttttaaccggtagccaggccgcgtgtaaagcagcctgtaacgcctttaccgatgcagtgctggaaatcgcgcgtaatccaatccagcgtgcgtaa

SEQ ID NO: 472786 - DNA, 621 bp, Shigella flexneri
atgcgcatatcagaacaacaacggcagatcctcgactatctggcaaaaaacgaatcaatcaccgcacgacaagccgcagatctcgtttatggtggcaatgttacccgcgtccaggttgacgccgcccgccgctcactcatgacgatggttagtaatgggctaatcaggaaacaaggccgcgctttcgtagctgaaagacatatcaatcacgcttatagccaggacgttgaagaattgcgccgccagatcctttgggtattcagcaaacagggtcaggagtatttcctttctgaacacccaaatttcgccgccaaagagttaacagtaagcggattgtcgtgcgcactggattatcttgtcggtgaaggttgcgttacttacaagcagctatggcacgccctgaatacgcttgtagaagatggtttactcattgccacgcgtgagaacatcgaatactggataatgccgcgttcaggtcgccgcaatcatgcacggtatatttcaggcaacagatacagaacgccggactttaatccgacacaggaagatcgggaccgtgccgaaatgatgtgcagggaacaggagaaaagaattatggataagttattttcgatgcagtga

SEQ ID NO: 472787 - DNA, 396 bp, Shigella flexneri
atgaccaatatcgaaagattagaacgctgtgccgatattatgcggcgcagatggatttatgaccctgaagcgggtttattgtttagccgtgaaacaaaagacgttatcaaaggcagcatgaccaataaagggcatttggttgtaacggtacatgaaggtaaattcaaagtgacactcacctatcagaaagcctgctatgtatacacatacggcgcttatgacgagacattatatgaagtgcaccacgttaatttgaacaaacaggataaccgcatcaagaatattcgcctgatgccgaaagaaaagcaccgccggatacataaaaacgtccgcaaacttattcggctgggccacacacaatggcttcaaccgcaattaattgaacaatcactataa

SEQ ID NO: 472788 - DNA, 264 bp, Shigella flexneri
atgcattcattagacagttattttcagcgcacgacagcccctaaatcagccgcccaggaacgccgtgaggaattccatgagaaagtgatgcgttctgctgattatattgcggacaagttcgtggaaacggttcgtccacttgttgatgaagtagctgataaacttcagtctgaaatgccggaagatatggaaggcactgcaaagcggcgactcatttgcgaattaagtcgtcgttttggcgtgtcaataagcgcttttaaataa

SEQ ID NO: 472789 - DNA, 543 bp, Shigella flexneri
atggacgcatttgaggtactggcaaataaaggcgctgaactggtagcacagcgtgataaaaccgccaacgaaggggaacgcgcactgctaaataaacagattaaagcgatccgtatggcccagtttaaattaatcagtaatgaagttatcgaaacaattaaaccgcagatcccacaaatcgttgctgacgctattaaagccgccggactggagaaacgcattgccgggctaaaaacgaacgcagagaaaatggagatgcacaaacagagcggtgctccgaatcccgatgagtacttctcaccggatgttgagtttatggcgcaggttgaggaacgtctgggtagctgtctcaccgaggaacagcgtcgctattttgatggagtggatagttcggcaggtattgacctgaactcgtatttcggtcgtgaaattgagcattttgatgccgccccgtctatgccggagccagaaccagaaatggccaccgatcctgaagctgagcaacggaaacgcgtattcaatgcgatagggattcggtactga

SEQ ID NO: 472790 - DNA, 288 bp, Shigella flexneri
atgttggcactacgcatcatgcagggcatcgctaagaccctcgcagaacatgtcttagacctgaaacattcgccactgagcaaacaggccatgaagcgccaaacgcttcgtctgtgggctgaatattcgcttggaactatcaataaaatcatcgacatgaaatcggggccgagcaaccagagcgcggaggaaatggagttcatcaggcgtttaattctcattcgcagagacattcatagccagttacacagcgtgggaatcgatattaatgatgggacgggcgattaa

SEQ ID NO: 472791 - DNA, 207 bp, Shigella flexneri; identical to SEQ ID NO: 28799

SEQ ID NO: 472792 - DNA, 348 bp, Shigella flexneri; identical to SEQ ID NO: 459828

SEQ ID NO: 472793 - DNA, 828 bp, Shigella flexneri
gtggcgcggataaaccgtatttcgatcacgctctgtgctttactttttaccaccctgcctttaacgcctatggcccatgcttcaaagcaagccagggagagttctgctaccactcatatcaccaaaaaagcagataaaaagaaaagcacggcaaccaccaaaaagacccagaaagccagccagaaaacagcgaaaaaagccgccagtaaaagtatgaccaaaagcaaaaccgcttcttctgttaaaaaatcttccattaccgcttctaaaaacgccaaaactcgcagcaaacacgccgtcaataaaacggcctcagccagctttaccgaaaagtgtaccaaacgtaagggctataaatcgcattgtgtgaaagtcaaaaatgccgcgtcaggaacccttgccgacgcgcacaaagcgaaggtgcaaaaagccacgaaagtggcaatgaataaactgatgcagcaaattggtaagccatatcgttggggcggcagctcaccgcgtaccggttttgattgcagcggcctggtttattacgcttataaagatttggtgaaaattcgtattccgcgtacggcgaatgaaatgtatcacctgcgtgatgcaggacctatcgaacgtagtgagctgaaaaacggcgacctggtctttttccgtactcagggacgcggtacagccgatcatgtcggcgtgtatgtcggcaacggcaaatttattcagtcaccgcgcacaggtcaggaaattcaaatcacttctctcagtgaagactactggcagcgccactatgttggcgctcgtcgggtaatgaccccaaaaacacttcgctaa

SEQ ID NO: 472794 - DNA, 582 bp, Shigella flexneri; identical to SEQ ID NO: 459826

SEQ ID NO: 472795 - DNA, 1170 bp, Shigella flexneri
atgaaaattaactatccgttgctggcgctggcgattggcgcgtttggtatcgggacaacggagttctcgccaatgggcttgttgcccgtcattgcgcgcggtgtggatgtctcgattcccgctgccggaatgttaatcagtgcctatgcagttggcgtaatggtgggcgcgccgctgatgacgcttctactttctcatcgtgcccgccgcagtgcgttgattttcctgatggcaattttcacgctaggcaacgttctttccgccatcgcgccggattatatgaccctgatgctttcacgtattttgaccagcctgaatcacggagcattttttggtttgggttcagtcgtggccgcaagcgtggtgccaaaacataaacaggccagcgcagttgccactatgtttatggggttaaccctggcaaatatcggtggcgtgccggcggcgacctggttgggtgaaaccatcggctggcggatgtcatttctggcaacggcggggctgggagtgatttcaatggtaagtctgttcttctcattacctaaaggtggtacaggggcacgacctgaagtgaaaaaagagctggcggtattaatgcgtccgcaggtgctgtctgcattgctgacgacggtactgggagctggtgcaatgtttaccctctacacctatatctctccggtactgcaaagtattacccacgcaacaccggtgttcgtcacggcaatgctggtgctgattggtgtcggattctctatcggtaactatctcggcggcaaactggcagatcgttcagttaacggcacgttgaaaggctttttgttgctgctgatggtgattatgctggcaatcccgttcctggcccgcaatgagttcggcgcagctattagcatggtggtgtggggcgcagcaacctttgcggttgtacctccgttacagatgcgcgtgatgcatgtcgccagtgaagcgccaggtctgtcttcatcagtcaatattggtgcctttaatcttggaaatgcgctgggagcagctgctggtggtgcggtaatttccgctgggctgggatacagctttgtgccggtgacgggggcgattgtcgcgggactggcattattgctggtgtttatgtcagccagaaaacaacctgaaacagtttgcgttgctaacagctaa

SEQ ID NO: 472796 - DNA, 1026 bp, Shigella flexneri
atggcaacaataaaagatgtagcgaaacgagcaaacgtttccactacaactgtgtcacacgtgatcaacaaaacacgtttcgtcgctgaagaaacgcgcaacgccgtgtgggcagcgattaaagaattacactactcccctagcgcggtggcgcgtagcctgaaggttaaccacaccaagtctatcggtttgctggcgaccagcagcgaagcggcctattttgccgagatcattgaagcagttgaaaaaaattgcttccagaaaggttacaccctgattctgggtaatgcgtggaacaatcttgagaaacagcgggcttatctgtcgatgatggcgcaaaaacgcgtcgatggtctgctggtgatgtgttctgagtacccagagccgttgctggcgatgctggaagagtatcgccatatcccaatggtggtgatggactggggtgaagcaaaagctgacttcaccgatgcggtcattgataacgcgttcgaaggcggctacatggccgggcgttatctgattgaacgcggtcaccgcgaaatcggcgtcatccccggcccgctggaacgtaacaccggcgcaggccgccttgccggttttatgaaggcgatggaagaagcgatgatcaaggtgccggaaagctggattgtgcagggtgactttgaacctgaatccggttatcgcgccatgcagcaaatcctgtcgcagccgcatcgccctactgccgtcttctgtggtggcgatatcatggcaatgggcgcactttgtgctgctgatgaaatgggcctgcgcgtcccgcaggatgtttcgctgatcggttatgataacgtgcgcaacgcgcgctattttacgccggcgctgaccacgatccatcagccaaaagattcgctgggtgaaacagcgttcaacatgctgttggatcgtatcgtcaacaaacgtgaagaaccgcagtccattgaagtgcatccgcgtttgattgaacgccgctccgtggctgacggcccgttccgcgactatcgtcgttaa

SEQ ID NO: 472797 - DNA, 933 bp, Shigella flexneri
atgtggtcagaatattcactcgaagttgttgatgcggtagcgcgtaatggtagttttagcgctgcggcacaggagctgcatcgtgttccttctgcggtcagctataccgtgcgtcagctggaagagtggctggcggtaccgctctttgaacgacggcaccgtgatgtggagctgaccgctgctggagcgtggtttctcaaagaagggcgctctgttgtcaaaaaaatgcagatcacccgccagcaatgtcagcagatagcgaacggctggcgcggtcagttagctatcgcagtggataatattgtcaggccagaacgtacacggcagatgatcgttgatttttatcgccattttgatgatgtcgaacttcttgtctttcaggaagtgttcaacggtgtctgggatgcgctttccgacgggcgcgtggaactggcaattggcgcaacacgcgcgattccggtaggcggtcgttatgccttccgggatatggggatgctaagctggagttgcgttgttgccagtcaccacccgctggcgttgatggatggcccgttcagcgatgatacgttgcgcaactggccgtcgttggtgcgcgaagacacctcgcgaacgctacctaaacgtattacctggttgctggataaccaaaaaagacttgtcgtacctgactgggaatcatcggcaacctgtatctcggcaggattatgcatagggatggtgccaacacatttcgccaaaccgtggcttaatgaggggaagtgggtagcacttgaactggaaaaccccttcccggattcggcatgttgtctgacatggcagcaaaatgatatgtcgcctgcgttaacctggctgcttgagtatctcggcgatagtgagacgctgaataaggagtggctgcgggagccggaagagactcccgcaacgggtgattaa

SEQ ID NO: 472798 - DNA, 1212 bp, Shigella flexneri
atgcaacctgggaaaagatttttagtctggctggcgggtttgagcgtactcggttttctggcaaccgatatgtatctgcctgctttcgccgccatacaggccgacctgcaaacgcctgcgtctgctgtcagtgccagccttagtctgttccttgccggttttgccgcagcccagcttctgtgggggccactctccgaccgttatggtcgtaaaccggtgttattaatcggcctgacaatttttgcgttaggtagtctggggatgctgtgggtagaaaacgccgccacgctgctggtattgcgttttgtacaggctgtgggggtctgcgccgcggcggttatctggcaagcattagtgacagattattatccttcacagaaagtcaaccgtatttttgcgaccatcatgccgctggtgggtctgtctccggcactggctcccctgttaggaagctggctgctggtccatttttcctggcaggcgattttcgccaccctgtttgccattaccgtggtgctgattctgcctattttctggctcaaacccacgacgaaggcccgtaacaatagtcaggatggtctgacctttaccgacctgctacgttctaaaacctatcgcggcaacgtgctgatatacgcagcctgttcagccagtttttttgcatggctgaccggttcaccgttcatccttagtgaaatgggctacagcccggcagttattggtttaagttatgtcccgcaaactatcgcgtttctgattggtggttatggctgtcgcgccgcactgcagaaatggcaaggcaagcagttattaccgtggttgctggtgctgtttgctgtcagcgtcattgcgacctgggctgcgggcttcattagccatgtgtcgctggtcgaaatcctgatcccattctgtgtgatggcgattgccaatggcgcgatctaccctattgttgtcgcccaggcgctgcgtcccttcccacatgcaaccggtcgcgccgcagcgttgcagaacactctgcaactgggtctgtgcttcctcgcaagtctggtagtttcctggcttattagtatcagcacgccattgctcaccaccaccagcgtgatgttatcaacagtagtgctggtcgcgctgggttacatgatgcaacgttgtgaagaagttgactgcccgaatcatggcaatgccgaagtcgctcatagcgaatcacactga

SEQ ID NO: 472799 - DNA, 1149 bp, Shigella flexneri
atgagttcatcgtgtatagaagaagtcagtgtaccggatgacaactggtaccgtatcgccaacgaattacttagccgtgccggtatagccattaacggttctgccccggcggatattcgtgtgaaaaaccccgatttttttaaacgcgttctgcaggaaggctctttggggttaggcgaaagttatatggatggctggtgggaatgtgaccgactggatatgttttttagcaaagtcttacgcgcaggtctcgagaaccaactcccccatcatttcaaagacacgctgcgtattgccggcgctcgtctcttcaatctgcagagtaaaaaacgtgcctggatagtcggcaaggagcattacgatttgggtaatgacttgttcagccgcatgcttgatcccttcatgcaatattcctgcgcttactggaaagatgccgataatctggaatctgcccagcaggcgaagctcaaaatgatttgtgaaaaattgcagttaaaaccagggatgcgcgtactggatattggctgcggctggggcggactagcgcactacatggcatctaactatgacgtaagcgtggtcggcgtcaccatttctgccgaacagcaaaaaatggctcaggaacgctgtaaaggcctggatgtcaccattttgctgcaagattatcgtgacctgaacgaccagtttgatcgtattgtttctgtggggatgttcgagcacgtcggaccgaaaaattacgatacctattttgcggtggtggatcgtaatttgaaaccggaaggtatattcctgctccatactatcggttcgaaaaaaaccgatctgaatgttgatccctggattaataaatatatttttccgaacggttgcctgccctctgtacgccagattgctcaatccagcgaaccccactttgtgatggaagactggcataacttcggtgctgattacgatactacgttgatggcgtggtatgaacgattcctcgccgcatggccagaaattgcggataactacagtgaacgctttaaacggatgtttacctattatctgaatgcctgcgcaggtgctttccgcgcccgtgatattcagctctggcaggtggtgttctcacgcggtgttgaaaacggccttcgagtcgctcgctaa

SEQ ID NO: 472800 - DNA, 642 bp, Shigella flexneri
atgtttacggggattgtacagggcaccgcaaaactggtgtcgattgacgagaaaccaaattttcgtacgcatgtggtggagttacccgaccacatgctggacggcctggaaaccggtgcttccgtggcgcataacggttgctgcctgaccgtgacggaaattaacggcaaccatgtcagttttgacctgatgaaagaaacgttacgcattaccaatcttggcgatttaaaagtgggggattgggtaaacgttgagcgtgcggcgaaattcagtgatgaaattggcggacacttaatgtcaggtcatattatgaccaccgctgaagtggcgaaaatattaacctcggaaaataatcgccagatctggtttaaagtccaggatagtcagttgatgaaatatatcctgtacaaaggatttattggcatcgacggtattagcctgaccgtcggcgaagtcacgccaacgcgtttttgcgtccatttaattccggaaacactggaacgcacgactcttgggaagaaaaaacttggcgcacgcgtcaacattgaaatcgatccacaaactcaggcagtggtagatacggtagaacgtgtgctggcggcacgagaaaatgccatgaatcaaccaggtacagaagcctga

SEQ ID NO: 472801 - DNA, 1374 bp, Shigella flexneri
gtgcagaagtatatcagtgaagcgcgtctgttattagcattagcaatcccggtgattctcgcgcaaatcgcccaaactgcgatgggttttgtcgataccgtgatggcgggcggctatagtgccaccgacatggcggcggtcgctatcggtacttctatctggcttccggcgatcctctttggtcacggactgctgctggcattaacgccggttatcgcgcaattaaatggttccggtcgacgtgagcgcattgcgcatcaggtgcgacaaggtttctggctggcaggttttgtttccgttctcattatgctggtgctgtggaatgcaggttacattatccgctacatggaaaacatcgatccggctctggcggacaaagccgtgggttatctgcgtgcgttgttgtggggcgcgccgggatatctgttcttccaggttgcccgtaaccaatgtgaaggtctggcaaaaaccaagccgggtatggtaatgggctttatcggcctgctggtgaacatcccggtgaactatatctttatttatggtcatttcggtatgcctgagctcggtggcgttggttgtggcgtggctactgcggcggtgtattgggtcatgttccttgccatggtttcttacattaaacgcgcccgctccatgcgcgatattcgtaacgaaaaaggcaccgctaagcccgagcctgcggttatgaaacgactgattcaactcggtttgccgattgcgctggcactgttctttgaagtgacactgtttgccgtcgtggctctgttagtgtctccgctcggtattgttgatgtcgcaggacaccagattgccctgaactttagttcactgatgtttgtgcttccaatgtcgctggcggcagcggtaactatccgcgtaggttatcgtctgggtcagggctcaacgctggatgcgcaaaccgctgcgcggaccgggcttatggtgggtgtctgtatggcaaccctgacggccattttcacggtttcactgcgggagcaaatcgccctgttgtacaacgacaatcccgaggttgtaacgctggctgcgcatttgatgttgctggcggcggtatatcagatttctgactcaatccaggtgattggcagtgggattttgcgtggttataaagatacgcgttccattttctatatcacctttacagcttactgggtgctgggcttgccaagcggctatattctggcactgaccgatctggtcgttgaacctatggggccagcaggcttctggataggctttattatcggcctgacatcggcagccattatgatgatgctgcgtatgcggttcctgcaacgtatgccgtcagccctcattctgcaacgagcgtcccgctaa

SEQ ID NO: 472802 - DNA, 1257 bp, Shigella flexneri
atgggatctgatgcgaaaaacttgatgagcgacgggaatgtgcaaattgttaagaccggcgaggtccttggcgcgacgcaacttactgaaggcgagttgattgttgaagctggcggaagagccgaaaataccgtggtcacgggggctggctggttgaaagtggcaaccggtgggatcgccaaatgcacacagtacggtaacaatggcacgctatcggtcagcgacggtgccattgccacagatattgttcagtccgagggaggcgcaattagtctctctacgctcgctacggttaatggccgccatcccgaaggtgaattcagcgttgatcagggttatgcctgcggtttgttgctggaaaatggcggtaacctgcgtgtactggaaggacatcgcgcggaaaaaatcattctcgatcaagagggcggcctgttggttaatgggacaacctcagcggtcgtggtagatgaaggtggtgaattgttggtgtatccaagtggagaagccagcaattgtgagattaatcagggcggcgtttttatgctggccgggaaagccagtgatacgttgcttgctggtggcaccatgaataatctcggtggtgaagactctgacactattgttgagaatggatccatttatcgtctggggacggatggccttcagctctacagttccggtaagacgcaaaacctgtcggtgaatgtgggggggcgggctgaagtgcatgccggtacgctggaaaatgcggtaatacaaggtggaacagtgatcctgttgtcacccaccagcgcggacgaaaattttgtcgtagaggaagatcgcgcaccggttgaactgaccgggagtgttgcattactggacggcgcttcaatgattattggttatggcgcagagctgcaacaatcaacgattactgtacagcagggcggtgtgttgattctcgacggcagtacggtaaaaggtgacagcgtcactttcattgttggtaacatcaatctgaatggcggaaaactgtggctgatcactggtgcggcaacgcatgtgcaactgaaagtgaaacgcctgcgcggagagggagcgatttgcctgcaaaccagtgcgaaagaaatttcacctgacttcatcaatgtgaaaggggaagttaacggggatatacgcgttgagataacagatgccagtcggcaaactctgtgtaacgctctgaaattacagccagacgaagacgggattggcgcaacgctccagcctgcgtaa

SEQ ID NO: 472803 - DNA, 306 bp, Shigella flexneri
atggcaactttgttacaacttcattttgcttttaatggcccatttggcgacgcaatggctgagcagcttaaaccacttgctgagtcgattaatcaggaacctggttttctgtggaaggtatggacagaaagtgaaaagaaccacgaagccggtgggatctaccttttcactgatgaaaaaagcgcccttgcctatctggaaaaacatactgcccgactgaaaaatctcggcgttgaggaagttgtcgccaaagttttcgatgtcaatgagccacttagtcaaatcaatcaggcaaaactcgcctga

SEQ ID NO: 472804 - DNA, 1605 bp, Shigella flexneri
atgaaaaaaattgctattgtgggtgccgggcctacggggatctacaccttattctcgcttctacagcaacaaactccactttctatttctatcttcgagcaggctgacgaggccggtgtcgggatgccatacagtgatgaggaaaactcaaaaatgatgctggcaaatattgccagtattgaaataccgccgattaattgtacgtatctcgaatggctacaaaagcaagaagccagccatctccagcgttatggcgttaaaaaagaaaccttgcacgatcgtcagtttttaccgcgaattctgctgggcgaatatttccgcgatcaatttttacgattagtagaccaggcacgacagcaaaaatttgcagtggctgtttatgaatcatgccaggttaccgatctgcaaattacaaatgctggcgtcatgctcgctacaaatcaggatttacccagcgagacgtttgatttagcggtgattgccacgggtcacgtctggcctgatgaagaagaagcaaccagaacgtattttcccagcccgtggtcaggcctgatggaagcaaaggtcgatgcgtgtaacgtgggtattatgggaacatccttgagcggactggatgcggcaatggcagtggctattcagcatggttcgttcattgaagatgataaacaacacgtcgtttttcaccgcgataacgcaagtgaaaagctaaatattacgttgatgtcgcgcacgggtattttacccgaagccgatttctattgccctattccctacgagcccttacacatcgtcaccgatcaggcattaaatgctgagattcaaaaaggtgaagagggccttttggatcgggtatttagattgatagtagaggaaatcaagtttgctgatccagactggagccaacgcatagccttagagagcctgaatgtcgattcctttgctcaagcctggtttgccgagcgcaaacaacgcgacccatttgactgggcagaaaaaaatctccaggaagtcgaacgcaataaacgagaaaaacatactgttccctggcgttatgtcattctgcgcctgcatgaagccgtacaggaaattgttcctcatctgaatgaacacgaccataaacggttcagtaaaggccttgccagggttttcatcgataattatgcggcaatcccttcagagtctattcgtcgactactggccttacgtgaagcggggatcattcatattctcgccctcggtgaagactacgaaatggaaattaatgagtcgcgcaccgtcctgaaaacggaagacaacagctactcgtttgacgtttttattgatgcccgcggacagcgtccgcttaaagtgaaagatattcctttccctgggctacgcgagcaattacagaaaacaggggatgaaatccctgatgttggcgaagattatacgttacagcaacccgaagatattcgtggacgcgtagcgttcggcgcgttgccctggttgatgcacgaccagcctttcgttcagggacttacggcatgtgcagaaattggtgaggcgatggctcgggcggtcgtaaagcctgcatcccgtgctcgtcggcgtctttcgtttgattaa

SEQ ID NO: 472805 - DNA, 765 bp, Shigella flexneri
atgtatcgctggttcctgcgccatttcccacgcggcggtagttatgccgatattcgtcatgcactgattgaggaaggatatacggactgggcggagagtctggttgagtatgcgtggaaaaaatggctggcggatgaaaacttcgcgcatcaggaagtttcctctatgcaaaaactggccacagaccccggagagataccattttgcagtcagtttgcccgcagcgacgatcatgctcgcatcggctgttgtgaggataacgcccgaatcgcaaccgctgggtatgccgcgcaaattgccagtatgggttatagcgtgcggattggaagtgtcggctttaacagtcacattggcagctccggtgaacgcgcacgggttgctgtaaccggtaattcttcgcggataagcagcgctggagatagtagtcggattgcgaataccggaatgcgagtacgcgtttgtacattgggtgaacggtgtcatgtcgccagtaatggtgacctggtgcaaatcgccagctttggcgcaaacgccagaattgccaacagcggcgacaatgtacacatcattgccagcggtgaaaattcaacggtagtgagcacgggcgtggtcgactcaattattctcgggctagggggaagcgccgcactggcatatcatgacggcgaaagagttcgcttcgccgtcgccattgaaggtgaaaacaatattcgaaccggagtccgctatcgtcttaatgaacagcatcagtttgttgagtgctga

SEQ ID NO: 472806 - DNA, 786 bp, Shigella flexneri
atgaacccgtcgcaacatgctgaacagtttcagagccagttagcgaactatgtgccacagttcactcccgaattttggccggtgtggttgatcattgccggagtattgctggttgggatgtggttggtgctggggctgcacgccttgcttcgtgctcgtggcgtgaagaaatcagccaccgatcatggtgagaaggtttatctttacagcaaagcggtcagattatggcactggtcgaatgcgttactctttgtattgttgctggcaagtgggctgataaatcactttgcgatggtgggcgcaactgcggttaaaagtctggttgcggtgcatgaagtttgcggatttttgttactggcatgctggctcggctttgtgctgatcaatgccgttggggataatggtcaccactatcgcattcgtcgtcaggggtggctggaacgagcggcaaaacaaacgcgattttatttgtttggcattatgcaggggaaagaacatcctttcccggcaacaacacagtctaaatttaatcccttacagcaggtcgcctatgttggtgtcatgtatggattgctgccgttgttactattgacggggctgttgtgtctctatccgcaagccgtgggagatgtgtttcctggcgtaagatactggttattgcaggcgcattttgctctggcatttataagcctcttttttatcttcggtcatctttatctttgcaccacggggcgtacgccacacgaaacctttaaaagcatggtcgatggctatcaccggcactaa

SEQ ID NO: 472807 - DNA, 669 bp, Shigella flexneri
atgtccttcactcgacgcaaatttgttctggggatgggaacagtaatcttttttactggttctgcgtcttctctgttagcgaacacgaggcaagaaaaggaagttcggtatgccatgattcatgacgagtcacggtgcaatggctgtaatatttgcgcccgcgcatgccgtaaaactaaccacgtccccgctcagggaagccgtttatcgatagcacacattccagtcaccgataacgacaacgaaacgcagtatcacttttttcgccagtcatgtcagcactgcgaagatgctccgtgcatcgacgtatgcccgacgggggcatcgtggcgtgatgagcaggggatcgtgcgggtagaaaaatcgcagtgcatcggctgcagttattgcattggcgcttgtccgtaccaggttcgctaccttaaccctgtcactaaagtggcagataaatgtgatttctgcgctgagtcccgactggcaaaaggctttccgcccatttgcgtcagcgcctgtccggaacacgcattgatctttggtcgcgaagatagcccagaaattcaggcgtggttgcaggataataaatactatcaatatcagctacctggtgccggaaaaccgcatctgtatcgccggttcggtcaacatttgattaaaaaggaaaatgtatga

SEQ ID NO: 472808 - DNA, 639 bp, Shigella flexneri
atgaaccatcaggatgaattgccgttagcgaaagtcagcgaagttgacgaggcgaagcggcaatggttgcaggggatgcgtcaccccgttgatacggtaaccgaaccagaacctgctgaaatcctggctgagttcattcgccagcattctgcggctgggcagctggtggcgcgcaccgtgtttctctcgccaccctattcggttgcagaagaggaactgtcagttttgctggaaagcattaagcagaacggagactacgcggatatcgcttgtatgacgggaagtcaggatgattactattactcaacgcaggccatgagtgaaaactacgcggcgatgtctttgcaagttgtggagcaggacatttgtcgcgccattgcacacgccgttcgttttgagtgccagacgtatcctcgtccttacaaagtcgccatgctgatgcaagcgccatattacttccaggaagcgcagattgaagccgcgatcgccgcgatggatgttgcacctgaatatgccgatatacggcaggtggagtcatcgacggcggtgttgtacttgtttagcgagcgatttatgacctatggcaaggcttatggcttatgcgaatggttcgaggtagagcagtttcagaacccctga

SEQ ID NO: 472809 - DNA, 1797 bp, Shigella flexneri
atgaaattcgctggatacgacgtcattattatcgaagggaaggcgaaatcaccggtatggctgaagattaaagatgacaaagttagcctggaaaaagccgatttcttatggggaaaagggacgcgcgcaacgacggaagaaatttgtcgattgaccagcccggaaacctgtgtggcggctattggtcaggctggggaaaaccttattcctctctctggcatgttgaatagccgtaaccacagcggcggtgcgggaactggcgcaataatgggttcgaaaaacctgaaagcgattgcggttgaagggacgaaaggggtcaacattgccgatcgtcaggagatgaagcgtctcaatgattacatgatgactgaacttattggtgcgaataacaaccatgtcgtgccaagtacgccacaatcgtgggcagagtattcagatcccaagtcacgctggacagcacgtaaagggctgttttggggcgcggctgaaggtggtccgattgaaacgggtgaaattccgccaggcaatcagaatacggtcggctttcgtacctataaatccgtttttgacttaggaccggcggcagagaaatacacagtaaaaatgagcggctgccactcttgcccgatccgttgtatgacccaaatgaatattcctcgggtgaaagagtttggcgtgcccagcacaggtggtaacacttgtgtagcaaactttgtccataccaccatcttcccgaacgggccgaaagattttgaagataaagacgatggtcgtgtgattggtaacctggttggtctgaatttgttcgatgactacggcctatggtgtaactacgggcagttgcatcgcgactttacttattgttacagcaaaggtgtgttcaagcgtgttctgccagctgaagagtatgcagaaattcgctgggatcaactggaagcgggtgacgttaacttcattaaagatttttactaccgtctggcgcatcgtgtgggtgagctgagtcacctggctgatggttcatatgccatcgcagaacgctggaatttgggtaaagagtactggggctacgcgaaaaataaactctggtcgccgtttggctatccggttcaccatgccaatgaagcgtcagcgcaggtcggttccattgttaactgtatgttcaaccgtgactgcatgacgcatacccatatcaactttattggttccggcttgccattgaaactgcaacgtgaagtggcgaaagaactttttggttctgaagatgcttacgatgaaaccaaaaactacacgccaatcaatgacgcaaaaattaaatatgcaaagtggtcgctgttgcgggtctgtttgcataacgccgtcactctgtgcaactgggtctggccaatgaccgtttcgccgctgaaaagccgtaattaccggggcgatctggcgcttgaagccaaattcttcaaagcgatcaccggcgaagagatgactcaggaaaaattagatttagctgcagagcgtatctttacgttgcatcgtgcctacacggtaaaaccgatgcaaaccaaagatatgcgtaatgaacacgatcttatctgttcctgggttttcgacaaggatccgcagatcccggtctttactgaaggtactgacaaaatggatcgtgacgatatgcatgcttcgctcacgatgttctacaaagaaatgggctgggacccacagcttggttgtccaacccgcgaaacattgcagcgtctggggctggaagatattgccgccgatctggcagcacacaatctactgcctgcgtaa

SEQ ID NO: 472810 - DNA, 309 bp, Shigella flexneri
atggctaacggttggacaggtaatatattaagagtcaatctcacgacaggaaatattaccctcgaagattccagtaagtttaaaagttttgtcggtggcatgggcttcggctacaaaattatgtatgacgaagtaccgctaggcacgaaacctttcgatgaagcgaataaattagtctttgctaccggcccattaactggatctggtgccccctgtagttctcgcgtaaatatcacctcactttctacttttaccaaaggaaatttagtcgcgatgcccatatgggtggcttttttgcagcgcaaatga

SEQ ID NO: 472811 - DNA, 627 bp, Shigella flexneri
atgaacccggttgatcgtccactattagatattggcttaacgcgattagaattcttgcgtatatcaggaaaaggccttgctggtctaacaattgcccctgcgttactgtcacttttgggttgcaaacaggaagatattgatagcggcacagtagggttgataaatacacccaaaggggtgctggtgacccagcgagcgcgatgcacgggttgccaccgctgtgaaatctcttgtaccaacttcaacgatggctcagtagggacattcttctcccgtatcaaaatccatcgcaattatttctttggcgacaacggggttggctctggcggcggcctgtatggcgatctcaactataccgcggacacctgccgtcaatgcaaagagccgcaatgcatgaacgtctgcccgattggtgcgattacctggcagcagaaagaaggctgtattaccgtcgatcataaacgttgtattggctgtagcgcctgtactacggcatgcccgtggatgatggccaccgtaaataccgaaagtaaaaaatcctcgaaatgtgtgttatgcggtgaatgcgcaaacgcctgcccaacaggggcgttaaaaattatcgagtggaaagatattactgtgtga

SEQ ID NO: 472812 - DNA, 210 bp, Shigella flexneri
atgggaaatcggacaaaagaggatgaactgtaccgagaaatgtgcagagttgtcggtaaagttgtgctggaaatgcgcgatctggggcaggaaccaaagcatattgttatcgcaggcgtattacgtacagcattagccaataaacgcattcagcgcagtgagctggaaaagcaggcgatggaaaccgtcattgacgcactggtaaaatga

SEQ ID NO: 472813 - DNA, 729 bp, Shigella flexneri
atgggcaaaatatcagatttgaattattctcaacacattacattagccgacaattttaaacaaaaaaatgaagccttagatacctggtatgtgggaatgaatgattttgcccgaattgccggggggcagaatagcagaagcaatattctttctcctagagcatttttggagtttttggcaaagatatttaccctgggttatgtggattttagcaaacgctccaacgaagcgggtagaaatatgatggctcatattgagttctcatcttattctaaagatactgatggcaatgaaaaaatgaagttttacatgaataatcctgaaggggagcgagcggatttatctaaggtgaagatagaaattacacttgcctcagcttctactaaagggattcgtgaaggacatacagtcattatatttaaacaatctgatggttcgactaatcgttatgaagggaagtcttttgaaagaaaagatgatagttcattacacctgattactaacaaggttctggcgtgttaccaacgcgaagctaacaagaaaatagcgcgtctattaaataatcatcagaagttaaataatatacaggagttaaatgattcgcaggagttaaataattcacagaagttaaataattcgcaggagttaaataactcgcaggtgagttgtaaaggttcagttgattctacgattacggatttattagaaaaagcattgaataaagggtaa

SEQ ID NO: 472814 - DNA, 453 bp, Shigella flexneri
atgatcatcggaaatattcataatcttcagccgtggctaccccaggagttacgccaggcgattgagcatatcaaagcacacgttacggcagaaacgccaaagggcaagcatgatatcgaaggcaatcgtctgttttatcttatctcggaagatatgaccgagccgtacgaagctcgccgtgcggagtaccatgcccgctatcttgacattcagattgtgttaaaaggtcaggaaggcatgaccttcagcacgcaacctgcaggcgcgccggataccgactggttagctgataaagacatcgcatttttgccggaaggcgttgatgagaaaacagttatcctaaatgaaggtgattttgttgtgttttatccgggggaagtgcataaaccgctgtgcgcagtgggcgcgccagcccaggttcgcaaagcagtagtgaagatgctgatggcgtga

SEQ ID NO: 472815 - DNA, 594 bp, Shigella flexneri
atggtcactaaaaaacaatctcgcgttccaggtcgtcccagacgtttcgctcctgagcaggcagtctctgcggcaaaagtgctttttcaccaaaaaggtttcgatgcagtaagtgtctctgaagttactgattatcttggtattaaccccccgagtctctacgcggcttttggcagtaaggctgggttatttagccgtgtactcaatgaatatgtcggtacggaagctattccgcttgccgatattcttcgtgatgatcgtccggtaggcgagtgcctggttgaggtattaaaagaagcggcgcgcagatatagccaaaacggcggctgcgctggctgtatggttcttgaaggtattcatagtcatgatccacaagcgcgtgatattgccattcaatattatcacgccgcagaaacgaccatttatgactatatcgccaggcggcatccacaaagcgcacaatgtgtgactgattttatgagtaccgtgatgtcagggctttctgcgaaggcacgggaggggcactccatcgaacaactctgtgcaacagctgccctggcaggggaagcgataaaaactcttctcaaggagtga

SEQ ID NO: 472816 - DNA, 714 bp, Shigella flexneri
atgggcgcttttaccggtaagacagttctcatcctcggtggcagtcgtggaatcggtgccgctatcgtacgtcgtttcgtcaccgatggggccaatgtacgattcacctatgcggggtcgaaagatgccgctgaacgtctggcacaagagactggagcgacagcagtattcacagatagtgctgacagagacgctgttattgatgtcgttcgtaagagcggcgcattggatatcctggtggtaaatgcaggtattggcgtctttggcgatgccctggaattaaatgccgacgatattgatcgccttttcaaaatcaatattcatgctccttatcatgcctctgttgaagccgcccggcagatgcccgaaggcgggcgcatcttaatcatcggctccgtgaatggcgatcgtatgcctgttgcaggcatggctgcttatgccgccagtaaatctgccctgcaaggcatggcgcgcgggctggcccgtgattttggaccgcgagggatcaccatcaacgtcgtccagccaggaccaattgataccgacgttaatcccgccaacgggccaatgcgcgatatgttgcatagttttatggccatcaaaagacatgggcaaccggaagaggtcgctggtatggtcgcatggttagcagggccagaagccagttttgttaccggcgcgatgcataccattgatggcgcgtttggcgcataa

SEQ ID NO: 472817 - DNA, 396 bp, Shigella flexneri
atggtagaaagaaccgctgttttccctgctggccgacattcactgtatgctgagcatcgttattctgcggctattcgttccggcgatttgctgtttgtttccgggcaagtaggaagtcgagaggacggaacaccagaacccgattttcagcaacaagtcagactggcctttgataatttgcatgcgaccctggcagctgcgggatgcacttttgacgatatcattgatgttacgagctttcataccgatccggaaaaacaatttgaagacatcatgacggtgaaaaatgaaatatttagcgccccaccttatccaaactggacggcggtgggtgttacctggctggcaggctttgattttgaaattaaagtgatagcgcgtatccctgagctataa

SEQ ID NO: 472818 - DNA, 135 bp, Shigella flexneri
atggttcagtgtgttcgacattttgtcttaccgcgtctgaaaaaagacgctggcctgccgtttttcttcccgttgatcacccattcccagcccctcaatcgaggggcttttttttgcctaggtgtcaggagataa

SEQ ID NO: 472819 - DNA, 936 bp, Shigella flexneri
atggctaatccgctatatcagaaacatatcatttccataaacgaccttagtcgcgatgaccttaatctggtgctggcgacagcggcgaaactgaaagcaaacccgcaaccagagctgttgaagcacaaagtcattgccagctgtttcttcgaagcctctacccgtacccgcctctctttcgaaacttccatgcaccgcctgggtgccagcgtggtgggcttctccgacagcgccaatacatcactgggtaaaaaaggcgaaacgctggccgataccatttcggttatcagcacttacgtcgatgcgatagtgatgcgtcatccgcaggaaggtgcggcgcgcctagccaccgaattttctggcaatgtaccggtactgaatgccggtgatggctccaaccaacatccgacgcaaaccttgctggacttattcaccattcaggaaacccaggggcgtctggacaatctccacgtcgcaatggttggtgacctgaaatatggccgcaccgttcactccctgacccaggcgctagcgaagttcgacggcaaccgtttttactttatcgcgccggatgcgctggcaatgccgcaatacattctggatatgctcgatgaaaaagggatcgcctggagtctgcacagctctattgaagaagtgatggcggaagtagacatcctgtacatgacccgcgtgcaaaaagagcgtctggacccgtccgagtacgccaacgtgaaagcgcagtttgttcttcgcgccagcgatctccacaacgccaaagccaatatgaaagtgctgcatccgctgccgcgtgttgatgagattgcgacggatgtggataaaacgcctcacgcctggtacttccagcaagcaggcaacgggattttcgctcgccaggcgttactggcactggttctgaatcgcgatctggtactgtaa

SEQ ID NO: 472820 - DNA, 462 bp, Shigella flexneri
atgacacacgataataaattgcaggttgaagctattaaacgcggcacggtaattgaccatatccccgcccagatcggttttaagctgttgagtctgttcaagttgaccgaaacagatcagcgcatcaccattggtctgaatttgccttctggcgagatgggccgcaaagatctgatcaaaatcgaaaatacctttttgagtgaagagcaagtagaccaactggcattgtatgcaccgcaagccacggttaaccgtatcgacaactatgaagtggtgggtaaatcgcgcccaagtctgccagagcgcatcgacaatgtgctggtctgcccgaacagcaactgtatcagccatgccgaaccggtttcatccagctttgccgtgcgaaaacgcgccaatgacatcgcgcttaaatgcaaatactgtgaaaaagagttttcccataatgtggtgctggccaattaa

SEQ ID NO: 472821 - DNA, 387 bp, Shigella flexneri
atgagcaaaactatcgcgacggaaaatgcaccggcagctatcggtccttacgtacagggcgttgatctgggcaatatgatcatcacctccggtcagatcccggtaaatccgaaaactggtgaagtaccggcagacgtcgctgcacaggcacgtcagtcgctggataacgtaaaagcaatcgtcgaagccgctggcctgaaagtgggcgacatcgttaaaaccactgtgttcgtgaaagatctgaacgacttcgcaaccgtaaacgccacttacgaagccttcttcaccgaacacaacgccactttcccggcacgttcttgcgttgaagttgcccgtctgccgaaagacgtgaagattgagatcgaagcaatcgctgttcgtcgctaa

SEQ ID NO: 472822 - DNA, 2697 bp, Shigella flexneri
atgtttaaagaaatttttacccggttcattcgccatttaccttcccgtctggttcatcgcgatccattgcctggcgcgcagcagacagtgaatacggcggtcccgccgtccttaagtgcgcattgcctgaaaatggcggtgatgcccgaagaagaattgtggaaaacgttcgacacccatccggaaggattaaatcaggcggaagtggaatctgcccgcgaacaacatggtgataataaattacccgcccaacaaccgtcgccgtggtgggtacatttatgggtctgctatcgcaacccctttaatattttgctcaccattcttggtgctatttcttacgccacggaagatttatttgccgcaggtgttatcgcgctaatggtcgctatttctacgttgctgaactttattcaggaagctcgttccaccaaagcggcagatgccctgaaagcgatggtcagtaataccgcgacggtactgcgagtaattaacgacaaaggcgaaaatggctggctggagatcccgatagaccagctggtgcccggcgatattataaaactggcggcgggggatatgatcccggcagatttacgtatcttgcaggcgcgggatctgttcgtcgctcaggcgtcgttaaccggtgagtctctgcccgtggaaaaagccgctactactcgccagccggagcacagcaatccgctggagtgcgacaccctgtgttttatgggcaccaccgtggtgagcggcacggcacaagcaatggtgattgctacaggagccaacacctggtttggtcaactggcggggcgtgttagtgagcaggaaagcgagccgaatgcctttcagcaagggatcagccgcgttagtatgctgctgattcgctttatgctggtgatggctccggtggtgttgcttatcaacggttacaccaaaggcgactggtgggaagcggcactgtttgcgctttcggtcgcggtaggcttaacgccggaaatgttgccgatgattgttacctcgacgctggcgcgcggcgcagtaaagctgtcgaaacagaaagtgatcgtcaaacatctggatgccattcagaactttggcgcaatggatattctgtgcactgataaaaccggcaccctgacgcaggacaaaattgtgctggagaatcataccgatatctccggtaaaaccagcgaacgcgtgctgcatagcgcgtggttgaacagtcattaccagaccggacttaaaaatctgcttgataccgcggtgctcgaaggtacggatgaagagtcagcgcgttcgctggccagccgttggcaaaaaattgatgagattccgtttgatttcgagcgtcgtcggatgtcggtggtagtggcagaaaataccgaacaccatcagctggtttgcaaaggtgcattgcaggaaatcctcaatgtgtgttcgcaggtgcgtcacaatggcgagattgtaccgctcgatgacaccatgctgcgtaagattaagcgggttactgatacgctgaatcgtcaggggctgcgcgtggttgcggtggcgacgaaatacctgccagcgcgtgaaggagattaccagcgggcggatgaatccgacctgatcctcgaaggatatattgctttccttgatccgccaaaagagacaaccgctccggcactgaaggcattaaaagcgagtggaattaccgtaaaaatccttactggcgacagtgagttagttgcagcgaaagtgtgccatgaagtggggctggatgcgggagaggtggtcattggtagtgatattgaaacgctatctgacgatgaactggcaaatctcgcacagcgcaccacgctgtttgcccgcctgacgccgatgcataaagaacgcattgtgactttactgaagcgcgaagggcatgtggttggctttatgggcgatggtattaatgatgcgcccgccttacgcgctgcggatatcggcatttctgtggacggcgcggtagatattgcccgtgaagcggctgatatcatcctgctggaaaaaagcctgatggtgctggaagagggggttattgagggacgtcgcactttcgccaacatgctgaaatacatcaaattgacggcgagttctaacttcggtaatgtgttcagcgtgctggtggcgagtgctttcttgcccttcctgccgatgttgccgttacacttgcttattcagaacctgctgtacgatgtgtcacaggtggcgatcccgtttgataacgtcgacgacgagcaaattcaaaagccgcagcgttggaatccggcggatctggggcgctttatggtcttcttcggaccgatcagctcgattttcgatattctgacgttttgcttgatgtggtgggtattccatgccaacacgccggaaacgcaaacgctgttccagtcgggctggtttgtggtgggattactgtcgcaaacgctgattgtgcatatgatccgtacccgccgtgtgccgtttattcagagctgtgcatcgtggccgttaatgatcatgaccgtgatcgtgatgattgtcgggatcgcattgccgttttcaccgctggccagttatctgcagctgcaggcgctgccgttaagctatttcccgtggctggttgcgattctggcagggtatatgacgttaacccagttggtgaaagggttctatagccgtcgttacggctggcagtaa

SEQ ID NO: 472823 - DNA, 948 bp, Shigella flexneri
atgcaaaatcggctgaccatcaaagacatcgcgcgcttaagcggcgtggggaaatctacggtttcccgggtgctgaataacgaaagcggcgtgagtcagcgcacgcgcgagcgtgttgaagcagtgatgaatcagcatggattttccccttcccgctctgcgcgcgctatgcgtgggcaaagcgataaagtggtcgccatcattgttacccgtctggattcgttgtcagaaaatctcgccgttcaaaccatgctgccagcgttctatgaacaaggttacgatccaatcatgatggaaaatcagttttccccacaattagttgccgaacatttgggggtgctgaaacggcgtaatatcgacggcgtagtgctgttcggttttaccggcataaccgaagaaatgttagcccactggcagtcatcgctggttctgctggcgcgtgacgcaaaaggctttgcttcggtctgttatgacgacgaaggagcaatcaagattctgatgcaacggctctatgaccaggggcatcgcaatatcagttatctcggcgtgccgcatagtgacgtgacgaccgggaagcgacgtcacgaagcctacctggcgttctgcaaagcgcataaactgcatcccgttgccgctctgccagggcttgctatgaagcaaggctatgaaaacgtagcaaaagtgattacgcctgaaactaccgcgttactgtgcgcaaccgacacgctggctcttggcgcaagtaaatacctgcaagagcaacgcatcgacaccttgcaactggcgagcgtaggtaatacgccgttaatgaaattccttcatccggagatcgtcaccgtagatcctggctacgccgaagctggacgccaggcggcctgccaattgatcgcacaggtaaccgggcgcagcgaaccgcaacaaatcatcatccccgccaccctgtcctga

SEQ ID NO: 472824 - DNA, 1422 bp, Shigella flexneri
atgatgagcaaaataaaccaaacggatatcgatcggttgattgaactggtcggcgggcgcggcaatattgcgacggtgagccactgtattactcgcctgcgctttgtcctcaaccaaccggccaatgccagaccgaaagaaattgagcaactccccatggtgaaaggctgtttcaccaatgccgggcaatttcaggtggtgattggcaccaacgtgggtgattactatcaagcactaatagcgtcaaccggacaggcgcaggttgataaagagcaggtaaaaaaagccgcccggcaaaatatgaaatggcatgagcagttgatctctcatttcgcggagatcttcttcccgttgctgcccgcgttgattagcggcggtttgatcctcggttttcgcaatgtgatcggcgatttgcccatgagcaacggtcagacgctggcgcaaatgtacccttccctgcaaacgatctacgattttctgtggttgatcggtgaagcgattttcttctacctgccggtcgggatttgctggtcagcggtgaaaaaaatgggcggcacgccgatccttggtatcgtgcttggcgtgacactggtttccccccagctgatgaacgcttatctgctcgggcagcagctgccggaagtgtgggactttggcatgttcagcatcgccaaagtgggctatcaggcgcaggtgatcccggcactgttagccgggctggcgctgggcgttattgaaactcgccttaaacgcatcgtaccggattacctctatctggtggtggtgcccgtctgttcgctgatcctcgcggtgttcctcgcccatgcgctgattggtccgtttggtcgcatgattggcgatggcgttgcctttgcggtacgtcacctgatgaccggcagctttgctccgattggtgcggcattgtttggcttcctgtacgcgccgctggtgatcaccggcgtacaccagaccacccttgctattgatttgcagatgattcaaagcatgggtggcacgccagtgtggccgctgattgcgctgtcgaatatcgctcagggctccgccgtgataggcattatcatttccagccgcaagcacaatgaacgcgagatctccgtgcctgccgctatctccgcctggcttggggtcactgagcctgcaatgtacggcatcaacctgaaatatcgcttcccgatgctgtgcgcgatgattggttctggtctggcaggattgctatgcggcctgaacggcgttatggcgaatggtatcggcgtagggggcctgccgggaattctctctattcaaccgagctactggcaggtatttgcgctggcaatggctatcgccatcatcatcccgattgtactcacctcgtttatctatcagcggaaataccgcctgggcacgctggacattgtttaa

SEQ ID NO: 472825 - DNA, 1656 bp, Shigella flexneri
atgactaatcttccccactggtggcaaaacggcgttatctaccagatttatccaaagagttttcaggacaccacgggtagcggcaccggcgatttacgtggcgttatccaacgcctggactatctgcataaactgggcgttgatgccatctggctaacccccttttatgtctctccccaggtcgataacggttacgatgtagcgaactatacggcgattgatcccacctacggcacgctggacgattttgacgaactggtgacgcaggcaaaatcgcgcgggattcgtatcattctcgatatggtgtttaaccatacctctacccaacatgcctggtttcgcgaggcgctgaacaaagaaagcccttaccgccagttttatatctggcgcgatggcgaaccagaaacgccaccgaacaactggcgttcaaaatttggcggtagtgcgtggcgctggcatgcggaaagcgaacagtactatttgcatctctttgcaccagaacaggcggatctcaactgggagaatccagcggtacgcgcagagctgaaaaaagtctgtgaattctgggccgatcgtggggtcgacgggttgcgcctggatgtggtgaatctgatctccaaagacccgcgtttccctgaagacctggatggcgacgggcgtcgcttctacaccgacgggccacgagcacacgagtttttgcacgagatgaaccgcgatgtgtttacgccacgcgggttaatgaccgtaggtgaaatgtcctccaccagccttgagcattgccagcgatacgcggcactgacaggcagtgaattgtcgatgacctttaattttcatcacctgaaggtcgattatcccggtggtgaaaaatggacgctggctaaacctgactttgtggcgttgaaaacattgttccgccactggcaacaaggaatgcacaacgtggcatggaatgccttgttctggtgtaaccacgatcagccgcgcattgtttctcgctttggtgatgaaggtgaataccgcgtgcctgcggcaaaaatgctggcgatggtgctgcatggcatgcagggaacgccgtatatctaccagggcgaagagattggcatgaccaacccgcatttcacgcgcattactgactatcgcgacgtggagagcctcaatatgtttgccgagctgcgcaacgatggtcgtgatgccgacgagttattggcaatcctcgccagtaaatcccgtgacaacagccgcacgcccatgcaatggagcaacggcgataatgccgggtttacggctggcgaaccgtggattggcctaggcgataactatcaacaaatcaacgtagaagccgcgctggccgatgactcctctgtgttttacacctaccaaaagttaatcgcactgcgtaagcaagaagccatcctgacatggggcaattaccaggatctgctgccaaacagccctgtattgtggtgctatcgccgtgaatggaaggggcaaaccttgctggtcattgccaaccttagccgtgagatccaaccctggcagccagggcaaatgcgcggcaactggcagcttgtgatgcataactacgaagaagcctcaccacaaccctgtgccatgaatttacggccttttgaggctgtctggtggttacagaagtaa

SEQ ID NO: 472826 - DNA, 2139 bp, Shigella flexneri
atgacaccgcatgtgatgaaacgagacggctgcaaagtgccgtttaaatcagagcgcatcaaagaagcgattctgcgtgcagctaaagcagcggaagtcgatgatgccgattattgcgccactgttgccgcggttgtcaacgagcagatgcaggggcgcaaccaggtggatatcaacgagatccagaccgcagttgaaaaccagctgatgtcgggtccatacaaacaactggctcgtgcttacatcgagtaccgtcacgatcgcgacattgaacgtgaaaaacgcggtcgcctgaaccaggagatccgtggtctggtcgagcagaccaacgcctcgttactcaacgaaaacgccaacaaagacagcaaggtgattccaacccagcgcgacctgctggccgggatcgtggctaaacactatgcacgccagcacctgctgccgcgtgacgtggtgcaggcacatgagcgtggcgatattcactatcacgatctcgattactcgccgttcttcccgatgttcaactgcatgttgatcgacctgaaaggcatgctgacccagggttttaaaatggggaacgccgagattgaaccgccgaagtcgatctctacggcaaccgcggtaactgcgcagattattgctcaggtcgccagccatatttatggcggcaccaccattaaccgtatcgatgaagtgctggcgccgtttgttaccgccagctacaacaaacatcgcaagaccgcagaagagtggaacatcccggacgccgaaggctacgctaactctcgtaccatcaaagagtgctacgatgccttccagtcgctggagtacgaagtaaacaccctgcacaccgccaacggtcagacgccgtttgtaacctttggttttggtctgggcaccagctgggaatcgcgcctgattcaggaatcgatcctgcgtaaccgtatcgcaggcctcggtaaaaaccgtaaaactgcggtgttcccgaaactggtgtttgcgattcgcgatggcctgaaccataaaaaaggcgatccgaactacgacatcaaacagctggcgctggagtgcgcaagcaagcgcatgtatccggatatcctgaactacgatcaggtagtgaacgtcaccggttcgtttaaaaccccgatgggctgccgcagcttcctcggcgtgtgggaaaatgaaaacggcgagcagatccacgatggtcgtaacaacctcggcgtgatcagcctgaacctgccgcgtattgctctggaagcaaaaggcgatgaagccaccttctggaagctgctggatgaacgtctggtgctggcacgtaaggcactgatgacccgtatcgctcgtctcgaaggcgtgaaagcgcgcgtcgccccgatcctctatatggaaggtgcttgtggcgtacgtctgaatgctgacgatgatgtttctgaaatcttcaaaagcggtcgtgcgtctatttcgctgggttacatcggcatccacgaaaccattaacgcgctgttcagcggcgagcatgtttacgacaacgagaagcttcgcgcgaaaggtatcgccattgttgaacgtctgcgtcaggcagtggatcagtggaaagaagaaacgggttatggtttcagtctttacagcacgccgagtgaaaacctgtgcgaccgcttctgccgtctcgatactgctgagtttggcgtggtgccgggcgtgaccgataaaggttactacaccaacagtttccaccttgatgtggagaagaaggtgaacccgtacgacaagatcgactttgaagcgccttacccgccgctggcgaacggtggtttcatttgctacggcgagtatccaaacattcagcacaacctgaaagcgctggaagatgtctgggattacagctatcagcatgtaccgtattacggcaccaatacaccgattgatgagtgctacgagtgtggctttaccggtgagttcgagtgcaccagcaaaggcttcacttgcccgaaatgtggtaaccatgacgcctcccgtgtgtcggtaactcgccgcgtgtgcggatatttaggtagcccggatgcacgtccgtttaacgctggtaagcaggaagaagttaagcgccgcgttaaacatttggggaatgggcagataggttaa

SEQ ID NO: 472827 - DNA, 465 bp, Shigella flexneri
atgaattatcatcagtactatcctgtcgacatcgtcaacggccccggcactcgctgcaccctgtttgtctccgggtgtgttcatgaatgccccggttgctataacaaaagcacatggcgggtaaattctggtcagccatttaccaaagcaatggaagacaagatcattaaagatctgaatgacactcgtatcaaacgccaggggatttccctctccggcggcgatccgctgcatccgcaaaacgtgccggatattctgaaactggtaaaacgcatccgcgccgagtgtccgggtaaagacatctgggtgtggacaggctataaactcgacgaactcaacgctgcgcaaatgcaggttgttgatttgattaacgtgctggtcgacggcaaatttgtgcaggatttaaaagacccttccctgatctggcgcggcagcagcaatcaggtggtgcatcatttgcgatga

SEQ ID NO: 472828 - DNA, 387 bp, Shigella flexneri; identical to SEQ ID NO: 32545

SEQ ID NO: 472829 - DNA, 1353 bp, Shigella flexneri
atggcacttgcaatgaaagtaatctctcaagttgaagcgcagcgcaagattctggaagaagcagtttccactgcgctggagttggcctcaggcaaatcggacggtgcggaagttgccgtcagcaagaccaccggcattagcgtaagcacgcgttatggtgaagtggagaatgttgaattcaatagtgatggcgcgctggggatcactgtttatcaccagaaccgtaaaggtagcgcatcgtctaccgatttaagcccgcaggccattgcccgcaccgtacaggcggcgctggatattgcccgttatacctcgccagatccctgtgccggcgtggcagacaaagagctgctggcctttgacgcaccgaatctcgacttgttccaccctgcggaagtttccccggatgaagccattgaactggcggcccgcgcagaacaggcggcattgcaggcggacaaacgcatcaccaataccgaaggtggcagctttaacagccactacggtgtcaaagtttttggcaacagccacggcatgttgcagggttactgctcaacgcgtcattcgctctccagctgtgtaattgccgaagaaaatggcgatatggagcgtgattacgcctacaccattggccgcgcgatgagcgatctgcaaacgccagagtgggtcggggccgactgtgctcgccgtactttatcgcgcctgtcaccgcgtaaactctccaccatgaaagcgccggtcatttttgccaatgaagtggcaaccgggctttttggccatctggtgggggcgatagcgggtggctcggtttaccgtaaatctacctttctgctggattcgctgggtaaacaaattctgccggactggctgaccattgaagagcatccgcatctgctgaaagggctggcgtcgacgccattcgacagcgaaggtgtgcgcaccgagcgtcgcgatattattaaagatggcatcctgactcagtggctgctgaccagctactcggcgcggaaactggggctgaaaagcaccggacatgcgggcggtattcacaactggcggattgccggacaagggctaagcttcgaacaaatgctcaaagagatgggcaccgggctggtggtgacggagctgatgggccagggcgtgagtgccattaccggtgattattcccgtggtgcagcgggcttctgggtagagaatggcgaaattcagtatcccgttagtgaaatcaccatcgcaggtaatttaaaagatatgtggcgcaatattgtcaccgtcggtaacgatattgaaacacgcagtaatatacagtgtggttctgtgctgttgccggagatgaaaatcgccgggcagtaa

SEQ ID NO: 472830 - DNA, 552 bp, Shigella flexneri
atgactaagcagcccgaagactggctcgacgacgttcccggtgatgacatcgaagacgaagacgatgaaattatctgggtcagtaaaagtgaaattaaacgtgatgccgaggagctaaaacgccttggcgcggaaattgttgatctggggaaaaacgcgctggataagatcccgttagatgcggatctgcgcccggctattgagctcgcccagcgtattaagatggaaggtcgccgccgccagttgcagctcatcggtaagatgctgcgccagcgcgacgtagagcctattcgtcaggcgctggataagctgaaaaaccgtcacaaccagcaggtggtgctgttccataaactggaaaacctgcgcgatcgtctgatcgatcaaggtgatgacgccatcgctgaagtattgaatctgtggcccgatgccgatcgtcagcaactgcgtacactgatccgcaacgcgaagaaagagaaagaagggaataagccgccgaaatccgcacgccagattttccagtatctgcgcgaactggcggagaatgaagggtaa

SEQ ID NO: 472831 - DNA, 1374 bp, Shigella flexneri
atgcgcattcatattttaggaatttgtggcacatttatgggcggtctggcgatgctggcgcgccagttaggccatgaagtaacgggttcggacgccaatgtgtatccgccgatgagcaccttacttgagaagcaaggcattgagctgattcagggttacgatgccagccagctcgagccgcagccggatctggtgattattggcaacgccatgacccgtggaaatccgtgtgtggaagcggtactggaaaaaaacatcccttatatgtcaggtccacagtggctgcacgattttgtgctgcgcgaccgctgggtgctggccgttgccggtacacacggcaaaaccaccaccgcgggaatggcgacctggattctggaacagtgtggttacaaaccgggatttgtgatcggcggtgtgccggggaactttgaggtttcggcgcgtctgggcgaaagcgacttctttgttatcgaagcggatgagtacgactgcgccttcttcgacaaacgctctaaatttgtccattactgcccgcgtacgctgatcctcaacaaccttgagttcgatcacgccgatatctttgacgacctgaaagcgatccagaaacagttccaccatctggtgcgtatcgttccggggcagggccgtattatctggccggaaaatgacatcaacctgaaacagaccatggcgatgggctgctggagcgagcaggagctggtgggtgagcagggtcactggcaggcgaaaaagctgaccaccgatgcttccgaatgggaagttttgctggatggcgaaaaagtgggcgaagtgaaatggtcgctggtaggcgaacataatatgcacaatggcctgatggcgattgcagcggctcgccatgttggtgtagcgccggcagatgccgctaacgcgctgggttcgtttattaatgctcgtcgccgtctggagttgcgtggtgaagcgaatggcgtcacggtatatgacgattttgcccatcacccgacggcgattctggcaacgctggcggcgctgcgtggcaaagttggtggtacggcgcgcattattgctgtgctggaaccgcgctcgaataccatgaaaatggggatctgcaaagacgatctggcaccttcattaggtcgtgccgatgaagtcttcctgctgcaaccggcgcatattccgtggcaggtggcagaagtggcagaagcctgcgttcagcctgcacactggagtggcgatgtggatacgctggcagatatggtggtgaaaaccgctcagcctggcgaccatattctggtgatgagcaacggcggttttggtgggatccatcagaaactgctggatggtctggcgaagaaggcggaagctgcgcagtaa

SEQ ID NO: 472832 - DNA, 999 bp, Shigella flexneri
atgaaaacgttaggtgaatttattgtcgaaaagcagcacgagttttctcatgctaccggtgagctcactgctttgctgtcggcaataaaactgggcgccaagattatccatcgcgatatcaacaaagcaggactggttgatatcctgggtgccagcggtgctgagaacgtgcagggcgaggttcagcaaaaactcgacttgttcgctaatgaaaaactgaaagccgcactgaaagcacgcgatatcgttgcggggattgcctctgaagaagaagatgagattgtcgtctttgaaggctgtgaacacgcaaaatacgtggtgctgatggaccccctggatggctcgtccaacatcgatgttaacgtctctgtcggtaccattttctccatctaccgccgcgttacgcctgttggcacgccggtaacggaagaagatttcctccagcctggtaacaaacaggttgcggcaggttacgtggtatacggctcctctaccatgctggtttacaccaccggatgcggtgttcacgcctttacttacgatccttcgctgggcgttttctgcctgtgccaggaacggatgcgcttcccggagaaaggcaaaacctactccatcaacgaaggaaactacattaagtttccgaacggggtgaagaagtacattaaattctgccaggaagaagataaatccaccaatcgcccgtatacctcgcgttatatcggttcactggttgcggatttccaccgtaacctgctgaaaggcggtatttatctctacccaagcaccgccagccacccggacggcaaactgcgtttgctttatgagtgcaacccgatggcattcctggcggaacaagcgggcggtaaagcgagcgatggcaaagagcgtattctggatatcatcccggaaactctgcaccagcgccgttcgttctttgtcggcaacgaccatatggttgaagatgtcgaacgctttatccgtgagttcccggacgcgtaa

SEQ ID NO: 472833 - DNA, 2070 bp, Shigella flexneri
atgtctgagaaaacttttctggtggaaatcggcactgaagagctgccaccaaaagcactgcgcagcctggcagagtcctttgctgcgaactttactgcggagctggataacgcaggcctcgcacacggcaccgttcaatggtttgctgctccgcgtcgtctggcgctgaaagtagctaacctggcggaagcacaaccagatcgtgaaatcgaaaaacgcggcccggcgattgcccaggcgttcgacgctgaaggaaaaccgagcaaagcggcagaaggttgggcgcgtggttgtggtattatcgttgaccaggctgagcgtctgactaccgataaaggcgaatggctgctgtatcgcgcccatgtgaagggcgaaagcaccgaagcactgctgccgaatatggttgcgacttcgctggcgaaactgccgatcccgaaactgatgcgctggggtgcaagcgacgtgcacttcgtgcgtccggtgcacaccgtgaccctgctgctgggcgacaaagtcattccggcaaccattctgggcattcagtccgatcgcgtgattcgcggccaccgctttatgggcgaaccggaattcaccatcgacaacgccgatcagtatccggaaattctgcgtgagcgcgggaaagtcatcgccgattacgaagaacgtaaagcgaagattaaagccgatgccgaagaagcagcgcgtaagattggcggtaacgctgacttaagcgaaagcctgctggaagaagtggcttcgctggtggagtggccggtcgttctgaccgcaaaattcgaagagaaattcctcgcggtgccggctgaagccctggtttacaccatgaaaggtgaccagaagtacttcccggtgtatgcgaacgacggcaaactgctgccgaactttatcttcgttgccaacatcgaatcgaaagatccgcagcaaattatctctggtaacgagaaagtcgttcgtccacgtctggcggatgccgagttcttcttcaacaccgaccgcaaaaaacgtctggaagataacctgccgcgcctgcaaaccgtgctgttccagcaacagctgggtacgctgcgtgacaagactgaccgcatccaggcgctggctggctggatcgccgaacagattggcgctgacgttaaccacgcaacccgtgcgggcctgctgtctaagtgtgacctgatgaccaacatggtcttcgagttcaccgacacccaaggcgttatggggatgcactacgcgcgtcacgatggcgaagcggaagacgtagccgtcgcgctgaatgagcagtatcagccgcgctttgccggtgatgacctgccgtccaacccggtagcttgtgcgctggcgattgctgataagatggatactctggcgggtatcttcggtatcggtcagcatccgaaaggcgacaaagacccgtttgcgctgcgtcgtgccgcacttggcgtgctgcgaattatcgttgagaagaacctcaaccttgatctgcaaacgctgaccgaagaagcggtgcgtctgtatggcgataagctgactaatgccaacgtagttgatgatgttatcgactttatgctcggtcgcttccgcgcctggtatcaggacgaaggttataccgttgacaccatccaggcggtactggcgcgtcgtccgactcgtccggctgatttcgatgcccgcatgaaagcggtatcgcacttccgtaccctggaagcagctgcagcactggcggcggcgaacaaacgtgtatctaacatcctggcgaaatctgacgaagtgctgagcgatcgcgtgaatgcctctaccctgaaagagccggaagaaattaaactggcgatgcaggttgtggtgctacgtgacaagctggagccgtactttgcggaaggtcgttaccaggatgcgctggtcgaactggcagagctgcgtgagccggttgatgctttcttcgataaagtgatggtcatggttgatgacaaagaattgcgtctcaaccgtctgaccatgctggagaaactgcgcgaactgttcctgcgcgttgcggatatttcgctgttgcagtaa

SEQ ID NO: 472834 - DNA, 912 bp, Shigella flexneri
atgcaaaagtttgataccaggaccttccagggcttgatcctgaccttacaggattactgggctcgccagggctgcaccattgttcaaccattggacatggaagtcggcgcgggaacctctcacccaatgacctgtctgcgcgcgctggggccagaaccgatggcggctgcttatgttcagccttctcgtcgcccgaccgatggtcgctacggcgaaaaccccaaccgtttacagcactactatcagttccaggtggtcattaagccatcgccggacaatattcaggagctgtacctcggttctctgaaagagctgggcatggacccgactattcacgacatccgtttcgtggaagataactgggaaaacccgactctgggggcctggggactgggctgggaagtgtggctaaacggcatggaagtgacgcagttcacttacttccagcaggttggtggtctggagtgtaaaccggttaccggcgagatcacctacggtctggaacgtctggccatgtacattcagggcgtagacagcgtttacgacctagtctggagcgacggcccgctgggtaaaaccacctacggcgacgtgttccatcagaacgaagtggagcagtccacttacaacttcgaatacgcggatgtggacttcctgttcacctgctttgagcagtacgagaaagaagcgcagcagctgctggcgctggaaaatccgctgccgctgccagcctacgagcgtattctgaaagccgcccacagcttcaacctgctggatgcgcgtaaagccatctccgtcaccgagcgtcagcgctacattctgcgcattcgcaccctgaccaaagcagtggcagaagcatattacgcttcccgtgaagccctcggcttcccgatgtgcaacaaagataagtaa

SEQ ID NO: 472835 - DNA, 300 bp, Shigella flexneri; identical to SEQ ID NO: 461290

SEQ ID NO: 472836 - DNA, 996 bp, Shigella flexneri
atgcagcccaaaatttactggattgataacctgcgagggatagcgtgtttaatggtggtgatgattcacaccactacctggtatgtgaccaatgctcatagtgttagccccgtcacatgggatatcgccaatgttctgaattctgcctctcgtgtcagcgtgccgctatttttcatgatttccggctatctcttttttggcgaacgcagcgcccagccgcgccatttcttgcgtatcggcttatgtctgattttttatagcgcaatcgcactgctctacattgcgctgtttacctccatcaatatggagttagcgctgaaaaacctgctgcaaaagccagtgttttaccacttgtggtttttcttcgcgattgcggtgatttatctggtttcaccgctgattcaggtgaagaacgtcggcggaaaaatgttgctggtgctaatggtggtgattggcattatcgctaacccaaacacagtgccgcagaaaattgacggttttgaatggctgccaattaacttatatatcaatggcgatactttttactacattctgtatggcatgttgggccgcgctatagggatgatggacacacagcataaagcactgtcgtgggtgagcgccgcgctgtttgcgacgggggtttttattatctctcgcgggacattatatgaattgcagtggcgcggaaattttgccgatacctggtatctttactgtgggccgatggtttttatctgcgcaatcgcgctattgactctggttaaaaacacgctggatacgcgtaccattcgcggacttggcttaatctcccgccattcattgggtatatacggattccacgccttgattatccatgcgctgcgcacccggggaattgagcttaaaaattggccaatactggatattatttggatcttttgcgcgacgttggcagcgagtttgttactttctatgctggtacaacgaatcgacagaaacagattagtgagttaa

SEQ ID NO: 472837 - DNA, 438 bp, Shigella flexneri
atggacaacaaaatatcaacctattcaccggcctttagtattgtgtcatggatagctctcgttggtggtatcgttacctacctgttagggctatggaatgcagagatgcagttaaatgaaaaagggtattattttgccgtactggtgttaggactgttttctgctgcgtcttatcaaaagaccgttcgggacaagtatgaaggcataccgaccacttccatttattatatgacctgcctgactgtctttattatctctgttgctctactgatggtaggtctgtggaatgcgacattattactcagtgaaaaaggtttttatggactggctttcttcttaagcttgtttggtgcagtagcggtgcagaagaatattcgtgatgccggaataaacccgccaaaagaaacacaggttacccaggaagaatacagcgaataa

SEQ ID NO: 472838 - DNA, 342 bp, Shigella flexneri
atgaaaacctcaaaaactgtggcaaaactattatttgttgtcggggcgctggtttatctggttgggctatggatctcatgcccattgctaagtggaaaaggctattttcttggcgtgttaatgacagcaacttttggtaactatgcatatcttcgcgcagaaaaactcgggcaactggataatttttttacccatatctgccagttagttgcgttaatcactatcggtctcttgtttatcggtgttttaaatgcacctatcaatgcttatgaaatggtgatctaccccatcgccttttttgtctgcttgtttggtcaaatgcgtttgtttcgctcggtatga

SEQ ID NO: 472839 - DNA, 1455 bp, Shigella flexneri
atgtatatcgggatagatcttggcacctcgggcgtaaaagttattttgctcaacgagcagggtgaggtggttgcttcgcaaacggaaaagctgaccgtttcgcgcccgcatccactttggtcggaacaagacccggaacagtggtggcaggcaactgatcgcgcaatgaaagctctgggcgatcagcattctctgcaggacgttaaagcattgggtattgccggccagatgcatggagcaaccttactggatgctcaacaacgggtattgcgccctgccattttgtggaacgacgggcgctgtgcgcaagagtgcactttgctggaagcgagagttccgcaatcacgagtgattaccggcaacctgatgatgcccggatttactgcgcctaaattgctatgggttcagcggcatgagccggagatattccgtcaaatcgacaaagtattattaccgaaagattacttgcgtctgcgtatgacgggggagtttgccagcgatatgtctgacgcagctggcaccatgtggctggatgtcgcaaagcgtgactggagtgacgtcatgctgcaggcttgcgacttatctcgtgaccagatgcccgcattatacgaaggcagcgaaattactggtgctttgttacctgaagttgcgaaagcgtggggtatggcgacggtgccagttgtcgcaggcggtggcgacaatgcagctggtgcagttggtgtgggaatggttgatgctaatcaggcaatgttatcgctggggacgtcgggggtctattttgctgtcagcgaagggttcttaagcaagccagaaagcgctgtacacagcttttgccatgcgctaccgcagcgttggcatttaatgtctgtaatgctgagtgcagcatcgtgtctggattgggccgcgaaattaaccggcctgtgcaatgtcccagctttaatcgctgcagctcaacaggctgatgaaagtgccgagccagtttggtttctgccttatctttccggcgagcgtacaccacacaataatccccaggcgaagggggttttctttggtttgactcatcaacatggccccaatgaactggcgcgagcagtgctggaaggcgtgggttatgcgctggcagatggcatggatgtcgtgcatgcctgcggcattaaaccgcaaagtgttacgttgattggtggcggggcgcgtagtgagtactggcgtcagatgctggcggatatcagcggtcagcagctcgattaccgtacggggggggatgtggggccagcactgggcgcagcaaggctggcgcagattgcggcgaatccagagaaatcgctcattgagttgttgccgcagctaccgttagaacagtcgcatctaccagatgcgcagcgttatgccgcttatcagccacgacgtgaaacgttccgtcgcctctatcagcaacttctgccattaatggcgtaa

SEQ ID NO: 472840 - DNA, 639 bp, Shigella flexneri
ttgcttatcgaaccgaaaccgcaagaaccgactaaacatcaatatgattacgatgccgcgacggtctatggcttcctgaaacagtttggtctggaaaaagagattaaactgaacattgaagctaaccacgcgacgctggcaggtcactctttccatcatgaaatagccaccgccattgcgcttggcctgttcggttctgtcgacgccaaccgtggcgatgcgcaactgggctgggacaccgaccagttcccgaacagtgtggaagagaatgcgctggtgatgtatgaaattctcaaagcaggcggtttcaccaccggtggtctgaacttcgatgccaaagtacgtcgtcaaagtactgataaatatgatctgttttacggtcatatcggcgcgatggatacgatggcactggcgctgaaaattgcagcgcgcatgattgaagatggcgagctggataaacgcatcgcgcagcgttattccggctggaatagcgaattgggccagcaaatcctgaaaggccaaatgtcactggcagatttagccaaatatgctcaggaacataatttgtctccggtgcatcagagtggtcgccaggagcaactggaaaatctggtaaatcattatctgttcgacaaataa

SEQ ID NO: 472841 - DNA, 678 bp, Shigella flexneri
atgcaagcctattttgaccagctcgatcgcgttcgttatgaaggctcaaaatcctcaaacccgttagcattccgtcactacaatcccgacgaactggtgttgggtaagcgtatggaagagcacttgcgttttgccgcctgctactggcacaccttctgctggaacggggcggacatgtttggtgtgggggcgtttaatcgtccgtggcagcagcctggtgaggcactggcgttggcgaagcgtaaagcagatgtcgcatttgagtttttccacaagttacatgtgccattttattgcttccacgatgtggatgtttcccctgagggcgcgtcgttaaaagagtacatcaataattttgcgcaaatggttgatgtcctggcagccaagcaagaagagagcggcgtgaagctgctgtggggaaccgctaactgctttacaaaccctcgctatggcgcgggtgcggcgacgaacccagatcctgaagtcttcagctgggcggcaacgcaagttgttacagcgatggaagcaacccataaattgggcggtgaaaactatgtcctgtggggtggtcgtgaaggttacgaaacgctgttaaataccgacttgcgtcaggagcgtgaacaactgggccgctttatgcagatggtggttgagcataaacataaaatcggcttctag

SEQ ID NO: 472842 - DNA, 564 bp, Shigella flexneri
atgaaaataaagaacattctactcaccctttgcacctcacttctgcttaccaacgttgcggcacacgccaaagaagtcaaaataggtatggcgattgatgatctccgtcttgaacgctggcaaaaagatcgagatatttttgtgaaaaaggcagaatctctcggtgcgaaagtatttgtacagtctgcaaatggcaatgaagaaacacaaatgtcgcagattgaaaacatgattaaccggggtgtcgatgttcttgtcattattccgtataacggtcaggtattaagtaacgttgtaaaaaaagccaaacaagaaggtattaaagtattagcttacgaccgtatgattaacgatgcggatatcgatttttatatttctttcgataacgaaaaagtcggtgaactgcaggcaaaagccttggtcgatattgttccgcaaggtaattacttcctgatgggcggctcgccggtagataacaacgccaagctgttccgcgccggacaaatgaaagtgttaaaaccttacgttgattctggaaaaattaaagtcgttggtgaccaatga

SEQ ID NO: 472843 - DNA, 393 bp, Shigella flexneri
atggaaaacgcgctaaccgccaataataacaaaattgatgctgtagttgcctcaaacgatgccaccgcaggtggggcaattcaggcattaagcgcgcaaggtttatcagggaaagtagcaatttccggccaggatgcggatctcgcaggtattaaacgtattgctgccggtacgcaaactatgacggtgtataaacctattacattgctggcaaatactgccgcagaaattgccgttgaattgggcaatggtcaggagccaaaagcagatacctcactgaataatggcctgaaagatgtcccctcccgcctcctgacaccgatcgatgtgaataaaaacaacatcaaagatacggtaattaaagacggattccacaaagagagcgagctgtaa

SEQ ID NO: 472844 - DNA, 1542 bp, Shigella flexneri
atgccttatctacttgaaatgaagaacattaccaaaaccttcggcagtgtgaaggcgattgataacgtcagcttgcggttgaatgctggcgaaatcgtctcactctgtggggaaaatgggtctggtaaatcaacgctgatgaaagtgctgtgtggtatttatccccatggctcctacgaaggcgaaattatttttgcgggagaagagattcaggcgagtcacatccgcgataccgaacgcaaaggtatcgccatcattcaccaggaattggccctggtgaaagaattgaccgtgctggaaaatatcttcctgggtaacgaaataacccacaatggcattatggattatgacctgatgacgctacgctatcagaagctgctcgcacaggtcagtttatccatttcacctgatacccgcgttggcgatttagggcttgggcaacaacaactggttgaaattgccaaggcacttaataaacaggtgcgcttgttaattctcgatgaaccgacagcctcattaactgagcaggaaacgtcggttttactggatattattcgcgatctacaacagcacggtatcgcctgtatttatatttcgcacaaactcaacgaagtcaaagcgatttccgatacgatttgcgttattcgcgacggacagcacattggtacgcgtgatgctgccggaatgagtgaagacgatattatcaccatgatggtcgggcgagagttaaccgcgatttaccctaatgaaccacataccaccggagatgaaatattacgtattgaacatctgacggcatggcatccggtcaatcgtcatattaaacgagttaatgatgtctcgttttccctgaaacgtggcgaaatactgggtattgccggactcgttggtgccggacgtaccgagaccattcagtgcctgtttggcgtgtggcccggacaatgggaaggaaaaatttatattgatggcaaacaggtagatattcgtaactgtcagcaagccatcgcccaggggattgcgatggtacccgaagacagaaagcgcgacggcatcgttccggtaatggcggttggtaaaaatattaccctcgccgcactcaataaatttaccggtggcattagccagcttgatgacgcggcagagcaaaaatgtattctggaatcaattcagcaactcaaagttaaaacgtcgtcccccgaccttgctattggacgtttgagcggcggcaatcagcaaaaagcgatcctcgcccgctgtctgttacttaacccgcgcatcctcattcttgatgaacctaccaggggtattgatattggcgcgaaatatgagatctacaaattaattaaccaactcgtccagcagggtattgccgttattgtcatctcttccgaattacctgaagtgctcggccttagcgatcgtgtactggtgatgcatgaagggaaactaaaagccaacctgataaatcataacctgactcaggagcaggtgatggaagccgcattgaggagcgaacatcatgtcgaaaagcaatccgtctga

SEQ ID NO: 472845 - DNA, 1182 bp, Shigella flexneri
atgtcgaaaagcaatccgtctgaagtgaaattggccgtaccgacatccggtggcttttctgggctgaaatcactgaatttgcaggtcttcgtgatgattgcagctatcatcgcaatcatgctgttctttacctggaccaccgatggtgcctacttaagcacccgtaacgtctccaacctgttacgccagaccgcgattaccggcatcctcgcggtaggaatggtgttcgtcataatttctgctgaaatcgacctttccgtcggctcaatgatggggctattaggtggcgtcgcggcgatttgtgacgtctggttaggctggcctttgccacttaccatcattgtgacgttggttctgggactgcttctcggtgcctggaacggatggtgggtcgcgtaccgcaaagtcccttcatttattgtcaccctcgcgggcatgttggcatttcgcggcatactcattggcatcaccaacggcacgactgtatcccccaccagcgccgcgatgtcacaaattgggcaaagctatctccccgccagtaccggcttcatcattggcgcgcttggcttaatggcttttgttggttggcaatggcgcggaagaatgcgccgtcaggctttgggtttacagtctccggcctctaccgcagtagtcggtcgccaagctttaaccgctatcatcgtattaggcgcaatctggctgttgaatgattaccgtggcgttcccactcctgttctgctgctgacgttgctgttactcggcggaatgtttatggcaacgcggacggcatttggacgacgcatttatgccatcggcggcaatctggaagcagcacgtctctccgggattaacgttgaacgcaccaaacttgccgtgttcgcgattaacggattaatggtagccatcgccggattaatccttagttctcgacttggcgctggttcaccttctgcgggaaatatcgccgaactggacgcaattgcagcatgcgtgattggcggcaccagcctggctggcggtgtgggaagcgttgccggagcagtaatgggggcatttatcatggcttcactggataacggcatgagtatgatggatgtaccgaccttctggcagtatatcgttaaaggtgcgattctgttgctggcagtatggatggactccgcaaccaaacgccgttcttga

SEQ ID NO: 472846 - DNA, 531 bp, Shigella flexneri
atgtttactaaacgtcaccgcatcacattactgttcaatgccaataaagcctatgaccggcaggtagtagaaggcgtaggggaatatttacaggcatcacaatcagaatgggatattttcattgaagaagatttccgcgcccgcattgataaaatcaaggactggttaggagatgtcgtcattgccgacttcgacgacaaacagatcgagcaagcgctggctgatgtcgacgtccccattgttggggttggcggctcgtatcaccttgcagaaagttacccacccgttcattacattgccaccgataactatgcgctggttgaaagcgcatttttgcatttaaaagagaaaggcgttaaccgctttgctttttatggtcttccggaatcaagcggcaaacgttgggccactgaacgcgaatatgcatttcgtcagcttgtcgccgaagaaaagtatcgcggagtggtttatcaggggttagaaaccgcgccagagaactggcaacacgcgcaaaatcggctggcagactga

SEQ ID NO: 472847 - DNA, 537 bp, Shigella flexneri
gtgattggcatcgataacgaagaactgacccgctatctgtcgcgtatcgccctttcttcggtcgctcagggcgcgcggcaaatgggctatcaggcggcaaaactgttgcatcgattattagataaagaagaaatgccgctacagcgaattttggtcccaccagttcgcgtcattgaacggcgctcaacagattatcgctcgctgaccgatcccgacgttattcaggccatgcattacattcgtaatcacgcctgtaaagggattaaagtggatcaggtactggatgcggtcgggatctcgcgctccaatcttgagaagcgttttaaagaagaggtgggtgaaaccatccatgcaatgattcatgccgagaagctggagaaagcgcgcagtctgctgatttcaaccaccttgtcgatcaatgagatatcgcaaatgtgcggttatccatcgctgcaatatttctactctgtttttaaaaaagcatatgacacaacgccaaaagagtatcgcgatgtaaatagcgaggtcatgttgtag

SEQ ID NO: 472848 - DNA, 825 bp, Shigella flexneri
atgattttgactcccatacgacgatatggggcgatgattcttatgttactcactctggtgttttcgagtgaggtgttagcgaagacgcacacaacaacagcgagtcaaaagtcccacttaactaaagctagtaataaacaggtaagcagtaaacaagagtattctcgcaatagtgcaaagagtagttcacttcctgatttgcgaaaatacccttccggaacaccaaggaaaaaggcgtttctccggaccgtaatgccttacattaccagccaaaatgcagccattactgcagaacgtaactggctgatttcaaaacagtatcagggccaatggtcacctgctgagcgtgcgcgtctgaaagacatcgccaaacgctacaaggtgaagtggtctggtaatacgcgaaaaatcccgtggaataccttgcttgaacgcgtagacattatccctaccagtatggtggcgacgatggctgcagcagaaagcggttggggaacgtcgaagctggcgcgcaacaataacaatctgttcggcatgaaatgcatgaaaggacgttgtaccaatgcgccgggtaaagtgaaagggtactcacagtttagttctgtcaaagaatcggtgagcgcctatgtcactaacctgaatacgcacccggcttactcttcgttccgtaaatcgcgtgcacagctgcgtaaagcggatcaggaagtgactgccacagcgatgattcacaagctgaagggctactcgaccaaagggaagagttataacaactacctgttcgcaatgtaccaggataaccaacggttaatcgcggcgcatatgtaa

SEQ ID NO: 472849 - DNA, 2031 bp, Shigella flexneri
atgaaactcgccgcctgttttctgacactccttcctggcttcgccgttgccgccagctggacttctccggggttccctgcctttagcgaacagggaacgggaacatttgtcagccacgcgcagttgcccaaaggtacgcgtccactcacgctaaattttgaccaacagtgctggcagcctgcagatgcgataaaactcaatcagatgctttccctgcaaccttgtagcaacacgccgcctcaatggcgattgttcagggacggcaaatatacgctgcaaatagacacccgctccggtacgccaacattgatgatttccatccagaacgccgccgaaccggtagcaaacctggtccgtgaatgcccgaaatgggatggattaccgctcacgctggatgtcagcgccactttcccggaaggagccgccgtacgggattattacagccaacaaattgcgatagtgaagaacggtcaaataacgttacaacccgctgctaccagcaacggtttactcctgctggaacgggcagaaactgacacatccgcccctttcgactggcataacgccacggtttactttgtgctgacagatcgtttcgaaaacggcgatcccagtaatgaccagagttacggacgtcataaagacggtatggcggaaattggcacttttcacggcggcgatttacgcggcctgaccaacaaactggattacctccagcagttgggcgttaatgctttatggataagcgccccatttgagcaaattcacggctgggtcggcggcggtacaaaaggcgatttcccgcattatgcctaccacggttattacacacaggactggacgaatcttgatgccaatatgggcaacgaagccgatctacggacgctggttgatagcgcacatcagcgcggtattcgtattctctttgatgtcgtgatgaaccacaccagctatgccacgctggcggatatgcaggagtatcagtttggcgcgttatatctttctggtgacgaagtgaaaaaaacgctgggtgaacgctggagcgactggaaacctgccgccgggcaaacctggcatagctttaacgattacattaatttcagcgacaaaacaggctgggataaatggtggggaaaaaactggatcagaacggatatcggcgattacgacaatcctggattcgacgatctcactatgtcgctggcctttttgccggatatcaaaaccgaatcaactaccgcttctggtctgccggtgttctataaaaacaaaacggatactcacgctaaagtcatcgaaggctttacgcctcgcgattacttaacccactggttaagtcagtgggtccgcgactatgggattgatggttttcgggtcgataccgccaaacatgttgagttgcccgcctggcagcaactgaaaaccgaagccagctccgcgcttcgcgaatggaaaaaaactaaccccgacaaagcattagatgacaaacctttctggatgaccggtgaagcctggggccacggcgtgatgcaaagtgactactatcgccacggcttcgatgcgatgatcaatttcgattatcaggagcaggcggcgaaagcagtcgattgtctggcgcagatggatacgacctggcagcaaatggcggagaaattgcagggtttcaacgtgttgagctacctctcgtcgcatgatacccgtctgttccgtgaagggggcgacaaagcagcagagttattactattagcgccaggcgcggtacaaatcttttatggcgatgaatcctcgcgtccgttcggtcctacaggttctgatccgctgcaaggtacacgttcggatatgaactggcaggatgttagcggtaaatctgccgccaacgtcgcgcactggcagaaaatcagccagttccgcgcccgccatcccgcaattggcgcgggcaaacaaacgacactttcgctgaagcagggctacggctttgttcgtgagcatggcgacgataaagtgctggtcatctgggctgggcaacagtga

SEQ ID NO: 472850 - DNA, 1254 bp, Shigella flexneri
atgacattctccctttttggtgacaaatttacccgccactccggcattacgctgctgatggaagatctgaacgacggtttacgcacgcctggcgcgattatgctcggcggcggtaatccggcgcagatcccggaaatgcaggactacttccagacgctactgaccgacatgctggaaagtggcaaagcgactgatgcactgtgtaactacgacggtccacaggggaaaacggagctactcacactgcttgccggaatgctgcgcgagaagttgggttgggatatcgaaccacagaatattgcactaacaaacggcagccagagcgcgtttttctacttatttaacctgtttgccggacgccgtgccgatggtcgggtcaaaaaagtgctgttcccgctggcaccggaatacattggctacgctgacgccggactggaagaagatctgtttgtctctgcgcgtccgaatattgaactgctgccggaaggccagtttaaataccacgtcgattttgagcatctgcatattggcgaagaaaccgggatgatttgcgtctcccggccgacgaatccaacaggcaatgtgattactgacgaagagttgctgaagcttgacgcgctggcgaatcaacacggcattccgctggtgattgataacgcttatggcgtcccgttcccgggtatcatcttcagtgaagggcgcccgctatggaatccgaatatcgtactgtgcatgagtctttccaagctggggctgcctggctcccgctgcggcattatcatcgccaatgaaaaaatcatcactgccatcaccaatatgaacggcattatcagcctggcacctggcggtattggtccggcgatgatgtgtgaaatgattaagcgtaacgatctgctgcgcctgtctgaaacagtcatcaaaccgttttactaccagcgtgttcaggaaactatcgccatcattcgccgctatttaccggaaaatcgctgcctgattcataaaccggaaggagccattttcctctggctatggtttaaggatttgcccattacgaccgagcagctctatcagcgcctgaaagcacgcggcgtgctgatggtgccggggcacaacttcttcccgggactggataaaccgtggccgcatacgcatcaatgtatgcgcatgaactacgtaccagagccggagaaaattgaggcgggggtgaagattctggcggaagagatagaaagagcctgggctgaaagtcactaa

SEQ ID NO: 472851 - DNA, 474 bp, Shigella flexneri
atgaaccggtttattattgcggatgcgacgaaatgtatcggttgccgtacctgtgaagtggcttgcgcagtgtcgcatcaggagaatcaggattgcgctgcgttgtcaccagacgagtttatttcccgtattcgtgtcattaaagaccacagctggaccacgccagtagcctgtcatcagtgtgaagatgcaccgtgcgcgaatgtctgccctgttgacgcgataagccgcgaacatgggcatattttcgttgaacaaacacgttgcattggctgtaaaagctgtatgctggcttgcccgtttggtgcgatggaggtcgtttcttcgcgcaaaaaggcgagggcgattaagtgcgatctgtgctggcatcgggagacggggccggcctgtgttgaagcctgcccgacaaaggcgttgcagtgcatggatgtcgagaaagtgcagcggcatcggctacagcagcagcctgtttga

SEQ ID NO: 472852 - DNA, 849 bp, Shigella flexneri
atggggaaagaagtgatgggaaaaaaagagaacgagatggcgcaggaaaaagagcgtccagccggaagccagagtctgtttcgcgggttgatgctgattgagattttgagcaactatccaaacggttgtccgttggcgcatctttcggagctggctggtttaaataagagtaccgtccatcgcttattgcagggattacagtcctgcggctatgtgaccaccgcgcccgccgcagggagttaccgcctgactaccaaatttattgccgtcgggcagaaggcgctgtcttcgctgaatatcattcatatcgccgctccgcatcttgaggcactgaacatcgccactggtgaaaccattaacttctccagccgcgaagacgatcacgctattttgatttataagctggaacccacaaccgggatgctgcgaacccgtgcctatattggccagcatatgccgctctactgttccgcaatgggcaagatctacatggcgtttggtcacccggactacgtgaagtcatactgggaaaaccatcagcatgagatccagccgttaacccgcaataccattaccgagctgcccgcgatgttcgacgaactggcgcacattcgtgaaagcggagcggcgatggacagagaagaaaacgaactcggcgtctcctgtattgctgttccggtgtttgatattcatgggcgggtgccgtacgccgtgtcgatttcgctttcgacatcacgtctgaaacaggtgggagagaaaaatctcctgaaaccactgcgtgaaaccgcgcaggctatttctaatgaactgggatttactgtcagggatgacctgggcgcgatcacataa

SEQ ID NO: 472853 - DNA, 993 bp, Shigella flexneri
atgaaagtgacatttgagcagttaaaagcagcctttaatcgggtcttaatttcacgcggcgttgacagcgaaacggctgacgcctgtgcagagatgttcgcccgcaccaccgaatccggcgtttattctcacggcgttaatcgtttccctcgtttcattcaacaactggaaaacggcgatatcattcctgatgcccaacccaaacgtataaccagcctcggcgcaattgaacagtgggatgcccagcgttcgatcggcaacctgacggcgaaaaagatgatggatcgcgccattgaactggctgccgatcacggtattggtctggtggcacttcgtaatgccaaccactggatgcgcggcggcagctacggctggcaggcggcggaaaaaggctatattggcatttgctggaccaactccatcgccgtaatgccgccgtggggcgcaaaagagtgtcgcatcggcactaacccgctgatcgtcgccattccttccacgccgatcaccatggtcgatatgtcgatgttctcttacggcatgttagaagttaaccgcctggcaggccgtcagctcccggtcgatggtggctttgatgatgagggcaatttgaccaaagaacctggcgttatcgagaagaatcgccgcattttgccgatgggctactggaaaggttctggcatgtcgattgtgctggatatgatcgctactctcctttccgacggcgcatcggttgccgaagtcacccaggacaacagcgacgaatacggcatttcacaaatttttattgccattgaagtggacaagcttatcgacggtcccacccgcgatgccaagctgcaacgtatcatggattacgttactaccgctgaacgcgctgacgaaaaccaggccatccgcttacccggccacgaatttactaccctgctggccgaaaaccgccgtaacggcatcactgttgatgacagcgtgtgggccaaaatccaggcgttatga

SEQ ID NO: 472854 - DNA, 153 bp, Shigella flexneri
atgatttttggacatatcgcgcagcccaatccgtgccgtttgcccgccgccattgaaaaggcgctcgattttctgcgcgctaccaacttcaacgtcctggagccgggcgttgtcgaaatcgacggcaagaatatttatgcgcaaattaggtaa

SEQ ID NO: 472855 - DNA, 1272 bp, Shigella flexneri
atgcagcacaacacactatcgaaacacaatcagaaattgccgtttacacgctacgacttcggctgggttttattatgcataggcatggcgattggtgccggaaccgtgctgatgccagtacaaattggcttgaagggaatttgggtatttattaccgcagcgatcattgcttatcctgtcacctgggtagtgcaggacatttatttaaaaaccctttctgaaagcgattcctgtaatgactacaccgatattatcagtcattacctggggaagaactggggaattttcctcggggttatctactttttgatgattatccacgggatttttatctactctctctccgtggttttcgacagcgcctcgtacctgaaaaccttcggtttaaccgatgccgatctttcacaatctctactttataaagtcgctattttcgccgtactgatagcgattgcgtctggtggtgaacgattactgtttaagatttctgggccaatggtggtggtcaaagtagggattattgtcgtgttcggttttgcgatgatcccgcactggaatttcgccaatataaccgccttcccgcaagcctccgtctttttccgcgatgtcctgcttaccattccattttgcttcttttctgcggtatttattcaggtacttaacccaatgaatattgcctatcgtaaacgggaagcagataaagtactggcaacccggctcgcgctgcgtacccaccgaattagttatatcacgctcatcgcggtgatcctgttttttgccttttcgtttaccttctcaattagccacgaagaagccgtttctgcctttgaacaaaatatctcggcactggcactggccgcgcaggtgatccctggacatatcattcatatcacctctacggtgctgaatatctttgccgtactgaccgcattctttggcatttatctcggtttccacgaggctattaaaggcattattctcaatctgttaagccgaattattgataccaagaaaattaactcacgcatgctgactctggcgatctgcgcttttatcgtcattacgttgacgatttgggtttcgtttcgtgtatcagtgctggtgttctttcagttgggaagcccgttatatggcattgtgtcgtgcctcattccgtttttcctgatctataaagtcgcacaactggaaaaacttcgcggatttaaagcctggctgattctgctttacggcattttgctatgcttgtcgccactgttgaagctgattgagtaa

SEQ ID NO: 472856 - DNA, 1005 bp, Shigella flexneri
atgagtacgcaagaggccacctcgcaacaaccgctgttgcaggctatcgacctgaaaaaacattatccggtgaagaaaggcatgttcgtgccggaacgtctggtgaaggcgctggacggcgtttcgtttaaccttgaacgtggcaaaacgctggcagtagtgggcgaatctggctgcggtaaatcgaccctcggtcggttgctgacgatgatcgaaacgcccaccggcggcgagctgtattatcaggggcaggatctgctcaagcacgatccgcaggcgcagaagctgcgtcggcagaaaatccagatcgtcttccagaatccctacggttcgctgaatccgcgtaagaaagttgggcaaattctcgaagagccgctgcttattaacaccagcttaagcaaagaacagcgtcgggaaaaagccctgtcgatgatggcaaaagtcggcctgaaaaccgagcactatgaccgctatccgcacatgttttccggcggacaacgtcagcgtatcgctattgcccgtggtctgatgctcgacccggatgtggtgattgccgatgagccggtttctgcgctggacgtctcagtgcgtgcgcaggtgctgaatctgatgatggatttgcagcaggagttggggctttcttatgtctttatctcccacgacctgtcggttgtggagcacattgctgatgaagtgatggtgatgtacctaggccgctgcgtggagaaaggaacgaaggaccaaatcttcaataacccgcgccatccgtacacccaggcgctgctctccgcgacgccacgcctgaacccggacgatcgtcgtgaacgcatcaaactcaccggtgaactgccaagcccgctgaatcctccgccgggttgcgccttcaacgcccgctgtcgtcggcgcttcggcccctgcacccagttgcagccgcagctaaaagactacggaggtcaactggtagcttgttttgctgttgatcaggatgaaaatccgcagcgttaa

SEQ ID NO: 472857 - DNA, 984 bp, Shigella flexneri
atggcgttattaaatgtagataaattatcggtgcatttcggcgacgaaagcgcaccgttccgcgccgtagaccgcatcagctacagcgtaaaacagggcgaagtggtcgggattgtgggtgagtccggctccggtaagtcggtcagttcactggcgattatggggctgattgattatccgggccgcgtaatggcagaaaaactggagtttaacggccaggatttgcagcgtatctcagaaaaagagcgccgcaacctggtgggtgccgaagtggcgatgatcttccaggacccgatgaccagccttaacccgtgctacaccgtgggtttccagattatggaagcgattaaagtgcatcagggcggcaacaaaagtacccgccgtcagcgggcgattgacctgctgaatcaggtcggtattcccgatccggcttcgcgtctggatgtttacccgcatcagctttccggcggcatgagccagcgcgtgatgatcgccatggcgattgcctgtcggccaaaactgctgattgccgatgaaccgaccaccgcgctggacgtgaccattcaggcgcaaatcatcgaactactgctggagctacagcagaaagagaacatggcgctggtgttaattacccatgacctggcgctggtggcggaagctgcgcataaaatcattgtgatgtatgcaggtcaggtagtagaaacgggcgatgcacacgccatcttccatgcgccgcgtcacccgtatactcaggcattgctgcgtgcgctgccagaatttgctcaggacaaagaacgtctggcgtcgttgccaggtgttgttcccggcaagtatgaccgcccgaacggctgcctgcttaacccgcgctgcccctatgccactgacagatgtcgcgctgaagaaccggcgctgaatatgctcgctgatgggcgtcagtccaaatgccattacccacttgatgatgccgggaggcccacactatga

SEQ ID NO: 472858 - DNA, 903 bp, Shigella flexneri
atgtcacaggttactgaaaataaagtgattagcgcaccggtgccgatgaccccgttacaggagttctggcactattttaaacgcaacaaaggcgcggtcgtcgggctggtttacgtcgccatcgtgctgttcatcgcgatctttgccaactggattgcgccttataacccggcggatcagttccgcgatgcgctgctcgccccgccagcctggcaggaaggcggcagtatggcacacttgctgggcaccgatgacgtcggtcgtgatgtgctgtcgcggctgatgtacggcgcgcgtttatcgctgctggttggctgtctggtggtggtgttgtcgctgattatgggcgttattctcggcctgatcgccggttacttcggcggcctggttgataacattatcatgcgcgtggtcgatatcatgctggcgctgccaagtctgctgttggcactggtgctggtggcgattttcggcccgtcgattggtaacgccgcgctggcgctgaccttcgttgccttgccgcactatgtgcgcttaacccgcgccgccgtgctggtggaggtgaatcgcgattacgtcaccgcctctcgcgtggcaggtgccggggcgatgcgccagatgtttattaacatcttcccgaactgccttgcgccgctgattgttcaggcgtcgctcggtttctctaacgccattctcgatatggctgctcttggtttcctcggcatgggggcacagccgccaacgcctgagtggggcaccatgctctccgacgtgttgcagttcgcgcaaagcgcctggtgggtcgtgaccttccctggtctggcgatcctgttgacggtgctggcatttaacctgatgggtgacggtctgcgtgacgcgctcgatcccaaactaaagcagtaa

SEQ ID NO: 472859 - DNA, 1020 bp, Shigella flexneri
atgttgcagtttattctccgacgtttgggactcgtcatccccacgtttatcggtattacccttctcacatttgcctttgtccacatgatcccgggcgatccggtgatgatcatggcaggcgaacgtgggatctcccctgagcgtcacgtgcagctgctggctgaactcggcttagataaaccgatgtggcagcagtatctccattacatttggggcgtaatgcacggcgatctaggcatttcaatgaaaagccgaattccagtatgggaagagttcgtgccgcgctttcaggccacgctggaacttggcgtctgcgcgatgatttttgctacggcagtcggtattccggttggtgtgctggctgcggttaaacgcggttccattttcgatcacactgcagttggcctggcgctgaccggctactcgatgccgatcttctggtggggcatgatgctgatcatgctggtttcggtgcactggaacctgacgcccgtctccggtcgcgtgagcgatatggtgttcctcgatgactccaatccgttaaccggttttatgctaatcgacaccgccatctggggtgaagacggcaactttatcgatgccgtcgcccatatgatcttgcccgccattgtgctgggtactattccgctagcggtcattgtgcgtatgacacgctcctcgatgctggaagtgctgggcgaggattacatccgcaccgcgcgcgccaaagggctaacccgcatgcgggtgattatcgtccatgcgctgcgtaacgcgatgctgccggtagtgaccgttatcggcctccaggtgggaacattgctggcgggggcgattctgaccgaaaccatcttctcgtggcccggtctggggcgctggttgattgacgcactgcaacgccgcgactatccggtagtgcagggcggcgtattgctggtggcgacgatgattatcctcgtcaacttgctggtcgatctgctgtacggcgtggtgaacccgcgtattcgtcataagaagtaa

SEQ ID NO: 472860 - DNA, 1608 bp, Shigella flexneri
atgcgtatttccttgaaaaagtcagggatgctgaagcttggtctcagcctggtggctatgaccgtcgcagcaagtgttcaggctaaaactctggtttattgctcagaaggatctccggaagggtttaacccgcagctgtttacctccggcaccacctatgacgcctcttccgtcccgctttataaccgcctggttgaatttaaaatcggcaccaccgaagtgatcccgggcctcgctgaaaagtgggaagtcagcgaagacggtaaaacctataccttccatctgcgtaaaggtgtgaagtggcacgacaataaagaattcaaaccgacgcgcgaaatgaacgccgatgacgtggtgttctcgttcgatcgtcagaaaaacgcgcaaaacccgtaccataaagtttctggcggcagctacgaatacttcgaaggtatgggcttgccggagctgatcagcgaagtgaaaaaggtggacgataacaccgttcagtttgtgctgactcgaccggaagcgccgttcctcgctgacctggcaatggacttcgcctctattctgtcaaaagaatatgctgacgcgatgatgaaagccggtacaccggaaaaactggacctcaacccaatcggaaccggtccgttccagttacagcagtaccaaaaagattcccgtatccgctacaaagcgtttgatggctactggggcaccaaaccgcagatcgatacgctggtcttctctattacccctgatgcttccgtgcgttacgcgaaattgcagaagaatgaatgccaggtgatgccgtacccgaacccggcagacatcgctcgcatgaagcaggataaatccatcaacctgatggaaatgccggggctgaacgtcggctacctctcgtataacgtgcagaaaaaaccgctggatgacgtgaaagttcgccaagcactaacctacgcggtgaacaaagacgcgatcatcaaagcggtttatcagggcgcgggtgtatcagcgaaaaacctgatcccgccaaccatgtggggctataacgacgacgttcaggattacacctacgatcctgaaaaagcgaaagccttgctgaaagaagcgggtctggaaaaaggtttctccatcgacctgtgggcgatgccggtacaacgtccgtataacccgaacgctcgccgcatggcggagatgattcaggcagactgggcgaaagtgggcgtgcaggccaaaatcgtcacctacgaatggggtgagtacctcaagcgtgcgaaagatggcgaacatcagacggtaatgatgggctggactggcgataacggggacccggataacttcttcgccaccctgttcagctgcgccgcctctgaacaaggttctaactactcaaaatggtgctacaaaccgtttgaagatctgattcaaccggcgcgtgctaccgacgaccataacaaacgcgttgaactgtacaagcaagcgcaggtggtgatgcacgatcaggctccggcactgatcatcgctcactccaccgtgtttgaaccggtacgcaaagaagtcaaaggctatgtggttgatccattaggcaaacatcacttcgaaaacgtctctatcgaataa

SEQ ID NO: 472861 - DNA, 1692 bp, Shigella flexneri
atgagatacatcaaatcgattacacagcagaagctgagctttttgcttgcaatctatattggcctttttatgaatggcgcggttttttatcgccgcttcggcagctatgcgcacgattttaccgtctggaaaggcgtttctgctgttgttgaactggccgccaccgtactggtgaccttctttttactacgtcttctatcgctgtttggccgccgcagctggcgtattctggcgtcgctggtggtgctcttttccgcaggtgccagctattacatgaccttccttaatgtggtcattggttatggcatcatcgcttccgtcatgaccaccgatatcgacctgtcaaaagaagttgttggtctgaactttattctctggttaatcgccgttagtgcattgcctcttatccttatctggaataaccgctgtcgctacaccttgctccgacaactgcgaaccccagggcagcgtattcgcagcctggtggtcgtcgtactggcgggtattatggtttgggcaccgattcgtttgctggatatccagcagaagaaagtggagagggcgaccggcgttgatttgccgagttatggcggtgtcgtagcgaactcttatctgccatcaaactggctttctgcgttggggctgtatgcctgggcgcgggtcgatgaatcttccgataataattcattgcttaatccggcgaagaagtttacataccaggctccacaaaacgttgatgatacttatgtcgtgtttatcatcggtgaaaccacgcgttgggaccatatgggtattttcggctatgagcgtaataccacgccgaaactggcccaggagaaaaatctggcggcgttccgtggttactcctgtgataccgcaaccaaactctcactgcgttgcatgtttgtacgtcaggggggcgcggaagataatccgcagcgcacattaaaagaacagaacattttcgcggttctgaagcagttaggattcagttctgacctctacgctatgcagagcgaaatgtggttctacagcaacacgatggcagacaacattgcttatcgtgagcagattggtgcggagccacgtaatcgtggcaagccggtagatgatatgttgctggtagacgaaatgcagcaatcgctagggcgcaacccggatggtaagcatctgatcattctgcataccaaaggttcgcattttaactacacccagcgttatccgcgtagcttcgcgcagtggaagccggaatgtattggtgttgatagcggctgtaccaaagcgcagatgatcaactcctatgacaactcggtgacctatgtggatcactttatctccagcgtgattgatcaggttcgcgataagaaagcgattgtgttctacgcagctgaccacggtgagtcaattaatgaacgcgagcacctgcacggcacgccgcgtgaactggcaccgccggagcagttccgcgtaccgatgatggtctggatgtcagataaatatctggaaaatccggccaatgcgcaggcgtttgcgcagctgaaaaaagaagccgacatgaaagtgccacgccgtcacgtagagctgtacgacaccatcatgggttgtcttggctatacttcaccggatggtggaattaacgaaaacaacaactggtgtcacatcccgcagacaaaagtggcagcggctaactaa

SEQ ID NO: 472862 - DNA, 1209 bp, Shigella flexneri
atgacaccttcaaattatcagcgtacccgctggctgacactcatcggtactatcattacccagtttgcgctggggtcggtttatacctggagcctgtttaatggcgcgctttctgccaagctggatgcgccggtaagccaggtcgctttctctttcggcttgttaagtctggggctggcaatttcgtcttctgttgcgggcaaattgcaggaacgttttggcgttaaacgcgtcaccgtggcttccggcattttgctgggattaggcttcttcctgaccgcgcattccaacaacctgatgatgctgtggttaagcgccggtgtgctggtcggtctggcggatggcgcgggttacctgctgacgctctctaactgcgtgaagtggttcccggagcgtaaaggtctgatctccgcgttcgctatcggttcttatggtctgggtagcctgggtttcaaatttatcgacacgcagctgctcgaaacggtgggtctggaaaaaacctttgtgatttggggagcgattgcgctggtgatgattgttttcggcgcaacgttaatgaaagacgcaccaaaacaggaagtgaaaaccagcaatggtgtggtggagaaagattacacgctggcagagtcgatgcgtaaaccgcagtactggatgttagcggtaatgttcctgactgcctgcatgagcggcctgtacgtgattggggtagcgaaagatatcgcccaaagtctggcacaccttgatgtggtttccgcagccaatgcagtaacggttatttccatcgctaacctttcaggtcgtctggtgctgggcattctgtctgacaaaattgcccgtatccgtgttatcaccattggtcaggtgatttcgctggtgggtatggcggccctgctgtttgcaccattaaatgcagtgacgttctttgcagcgattgcctgcgtggcatttaactttggcggcactattaccgtctttccatcactggtcagtgagttcttcggcctcaataacctggcgaaaaactacggtgtgatttacctcggtttcggtatcggtagcatttttggttcgattatcgcctcactgtttggcggtttctatgtgaccttctacgtgattttcgccctgctgattctgtcattggcgctttctacgacgattcgtcagccagagcagaaaatgttgcgtgaggcgcatggctccctttaa

SEQ ID NO: 472863 - DNA, 699 bp, Shigella flexneri
atgatcataaaaaaaagcggtggtcgctggcagctaagcctgctggcgagcgtggtaatcagtgccttttttctcaacacagcttacgcctggcaacaagaatatatcgttgatacgcaacccggacattccacagagcgttacacctgggatagtgatcatcaacctgattacaacgatattttgtcgcaacgtattcaaagtagccaaagggcgctgggactggaagtcaatctggcggaagaaactcctgtggatgtgaccagcagtatgagtatgggctggaattttcctttatatgaacaggttacaaccggcccggtcgcggcattacattacgatggcacaaccacctcgatgtataacgagtttggcgacagtactaccacgctgaccgatccgttatggcatgccagcgtgagtagcttaggctggcgtgttgactcccggcttggcgatctccgaccctgggcgcaaatcagctataaccagcaatttggcgagaatatctggaaggcgcaatcaggcctgagccggatgacggcgacaaaccagaacggcaactggctggatgtcaccgtaggcgctgatatgttgctcaatcaaaatattgccgcctatgctgcgctaactcaggcagaaaataccactaataatagcgactatctgtatacgatgggggttagcgccagattttaa

SEQ ID NO: 472864 - DNA, 564 bp, Shigella flexneri
atggaacgttgcggctgggtgagtcagggcccgctttatattgcctaccatgataatgagtggggcgtgcctgaaactgacagtaaaaaactgttcgaaatgatctgctttgaagggcagcaggctgggttatcgtggatcaccgtcctcaaaaaacgcgaaaactatcgcgcctgctttcatcagttcgatccggtgaaggtcgcagcaatgcaggaagaggatgtcgaaagactggtacaggacgccgggattatccgccatcgagggaaaattcaggcaattattggtaatgcgcgggcgtacctgcaaatggaacagaacggcgaaccgtttcccgactttgtctggtcgtttgtaaatcatcagccacaggtgacacaagccacaacgttgagcgaaattcccacatctacgtccgcctccgacgccctatctaaggcactgaaaaaacgtggttttaagtttgtcggcaccacaatctgttactcctttatgcaggcatgtgggctggtgaatgatcatgtggttggctgctgttgctatctgggaaataaaccatga

SEQ ID NO: 472865 - DNA, 441 bp, Shigella flexneri
atgattcgggaagcgcaacgttcagaactccccgcgatcctcgaactgtggctggaaagtacaacctgggggcatccctttataaaagcgaattactggcgtgactgcattccgctggtgcgggatgcctatcttgccaacgcgcaaaactgggtctgggaagaggacggtaagcttctcggttttgtcagcattatggaaggccgatttctggcagcaatgtttgtcgcaccgaaggccgtcagacgcggtattggtaaggcgctgatgcagtatgtgcagcagcgctatccccatctgatgctggaggtttatcaaaaaaatcaaccggcgatagatttttaccgtgcgcagggttttcacattgtcgattgcgcatggcaggatgaaacccaactacccacctggattatgagctggccggtggttcaaacgctgtaa

SEQ ID NO: 472866 - DNA, 2334 bp, Shigella flexneri
ttggccaactcatcctcacgatattccgttctgactgccgcccactgggggcccatgctggttgaaaccgacggcgaaaccgtgtttagctcgcgtggcgcgttagccacaggaatggaaaactccttgcagagcgcggttcgcgaccaggttcacagcaatacgcgggtacgatttccaatggtgcgcaaaggctttctcgcgtcaccggaaaacccgcaaggcattcgtgggcaggatgaatttgttcgcgtgagttgggatgaggtgctggatcttattcaccaacaacataaacgcattcgtgaggcttatggtccggcatcgatttttgctggttcctacggctggcgttcaaacggcgtgctgcataaggcctcgacattattacaacgctatatggcgctggcaggcggttataccgggcatctgggggattattcgaccggtgcggcacaggcgatcatgccgtatgtcgtaggtggcagcgaagtttatcaacagcaaaccagttggccgctggtgctggaacatagcgatgtcgtggtgttgtggagtgctaacccactcaatacgctgaaaattgcgtggaatgcatccgatgagcaggggctttcttacttttccgcactgcgtgacagtgggaaaaagctgatctgcattgatccaatgcgatcggaaaccgtcgatttctttggcgataaaatggagtgggtggcaccgcacatgggcaccgatgttgcgctgatgctggggatcgcccatacgctggtggaaaatggttggcacgacgaagcgtttctggcgcgttgcaccacaggttatgccgtcttcgcctcttatttgctgggcgagagtgacggaatagcgaaaaacgccgaatgggcggcagagatttgtggtgttggcgcagcgaaaatccgcgagctggcggctattttccaccaaaataccaccatgctgatggcaggctggggaatgcagcgccaacagtttggtgagcaaaaacactggatgatcgtcacgctggcagcaatgttggggcaaatcggcacacccggcggcggttttggtctttcttaccattttgccaatggtggtaaccccacgcggcgttctgcggtgctctcttccatgcagggcagcttgccgggtggctgcgatgcggtggataaaatccctgttgcccgcattgttgaagcactggaaaaccctggtggcgcatatcaacacaacggtatgaaccgacatttcccggatattcgttttatctggtgggcgggcggtgccaactttactcatcatcaggataccaatcgtctgatccgtgcctggcaaaaaccggagctggtggtgatctctgaatgcttctggacggcggcggcgaaacacgcggatattgttctgcctgcgactacctcttttgagcgtaatgatctcaccatgaccggtgattacagtaatcagcatctggtgccgatgaagcaagtggtgccgccacgctatgaagcgcgtaatgattttgatgtttttgccgagttgagtgaacgttgggagaagggcggctatgcgcggtttacggaaggaaaaagtcagctgcaatggctggaaacgttttataacgttgcccggcagcgcggggcaagccagcaggttgaattgccgccatttgctgagttctggcaagccaaccagttaattgagatgccggaaaacccggacagcgagcggtttattcgcttcgctgatttttgccgcgatccgctggcgcatccgttaaaaaccgccagcggcaagattgaaatcttctcacagcgtattgccgattacggttacccggattgccctgggcatccaatgtggctggagccggacgaatggcagggcaatgccgaaccagaacagttgcaggtactttctgcccatccggcgcaccgcctgcacagccagctgaattacagttctctgcgcgaattgtacgcggtagcaaaccgtgagcctgtcaccattcatcctgacgatgctcaggcgcgcggcataaccgaaggggatatggtgcgggtgtggaactcccgtgggcagatccttgccggagcggtcattagcgagggaattaaacctggcgtgatttgcattcacgaaggggcatggccggatctggatttaaccgctgacggtatttgtaaaaacggcgcagtgaacgtgctgaccaaagatctccccagctcgcggctggggaatggctgtgcgggtaatacgacgctggcatggctggaaaaatacaacggtccggaactgacacttacagcgtttgaaccaccggccagctcataa

SEQ ID NO: 472867 - DNA, 651 bp, Shigella flexneri
gtgtttatcttacttgccgccgtagtgagtggcgctctggcggtatctggctgcacaactaacccttacaccggcgaacgcgaagcaggcaaatctgctatcggcgcaggtctgggctctctcgtgggcgcgggtattggtgcgctctcttcttcgaagaaagatcgcggtaaaggcgcgctgattggcgcagcagcaggcgcagctctgggcggcggcgtgggttattacatggatgtgcaggaagcgaagctgcgtgacaaaatgcgcggcactggtgttagcgtaacccgcagcggggataacattatcctcaatatgccgaacaatgtgaccttcgacagcagcagcgctcccctgaaaccggcaggcgctaacaccctgaccggcgtggcaatggtgctgaaagagtatccgaaaacggcggttaacgtgattggttataccggcagcacggggggtcacgacctgaacatgcgtctctcccagcagcgtgcggattccgttgccagcgcgttgatcacccagggcgtggacgccagccgcatccgtactcagggccttggcccggctaacccaatcgccagcaacagcaccgcagaaggtaaggcgcaaaaccgccgtgtagaaattaccttaagcccgctgtaa

SEQ ID NO: 472868 - DNA, 975 bp, Shigella flexneri
atgaagccgtccgttatcctctacaaagccttacctgatgatttactgcaacgcctgcaagcgcatttcaccgttcaccaggtggcaaacctcagcccacaaaccgtcgttcaaaatgcagcaatttttgcagaagctgaaggtttactgggttcaaacgagaatgtagatgccgcattgctggaaaaaatgccgaaactgcgtgccacatcaacgatctccgtcggctatgacaattttgatgtcgatgcgcttaccgcccgaaaaattctgctgatgcacacgccaaccgtattaacagaaaccgtcgccgatacgctgatggcgctggtgttgtctaccgctcgtcgggttgtggaggtagcagaacgggtaaaagcaggcgaatggaccgcgagcataggcccggactggtacggcactgacgttcaccataaaacactgggcattgtcgggatgggacggatcggcatggcgctggcacaacgtgtgcactttggcttcaacatgcccatcctctataacgcgcgccgccaccataaagaagcagaagaacgcttcaacgcccgctactgcgatttggatactctgttacaagagtcagatttcgtttgcctgatcctgccgttaactgatgagacgcatcatctgtttggcgcagaacaattcgccaaaatgaaatcctccgccattttcattaatgccggacgtggcccggtggttgacgaaaatgcactgatcgcagcattgcagaaaggcgaaattcacgccgccgggctggatgtcttcgaacaagagccactgtccgtagattcgccgttgctctcaatggccaacgtcgtcgcagtaccgcatattggatctgccacccatgagacgcgttatggcatggccgcctgtgccgtggataatttgattgatgcgttacaaggaaaggttgagaagaactgtgtgaatcctcacgtcgcggactaa

SEQ ID NO: 472869 - DNA, 711 bp, Shigella flexneri
atggcgacaggaaagtcctgctctcgctggtttgcgcctcttgcggcgttattaatggtagttagcctgagtgggtgttttgataaagaaggcgatcagcgtaaagcgtttatcgacttcctgcaaaatacagtgatgcgtagcggtgaacgtctaccaaccctgactgccgatcagaaaaaacagtttggtccttttgtctctgattacgcgattctgtatggttattctcagcaggtgaatcaggcgatggattccggtctgcgcccggtcgtagacagcgttaacgcaattcgcgtaccgcaggattacgttacgcaaagcggtccgctgcgtgaaatgaatggttcgctgggtgtgctggcgcaacaactgcaaaatgcgaagttgcaggccgatgctgcgcactctgcgctaaaacagagcgatgacctgaaaccggtatttgatcaggcattcaccaaagtggtaacgacgccagctgatgcattgcaaccgttgattccggcggcacaaactttcacgcaacaactggtgatggttggagactacattgctcagcaaggtactcaggtgagctttgtcgcaaatggcatccagttcccgacttcacagcaggcaagtgaatataacaaactgattgcgccattaccggcacaacatcaggcgtttaatcaggcctggactacagcagttactgcaacccaataa

SEQ ID NO: 472870 - DNA, 126 bp, Shigella flexneri
atggaatataaagatccaatgcatgagctgttgagcagcctggaacagattgtttttaaagatgaaacgcagaaaattaccctgacgcacagaacaacgtcctgtaccgaaattgagcagttatga

SEQ ID NO: 472871 - DNA, 213 bp, Shigella flexneri; identical to SEQ ID NO: 460420

SEQ ID NO: 472872 - DNA, 213 bp, Shigella flexneri
atgcctgaacaccataaggttagcctcttactcgttggaaatcaacacagggggctgggaatgccgcagaaatatagattactttctttaatagtgatttgtttcacgcttttatttttcacctggatgataagagattcactgtgtgaattgcatattaaacaggagagttatgagctggcggcgtttttagcctacaaattgaaagagtaa

SEQ ID NO: 472873 - DNA, 366 bp, Shigella flexneri
atgaacatggttgagaatatgctcgatcaggcattcaaaaagcttaatcctcacgagcatcctgttctgcactctgaccagggatggcagtatcgtatgagaagatatcaaaatatccttaaagaacatggtattaaacaaagcatgtccagaaaaggcaattgtctggataatgctgtggtggagtgtttctttggaaccttaaagtcggagtgtttttatcttgatgagttcagtaatataagcgaactgaaggatgctgttacggaatatattgaatactataacagcagaagaattagcctgaaattaaaaggtctgactccaattgaatatcggaatcagacctatatgcctcgtgtttaa

SEQ ID NO: 472874 - DNA, 552 bp, Shigella flexneri
ttggagtcattaccctttgttgcagcccaaccaactattgtcccacaattacagcaacaagttacgggtcttacgagtagcttaaactcacaagaaaagaaagaactgacgcacaagttagaatctattttcaataatacccaagtgcaaattgctgtattaattgtttccacaaccaaagatgagacaattgaacaatatgctacaagagtttttgacaattggcgtttaggagatgccaaacgtaatgatgggatactgatcgttgttgcctggtcggatcgcactgtccgcatccaggtaggttatgggctggaagaaaaggtaaccgatgctctggctggagatatcatccgtagcaacatgatacccgcatttaaacaacaaaaattagctaagggattagagttagctataatcgctttgaataaccaactcacttcacaacaccaatatccggctaatccttcagaaagtgaatcaacgtcttccactgatcattattactttgctattttttgggtatttgcagtgatgttcttccctttctag

SEQ ID NO: 472875 - DNA, 1299 bp, Shigella flexneri
atgtccaaaatcgtaaaaatcatcggtcgtgaaatcatcgactcccgtggtaacccgactgttgaagccgaagtacatctggagggtggtttcgtcggtatggcagctgctccgtcaggtgcttctactggttcccgtgaagctctggaactgcgcgatggcgacaaatcccgtttcctgggtaaaggcgtaaccaaagctgttgctgcggtaaacggcccgatcgctcaggcgctgattggcaaagatgctaaagatcaggctggcattgacaagatcatgatcgacctggacggcaccgaaaacaaatccaaattcggcgcgaacgcaatcctggctgtatctctggctaacgccaaagctgctgcagctgctaaaggtatgccgctgtacgagcacatcgctgaactgaacggcactccgggcaaatactccatgccggttccgatgatgaacatcatcaacggtggtgagcacgctgacaacaacgttgatatccaggaattcatgattcagccggttggcgcgaaaactgtgaaagaagccatccgcatgggttctgaagttttccatcacctggcaaaagttctgaaagcgaaaggcatgaacactgctgttggtgacgaaggtggctatgcgccgaacctgggttccaacgctgaagctctggctgttatcgctgaagctgttaaagctgctggttatgaactgggcaaagacatcactctggcgatggactgcgcagcttctgaattctacaaagatggtaaatacgttctggctggcgaaggcaacaaagcgttcacctctgaagaattcactcacttcctggaagaactgaccaaacagtacccgatcgtttctatcgaagacggtctggacgaatctgactgggacggtttcgcataccagaccaaagttctgggcgacaaaatccagctggttggtgacgacctgttcgtaaccaacaccaagatcctgaaagaaggtatcgaaaaaggtatcgctaactccatcctgatcaaattcaaccagatcggttctctgaccgaaactctggctgcaatcaagatggcgaaagatgctggctacactgcagttatctctcaccgttctggtgaaactgaagatgctaccatcgctgatctggctgttggtactgctgcaggccagatcaaaactggttctatgagccgttctgaccgtgttgctaaatacaaccagctgattcgtatcgaagaagctctgggcgaaaaagcaccgtacaacggtcgtaaagagatcaaaggccaggcataa

SEQ ID NO: 472876 - DNA, 1638 bp, Shigella flexneri
atgacaacgaactatatttttgtgaccggcggggtcgtatcctctctgggtaaaggcattgccgcagcctccctcgcagccattcttgaagcccgtggcctcaatgtgaccatcatgaaactggatccttacatcaacgtcgatccaggtactatgagcccaatccaacacggggaagtgttcgttactgaagacggcgctgaaaccgacttggacctggggcactacgagcgtttcattcgtaccaaaatgagccgccgcaacaacttcaccacgggtcgtatctactctgacgttctgcgtaaagaacgccgcggtgactacctcggcgcaaccgtgcaggttattccgcacatcactaacgcaatcaaagagcgcgtgctggaaggtggcgaaggtcatgacgtagtactggtagaaatcggcggtacagtaggtgatatcgaatccttgccgttcctcgaagctattcgccagatggctgttgaaattggccgtgagcacactctgtttatgcacctgacgctggtgccgtacatggcagcgtctggtgaagtcaaaaccaaaccgactcagcactctgtaaaagagctgctctccatcggtatccagcctgacatcctgatttgtcgttcagatcgcgctgtaccggcgaacgaacgtgcgaagattgcattgttctgtaatgttccggaaaaagcggttatttctctgaaagacgtcgattccatctataaaattccgggcctgttgaaatctcaggggctggacgattatatttgtaaacgattcagcttaaactgcccggaagcaaatctgtccgaatgggaacaggttatcttcgaagaagcgaatccggtaagtgaagtcaccatcggtatggtcggcaagtacattgaactgccggatgcttataaatcagtgatcgaagcactgaaacacggtgggctgaagaatcgtgtcagcgtcaacatcaaactgatcgattcacaagatgttgaaacgcgcggcgttgaaatccttaaaggtctggacgcaatccttgtacctggcggtttcggctatcgtggcgtagaaggcatgattacgaccgcgcgttttgcgcgtgagaacaatattccttatctgggcatttgcctgggtatgcaggtggcgttaattgattacgctcgccatgttgccaacatggagaacgccaactctacagaatttgtgccagactgtaagtacccggttgtggcgctgattaccgagtggcgcgatgaaaacggcaacgttgaagttcgtagcgagaagagcgatctcggcggtaccatgcgtctcggcgcacagcagtgccagttggttgacgatagcctggttcgccagctatacaatgcgccgacaattgttgagcgtcatcgtcaccgttacgaagtcaacaacatgctgttgaaacagattgaagatgcaggtctgcgcgttgcgggccgttccggggatgatcagttggtcgagatcatcgaagttccgaatcacccgtggttcgtggcttgccagttccatccggagtttacttctactccacgtgatggtcacccgctgtttgcaggctttgtgaaagccgccagcgagttccagaaacgtcaggcgaagtaa

SEQ ID NO: 472877 - DNA, 792 bp, Shigella flexneri
atgaatcaaatcgaccgtttgctcactattatgcagcgcctgcgcgatccggaaaacggctgcccgtgggataaagagcagacatttgccaccattgcgccttacacccttgaagaaacctacgaagtgctggacgccatcgcccgtgaagattttgacgatcttcgcggtgaactgggcgatctgctattccaggtggtgttttacgcgcaaatggctcaggaagaagggcgctttgactttaatgatatttgcgctgctattagcgataaattagagcgtcgccatccgcatgtttttgctgatagctctgccgaaaacagtagtgaagtgcttgcccgttgggagcaaatcaaaaccgaagagcgcgcgcagaaagcgcagcattcggcgctggacgatattcctcgtagtttaccggctttaatgcgggcgcaaaaaatccagaaacgttgcgccaacgttggcttcgactggacgacgcttggcccggtggttgataaagtctacgaagagatcgacgaggtgatgtacgaggcgcggcaggctgttgtcgaccaggctaaactggaggaggaaatgggggacctgctgtttgccacggttaatctggctcgccatttagggacgaaagcagaaatcgcattgcaaaaagtgaacgaaaaattcgagcgtcgttttcgcgaagtggagcgtattgttgccgcgcgtggactggaaatgacaggtgttgacctcgaaacaatggaagaagtctggcaacaggtaaaacggcaggaaattgatctctaa

SEQ ID NO: 472878 - DNA, 2235 bp, Shigella flexneri
atggttgcggtaagaagtgcacatatcaataaggctggtgaatttgatccggaaaaatggatcgcaagtctgggtattaccagccagaagtcgtgtgagtgcttagccgaaacctgggcgtattgtctgcaacagacgcaggggcatccggatgccagtctgttattgtggcgtggtgttgagatggtggagatcctctcgacattaagtatggacattgacacgctgcgggcggcgctgctgttccctctggctgatgccaacgtagtcagcgaagatgtgctgcgtgagagcgtcggtaagtcggttgttaaccttattcacggcgtgcgtgatatggcggcgatccgccagctgaaagcgacgcacactgattctgtttcctccgaacaggtcgataacgttcgccggatgttattggcgatggtcgatgattttcgctgcgtagtcatcaaactggcggagcgtattgctcatctgcgcgaagtaaaagatgcgccggaagatgaacgtgtactggcggcaaaagagtgcaccaatatctacgcgccgttggcgaaccgtcttgggattgggcaactgaaatgggagctggaagattactgcttccgttatctccacccgaccgaatacaaacgcatcgcaaaactgctgcatgaacgccgtctcgaccgcgaacactatatcgaagagtttgtcggccatctgcgcgctgagatgaaagctgaaggcgttaaagctgaagtgtatggtcgtccgaaacacatctacagcatctggcgcaaaatgcagaaaaagaacctcgccttcgatgagctgtttgatgtgcgtgcggtacgtattgtcgccgagcgtttacaggattgttatgccgcactggggatagtgcacactcactatcgccacctgccggatgagtttgacgattacgtcgctaacccgaaaccaaacggttatcagtctattcataccgtggttctggggccgggtggaaaaaccgttgagatccaaatccgcaccaaacagatgcatgaagatgcggagttgggtgttgctgcgcactggaaatataaagagggcgcggcagctggcggcgcacgttcgggacatgaagaccggattgcctggctgcgtaaactgattgcgtggcaggaagagatggctgattccggcgaaatgctcgacgaagtacgtagtcaggtgtttgacgaccgggtgtatgtctttacgccgaaaggtgatgtcgttgatttgcctgcgggatcaacgccgctggacttcgcttaccacatccacagtgatgtcggacaccgctgcatcggggcaaaaattggcgggcgcattgtgccgttcacctaccagctgcaaatgggcgaccagattgaaattatcacccagaaacagccgaaccccagccgtgactggttaaacccaaacctcggttacgtcacaaccagccgtgggcgttcgaaaattcacgcctggttccgtaaacaggaccgtgacaaaaacattctggctgggcggcaaatccttgacgacgagctggaacatctggggatcagcctgaaagaagcagaaaaacatctgctgccgcgttacaacttcaatgatgtcgacgagttgctggcggcgattggtggcggggatatccgtctcaatcagatggtgaacttcctgcaatcgcaatttaataagccgagtgccgaagagcaggacgccgccgcgctgaaacagcttcagcaaaaaagctacacaccgcaaaaccgcagtaaagataacggtcgtgtggtggttgaaggtgttggtaacctgatgcaccacatcgcgcgctgctgccagccgattcctggagatgagattgtcggcttcattacccagggacgcggtatttcagtacaccgcgccgattgcgaacaactggcggaactgcgctcccatgcgccagaacgcattgttgacgcggtatggggtgagagctactccgccggatattcgctggtggtccgcgtggtggctaatgatcgtagtgggttgttacgtgatatcacgaccattctcgccaacgagaaggtgaacgtgcttggcgttgccagccgtagcgacaccaaacagcaactggcgaccatcgacatgaccattgagatttacaacctgcaagtgctggggcgcgtgctgggtaaactcaaccaggtgccggatgttatcgacgcgcgtcggttgcacgggagttag

SEQ ID NO: 472879 - DNA, 1302 bp, Shigella flexneri
atggcgcaattctactctgcaaaacgacgcacgacgacgcgtcagatcataaccgtttcagtcaacgacctcgactcttttggtcagggcgtggcgcgacataacggcaaaacgttatttatccccggattattgccgcaggaaaacgcggaagttgctgttactgaagataaaaaacagtatgcccgcgctaaagtcgtacgccggttaagcgatagcccggaacgcgaaacgccacgctgtcctcattttggcgtatgcggcggctgtcagcaacaacacgccagcgtggatttacagcagcgaagcaaaagtgcggcactcgcccgattaatgaaacacgatgtctctgaagtgatcgccgatgttccctggggctatcgccgccgcgcgcgtttaagtctgaactacttaccgaaaacacagcaacttcagatggggtttcgcaaagcgggctccagtgacattgtcgacgtcaaacaatgccccattttagcgccccaacttgaagcattgctgcccaaagtcagggcatgtctgggcagcttacaagctatgcgccatcttggtcatgttgaactggtacaggcaaccagcggcacgctgatgattttgcgccataccgcaccgctaagttcggcagatcgcgaaaaactggaacgcttttcgcattctgaaggcctggatctgtatctcgcccccgatagtgagatactcgaaaccgtctctggtgagatgccctggtatgactcaaacgggttgcgcttaacttttagcccgcgcgattttattcaggtcaatgcgggtgtgaaccaaaaaatggtagcgcgtgcgttggaatggctggatgtgcaacctgaagatcgcgtactggatctgttctgcggtatgggcaactttacactgccattggcgacacaagctgccagtgtggtcggtgtagaaggtgttcctgcgctggtggaaaaaggccaacagaatgcgcgtcttaatggcttacagaatgtgacgttttatcacgaaaatcttgaagaagatgtcacaaagcagccgtgggcgaaaaacggcttcgataaagtgttgctggacccggcgcgagcaggtgccgcaggtgttatgcagcaaattataaaactggaacctattcgtatagtttatgtatcctgtaaccctgcaacgctggctcgggatagcgaagcgttattaaaagcaggatataccattgcgcgactggcgatgctggatatgttcccacacacgggacatctggaatcgatggtacttttctcgcgcgttaaatag

SEQ ID NO: 472880 - DNA, 2757 bp, Shigella flexneri
atgaccaactacagcctgcgcgcacgcatgatgattctgatcctggcaccgaccgtccttattggtttattgctgagtatctttttcgtcgtgcatcgctataacgacttgcagcgtcaactggaagatgccggtgctagcattattgagccgcttgcagtttctactgaatatggcatgagcctgcaaaatcgcgaatctatcggtcagttaataagcgtactgcatcgtcgccattccgatattgttcgcgcgatttcggtttatgatgaaaataaccgactctttgtcacctccaattttcatcttgatccctcatcaatgcagctcggcagcaacgtgccgtttcctcgccagctcactgtcactcgtgacggcgatattatgatcctccgcacgccgattatttctgagagttactcccccgacgaatcgcccagtagcgatgccaaaaatagtcaaaatatgttgggatatattgcgcttgagctggatcttaaatcggttcgcttgcagcaatataaagagatctttatttcctgcgtgatgatgctgttttgtatcggtattgcgcttatttttggctggcgcttaatgcgcgatgtaaccggtccgattcgcaacatggtgaataccgtcgaccgcatccgtcgcgggcaactcgacagccgggtggaaggatttatgctcggcgagctggatatgctgaaaaacggtatcaactcgatggcaatgtcgctggctgcttatcacgaagagatgcagcacaatatcgaccaggcgacgtccgatctgcgtgaaacgctggagcagatggaaattcagaacgttgagttggatctggcgaaaaagcgcgcccaggaagcggcgcgtattaaatccgagtttctggcaaatatgtcacacgagctgcgtacaccactgaatggtgttattggctttacccgcctgacactgaaaacagaattaacaccaacgcagcgcgatcacctgaatacgattgaacgttcggcaaataatttgctggcaattattaatgatgttctcgacttctcgaaactggaagcaggtaagctgattctggaaagtattccattcccactacgcagcacgctggatgaagtcgttactctgctggcacattcttctcacgataaagggttggaactgacgctcaatattaaaagcgacgtgcctgataacgtgatcggcgacccactgcgattacagcaaatcatcactaacctggtggggaatgcaattaaattcaccgagaatggcaacattgatattctggtagaaaaacgtgcgctgagtaataccaaagtgcagattgaagtgcagattcgggataccggcattggtattcctgaacgcgatcaatcgcgcttattccaggccttccgacaggctgatgccagtatttcccgccgtcatggtggcaccgggctggggctggtgattacacaaaaactggttaatgaaatgggcggcgatatttcgttccatagccagccgaatcgcggttcaactttctggttccacattaatctcgatctgaacccgaacattattatcgaagggccatccatccagtgcctcgcaggtaagcgcctggcctatgtcgaaccaaactccgcagcagcgcaatgcacgctggatattttaagtgaaacgccgctggaagtggtttatagcccaacgttctccgcgctgcctcccgcgcattacgacatgatgttgttaggcatcgcggtgaccttccgcgagccgctaacaatgcaacatgagcgattagcgaaagcggtatcgatgaccgatttcctgatgctggcacttccttgccatgcacaagttaatgctgaaaaactcaagcaagatggtatcggcgcgtgtctgctgaaaccattaacacctacgcgcctgttgcctgccctgacggaattttgtcatcacaaacaaaacacgcttttgcctgtaaccgatgaaagtaagctggcaatgacagtcatggcggttgatgacaaccccgctaacctgaaacttatcggcgcattgctggaagatatggtgcaacatgtggaactttgcgatagcgggcatcaggcagttgaacgggcgaaacagatgccgttcgatttgatcttaatggatattcaaatgccggacatggatggcattcgggcctgcgaactcatccaccaactcccgcatcagcgacaaacgccggttatcgcggtaacggcgcatgcaatggccgggcaaaaagagaagctgcttggcgcagggatgagcgattatctggcgaaaccgattgaagaagagcgattgcataatttgttgttgcgctacaagcctggcagcggtatttcgtctcgcgtcgtgacgcccgaagtcaacgaaattgtggtgaacccgaatgcgaccctcgactggcaactggcactacgccaggcagcaggaaaaaccgatttagcgcgcgatatgctgcaaatgttactcgatttcctgcctgaagttcgcaacaaagttgaggaacagctggctggagaaaacccggaaggcctggttgatttgattcataaactgcatggcagttgcggctatagcggcgtaccacgtatgaagaatctctgccagctgatcgaacaacagctacgtagcggtactaaagaagaagatttggagccggagctgctggaactgttggacgagatggataatgtcgcgcgcgaagccagcaaaattctcgggtaa

SEQ ID NO: 472881 - DNA, 1341 bp, Shigella flexneri
atgagttctcaatttacgacgcctgttgttactgaaatgcaggtcatcccggtggcgggtcatgacagtatgctgatgaatctgagtggtgcacacgcaccgttcttcacgcgtaatattgtgattatcaaagataattccggtcacactggcgtaggggaaattcccggcggcgagaaaatccgtaaaacgctggaagatgcgattccgctggtggtaggtaaaacgctgggtgaatacaaaaacgttctgacgctggtgcgtaatacttttgccgatcgtgatgctagtgggcgcggtttgcagacatttgatttgcgtaccactattcatgtagttaccgggatagaagcggcaatgctggatctgctggggcagcatctgggggtaaacgtggcatcgctgctgggcgatggtcaacagcgtagcgaagtcgaaatgctcggttatctgttcttcgtcggtaatcgcaaagccacacctctgccgtatcaaagccagccggatgactcatgcgactggtatcgcctgcgtcatgaagaagcgatgacgccggatgcggtggtgcgcctggcggaagcggcgtatgaaaaatatggcttcaacgatttcaaactgaaaggcggtgtactggccggggaagaagaagccgagtctattgtggcactggcgcaacgcttcccgcaggcgcgtattacgctcgatcctaacggtgcctggtcgctgaacgaagcaattaaaattggtaaatacctgaaaggttcgctggcttatgcagaagatccgtgtggtgcggagcaaggtttctccgggcgtgaagtgatggcagagttccgtcgcgcgactggcctgccgactgcaaccaatatgatcgccaccgactggcggcagatgggccatacgctctcgttacaatccgttgatatcccgctggcggatccgcatttctggactatgcaaggttcggtacgtgtggcgcaaatgtgccatgaatttggcctgacctggggttcacactcaaacaaccacttcgatatttccctggcgatgtttacccatgttgccgccgctgcaccgggtaaaattactgctattgatacgcactggatctggcaggaaggtaatcagcgcctgaccaaagaaccgtttgagatcaaaggcgggctggtacaggtgccagaaaaaccggggctgggtgtagaaatcgatatggatcaagtgatgaaagcccatgagctgtatcagaaacacgggcttggcgcgcgtgacgatgcgatgggaatgcagtatctgattcctggctggacgttcgataacaagcgcccgtgcatggtgcgttaa

SEQ ID NO: 472882 - DNA, 1341 bp, Shigella flexneri
atggcgacacaatccagtcctgttattactgatatgaaagtcattccggtcgccggacatgacagcatgttgctcaatattggtggtgcgcataacgcatacttcacccgcaatatcgtggtactcaccgataacaccgggcataccggcattggtgaagcgccgggcggagaggtgatttatcaaacactggtcgatgctattccgatggttctgggccaggaagttgcgcgcctgaataaagtggttcagcaggtacataaaggtaatcaggcagccgattttgataccttcggcaaaggtgcctggacttttgaattgcgcgttaatgccgtggcggcgctggaagccgccttgcttgacctgctaggtaaggcgctgaatgttccggtctgcgaactgttggggccaggcaagcaacgcgagactattaccgtcctcggttatctgttttatataggtgatcggaccaaaaccgatcttccttatctggaaaatacgccgggcaaccatgagtggtatcagttgcgccatcagaaagcgatgaacagcgaagccgttgtgcgtctggcggaagcctcacaggatcgctatggctttaaagatttcaaacttaagggcggggtgttacctggcgagcaagaaatcgacactgttcgtgcattgaagaaaagcttcccggatgcgcggattaccgttgatcccaacggtgcatggctgcttgatgaagccatttctttatgcaaagggctgaatgatgttcttacctatgccgaagatccatgcggcgcagaacagggcttctccggacgtgaagtgatggcggagtttcgacgggcgaccggcttgcccgtcgcgactaacatgatcgccaccaactggcgcgaaatgggtcatgcggtgatgctcaatgcggtagatattccacttgccgatccgcacttctggacgctttccggtgcagtccgcgtggcgcagctttgcgacgactgggggctgacctggggctgccattccaacaaccatttcgatatctctctggcgatatttacccatgtgggcgcggcggcaccgggtaatcctaccgctatcgatacccactggatttggcaggagggcgattgtcgcctgaccaaaaatccgctggagattaaaaacggaaaaattgccgttcctgatgcgcccggtctgggcgtggaactggactgggaacaggtacaaaaggcacatgaggcctataaacgtctgccttgcggtgcgcgtaacgacgcaggtccgatgcagtacctgatccccggctggacctttgaccgtaaacgtcccgttttcggccgtcattga

SEQ ID NO: 472883 - DNA, 1353 bp, Shigella flexneri
atgagttctttaagtcaggctgcgagcagtgtggaaaaacgcacgaatgctcgttactggatagtggtgatgttgtttatcgtcacatccttcaactacggcgaccgcgctacgctttctattgccggttcggaaatggccaaagatatcggccttgatcccgtgggaatgggctatgtgttctctgccttctcatgggcttatgttatcgggcagatccctggtggttggttgctggatcgttttggttcaaaacgcgtctacttctggtcgatctttatctggtcgatgtttaccttgctgcaaggcttcgtcgatatctttagtggattcggcattatcgttgccctgtttactctgcgcttcctggtcgggcttgctgaagcgccatctttccccggcaacagtcgcattgttgcggcctggtttccggtgcaggaaaggggaacggcggtgtcgatttttaactccgctcaatacttcgcaacggtgatcttcgcgccgattatgggctggctgacgcatgaagtgggctggtcacacgtcttcttctttatgggcggtctgggcattgtcatcagctttatctggttgaaagtcatccacgagccaaatcaacatccgggggtaaatcagaaagagctggagtatatcgccgcgggtggcgcgctgatcaatatggatcagcaaagcaccaaagttaaagtgccgttcagcgtgaagtgggggcagatcaaacagctgctcgggtcacggatgatgatcggcgtttatatcggtcagtactgtatcaacgccctgacttactttttcattacctggtttccggtttatctggtgcaggcgcgtgggatgtcgattctgaaagcgggctttgtggcttccgttccggcggtttgcggttttatcggcggtgtgctgggtggaattatttccgactggctgatgcgccgcacgggatcgctgaacattgcgcgtaaaacaccgatcgtaatgggcatgttgctgtcgatggtgatggtgttctgcaactacgtcaacgttgagtggatgatcatcggctttatggcgctggccttcttcggtaagggcatcggggcgctgggttgggcagtaatggcagataccgcgccaaaagagatcagcggtctttccggtggcctgttcaacatgttcggtaacatttctggcatcgtcacgccaatcgcaattggttatatcgttggcacgactggctcgtttaatggggcgctgatttatgttggtgttcatgccctaatcgcggtactgagctacctggtgctggtgggcgatatcaagcgtatcgagctgaaacctgtcgcggggcaataa

SEQ ID NO: 472884 - DNA, 450 bp, Shigella flexneri
atggcggaaattggtatttttgtcggcaccatgtacggaaattcgctgttagtggcggaagaagcagaagcaattctgaccgcacagggccacaaagcaacggtatttgaagatcctgaattaagcgactggctgccctatcaggataagtatgttctggtggttacgtccacgaccgggcagggcgaccttcctgatagcattgtgccgctctttcagggaatcaaagatagtctgggcttccagccgaatctgcgttatggcgtgattgcgctcggcgacagcagttatgtaaatttttgcaatggcggcaaacagttcgatgccttgttgcaggaacagagcgctcagcgggttggcgaaatgctgttgattgacgccagtgagaacccggaaccggaaacggaatcaaatccgtgggtcgaacagtggggcacgctgttgtcctga

SEQ ID NO: 472885 - DNA, 783 bp, Shigella flexneri
atgctggaaatactctatcaggatgaatggctggttgcggtaaataaaccctccggctggctggttcaccgtagctggctggatcgcgacgagaaagtagtggtcatgcaaaccgtgcgtgaccagataggacagcatgtttttactgctcatcgtctggaccgacccacttctggtgtgttgttgatgggattatccagcgaggccggacggctgctggcacaacagtttgaacagcaccaaatccagaaacgttaccatgcgattgtgcgcggctggttgatggaagaagcggtgttggattatccactggtggaagaactggacaaaatcgctgataaatttgcccgcgaagataaaggcccgcagccagcagtgacgcattatcgcggtctggcgaccgtagaaatgccggtagcgaccggacgttacccgaccacgcgctacggcctggtggaactggagccgaaaaccggacgcaaacatcagcttcgccgacatcttgcccatttgcgtcatccgattattggcgatagcaaacatggcgatttacgccagaatcgcagcggtgctgagcattttggcctccagcggttaatgctacatgccagtcagttgtcattgacgcatccttttactggcgagccgctgactattcacgcgggcctggacgacacctggatgcaggcgttatcacaatttggctggcgcggtctgcttcctgaaaatgaaagggttgagttcagtgcgccatcgggtcaggatggagagataagttcctaa

SEQ ID NO: 472886 - DNA, 330 bp, Shigella flexneri
atgaccactcatgaccgcgttcgtctccagttgcaggcgcttgaagcgttactgcgtgaacatcagcactggcgaaacgatgaaccccagccgcatcaatttaatagtacccaaccgttctttatggacaccatggaaccactggagtggttgcagtgggggctgatcccgcgaatgcacgatttgttaaataacaaccagccgttaccgggcgcttttgctgttgcaccctattatgaaatggcgctggcgacggaccatccgcaacgcgcgcttattctggctgagttggaaaaactggatgctctttttgcggatgatgcgagctaa

SEQ ID NO: 472887 - DNA, 546 bp, Shigella flexneri
gtggacgatttgaccgcacaagccctgaaagattttactgcacgctactgcgatgcgtggcatgaagagcataaaagctggccgttaagtgaggaattgtacggtgttccttcaccgtgcattatttcaactaccgaagatgccgtatactggcaaccccagccgtttaccggggaacaaaatgtaaacgcggttgaacgcgcttttgatattgtgatacaacccacaattcataccttttatacgactcagtttgccggggatatgcacgcgcagtttggcgatatcaaactgacattgctgcaaacctggagtgaagacgacttccgtcgggtgcaggaaaatctgattggtcatctggtgactcagaaaaggctaaaactgccgcccacgctatttatcgcgacgctggaagaagagttagaggtcatctcggtgtgtaatctctccggtgaagtgtgcaaagagacgctgggaacacgtaaacggacgcatttagcctcaaatcttgcggaattccttaatcaacttaagcctcttctgtaa

SEQ ID NO: 472888 - DNA, 849 bp, Shigella flexneri
atgtcttcttatgcaaaccatcaggcacttgcgggcctgactcttggaaaatcaaccgattaccgggatacctatgacgccagcctactgcaaggcgttccacgcagcctgaatcgcgacccgctgggtctgaaagcggataacctgccttttcacggtacggatatctggacgctgtatgaactttcctggctgaatgcgaaaggtttgccgcaggtcgctgtcggtcatgttgaacttgattacaccagcgtaaatctgattgagtcgaagagttttaagctctatctcaacagttttaaccagacgcgttttaataactgggatgaggtgcgccagacgctggagcgcgacttaagcacttgcgctcagggtaagattagcgtggcgttatatcgtcttgatgaactggaaggccagccgataggtcatttcaatggcacttgcattgatgaccaggatatcactatcgataactatgaattcactactgactatctggagaatgccaccagcggtgaaaaagtagtggaagagacgctcgtcagccacctgctgaaatcaaactgcctgatcacccatcaaccagattggggttcgatccaaattcagtatcgtggacgccaaattgacagagaaaaactgctgcgttacctggtctcattccgtcatcacaacgagttccacgaacagtgcgtggaacgcatctttaatgacctgttacgcttctgccagccagagaaattgagcgtttacgcacgttatacccgtcgtggcggtctggacattaacccgtggcgcagtaatagcgattttgtcccatcgaccacaagactggttcggcaataa

SEQ ID NO: 472889 - DNA, 1365 bp, Shigella flexneri
ttgattacacatattagcccgcttggctccatggatatgttgtcgcagctggaagtggatatgcttaaacgcaccgccagcagcgacctctatcaactgtttcgcaactgttcacttgccgtactgaactccggtagtttgaccgataacagcaaagaattgctgtctcgttttgaaaatttcgatattaacgtcctgcgccgtgaacgcggcgtaaagctggaactgattaatcccccggaagaggcttttgtcgatgggcgaattattcgcgctttgcaggccaacttgttcgcggttctgcgagacattctcttcgtttacgggcaaatccataataccgttcgttttcccaacctgaatctcgacaactccgtccacatcactaacctggtcttttccatcttgcgtaacgctcgcgcgctgcatgtgggtgaagcgccaaatatggtggtctgctggggcggtcactcaattaacgaaaacgagtatttgtatgcccgtcgcgtcgggaaccagctgggcctgcgtgagctgaatatctgcaccggctgtggtccaggagcgatggaagcgccgatgaaaggtgctgcggtcggacacgcgcagcagcgttacaaagacagtcgttttattggtatgacagagccgtcgattatcgccgctgaaccgcctaacccgctggtcaacgaattgatcatcatgccggatatcgaaaaacgtctggaagcgtttgtccgtatcgctcacggcatcattatcttccctggcggtgtgggtacggcagaagagttgctgtatttgctgggaattttaatgaacccggccaacaaagatcaggttttaccattgatcctcaccggcccgaaagagagcgccgactacttccgcgtactggacgagtttgtcgtacatacgctgggcgaaaacgcgcgccgccattaccgcatcatcattgatgacgccgctgaagtcgctcgtcagatgaaaaaatcgatgccgctggtgaaagaaaatcgccgtgatacaggcgatgcctacagctttaactggtcaatgcgcattgcgccagatttgcaaatgccgtttgagccgtctcacgagaatatggctaatctgaagctttacccggatcaacctgttgaagtgctggctgccgacctgcgccgtgcgttctccggtattgtggcgggtaacgtaaaagaagtcggtattcgcgccattgaagagtttggtccttacaaaatcaacggcgataaagagattatgcgtcgtatggacgacctgctacagggttttgttgcccagcatcgtatgaagttgccaggctcagcctacatcccttgctacgaaatctgcacgtaa

SEQ ID NO: 472890 - DNA, 609 bp, Shigella flexneri
atgacaggtgaaaaagaaagcaaaaatgcagagcgcatttttatgcccccggaaataatgcgtttcaaggaacgccttgaagaggcaatgaatggagaatcaagccgggcgtttgcagctaagtgcggactttctgatggggttatcagaaactacctgtctggcaagacatacccgtctttagatcgattagcacaaatagcctacgcaacagggcgtccaatagagtggtttatccaaagtcagagcatgccaatggttgagcataaaaataatcaagagaataaaaattctcaacctgaccgcagcacattgaaaactaaactgatcgcaattgtcgaattgttagaggacaaggaactgcattctgcgattgagttgttcagaaagaaaggatttgaagctcttatgcctgagattttttcttccgatgattccatccaggctgatttgcaaggtatttcgcagcaaaccttacaaacagccaaaatgcttgaatcattaccaacagatactcgtaaaaagattttgtcaaagtatggtatttatgaacaggaaggtcttgtagctccttcacaagaaccacaagatgtaaaaaaagccgtataa

SEQ ID NO: 472891 - DNA, 663 bp, Shigella flexneri
atgtcctcccggttttttttcgtacttcaagtgaatcaatacaccggtctgggcgcgaaagtgctggaagcctgcccggaagtccacaatctgaaactagcggcccgctttaccacccgcacgcctgccaactggaagaacattgtcgataactatctcgagtgctatcactgtggtccggcgcatctaggtttctccgactccgtacaggttgatcgttactggcacaccatgcacggtaactggacgctgcaatacggtttcgccaaaccgtccgaacagtcgtttaaatttgaagagggtacggatgcggcattccacggtttctggctgtggccgtgcacgatgctgaacgtcaccccgatcaaagggatgatgacggtcatttatgaattcccggtggattctgaaactaccctgcaaaactacgatatttacttcaccaatgaagagttaaccgacgagcaaaaatcgctgattgagtggtatcgcgatgtgttccatccggaagatttacgtctggttgaaagcgtacagaaagggctgaaatcgcgtggctatcgtggtcaggggcgcatcatggccgacagtagcggtagtggcatttccgaacatggtatcgcccatttccataatctgctggcgcaggtgtttaaggactaa

SEQ ID NO: 472892 - DNA, 966 bp, Shigella flexneri
atgtcagactatcaaatgtttgaagtacaggtgagccaggttgaaccccttaccgaacaggtgaaacgcttcacgctggtggcaaccgatggcaaaccgctgcctgcgttcaccggaggaagtcacatcctagtgcagatgagcgatggtgataaccagtacagcaatgcgtattcactactgagttcaccgcataacacctctagttatcagattgccgttcgactggaagaaaactcgcgcggcggttcccgctttttgcatcagcaggtaaaagtgggcgatcggttaacgatctcaacgcctaataacctgtttgcgctaattccctcagccagaaagcatctgtttatcgcgggcggtattggtatcacccctttcctgtcgcacatggcagagttgcaacacagcgacatcgactggcagctacattactgctcgcgaaatccagaaagttgcgcatttcgtgctgagctagtccagcatccgcaggctgagaaagtccatttgcatcattcatcaaccggaacacgactggaattagcgcgattattggcggatatcgaacctggcacacacgtttatacctgtggccccgaggcgctaattgaagcggtaagaagtgaagctgcgcgtctggacatcgccgccgatacactgcactttgagcaatttgctatcgaagacaaaaccggcgatgcatttaccctggtgcttgcccgttccggaaaagagtttgtggtgccggaagagatgactattttgcaggttattgaaaataataaagccgcgaaagtggaatgtttatgtcgtgaaggggtatgcggaacctgcgaaacggcaatactggaaggtgaagctgaccatcgggatcagtattttagcgatgaagagcgtgccagccagcaaagtatgttgatctgttgttcgcgtgcgaagggtaaacgcctggtgttggatttgtag

SEQ ID NO: 472893 - DNA, 1116 bp, Shigella flexneri
atgattaccacggacgatgcgctggcttctttgtgtgaagccgtccgtgtctttccggcgatagccctggatactgaatttgttcgtacgcgcacttattacccgcagctggggttgattcaacttttcgatggcgagcatctggcgctaattgatcctctcgggatcaccgactggtcaccgctgaaagcgatcctgcgcgatccgtccatcacaaaatttctccatgcaggcagtgaagatctggaagtgttcctcaatgtctttggcgaattaccacaacccttgattgacacgcaaatccttgctgccttctgcggacgcccgatgtcatggggtttcgcttccatggtggaagagtattccggcgttacgctggacaagagtgaatcgcgcaccgactggctggccagaccgctgaccgaacgtcagtgtgaatacgcagcggcggatgtctggtatctgttaccgatcaccgccaagcttatggtagaaacggaggcctccggctggctacctgcggcgctggatgaatgccgcctgatgcaaatgcgtcgtcaggaagtcgttgcgccggaagatgcctggcgtgatatcaccaatgcctggcagttacgcacacgccaactggcctgtctgcaactgttagccgactggcgactgcgcaaggcgcgagagcgtgatctggcggtgaactttgtcgtgcgtgaagagcatttgtggtcggtcgcgcgttatatgccgggaagtttaggcgaactggacagcctgggtttatccggtagcgaaatccgctttcacggtaaaacgctgctggcgctggtggaaaaagcgcagacattgccggaagatgccttaccgcagccgatgcttaacctgatggacatgcctggttatcgtaaagcgtttaaagcgattaagtcgctgattactgacgtgagcgaaacgcataagatcagcgccgaattgctggcatcgcgtcggcaaatcaaccaactgctgaactggcactggaaactgaaaccgcagaacaatttgccggagctgatttccggctggcgtggtgagctgatggcggaagcattacacaatttattgcaggaatatccgcagtaa

SEQ ID NO: 472894 - DNA, 1752 bp, Shigella flexneri
atgttaacagcgtgtatatcatttggggttgcgatgacgacgaacacgcattttagaggtgaagaattgaagaaggtttggcttaaccgttatcccgcggacgttccgacggagatcaaccctgaccgttatcaatctctggtagatatgtttgagcagtcggtcgcgcgctacgccgatcagcctgcgtttgtgaatatgggggaggtgatgaccttccgcaagctggaagaacgcagtcgcgcgtttgccgcttatttgcaacaagggttggggctgaagaaaggcgatcgcgttgcgttgatgatgcctaacttattgcaatatccggtggcgctatttggcattttgcgtgccgggataatcgtcgtaaacgttaacccgttgtataccccgcgtgagcttgagcatcagcttaacgatagcggcgcatcggcgattgttatcgtgtctaactttgcccacactctggaaaaagtggttgataaaaccgccgttcagcacgtaattctgacccgtatgggcgatcagctatctacggcaaaaggcacggtagtcaatttcgttgttaaatacatcaagcgcttggtgccgaaataccatctgccagatgccatttcatttcgtagcgcactgcataacggctaccggatgcagtacgtcaaacccgaactggtgccggaagatttagccttcctgcaatacaccggcggcaccacaggtgtggcgaaaggcgcgatgctgactcaccgcaatatgctggcgaacctggaacaggtcaacgccacctatgggccgttgctgcatccaggtaaagaactggtagtaacggcactgccgctgtatcacatttttgccctgaccattaactgcctgctgtttatcgaactgggtgggcagaacctgcttatcactaacccgcgtgatattccagagttggtaaaagagttagcgaaatatccgtttaccgctatcactggcgttaacaccttgttcaatgcgttgctgaacaataaagagttccagcagctggatttctccagtctgcatctttccgcaggcggtgggatgcctgttcagcaagtggtggcagaacgctgggtgaaactgaccggacagtatctgctggaaggttatggcctgaccgagtgcgcgccgctggtgagcgttaacccgtatgatattgattatcatagcggtagcatcggtttgccggtgccatcgacggaagccaaactggtggatgacgacgacaacgaagtaccaccgggtcaaccgggtgagctttgtgtcaaaggaccgcaggtgatgctgggttactggcagcgtccggatgctacagatgagatcatcaaaaatggctggttacacaccggcgacatcgcggtgatggatgaagaaggattcctgcgcattgtcgatcgtaaaaaagacatgattttggtttccggttttaacgtctatcccaacgagattgaagatgtcgtcatgcagcatcctggcgtacaggaagtcgcggctgttggcgtaccttccggctccagtggtgaagcggtgaaaatcttcgtagtgaaaaaagatccatcgcttaccgaagagtcactggtgactttttgccgccgtcagctcacgggatacaaagtaccgaagctggtggagtttcgtgatgagttaccgaaatctaacgtcggaaaaattttgcgacgagaattacgtgacgaagcgcgcggcaaagtggacaataaagcctga

SEQ ID NO: 472895 - DNA, 582 bp, Shigella flexneri
atggcggttcaaaagaatgttatcaaaggcatactggcaggtacgtttgcgctaatgctgagcggttgtgtcactgtgccggacgccattaaaggcagcagtcccacgccgcaacaagatttagttcgggtgatgagtgcgccgcagctgtacgttggtcaggaggcacgctttggtggcaaagtggttgcggtacaaaaccagcaagggaaaacccgcctggaaattgctaccgtaccgctggacagcggagctaggccgacgctgggagaaccttctcgcggtcgcatttatgccgatgtgaacggttttctggacccggtggatttccgtggacaactggttacggtagtcgggccaatcaccggtgcggttgacggcaaaatcggcaatacgccctataaatttatggtgatgcaagtaacgggttacaaacgttggcatttaacccagcaggtgattatgccgcctcagccgattgatccatggttttatggcggtcgtggctggccctatggctacggcggatggggctggtataatcccggccccgcgagagtacaaacagttgtaaccgaataa

SEQ ID NO: 472896 - DNA, 696 bp, Shigella flexneri
atgcgaattctggctatcgataccgcgacagaggcctgctctgtcgccctgtggaacgacggtactgtcaacgctcattttgagctttgccctcgtgaacatactcaacgaatcttaccgatggtgcaggatatcctgaccaccagcggaacttccctgactgatattaacgctctggcttacgggcgcggccccggtagctttaccggcgtgcgcattggtattggcatcgcgcaagggctggcgcttggcacggaattaccgatgattggcgtctccacgctaatgacgatggcgcaaggggcgtggcgcaaaaacggcgcaacacgcgtgctgtcagccattgacgcgcgaatgggcgaagtttactgggccgaatatcagcgtgatgaaaacggtatctggcacggtgaagaaaccgaagccgtactcaaacccgaactcgttcatgaacgaatgcaacagctttccggcgaatgggtgacggtagggacgggctggcaagcctggccggatctcggtaaagagagcgggctggttttgcgcgatggcgaagtgttactccccgctgcagaagatatgctgccgattgcttgtcagatgtttgccgagggtaaaacggtggcggtggaacatgccgagccggtttatttgcgtaacaacgtcgcatggaagaaacttccgggcaaagaatga

SEQ ID NO: 472897 - DNA, 1911 bp, Shigella flexneri
gtgacggacgattttgcaccagacggtcagctggcgaaagcgataccaggctttaagccgcgagaaccacagcgacagatggcggtagccgtcacccaggcgatagaaaaaggccagccgctggtggtggaagcaggaaccggtacgggcaaaacctacgcttacctggctcctgcgctgcgggcgaaaaagaaagtcattatctcgaccggctcaaaagcgttgcaggatcagctctacagccgcgatttgccaacagtctcaaaggcattgaaatatacgggcaacgtggcgctgctgaaagggcgctcaaactacctctgcctcgaacgtctcgaacagcaggcgctggcggggggcgatctgccggtacaaatcttaagcgatgtgatcctgctgcgctcctggtctaatcaaacagtcgatggtgatatcagcacctgcgtcagcgtggcggaagattcacaggcgtggccgctggtcaccagcaccaacgacaactgtcttggcagcgactgcccgatgtataaagattgctttgtggtcaaagcacgtaaaaaagcgatggacgccgatgtggtggtggtaaaccatcatctctttctggcggatatggtggttaaagagagtggatttggcgagttgatccctgaagcggacgtcatgatcttcgacgaagcccaccagctaccggacattgccagccagtattttggtcagtcactctccagtcgacaactgctcgacctggcaaaagacatcaccatcgcctaccgcaccgaattaaaagacacccagcagttacaaaagtgcgctgatcgtcttgcccagagtgcgcaggattttcgtctgcaactcggtgagccaggttatcgcggtaacctgcgtgagctgttagctaatccgcaaattcagcgggcatttttactgctcgatgacaccttggaactttgttatgatgtggcgaaactgtcactggggcgttccgccttgctggatgcggcatttgagcgcgccacgttgtatcgcacacggctgaagcggctaaaagagatcaatcagccgggctacagctactggtacgaatgcacttcgcgccattttactctggctctcacgccgctcagcgtggcggataaattcaaagagttaatggcgcaaaagcccggtagctggatcttcacctcagcaacgctgtcggtgaacgacgatctgcatcatttcacctcgcggcttgggatagaacaggcggagtcgttgctattgccaagcccgtttgattacagccgccaggcgttactctgtgtgccgcgcaatctgccgcaaaccaaccagccaggttctgctcgccagttagcggcaatgctgcgaccgatcatcgaagctaacaacggtcgttgttttatgctttgtacctcgcacgccatgatgcgcgatctggccgagcagttccgcgctaccatgacgcttcccgttttgttgcagggggaaaccagtaaaggccaactgttgcagcagtttgtcagtgccggtaatgcgcttcttgtggcaaccagtagtttctgggaaggggtggacgtgcgtggcgatacattgtcattggtaattatcgacaaattgccgtttacctcgccggatgatccactgttaaaagcgcgcatggaagattgtcgtttgcgcggtggcgacccgttcgatgaagtgcaactaccagatgccgtcattactctcaaacagggggtaggtcgactgattcgcgacgccgacgatcgtggcgtgctggtgatttgtgactatcggctggtgatgcgtccttacggcgcgacgtttctcgccagtctgccgcccgcgccacgcacccgtgacattgcccgtgcggttcgtttccttgcgataccatcctccaggtaa

SEQ ID NO: 472898 - DNA, 348 bp, Shigella flexneri
atgatgactatcgttcgtatcgatgctgaagcccgctggtctgatgtagtaatccacaacaacacgctctactacactggtgtaccggaaaacctcgacgccgatgcctttgagcaaaccgccaacacgctggcacagattgacgccgtgctggaaaaacagggcagcaataaatcgagcattctggatgccaccattttcctggccgataaaaacgacttcgcggcgatgaataaagcgtgggatgcctgggttgtcgcgggtcatgcgccggtgcgctgcacggtacaagcgggtttgatgaacccgaagtataaagttgaaattaagattgtggctgcggtgtaa

SEQ ID NO: 472899 - DNA, 300 bp, Shigella flexneri
atgcctgctgtaatagataaagccctggatttcattggtgccatggatgtatcagcgccaacaccaagttcgatgaatgaaagcacggcgaagggaatctttaaatatttaaaagaactgggagtacccgcgagtgccgctgatattacggcgcgagctgaccaggaaggctggaaccctgggttcacggaaaaaatggttggatgggcaaaaaaaatggagacaggtgaacgctctgtgattaaaaatcctgaatacttttcaacatatatgcaggaagaactaaaagcactggtctga

SEQ ID NO: 472900 - DNA, 180 bp, Shigella flexneri
atgtttgcaggtttaccttcactcatccatgaacagcagcaaaaagctgtcgagcggatccaggaactgatggcacaagggatgagtagcggccaggcaatcgcgctggtggcagaagagctgcgtgccaaccactccggcgagctaatcgtggcgcgttttgaggatgaagacgagtaa

SEQ ID NO: 472901 - DNA, 1362 bp, Shigella flexneri
atgaagacgttatctcccactgtgattactttaccctggcgtcaggacgccgctgaattttatttctcccgcttaagccacctgccgtgggcgatgcttttacactccggctatgccgatcatccgtatagccgctttgatattgtggtcgccgatccgatttgcactttaaccactttaggtaaagaaaccgttgttagtgaaagcgaaaaacgcacaacgaccactgatgacccgctacaggtgctccagcaggtgctggatcgcgcagacattcgcccaacgcataacgaagatttgccatttcagggcggcgcactggggttgtttggctacgatctgggccgccgttttgagtcactgccagaaattgcggaacaagatatcgttctgccggatatggcagtgggtatctacgattgggcgctcattgtcgaccaccagcgtcatacagtttctttgctgagtcataatgatgtcaatgcccgtcgggcctggctggaaagccagcaattctcgccgcaggaagatttcacgctcacttccgactggcaatccaatatgacccacgagcagtacggcgaaaaatttcgccaggtacaggaatatctgcacagcggtgattgctatcaggtgaatctcgcccagcgttttcatgcgacctattctggcgatgaatggcaggcattccttcagcttaatcaggccaaccgcgcgccatttagcgcttttttacgtcttgaacagggtgcaattttaagcctttcgccagagcggtttattctttgtgataatagtgaaatccagacccgcccgattaaaggcacgctaccacgcctgcccgatcctcaggaagatagcaaacaagcagaaaaactggcgaactcagcgaaagatcgtgccgaaaatctgatgattgtcgatttaatgcgtaatgatatcggtcgtgttgccgtagccggttcggtaaaagtaccagagctcttcgtggtggaacccttccctgccgtgcatcatctggtcagcactataacggcgcgactaccagaacagttacacgccagcgatctgctgcgcgcagcttttcctggtggctcaataaccggggctccgaaagtacgggctatggaaattatcgacgaactggaaccgcagcgacgtaatgcctggtgcggcagcattggctatttgagcttttgcggcaacatggataccagcattactatccgcacgctgactgccattaacggacaaatatactgctctgcgggcggtggaattgtcgccgatagccaggaagaagcggaatatcaggaaacttttgataaagttaataagatattacgccaactggagaagtaa

SEQ ID NO: 472902 - DNA, 579 bp, Shigella flexneri
gtggaataccgtagcctgacgcttgatgattttttatctcgctttcaacttttgcgcccgcaaattaaccgggaacccctaaatcatcgtcaggctgccgtgttaatccccatcgtccgtcgaccgcaaccggggttgttgctgactcagcgttcaattcatctgcgtaaacacgctggacaagtggcattccctggaggtgcagtcgatgacacggacgcatcagttatcgccgccgcgctgcgcgaagctgaagaagaggtcgctataccgccttccgccgttgaagttatcggcgtgctgccgcccgtcgatagcgtaactggctatcaagtaaccccagtggtcggcattatcccgcccgatctgccgtatcgcgccagtgaagatgaagtctcggcggtgtttgaaatgccgctcgcccaggcattacatctgggtcgttatcaccctttagatatctaccgccgtggcgattcacatcgggtatggctgtcctggtacgaacagtattttgtatggggaatgaccgcaggcataattcgtgagctggcgctgcaaattggtgtgaacccctga

SEQ ID NO: 472903 - DNA, 1365 bp, Shigella flexneri
gtgattagtctattcgacatgtttaaggtggggattggtccctcatcttcccataccgtagggcctatgaaggcgggtaaacagttcgtcgatgatctggtcgaaaaaggcttactggatagcgttactcgcgttgccgtggacgtttatggttcactgtcgctgacgggtaaaggccaccacaccgatatcgccattattatgggtcttgcaggtaacgaacctgccaccgtggatatcgacagtattcccggttttattcgcgacgtaaaagagcgcgaacgtctgctgctggcacagggacggcatgaagtggatttcccgcgcgacaacgggatgcgttttcataacggcaacctgccgctgcatgaaaacggtatgcaaatccacgcctataacggcgatgaagtcgtctacagcaaaacttattattccatcggcggcggttttatcgtcgatgaagaacactttggtcaggatgctgccaacgaagtgagcgtgccgtatccgttcaaatctgccaccgaactgctcgcgtactgtaatgaaaccggctattcgctgtctggtctcgctatgcagaacgaactggcgctgcacagcaagaaagagatcgacgagtatttcgcgcatgtctggcaaaccatgcaggcatgtatcgatcgcgggatgaacaccgaaggtgtactgccaggcccgctgcgcgtgccacgtcgtgcgtctgccctgcgccggatgttagtttccagcgataaactgtctaacgatccgatgaatgtcattgactgggtaaacatgtttgcgctggcagttaacgaagaaaacgccgccggtggtcgtgtggtaactgcgccaaccaacggtgcctgcggtatcgttccggcagtgctggcttactatgaccactttattgaatcggtcagcccagacatctatacccgttactttatggcagcgggcgcgattggtgcattgtataaaatgaacgcctctatttccggtgcggaagttggttgccagggcgaagtgggtgttgcctgttcaatggctgctgcgggtcttgcagaactgctgggcggtagcccggaacaggtttgcgtggcggcggaaattggcatggaacacaaccttggtttaacctgcgacccggttgcagggcaggttcaggtgccgtgcattgagcgtaatgccattgcctctgtgaaggcgattaacgccgcacggatggctctgcgccgcaccagtgcaccgcgcgtctcgctggataaggtcatcgaaacgatgtacgaaaccggtaaggacatgaacgccaaataccgcgaaacctcacgcggtggtctggcaatcaaagtccagtgtgactaa

SEQ ID NO: 472904 - DNA, 1599 bp, Shigella flexneri
atgcaaaaagcacaacggatcattaaaacctatcgccgtaatcgaatgattgtttgtacgatttgcgcactcgttacgctcgcttcgaccctgagcgtgcgatttatttcacagcgtaacttaaatcaacaacgggtagtacaattcgccaatcacgctgtagaggaattagataaagtactgcttcccctacaggcaggtagcaaagtcttgcttccgctgattggtctgccctgctctgtcgcccatttgccattacgtaaacaggcggcaaaactccaaactgtgcgatccattggcctggtgcaagacggcacactttattgctccagcatttttggttatcgcaatgtgcccatcgtggacattctggctgaacttcctgcaccgcaaccacttttacgcctgacgatcgaccgtgccctgattaaaggcagtccggttttgattcaatggacgcctgcagcgggcagtagcaatgctggggtcatagagatgattaacatcgacttactgacggcaatgctccttgagccacaactgccgcaaatcagtagcgccagcctgacggtggacaaacggcatttgctctatggtaatgggctggtagattcccttccgcaacctgaagacaatgaaaactatcaggtttcttcgcaaagctttccttttaccattaacgtaaatggtccgggggctacggcgctggcatggcactatcttccaacacaattaccgctggcggtgctgctaagtttactggtgggctatatcgcctggctggcgaccgcttaccggatgagcttttcccgcgaaattaatctgggcctggcgcaacatgagttcgaattgttctgtcagcctttgcttaatgcgcgcagccagcaatgtattggtgtagagattttgctgcgctggaataatccgcgtcagggctggatttcaccggatgtgtttattcctatcgcggaagaacatcatttaattgtgccactgacccactatgtgatggcagaaaccattcgtcagcaccatgttttcccgatgagtagtcagtttcatgttggcattaacgtcgcacccagccattttcgccgtggtgtgctgataaaagatctcaatcagtactggtttagcgctcacccgattcagcaactgatcctcgaaatcaccgaacgcgatgccttactggatgttgattatcggattgcccgcgagctgcatcgtaaaaacgtcaaactggcgattgatgacttcggcaccggcaacagctcgttttcctggcttgaaacattacgtcctgacgtgctgaaaattgataagtcatttaccgcagctataggttctgacgcggttaactcgacggtgaccgatatcatcatcgcgctggggcaaagactgaatattgaactggtggcggagggcgtggaaacgcaagaacaggcgaagtatttgcgccgtcatggcgtgcatattttgcaagggtatttgtacgcacagccgatgccgctacgtgattttcccaaatggctggcgggcagccaaccgccgcccgcccggcataatggacatatcacgcccattatgtcgttacgttaa

SEQ ID NO: 472905 - DNA, 1551 bp, Shigella flexneri
atggaattcttaatggacccctcaatttgggcggggctactcacgcttgttgttctcgaaattgtgctgggtatcgataacctggtcttcatcgccattcttgctgacaaactgccgccaaaacaacgcgataaagcgcgtttgctggggttatcactggcgctgattatgcgtctggggctgctgtcgctgatttcatggatggtcacgctgaccaaaccgctatttaccgtcatggatttctccttctccggacgcgatctgattatgttgttcggggggatattcttgctgttcaaagcaacaaccgaactgcatgaacggctggaaaaccgcgatcatgattccggccacggtaaaggctacgccagtttctgggtggtcgtcacacagattgtcatccttgacgccgtcttctcgttggatgcggtaattactgcagtagggatggttaaccatctgccggtgatgatggcggcggtagtgattgcgatggcggttatgttgctggcatcgaaaccgctgacgcgattcgttaaccagcaccccacggtggtggtgctctgtctgagcttcctgttaatgattggtctgagtctggtggcagaaggtttcggtttccacattccgaaaggttacctgtatgccgcgattggcttctcgatcattatcgaagtgtttaaccagattgcgcgtcgcaactttattcgtcaccagtcgactttgccgctgcgagcgcgtactgccgatgccatcctgcgtttgatgggcgggaaacgtcaggccaatgttcagcacgatgccgataacccgatgccgatcccggaaggtgcatttgccgaagaagaacggtacatgattaacggcgtactgacgctggcgtcgcgttctctgcgcgggatcatgacgccgcgcggtgaaataagctgggttgacgctaatctcggggtcgatgaaatccgcgagcaactgctctcttcaccgcacagtctgttcccggtatgtcgcggtgaactggatgaaatcatcggtatcgtacgtgctaaagaactgctggtggcgctggaagagggcgttgatgtggcggcgattgcttcggcgtctccggcgattatcgtcccggaaaccctcgatccgatcaacctgctgggcgtgctgcgtcgcgctcgcgggagctttgttatcgtgaccaacgagtttggtgtggtacaaggcttggtcacgccgctggatgtgctggaagccattgcgggtgaattcccggacgctgacgaaacgccggaaatcattaccgatggtaacggctggctggtaaaaggcggtacagatttgcatgccttgcagcaggcgcttgatgttgagcaccttgccgatgacgatgatatcgcgacggtcgcgggcctcgtgatctcggcaaatggtcacattccccgtgtgggcgatgtgattgatgtagggccactgcatatcaccatccttgaagccaatgattatcgtgttgatctggttcgcattgttaaagagcaaccggcgcacgatgaagatgagtaa

SEQ ID NO: 472906 - DNA, 210 bp, Shigella flexneri; identical to SEQ ID NO: 460771

SEQ ID NO: 472907 - DNA, 972 bp, Shigella flexneri
gtgaccattgctattgttataggcacacatggttgggctgcagagcagttgcttaaaacggcagaaatgctgttaggcgagcaggaaaacgtcggctggatcgatttcgttccaggtgaaaatgccgaaacgctgattgaaaaatacaacgctcagttggcaaaactcgacaccactaaaggcgtgctgtttctcgttgatacatggggaggcagcccgttcaatgctgccagccgcattgtcgtcgacaaagagcattatgaagtcattgcaggcgttaacattccaatgctcgtggaaacgttaatggcccgtgatgatgacccgagctttgatgaactggttgcgctggcagtagaaacaggccgtgaaggcgtgaaagcactgaaagccaaaccggttgaaaaagccgcgccagcacccgctgccgcagcaccaaaagcggctccaactccggcaaaaccaatggggccaaacgactacatggttattggccttgcgcgtatcgacgaccgtctgattcacggtcaggtcgccacccgctggaccaaagaaaccaatgtctcccgtattattgttgttagtgatgaagtggctgcggataccgttcgtaagacactgctcacccaggttgcacctccgggcgtaacagcacacgtagttgatgttgccaaaatgattcgcgtctacaacaacccgaaatatgctggcgaacgcgtaatgctgttatttaccaacccaacagatgtagagcgtctcgttgaaggcggcgtgaaaatcacctctgttaacgtcggtggtatggcattccgtcagggtaaaacccaggtgaataacgcggtttcggttgatgaaaaagatatcgaggcgttcaaaaaactgaatgcacgcggtattgagctggaagtccgtaaggtttccaccgatccgaaactgaaaatgatggatctgatcagcaaaatcgataagtaa

SEQ ID NO: 472908 - DNA, 801 bp, Shigella flexneri
atggagattaccactcttcaaattgtgctggtatttatcgtagcctgtatcgcaggtatgggatcaatcctcgatgaatttcagtttcaccgtccgctaatcgcgtgtaccctggtgggtatcgttcttggggatatgaaaaccggtattattatcggtggtacgctggaaatgatcgcgctgggctggatgaacatcggtgctgcagttgcgcctgacgccgctctggcttctatcatttctaccattctggttatcgcaggtcatcagagcattggtgcaggtatcgcactggcaatccctctggccgctgcgggccaggtactgaccatcatcgttcgtactattaccgttgctttccagcacgctgcggataaggctgctgataacggcaacctgacagcgatttcctggatccacgtttcttctctgttcctgcaagcaatgcgtgtggctattccggccgtcatcgttgcgctgtctgttggtaccagcgaagtacagaacatgctgaatgcgattccggaagtggtgaccaatggtctgaatatcgccgggggcatgatcgtggtggttggttatgcgatggttatcaacatgatgcgtgctggctacctgatgccgttcttctacctcggcttcgtaaccgcagcattcaccaactttaacctggttgctctgggtgtgattggtactgttatggcagtgctctacatccaacttagcccgaaatacaaccgcgtagccggtgcgcctgctcaggcagctggtaacaacgatctcgataacgaactggactaa

SEQ ID NO: 472909 - DNA, 852 bp, Shigella flexneri
atggttgatacaactcaaactaccaccgagaaaaaactcactcaaagtgatattcgtggcgtattcctgcgttctaacctcttccagggttcatggaacttcgaacgtatgcaggcactgggtttctgcttctctatggtaccggcaattcgtcgcctctaccctgagaacaacgaagctcgtaaacaagctattcgccgtcacctggagttctttaacacccagccgttcgtggctgcaccgattctcggcgtaaccctggcgctggaagaacagcgtgctaatggcgcagagatcgatgacggtgctatcaacggtatcaaagtcggtttgatggggccgctggctggtgtaggcgacccgatcttctggggaaccgtacgtccggtatttgcagcactgggtgccggtatcgcgatgagcggcagcctgttaggtccgctgctgttcttcatcctgtttaacctggtgcgtctggcaacccgttactacggcgtagcgtatggttactccaaaggtatcgatatcgttaaagatatgggtggtggcttcctgcaaaaactgacggaaggggcgtctatcctcggcctgtttgtcatgggggcattggttaacaagtggacacatgtcaacatcccgctggtggtttcgaccatcaccgggcaggatggacagacccgtgtcaccaccgtgcaaactattcttgaccagttaatgccaggccttgtaccactgctgctgacatttgcttgtatgtggctgctgcgcaaaaaagttaacccgctgtggatcatcgttggcttcttcgtcatcggtatcgctggttacgcttgcggcctgctgggactgtaa

SEQ ID NO: 472910 - DNA, 477 bp, Shigella flexneri
atgacaatcacggacctggtactgattcttttcatcgccgcactcctggccttcgcgatctacgatcagttcatcatgccccgccgtaacggccccaccctgctggcaattcctttgctccggcgtggtcgcatcgatagcgttatcttcgtcggattgattgtcattcttatctataacaacgtcacgaatcatggcgcgctaataacaacatggttattaagtgcactggctctgatgggtttttatatattctggatccgcattccgaagatcatctttaaacaaaaaggttttttcttcgccaatgtctggattgaatatagccgaatcaaagcgatgaacttgtcggaagatggcgtgttggtgatgcaattagaacagcgtcggctgttaatccgcgttcgaaatatcgacgatctggaaaaaatttataagcttctcgtatcaggtaatgctgccaacttactgatttag

SEQ ID NO: 472911 - DNA, 300 bp, Shigella flexneri
atggcagattttcgccgtgcttatgaactgaatgtgttttcttttttccatctgtcacaacttgttgcgccagaaatggaaaaaaatggaggtggcgttattctgaccatcacttctatggcggcagaaaataaaaatataaacatgacttcctatgcatcatctaaagctgcggccagtcatctggtcagaaatatggcatttgacctgggtgaaaaaaatattcgggtgaatagcattgcgccgggggcaatattaaccgatgccctgaaatccgttattacaccagaaattgggtaa

SEQ ID NO: 472912 - DNA, 351 bp, Shigella flexneri
gtgtttaattctgacaacctgagactcgacggaaaatgcgccatcatcacaggtgcgggtgcaggtattggtaaagaaatcgccattacattcgcgacagctggcgcatctgtggtggtcagtgatattaacgccgacgcagctaaccatgttgtagacgaaattcaacaactggatggtcaggcatttgcctggcgttgtgatattacttccgaacaggaactctctgcactggcagactttgccgtcagtaatctgggtaaagttgatatcctggttaacaacgccggtggggtggtcctaaaccgtctgatatgccaatggcagattttcgccgtgcttatgaactga

SEQ ID NO: 472913 - DNA, 1029 bp, Shigella flexneri
atggctaccgccaaaaaaataaccattcatgatgttgcgctggctgcgggcgtgtcggtaagtaccgtttcgctggtgcttaatggcaaagggcgaatctctaccgccacaggagaacgcgttaacgccgccattgaagagctgggatttgtgcgcaatcgacaggcgtcggcgctgcgcggcgggcaaagcggcgtcattggtttgatcgtccgtgatttatctgcgccgttttacgccgaattgacggccggattgacggaagctctggaagcacagggacggatggtttttttgcttcacggcggtaaagacggcgagcagctggcacagcggttttcactgttactgaatcagggtgtcgatggtgtggtaattgccggggctgcaggaagcagcgatgacctgcggcggatggcagaagaaaaagctatcccggtgattttcgcttcccgtgccagttatcttgatgatgttgatacggttcgcccggacaacatgcaggctgcacagttgttgacggagcatctcattcgcaatgggcatcagcggatcgcctggctgggagggcaaagttcctcattaacccgtgcagaacgggtggggggctattgtgcaactctactaaaatttggcctgccgtttcacagcgattgggtgttggagtgcacttccagccagaagcaagccgcggaagctatcacggcgcttttacgtcataacccgaccatcagtgccgtggtttgctataacgaaactattgcgatgggggcatggtttggtttgctgaaagcagggcggcaaagcggggaaagcggagtcgatcgttactttgagcaacaggtttcgctggcggcatttaccgatgcgacaccaaccacacttgatgatatacctgttacctgggccagcacgccagcgcgggaacttggtatcacacttgcggatcgcatgatgcaaaaaatcacccatgaagagacgcattcacgcaatcttattattcccgcccggctcattgcggcgaaataa

SEQ ID NO: 472914 - DNA, 1593 bp, Shigella flexneri
atgacggcgaaaacagcaccgaaagtcacgctgtgggagttcttccagcagttaggcaaaaccttcatgttacccgtggcattattgtcgttctgcggcattatgctcggcattggtagttctcttagcagccatgatgtcataaccctgatcccggtcctgggcaaccccgtgttgcaggctatctttacctggatgagtaagattggctcgtttgcttttagtttcctgcctgtcatgttctgtatcgccatcccgctgggcctggcacgcgaaaataaaggcgtagcggcattcgctggcttcgtcggttatgcggtaatgaacctcgcggtaaacttctggttgaccaataaaggcattctgccaaccacagatgccgccgttctgaaagccaataacatccagagcattcttgggatccagtcgatcgataccgggatcctcggtgcggtgatcgccggtattatcgtctggatgctgcatgagcgtttccataatatccgcctgccggatgcgctggcattcttcggcggtacgcgcttcgtaccaattatctcctcgctggtgatgggccttgtcggcctggtgattccattagtctggccgattttcgccatgggtattagcggcttgggccatatgataaacagcgcgggtgatttcggaccgatgctgtttggtaccggtgaacgtctgctgttgccgtttggtctgcatcacattctggtggcattaattcgctttaccgacgcaggcggcacgcaggaggtctgcggtcaaaccgtcagcggcgcactgaccatcttccaggcgcaattgagttgcccgaccactcacggtttttctgaaagcgtcacgcgtttcctttcgcaaggtaaaatgcctgcgtttctcggcggtctaccaggtgcagcgttagctatgtatcactgcgcgcgcccggaaaatcgccataaaattaaaggtctgctgatttctggcctgatcgcctgcgtcgttggcggcactaccgaaccgctggaattcctgttcctgttcgtagcgccagttctgtatgtcatccacgcgctgttaaccggcctcggcttcaccgtcatgtctgtgctcggcgtcaccatcggtaataccgacggcaatatcatcgacttcgtggtgttcggtattttgcatggtctgtcaaccaagtggtacatggtgccagtggtggcggcaatctggtttgtcgtttactacgtcatcttccgtttcgctatcacccgcttcaatctgaaaaccccggggcgcgatagcgaagttgccagctcaatcgaaaaagccgttgccggtgcgccgggtaaatcaggttacaacgttcctgcaatcctcgaagcattaggcggtgccgacaatattgtcagcctcgataactgcattacccgtctgcgtttgtctgtggaagatatgtcgcttgttaatgtgcaggcactgaaggacaatcgggcaattggcgtagtacaacttaatcaacataacctgcaggttgttatcgggccacaagttcagtcagtaaaagatgaaatggccggtctgatgcatactgtccaggcataa

SEQ ID NO: 472915 - DNA, 1173 bp, Shigella flexneri
atgttcgatttttcaaaggtcgtggatcgtcatggcacatggtgtacacagtgggattatgtcgctgaccgtttcggcactgctgacctgttaccgttcacgatttcagacatggattttgccactgccccctgcattatcgaggcgctgaatcagcgcctgatgcacggcgtatttggctacagccgctggaaaaacgatgagtttctcgcggctattgcccactggttttccacccagcattacaccgcaattgatacgcagacggtggtgtatggcccttctgtcatctatatggtttcagaactgattcgtcagtggtctgaaacaggtgaaggcgtggtgatccacacgcccgcctatgacgcattttacaaggccattgaaggtaaccagcgcacagtaatgcccgttgctttagagaagcaggctgacggctggttttgcgatatgggcaagctggaagccgttttggcgaaaccagaatgtaaaattatgctcctgtgtaacccacagaatcctaccgggaaagtgtggacgtgcgatgagctggagatcatggctgacctgtgcgagcgtcatgatgtgcgggttatttccgatgaaatccatatggatatggtctggggcgagcagccgcatattccctggagtaatgtggcgcggggagactgggcgttgctgacatcgggatcgaaaagtttcaatattcccgcgctgaccggtgcttacgggattatagaaaatagcagcagccgtgatgcctatttatcggcactgaaaggacgtgatgggctttcttccccttcggtactggcgttaactgcccatatcgccgcctatcagcaaggtgcaccgtggctggatgccttacgcgtctatctgaaagataacctgacgtatatctcagataaaatgaacgccgcgtttcctgaactcaactggcagatcccgcaatccacttatctggcctggcttgatctacgtccgttgaatattgacgacaacgcgttgcaaaaagcgcttatcgagcaagaaaaagtcgcgatcatgccggggtatacctatggtgaagaaggtcgtggttttgtccgtctcaatgccggctgcccacgttcgaaactggaaaaaggtgtggctggattaataaacgccatccgcgctgttcgctaa

SEQ ID NO: 472916 - DNA, 1002 bp, Shigella flexneri
atgattgataccaccctgccattaactgatatccatcgccaccttgatggcaacattcgtccccagaccattcttgaacttggccgccagtataatatctcgcttcctgcacaatcccttgaaacactgattccccacgttcaggtcattgccaacgaacccgatctggtgagctttctgaccaaacttgactggggcgttaaagttctcgcctctcttgatgcctgccgccgcgtggcatttgaaaacattgaagatgcagcccgtaacggcctgcgctatgtcgagctgcgtttttcaccaggctacatggcaatggcacataagctgcctgtagcgggtgttgtcgaagcggtgatcgatggcgtacgtgaaggttgccgcacctttggtgtgcaggcgaagcttatcggcattatgagccgaaccttcggcgaagccgcctgtcagcaagagctggaggcctttttagcccaccgtgaccagattaccgcacttgatttagctggtgatgaacttggattcccgggaagtctgttcctttctcacttcaaccgcgcgcgtgatgcgggctggcatattaccgtccatgcaggggaagctgccgggccggaaagcatctggcaggcgattcgtgaactgggtgcggagcgtattggacatggcgtaaaagccattgaagatcgggcgctgatggattttctcgccgagcaacaaattggtattgaatcctgtctgacctccaatattcagaccagcaccgtagcagagctggctgcacatccgctgaaaacgttccttgagcatggcattcgtgccagcattaacactgacgatcccggcgtacagggagtggatatcattcacgaatataccgttgccgcgccagctgctgggttatcccgtgagcaaatccgccaggcacagattaatggtctggaaatggctttcctcagcgcagaggaaaaacgcgcactgcgagaaaaagtcgccgcgaagtaa

SEQ ID NO: 472917 - DNA, 1041 bp, Shigella flexneri
atgagcgacaacatccgtgttgggttgattgggtatggttatgcgagcaaaaccttccatgcgcccctgattgcgggcacgcccgggctggaactggcggtaatctccagcagtgatgaaacaaaagtaaaagccgactggccaacggttacggttgtctctgagccgaagcatctgtttaacgatcccaacatagacctgattgtcattcctacacccaacgatacccatttcccgttagccaaagcggcgcttgaggcgggtaaatatgtggtcgttgataaaccctttaccgtgacactgtcacaagcgcgagagctggatgcgctggcaaaaagcctggggcgtgtgctgtctgtattccataaccgtcgttgggatagcgatttcttgacgctaaaaggtttgctcgcggaaggcgtgctgggtgaagttgcttactttgagtctcattttgaccgcttccgtccgcaggtgcgcgatcgttggcgtgaacagggcggcccaggcagcggtatctggtacgatttagcaccgcatcttcttgatcaggccattacgctatttggtttaccggtcagcatgacggtagatttggcacagttacggcccggagcgcagtcgaccgattatttccacgccatcttgtcctatccacagcggcgagtcattttacacggtaccatgctggcagccgctgagtcagcacggtatatcgtgcatggatcccgaggcagttatgtgaaatatggcctcgatccacaggaagaacgtctgaaaaatggcgagcgtctgccgcaggaagactggggctacgatatgcgtgatggcgtacttacccgcgtggaaggtgaggaacgtgtcgaagaaacgctgttgacggtgcctgggaattatccggcttactatgcggcgattcgtgatgcgttaaatggcgatggtgaaaatccggttccggcaagccaggcaatccaggtaatggagttgattgagctgggcatcgaatccgccaaacatcgcgcgacgttgtgccttgcgtga

SEQ ID NO: 472918 - DNA, 216 bp, Shigella flexneri; identical to SEQ ID NO: 261393

SEQ ID NO: 472919 - DNA, 441 bp, Shigella flexneri
atgaccaccacaacgccacaacgtattggaggctggttgcttggcccgttggcctggcttttagtcgctctgttgagtacgacgctggcgttgttgctgtataccgctgcgttatcttctccgcaaacatttcaaacgctcggcggacaagcactgacgacacaaatcttatggggcgtttcttttattaccgctatcgccatgtggtattacacactgtggttgaccatcgctttctttaaacgtcggcgttgtgttcctaaacactatattatctggctgcttatttccgtattgctggcagtaaaagcattcgctttttcacccgtggaagttggcatagccgttcgccagttgctgtttactttgttggcaaccgcattgatcgtcccctatttcaaacgctcgtcgcgggtaaaagcgacgtttgtgaatccgtaa

SEQ ID NO: 472920 - DNA, 582 bp, Shigella flexneri
atgactgactacctgttactgtttgtcggaactgtactggtcaataactttgtactggtcaagtttctcggtctctgtccgtttatgggggtttccaaaaaactggaaaccgcgatgggcatggggctggcaacaacgtttgtgatgacgctgacgtctatttgcgcctggcttatcgatacgtggattttgatcccacttaatctgatttacctgcgcaccctggcatttattctggtgattgctgtggtcgtgcagttcaccgagatggtggtgcgcaaaaccagcccggtgctttaccgtctgctggggatttttttgccgcttatcaccaccaactgtgcagtgctcggcgtggcgttgctgaatatcaatctcgggcacaatttcttgcagtcggcgctgtacggtttttccgccgctgtcggtttctcgctggtgatggtgctcttcgccgccatccgcgaacgccttgctgtggctgatgtcccggcaccttttcgcggtaatgccattgcgttaattaccgcaggtcttatgtctctggcctttatgggctttagtggtttggtgaagttgtaa

SEQ ID NO: 472921 - DNA, 579 bp, Shigella flexneri
atgaatgctatctggattgccgttgccgccgtgagcctgctgggcctggcgtttggcgccattctgggttatgcctcccgccgttttgcggtggaagacgatccggtcgttgagaaaattgacgaaatcttaccgcagagccagtgtggtcagtgcggttatcccggctgtcgcccctacgcggaagccatcagctgtaacggtgaaaaaatcaaccgttgcgccccaggtggcgaagctgtgatgctaaaaattgccgagttgcttaatgtcgagccgcagccgctggatggcgaagcgcaagagctaacgcctgcgcggatggtggcggttattgatgaaaataactgtattggctgcactaaatgtattcaggcttgtccggtagacgccatcgttggcgctacccgtgtcatgcatacggtaatgagtgatctctgtacgggctgcaatttatgtgttgatccgtgcccgacgcactgcatctcgttgcaaccggtcgcagaaacacctgactcctggaaatgggatctgaacaccattcccgtgcgtatcattcccgtggaacaccatgcttaa

SEQ ID NO: 472922 - DNA, 2127 bp, Shigella flexneri
atgcttaagttattctctgcattcagaaaaaataaaatctgggatttcaacggcggcatccatccaccggagatgaaaacccagaccaacggtacccccctgcgccaggtactactggcgcagcattttgttattccactgaaacagcatattggcgctgaaggtgagttgtgcgttagcgtcggcgataaagtattgcgcggccagccgcttacccgtggtcgcggcaaaatgctgcctgttcacgcgcccacctcgggtaccgttacggctattgcgccccactctacggctcatccttcagctttagctgaattaagcgtgattattgatgccgatggtgaagactgctggatcccgcgcgacggctgggtcgattatcgctctcgcagtcgcgaagagttaatcgagcgcatacatcagtttggtgttgccgggctgggcggtgccggattcccgacaggcgttaaattgcagggtggtggagataagattgaaacgttgattatcaacgctgctgagtgcgagccgtacattaccgccgatgaccgtttgatgcaggattgcgcggctcaggtcgtagagggtattcgcattcttgcgcatattctgcagccacgcgaaattcttatcggcattgaagataacaaaccgcaggcgatttccatgctgcgcgcggtgctggcggactctaacgatatttctctgcgggtgattccaaccaaatatccttctggcggtgctaaacaattaacctacattctgaccgggaagcaggttccacatggcgggcgttcatccgatatcggcgtattaatgcaaaacgtcggcactgcttatgcagtgaaacgtgccgttattgatggcgagccgattaccgagcgtgttgtaaccctgactggcgaagcaatcgctcgcccgggcaacgtctgggcacggctggggacgccagtgcgtcatttattgaatgatgccggattctgcccctctgccgatcaaatggtgattatgggtggcccgctaatgggctttaccttgccatggctggatgtcccggtcgtaaagattaccaactgtctgttggctccctctgccaatgaacttggcgaaccacaggaagaacaaagctgcatccggtgtagcgcctgtgctgacgcctgccctgtggatcttttgccgcaacagttgtactggttcagcaaaggtcagcaacacgataaagctaccacgcataacattgccgactgcattgaatgtggggcttgcgcgtgggtttgcccgagcaatattcccttggtgcaatatttccgtcaggaaaaagctgaaattgcggctattcgtcaggaagaaaagcgcgccgcagaagccaaagcgcgtttcgaagcgcgccaggctcgtctggagcgcgaaaaagcgactcgccttgaacgacataagagcgcagccgttcaacctgcagccaaagataaagatgcgattgctgccgctctggcgcgggtgaaagagaaacaggcccaggctacacagcctattgtgattaaagcgggcgaacgcccggataacagtgcaattattgcagaacgggaagcccgtaaagcgcaagccagagcgaaacaggcagaactggagcaaactaacgacgcagcaaccgttgctgaaccacgtaaaactgccgttgaagcagctatcgcccgctccaaagcgcgcaagctggaacagcaacaggctaatgcggaaccagaagaacaggtcgatccgcgcaaagccgccgtcgaagccgctattgcccgcgccaaagcgcgcaagctggaacagcaacaggctaatgcggaaccagaagaacaggttgatccgcgcaaagctgccgtcgaagccgctattgcccgcgccaaagcacgcaagctggaacagcaacaggccaatgcggagccagaagaacaggttgatccgcgcaaagctgccgtcgaagccgctattgcccgcgccaaagcacgcaagctggaacagcaacaggctaatgcggaaccagaagaacaggtcgatccgcgcaaagccgcagttgccgcggctattgcccgcgttcaggccaaaaaagccgcccagcaaaaggttgtaaacgaggactaa

SEQ ID NO: 472923 - DNA, 1059 bp, Shigella flexneri
atggtattcagaatagctagctccccttatacccataaccagcgccagacatcgcgcattatgctgttggtgttgctcgcagccgtgccaggaatcgcagcgcaactgtggttttttggttggggtactctcgttcagatcctgttggcgtcggtcagtgctctgttagccgaagctctcgtactcaaactacgcaagcagtcggtagccgcaacgttgaaagataactcagcattgctgacaggcttattgctggcggtaagtattccccccctagcgccatggtggatggtcgtactgggtacggtgtttgcggtgatcatcgctaaacagttgtatggcggtctggggcaaaacccgtttaatccggcaatgattggttatgtggtcttactgatctccttcccggtgcagatgaccagctggttaccgccacatgaaattgcggtcaacatccctggttttatcgacgccatacaggttattttcagcggtcataccgccagtggtggtgatatgaatacgctacgcttaggtattgatggcattagtcaggcgacaccgctggatacattcaaaacctctgtccgcgcaggtcattcggttgaacagattatgcaatatccgatctacagcggtattctggcgggcgctggttggcaatgggtaaatctcgcctggctggctggtggcgtgtggttgctatggcagaaagcgattcgctggcatattcccctcagcttcttagtaacgctggcgttatgcgcaacgttgggctggttgttctcaccagaaacactggcagcaccgcaaattcatctgctgtctggtgcgactatgctcggcgcattctttattttgactgacccagttactgcttctacgaccaatcgtggtcggctgatgttcggcgcgctggcgggcttattagtctggttgatccgcagtttcggcggctatcctgacggcgtggcttttgccgtcctgctggcgaacatcacggttcctctgatcgattactacacgcgtccgcgcgtctacggccatcgcaaagggtaa

SEQ ID NO: 472924 - DNA, 621 bp, Shigella flexneri
atgctgaaaactatccgaaaacacggcattacactggcactatttgcagcgggttctacagggttaactgcggccatcaaccagatgaccaaaacgacaattgctgaacaggccagtctgcaacaaaagacgttatttgatcaggtgctgccagccgaacgctataacaatgcgctcgcacagagttgctatctggtaactgcgccagagttaggtaaaggtgagcatcgggtttacatcgccaaacaggatgacaaaccggtagccgccgttctggaagcaaccgcgccagatggctattccggtgcgattcagctgctggtgggagccgattttaatggcacggtacttggcacgcgcgtgacagagcaccacgaaacgccagggcttggcgataaaatcgaattgcgcctttctgactggctcacccattttgcgggaaaaaaaatcagtggtgcggatgatgcgcactgggcggtgaagaaagatggtggtgatttcgaccagttcaccggcgcgacgattactccccgcgcggtggttaatgcggtaaaacgcgccggattgtacgctcagacgttaccggcacaactttctcaacttcctgcctgtggagaataa

SEQ ID NO: 472925 - DNA, 696 bp, Shigella flexneri
gtgagcgaaattaaagacgttattgttcaggggttgtggaaaaacaactctgcactggtccaactgctcggcctttgtccgctattggcggtcacatccactgccactaacgctctgggtttaggacttgcgactacgctggtactgacgctgaccaacctgaccatttcgacgctgcgtcactggacgccagccgagatccgcattcccatttacgtgatgatcatcgcctcggtggtcagcgctgtacagatgctgatcaacgcctacgcctttggcctgtatcaatcattagggatttttattccgctgattgtcactaactgtatcgttgtgggccgcgctgaagccttcgccgccaaaaaaggtccggcgctttcggcactggacggcttttcaattggtacgggcgcaacctgcgccatgttcgtgctgggttcactacgcgaaattatcggcaatggcacgttgtttgacggtgcagatgcgctgttaggtagctgggcaaaagtattacgcgtggagattttccacaccgactcccctttcctgctggcgatgctgccaccaggtgcatttattggcttgggactgatgctggcaggaaaatacctgattgatgaaagaatgaaaaagcgccgtgctgaagcagctgccgaacgtgcattgccaaacggtgaaacagggaatgtctga

SEQ ID NO: 472926 - DNA, 636 bp, Shigella flexneri
atgaacaaagcaaaacgtctggagatcctcactcgcctgcgtgagaacaatcctcatcccaccaccgagcttaatttcagttcgccttttgaattgctgattgccgtactgctttccgctcaggcgaccgatatcagtgttaataaggcgacggcgaaactctacccggtggcgaatacgcctgcagcgatgcttgaactaggcgttgaaggggtgaaaacctatatcaaaacgattggcctttataacagcaaagcagaaaatatcatcaaaacctgccgtatattactggaacaacataatggcgaggttccggaagatcgtgctgcgcttgaagccctgcccggcgtaggtcgtaaaacagccaacgtcgtattaaacactgcattcggctggccgactattgctgtcgacacgcacattttccgcgtttgtaatcgtactcaatttgcgccggggaaaaacgtcgaacaggtagaagaaaagctactgaaagtggttccggcagagtttaaagtcgactgccaccattggttgatcctgcacgggcgttatacctgcattgcccgcaagccccgctgtggctcttgtattattgaagatctttgtgaatacaaagagaaagttgacatctga

SEQ ID NO: 472927 - DNA, 1503 bp, Shigella flexneri
gtgtccactgcaaaccaaaaaccaactgaaagcgtcagtttgaacgctttcaaacaaccgaaggcgttctatctcatcttctcgattgagttatgggaacgttttggttattacggcctacaaggaattatggctgtttacctggttaaacaactgggtatgtctgaagcggattcaatcacccttttctcttcctttagtgccctggtttatggtctggtcgctatcggcggctggttaggtgacaaggtactgggtactaaacgcgtaattatgctcggcgctattgtgctggcgattggttatgctctggttgcctggtctggtcacgacgccggtattgtttatatgggtatggcggctattgcggtcggtaacggcctgtttaaagctaacccgtcttctctgctttctacatgctatgagaaaaacgacccacgtctggacggtgcattcaccatgtactacatgtccgtcaacatcggctctttcttctctatgatagccaccccgtggctggccgcgaaatacggctggagtgttgcgtttgcgttgagcgttgtaggcctgctgatcactatcgttaacttcgccttctgccaacgctgggttaaacagtacggttcaaaaccagactttgaaccagtcaactaccgtaacctgttgctgaccattattggtgttgtggcgctgatcgctgttgccacctggctactgcacaatcaggaagttgcgcgtatggcgctgggcgttgttgccttcggtattgtggttatcttcggtaaagaagctttcgcgatgaaaggtgctgcgcgtcgtaaaatgatcgttgccttcatcctgatgctcgaagcaatcatcttcttcgtgctgtacagccagatgccaacgtcactgaacttctttgcgattcgtaacgttgagcactccattctgggtctggccgtagaacctgagcagtatcaggcactgaacccgttctggatcatcatcggtagtccgattctggccgctatctataacaagatgggtgataccctgccgatgccaaccaagtttgcaatcggcatggtgatgtgttctggtgcgttcctgattctgccgctgggtgcgaaattcgcgtctgacgcaggtatcgtgtctgtcagctggctggtcgcaagctatggcctgcagagcatcggggaactgatgatctctggtctgggtctggcaatggttgcacaactcgttccgcagcgtctgatgggcttcattatgggtagctggttcctgaccactgccggtgcaaacctgattggtggttatgttgcgggtatgatggctgtgccggataacgttaccgacccgctgatgtcactggaagtctatggtcgcgtattcttgcagattggtgtcgctactgccgttattgcagtactgatgctgctgaccgcgcctaaactgcaccgcatgacgcaggatgacgctgcagacaaagcggcgaaagctactgtagcgtaa

SEQ ID NO: 472928 - DNA, 606 bp, Shigella flexneri
atgaaattgttctacaaaccgggcgcctgctctctcgcttcccatatcaccctgcgtgagagcggaaaggattttacgctcgtcagtgtggatttaatgaaaaaacgtctcgaaaacggtgacgattacttttccgttaaccctaaggggcaggtgcctgcattgctgctggacgatggtactttgctgacggaaggcgttgcgattatgcagtatcttgccgacagcgtccccgaccgccagttgctggcaccggtaaacagtatttcccgctataaaaccatcgaatggctgaattacatcgccaccgagctgcataaaggtttcacacctctgtttcgcccagatacaccggaagagtacaaaccgacagttcgcgcgcagctggataagaagctgcaatatgtgaacgaggcactgaaggatgagcactggatctgcgggcaaagatttacaattgctgatgcctatctgtttacggttctgcgctgggcatacgcggtgaaactgaatctggaagggttagagcacattgcggcatttatgcaacgtatggctgaacgtccggaagtacaagacgcgctgtcagcggaaggcttaaagtaa

SEQ ID NO: 472929 - DNA, 861 bp, Shigella flexneri
atgaaaaatattctcgctatccagtctcacgttgtttatggtcatgcgggtaacagtgcggcagagtttccgatgcgccgcctgggcgcgaacgtctggccgctgaacaccgttcaattttctaatcacacccaatacggcaaatggactggctgcgtgatgccgcccagccatttaaccgaaattgtgcaaggcattgccgccattgataaattacacacctgtgatgccgtattaagtggctatctgggatcggcggagcagggtgaacatatcctcggtatcgtccgtcaggtgaaagcagcgaatccgcaggcgaaatatttttgcgatccggtaatgggtcatccggaaaaaggctgtatcgttgcaccgggtgtcgcagagtttcatgtgcggcacggtttgcctgccagcgatatcattgcgccgaatctggttgagctggaaatactctgtgagcatgcggtaaataacgtcgaagaagcggttctggcagcgcgcgaactcattgagcaagggccacaaattgtgttggttaaacacctggcgcgagctggctacagccgtgaccgttttgaaatgctgctggtcaccgccgatgaagtctggcatatcagccgtccactggtggattttggtatgcgccagccggtaggtgttggtgatgtgacgagcggtttactgctggtgaaactgcttcagggggcaacgctgcaggaggccctggaacatgtgaccgctgcagtctacgaaatcatggtgaccaccaaagcaatgcaggaatatgagctgcaagtggtggctgctcaggatcgtattgccaaaccagaacattacttcagcgcaacaaagctctga

SEQ ID NO: 472930 - DNA, 1275 bp, Shigella flexneri
atggcaagcagtaacttgattaaacaattgcaagagcgggggctggtagcccaggtgacggacgaggaagcgttagcagagcgactggcgcaaggcccgatcgcgctctattgcggcttcgatcctaccgctgacagcttgcatttggggcatcttgttccattgttatgcctgaaacgcttccagcaggcgggccacaagccggttgcgctggtaggcggcgcgacgggtctgattggcgacccgagcttcaaagctgccgagcgtaagctgaacaccgaagaaactgttcaggagtgggtggacaaaatccgtaagcaggttgccccgttcctcgatttcgactgtggagaaaactctgctatcgcggcgaacaactatgactggttcggcaatatgaatgtgctgaccttcctgcgcgatattggcaaacacttctccgttaaccagatgatcaacaaagaagcggttaagcagcgtctcaaccgtgaagatcaggggatttcgttcactgagttttcctacaacctgttgcagggttatgacttcgcctgtctgaacaaacagtacgatgtggtgctgcaaattggtggttctgaccagtggggtaacatcacttctggtatcgacctgacccgtcgtctgcatcagaatcaggtgtttggcctgaccgttccgctgatcaccaaagcagacggcaccaaatttggtaaaactgaaggcggcgcagtctggttggatccgaagaaaaccagcccgtacaaattctaccagttctggatcaacactgcggatgccgacgtttaccgcttcctgaagttcttcacctttatgagcattgaagagatcaacgccctagaagaagaagataaaaacagcggtaaagcaccgcgcgcccagtatgtactggcggagcaggtgactcgtctggttcacggtgaagaaggtttacaggcggcaaaacgtattaccgaatgcctgttcagcggttctttgagtgcgctgagtgaagcggacttcgaacagctggcgcaggacggcgtaccgatggttgagatggaaaagggcgcagacctgatgcaggcgctggtcgattctgaactgcaaccttcccgtggtcaggcgcgtaaaactatcgcctccaatgccatcaccattaacggtgaaaaacagtccgatcctgaatacttctttaaagaagaagatcgtctgtttggtcgttttaccttactgcgtcgcggcaaaaagaattactgtctgatttgctggaaataa

SEQ ID NO: 472931 - DNA, 657 bp, Shigella flexneri
atgtctgataacgacgaattgcagcaaatcgcgcatctgcgccgtgaatacaccaaaggcgggttacgccgccgcgatcttcccgccgatccattaaccctttttgaacgttggctctctcaggcttgtgaagccaaactggcggaccctaccgcgatggtggtcgctaccgtggatgaacatggtcagccttatcagcgcatcgttttactcaaacattacgacgaaaaaggcatggtgttttacaccaacctcggtagccgtaaagcacatcaaattgaaaataatccgcgcgttagcctgctgttcccgtggcatacccttgaacgccaggtgatggtgatcggtaaagcagaacgactttcgactctcgaagtgatgaaatattttcatagccgcccgcgtgatagccagattggtgcatgggtttcgaagcagtccagtcgcatttctgcccgcggtatccttgaaagtaaattcctggagctgaagcagaagtttcaacagggcgaagtgccattgccgagcttttggggcggttttcgcgtcagccttgaacagattgagttctggcagggcggtgagcatcgcctgcatgaccgctttttgtaccagcgtgaaaatgatgcgtggaagattgatcgtcttgcaccctga

SEQ ID NO: 472932 - DNA, 249 bp, Shigella flexneri
atgcaaaccgatacgctggaataccagtgtgatgaaaaaccgttgacggtcaaactgaataatccgcgccaggaagtcagttttgtttacgataatcaactactgcacctcaaacagggcctttcagcctctggcgcgcgttactccgacgggatctatgttttctggtcgaaaggtgaggaagcgactgtctataaacgcgaccgcatcgtcttgaataactgtcagttacaaaatccacagcgttga

SEQ ID NO: 472933 - DNA, 765 bp, Shigella flexneri
atgaagaatactaaattactgctggcgattgcgacctctgcagcattactgacagggtgtcaaaatacccacggtattgataccaatatggctatcagctccggtttaaatgcctataaagcagcaacattaagcgatgccgatgcaaaagcgattgccaatcagggctgtgccgaaatggacagcggcaatcaagtcgcaagtaaatccagcaagtacggtaaacgtctggcaaaaatcgccaaagcattgggtaacaatattaatggcacgccggtcaactataaggtttatatgaccagcgacgtcaacgcatgggcgatggcgaacggctgtgttcgtgtctacagtggcctgatggacatgatgaatgacaacgaaattgaaggtgttctgggccatgaactgggccacgtcgcgttgggtcactcgctggctgaaatgaaagcttcttatgcgatcgttgccgcacgcgatgccatttcagctaccagcggtgtggcttcccagctttcccgctcacaattgggtgatatcgcagaaggcgctattaatgctaaatactcccgtgataaagagtccgaagcagatgatttctcttttgatctgttgaagaaacgtggcatcagcacccaggggctggttggcagctttgaaaaactggctagcctggatggcggtcgcacccagtccatgtttgactctcacccaccatcaacagagcgtgcgcaacacatccgtgatcgtatcgcctctggtaagtaa

SEQ ID NO: 472934 - DNA, 684 bp, Shigella flexneri
atgacggcaattgccccggttattaccattgatggcccaagcggtgcagggaaaggcaccttgtgtaaggctatggcggaagcgttgcaatggcatctgctggactcgggtgcaatttatcgcgtactggcattggcggcattacatcaccatgttgatgttgcgtcggaagatgcgctggtaccgctggcatcccatctggatgtacgttttgtgtcgaccaatggcaatctggaagtgatcctcgaaggggaagatgtcagcggcgaaattcgtactcaggaagtggcgaatgcggcttcacaagtcgcggcattcccacgcgttcgtgaagcattattgcgtcgccaacgcgcgtttcgcgaattaccaggtctgattgccgatggccgcgacatgggaacggtggtattccctgatgcaccagtgaaaattttccttgacgcctcctcggaagaacgtgcgcatcgccgcatgctacagttgcaggagaagggctttagtgttaacttcgagcgccttttggccgagatcaaagaacgcgacgaccgcgatcgtaaccgagcggtagcgccactggttccggcagccgatgctttagtgttggattccaccaccttaagcattgagcaattgattgaaaaagcgctacaatacgcgcgccagaaattggctctcgcataa

SEQ ID NO: 472935 - DNA, 1674 bp, Shigella flexneri
atgactgaatcttttgctcaactctttgaagagtccttaaaagaaatcgaaacccgcccgggttctatcgttcgtggcgttgttgttgctatcgacaaagacgtagtactggttgacgctggtctgaaatctgagtccgccatcccggctgagcagttcaaaaacgcccagggcgagctggaaatccaggtaggtgacgaagttgacgttgctctggacgcagtagaagacggcttcggtgaaactctgctgtcccgtgagaaagctaaacgtcacgaagcctggatcacgctggaaaaagcttacgaagatgctgaaactgttaccggtgttatcaacggcaaagttaagggcggcttcactgttgagctgaacggtattcgtgcgttcctgccaggttctctggtagacgttcgtccggtgcgtgacactctgcacctggaaggcaaagagcttgaatttaaagtaatcaagctggatcagaagcgcaacaacgttgttgtttctcgtcgtgccgttatcgaatccgaaaacagcgcagagcgcgatcagctgctggaaaacctgcaggaaggcatggaagttaaaggtatcgttaagaacctcactgactacggtgcattcgttgatctgggcggcgttgacggcctgctgcacatcactgacatggcctggaaacgcgttaagcatccgagcgaaatcgtcaacgtgggcgacgaaatcactgttaaagtgctgaagttcgaccgcgaacgtacccgtgtatccctgggcctgaaacagctgggcgaagatccgtgggtagctatcgctaaacgttatccggaaggtaccaaactgactggtcgcgtgaccaacctgactgactacggctgcttcgttgaaatcgaagaaggcgttgaaggtctggtacacgtttccgaaatggattggaccaacaaaaacatccacccgtccaaagttgttaacgttggcgatgtagtggaagttatggttctggatatcgacgaagaacgtcgtcgtatctccctgggtctgaaacagtgcaaagctaacccgtggcagcagttcgcggaaacccacaacaagggcgaccgtgttgaaggtaaaatcaagtctatcactgacttcggtatcttcatcggcctggacggcggcatcgacggcctggttcacctgtctgacatctcctggaacgttgcaggcgaagaagcagttcgtgaatacaaaaaaggcgacgaaatcgctgcagttgttctgcaggttgacgcagaacgtgaacgtatctccctgggcgttaaacagctcgcagaagatccgttcaacaactgggttgctctgaacaagaaaggcgctatcgtaaccggtaaagtaactgcagttgacgctaaaggcgcaaccgtagaactggctgacggcgttgaaggttacctgcgtgcttctgaagcatcccgtgaccgcgttgaagacgctaccctggttctgagcgttggcgacgaagttgaagctaaattcaccggcgttgatcgtaaaaaccgcgcaatcagcctgtctgttcgtgcgaaagacgaagctgacgagaaagatgcaatcgcaactgttaacaaacaggaagatgcaaacttctccaacaacgcaatggctgaagctttcaaagcagctaaaggcgagtaa

SEQ ID NO: 472936 - DNA, 285 bp, Shigella flexneri; identical to SEQ ID NO: 459702

SEQ ID NO: 472937 - DNA, 354 bp, Shigella flexneri
atgaaaataacgacagtcggcgtatgcataatttgcggaatttttccgttgctgattttgccccaattgcctaggacattaacccttgcgtttctgactctcttcgcctgcgtactggcatttatccctgttaaaaccgtccgttatatcgcgctgacgttgctgtttttcgtttggggcatattatcagcaaagcaaattttgtgggcaggagaaaccttaactggcgcgacgcaggatgcaattgttgagatcactgcaactgacggcatgaccactcattacggtcaaattacttatctacaaggtcgacgtatattccctgcgccaggccttgtgctgtatggcgaataa

SEQ ID NO: 472938 - DNA, 1197 bp, Shigella flexneri
atgaaactcaaagttcgtgcagttcatggccaacttaatgatggcggctttgatagccagcgttatgccattgcccagcatcagccgctcaccggccgttttctgcaggcaagtgtcattgaaccgaattgtagcctgcgtgcacagtatctggcgtcactacaaacaacgctgcaaccctatccgtggaatgcggttattcttggtttaggtatgggggaacggttatccgtccccaaagaaatcaaaaatatcatgcgcgatactggaacggcgcatttaatggcgatatcgggattgcacatcgcttttgcggcgttgctggctgccggactcattcgcagtggacaaatttttctgcctgggcgctggatccactggcaaataccattaattggcggaatctgctgtgctgctttttatgcctggttgacgggaatgcaacctcctgcattgcgtaccgtggtggcgcttgctacgtggggaatgcttaagttaagtgggcgacagtggagtggctgggatgtatggatatgttgtctggcggcaattttgctgatggatcctgttgccattctctcgcaaagtttatggctctctgccgctgcggtcgcggcactgattttttggtatcagtggtttccctgtcctgagtggcaactgccgccggtattgcgtgcagttgtttccctcatccatctgcaactgggaatcacactcctgcttatgcccatgcaaatcgtcatatttcatggcattagtctgacctcgtttattgcaaatctatttgcaattcccttggtgacatttatcacggttccgttgatcctcgccgcgatggttgtgcattttagcgggccgttaatcctggaacaggggttatggtttcttgccgaccggtctttggctttacttttctgggggttaaagagtttgccggaagggtggatcaacattgttgaatgttggcaatggctatcattttccccatggttcttactggtggtatggcgattaaacgcctggcgaacgttgccagcaatgtgtgtggctggaggcttgctgatgtgctggccgctgtggcaaaaacctcgacctgacgagtggcagctgtacatgcttgatgtcgggcaagggctggcaatggtgatagccagaaacggcaaagcgattctctatgacacaggactggcctga

SEQ ID NO: 472939 - DNA, 693 bp, Shigella flexneri
atgacacaggactggcctgaaggggatagtgggcaacaactgattatcccctggctccactggcataatcttgaaccggaaggcgttattctgagccatgaacatctggatcaccggggagggctggattcaatattgcatatatggccgatgttatggatcagaagtccgttaaactgggaacatcatcagccctgtgtgcgtggcgaagcgtggcagtggcaaggattgcgtttcagcgcgcactggcctttacaaggtagcaacgataagggaaataaccattcctgtgtggttaaggttgatgacgggacgaatagcattcttctaaccggtgatattgaagccccagctgaacaaaagatgctaagccgttactggcagcaagtgcaggcaacattgcttcaggtacctcaccatggcagtaatacctcatcatcgttgccattaattcagcgagtgaatggaaaagtggcactcgcatcggcatcgcgctataacgcatggcgattgccctctaacaaagttaagcatcgctatcaacagaaaggatatcaatggcttgatactccacatcagggtcaagtgacggtcaatttttcagcacaaggctggcggattagcagcctcagagagcaaattttacctcgttggtatcatcagtggtttggcgtgccagtggataacgggtag

SEQ ID NO: 472940 - DNA, 1749 bp, Shigella flexneri
atgcataacgacaaagatctctctacgtggcagacattccgccgactgtggccaaccattgcgcctttcaaagcgggtctgatcgtggcgggcgtagcgttaatcctcaacgcagccagcgataccttcatgttatcgctccttaagccacttcttgatgatggctttggtaaaacagatcgctccgtgctggtgtggatgccgctggtggtgatcggactgatgattttacgtggtatcaccagctatgtctccagctactgtatctcctgggtatcaggaaaggtggtaatgaccatgcgtcgccgcctgtttggtcacatgatgggaatgccagtttcattctttgacaaacagtcaacgggtacgctgttgtcacgtatcacctacgattccgaacaggttgcttcttcttcttccggcgcactgattactgttgtgcgtgaaggtgcgtcgatcatcggcctgttcatcatgatgttctattacagttggcaactgtcgatcattttgattgtgctggcaccgattgtttcgattgcgattcgcgtagtatcgaagcgttttcgcaacatcagtaaaaacatgcagaacaccatggggcaagtgaccaccagtgcagaacaaatgctgaagggccacaaagaagtattgattttcggtggtcaggaagtggaaacgaaacgcttcgataaagtcagtaaccgaatgcgtcttcaggggatgaaaatggtttcagcctcttccatctctgatccgatcattcagctgatcgcctctttggcgctggcgtttgttctgtatgcggcgagcttcccaagtgttatggataacctgactgccggtacgattaccgttgttttctcttcaatgattgcactgatgcgtccgctgaaatcgctgaccaacgttaacgcccagttccagcgcggtatggcggcttgtcagacgctgtttaccattctggacagtgagcaggagaaagacgaaggtaagcgcgtgatcgagcgtgcgactggcgacgtggaattccgcaatgtcacctttacttatccgggacgtgacgtacccgcattgcgtaacatcaacctgaaaattccggcagggaagacggttgctctggttggacgctctggttcaggtaaatcaaccatcgccagcctgatcacgcgtttttacgatattgatgaaggcgaaatcctgatggatggtcacgatctgcgcgagtataccctggcgtcgttacgtaaccaggttgctctggtgtcgcagaatgtccatctgtttaacgatacggttgctaacaacattgcttacgcacggactgaacagtacagccgtgagcaaattgaagaagcggcgcggatggcctacgccatggacttcatcaataagatggataacggtctcgatacagtgattggtgaaaacggcgtgctgctctctggcggtcagcgtcagcgtattgctatcgctcgagccttgctgcgtgatagcccgattctgattctggatgaagctacctcggctctggataccgaatccgaacgtgcgattcaggcggcactggatgagttgcagaaaaaccgtacctctctggtgattgcccaccgcttgtctaccattgaaaaggcagacgaaatcgtggtcgtcgaggatggtgtcattgtggaacgcggtacgcataacgatttgcttgagcaccgcggcgtttacgcgcaacttcacaaaatgcagtttggccaatga

SEQ ID NO: 472941 - DNA, 987 bp, Shigella flexneri
atgatcgaaaaaatctggtctggtgaatcccctttgtggcggctattgctgccactctcctggttgtatggcctggtgagtggcgcgatccgtctttgctataaactaaaactgaagcgcgcctggcgtgcccccgtaccggttgtcgtggttggtaatctcaccgcaggcggcaacggaaaaaccccggtcgttgtctggctggtggaacagttgcaacagcgcggtattcgcgtgggggtcgtatcgcggggatatggtggtaaggctgaatcttatccgctgttattgtcggcagataccaccacagcacaggcgggtgatgaacctgtgttgatttatcaacgcactgatgcgcctgttgcggtttctcccgttcgttctgatgcggtaaaagccattctggcgcaacaccctgatgtgcagatcatcgtaaccgacgacggtttacagcattaccgtctggcgcgtgatgtggaaattgtcgttattgatggtgtgcgtcgctttggcaatggctggtggttgccggcggggccaatgcgtgagcgagcggggcgcttaaagtcggttgatgcggtaatcgtcaacggcggtgtccctcgcagcggtgaaatccccatgcatctgctgccgggtcaggcggtgaatttacgtaccggtacgcgttgtgacgttgctcagcttgaacatgtagtggcgatggcggggattgggcatccgccgcgcttttttgccacgctgaagatgtgtggcgtacaaccggaaaaatgtgtaccgctggccgatcatcagtctttgaaccatgcggatgtcagtgcgttggtaagcgccgggcaaacgctggtaatgactgaaaaagatgcggtgaaatgccgggcctttgcagaagaaaattggtggtatttgcctgtagacgcacagctttcaggtgatgaaccagcgaaactgcttacgcaactaacctcgctggcttctggcaactag

SEQ ID NO: 472942 - DNA, 1233 bp, Shigella flexneri
atgtcgctgccgcacctctcccttgctgatgcgcgtaatcttcaccttgccgcacaaggcctgttaaacaaaccccgccgtcgagcgtcgttggaggatattccggcaacgatctcccgcatgtccttgctgcaaatcgataccatcaatattgttgcccgtagtccatatctggtgcttttcagtcgtctgggaaattatcctgcccagtggctggatgagtctctggcgcgtggcgaattaatggaatactgggcgcatgaagcctgctttatgccgcgtagcgactttcgtcttattcgccaccgcatgctggcacctgaaaaaatgggctggaaatacaaagacgcctggatgcaggaacatgaggcggaaattgcacagttaattcagcatattcatgataaagggccggtacgttcagccgattttgagcatcctcgtaaaggtgcaagcggctggtgggaatggaagccgcataaacggcatctggaaggtttatttactgccggaaaggtgatggtgattgaacggcgcaacttccagcgcgtttatgatttaacccaccgtgtcatgcctgactgggatgatgagcgcgatctcgtttcgcaaacagaagcagaaatcatcatgctggataacagtgcgcgtagcctgggaatattccgcgaacagtggctggcagattactatcggctgaaacgtccggcactggcggcgtggcgcgaagcgagggctgaacagcagcaaatcattgctgtgcatgttgaaaaattgggcaatctttggctgcatgctgatttgctgccgctactcgagcgtgcgctggccggaaagctcactgcaacgcacagcgcggtactttcgccttttgatcctgttgtctgggatcgcaaacgcgcagagcagctttttgattttagctaccggctggagtgctataccccagcgccgaaacgccagtatggctattttgttctgccattattacatcgtgggcaattagttgggcgaatggatgccaaaatgcatcgccagacaggcatccttgaagttatctctctgtggttacaggaaggcattaaaccaacgacaatgctgcaaaaagggttacgtcaggcgattactgatttcgcgagctggcagcaggcaacgcgggtgacattaggacgctgcccgcaaggtctctttactgattgccgcactggctgggaaatagaccccgtcgcataa

SEQ ID NO: 472943 - DNA, 183 bp, Shigella flexneri; identical to SEQ ID NO: 459681

SEQ ID NO: 472944 - DNA, 747 bp, Shigella flexneri
atgagttttgtggtcattattcccgcgcgctacgcgtccacgcgtctgcccggtaaaccattggttgatattaacggcaaacccatgattgttcatgttcttgaacgcgcgcgtgaatcaggtgccgagcgcatcatcgtggcaaccgatcatgatgatgttgcccgcgccgttgaagccgctggcggtgaagtatgtatgacgcgcgccgatcatcagtcaggaacagaacgtctggcggaagttgtcgaaaaatgcgcattcagcgacgacacggtgatcgttaatgtgcagggtgatgaaccgatgatccctgcgacaatcattcgtcaggttgctgataacctcgctcagcgtcaggtgggtatggcgactctggcggtgccaatccacaatgcggaagaagcgtttaacccgaatgcggtgaaagtggttctcgacgctgaagggtatgcactgtacttctcacgtgccaccattccttgggatcgtgatcgttttgcagaaggccttgaaaccgttggcgataacttcctgcgtcatcttggtatttatggctaccgtgcaggctttatccgtcgttacgtcaactggcaggcaagtccgttagaacacatcgaaatgttagagcagcttcgtgttctgtggtacggcgaaaaaatccatgttgctgttgctcaggaagttcctggcacaggtgtggatacccctgaagatcttgagcgcgttcgcgctgaaatgcgctaa

SEQ ID NO: 472945 - DNA, 894 bp, Shigella flexneri; identical to SEQ ID NO: 459679

SEQ ID NO: 472946 - DNA, 780 bp, Shigella flexneri
atgctttttacactgaaaaaagtgattggcaatatgttgctgccacttccgctgatgttgttaattattggcgctggcctggcgctgctgtggtttagccgttttcaaaaaaccgggaagatttttattagcattgggtggctggcactcttgttattgagtttgcaaccggtagccgaccgcctgctgcgtcccatcgaaagcacctatccgacatggaataattcgcaaaaagtggactatatcgtggtgctcggaggtggttatacctggaacccgcagtgggcaccgagctctaatttaatcaataacagtctgccacgcctgaatgagggtatccgtttatggcgcgaaaatccgggttcaaaactgatcttcacgggaggcgtagcaaaaaccaatacggtgagtacagcggaagtaggtgccagagttgcgcaatcgctgggcgtaccgcgcgagcaaattatcaccctggatttgccaaaagataccgaagaagaagctgcggcagtgaaacaggcgattggtgacgcccctttcctgctggtgacctccgcatcacatctgccgcgggcgatgatcttttttcagcaggaagggttaaatccgctaccagccccggcgaatcagttggccatcgactcgccgcttaatccgtgggaacgggcaatcccttctccggtctggctgatgcatagcgatcgtgttggctatgaaacgcttggccgcatctggcagtggctgaaaggtccgtcaggcgagccacggcaagagtga

SEQ ID NO: 472947 - DNA, 786 bp, Shigella flexneri
atgcaggatcgcaattttgatgatattgcggaaaagttttcccgtaacatttacggcaccaccaaagggcagcttcgacaggctattctgtggcaggatctcgatcgcgtgctggcggaaatgggcccgcaaaaactgcgtgtgctggatgctggcggcggagaagggcagaccgcaatcaaaatggccgagcgcgggcatcaggttattttatgcgatctttctgcgcagatgatcgaccgcgcaaaacaggcggcagaagcaaaaggtgtgagcgacaacatgcaatttatacattgcgccgctcaggatgttgcttcgcatttggaaacgcccgttgatctgatattgttccatgcggtgctcgagtgggtggccgatccccgcagtgtattgcagaccctgtggtcagtgttgcgtccaggcggagtgttgtcgttaatgttctacaatgcgcatggtttgttgatgcataacatggtcgccgggaattttgattacgtgcaggcgggaatgccgaaaaagaaaaaacggacgctttcgccagattatccacgcgacccggcgcaggtttatctgtggctggaagaagctggttggcaaattatgggtaagacaggcgttcgcgtgtttcatgattatctgcgcgagaagtaccagcagcgcgactgctatgaagcattacttgaattagaaacgcgttattgccgtcaggaaccgtatattaccctagggcgttatattcatgtcaccgcgcgcaaaccgcagagcaaggataaagtatga

SEQ ID NO: 472948 - DNA, 1323 bp, Shigella flexneri
atgagtgaattttcccagacagtccccgaactggttgcctgggccagaaaaaatgacttctccatctcgctgccggtagaccgactctcttttctgctggcggttgccacgctgaacggcgagcgtctggatggtgagatgagtgaaggcgagctggtggatgcattccgccatgtgagtgatgcgtttgagcaaaccagcgaaaccatcggcgtgcgcgccaataacgcgatcaacgacatggtgcgtcaacgtctgctgaaccgctttaccagcgagcaggcggaagggaacgcaatttaccgtctgacgccgctcggcatcggcattactgactactacatccgtcagcgcgagttttctacgctgcgtctttctatgcagttgtcgattgtggcgggtgagctcaaacgcgcagcagatgccgccgaagagggcggtgatgaatttcactggcaccgtaatgtctatgcgccactgaaatattcggtagcagaaattttcgacagtatcgacctgacgcaacgtctgatggacgaacagcagcagcaggtgaaggacgatatcgcccagttgctgaacaaagactggcgggcggcgatttccagctgtgaattgttgctttcggaaacttccggaacgctgcgtgaattgcaggatacgctggaagcggcaggcgacaaattgcaggctaatctgttgcgcattcaggatgcgacgatgacccatgacgatctgcatttcgtcgatcgtctggtgttcgatctgcagagcaaactcgatcgtattatcagttggggccagcaatccatcgacttgtggattggctacgaccgccacgtacacaaatttattcgtaccgcgatcgatatggataaaaaccgcgtctttgctcagcggttacgtcagtcggtacaaacctattttgatgagccgtgggcgctaacttatgccaatgccgatcgtctgctggatatgcgtgacgaagagatggcactgcgcgatgaagaagtgactggggaacttcctgaggatctggaatacgaagagtttaacgagatccgcgaacagctggcggcgatcatcgaagaacaacttgccgtgtacaaaaccagacaagtgccgctggatcttggtctggtggtacgcgaatatctgtcacagtatccgcgtgcacgtcactttgacgttgcgcgtattgttattgatcaggcggtacgtcttggcgtagcgcaagcagatttcaccggactgccagcgaaatggcagccgattaatgattacggagccaaggtacaggcgcatgtcatcgacaaatattga

SEQ ID NO: 472949 - DNA, 705 bp, Shigella flexneri
atgtcatcgacaaatattgaacaagtgatgccggttaagctggcgcaggcgctggcgaatccgttatttccggcgctggacagcgccttacgttcaggccgccatattggcctcgacgaactggataatcatgcattcctgatggattttcaggaatatctggaagagttttacgcgcgttataacgttgagcttattcgcgcaccggaagggttcttctatttacgcccacgttccaccactcttatcccgcgttccgtcttgtcggaactggatatgatggtcgggaaaatcctctgttatctctatctcagcccggaacggctggcgaatgaggggattttcacccagcaggaactgtacgacgaactgctcaccctggccgatgaagcgaaactgctgaaactggtgaacaaccgttcaaccggttcagacgttgaccgtcagaagttgcaggagaaagtacgttcttcgctcaaccgtctgcgtcgtttaggcatggtgtggtttatgggccacgacagcagcaagttccgcattaccgaatcggtgttccgcttcggagccgatgtgcgtgctggcgacgatccccgtgaagcacagcgtcgcctgattcgtgatggcgaagcaatgccgattgaaaatcatctgcaactcaacgatgaaaccgaagagagtcagccagatagcggagaggaagaataa

SEQ ID NO: 472950 - DNA, 4461 bp, Shigella flexneri
atgattgaacgcggtaaatttcgctcactgacgctgattaactggaacggcttttttgcccgaacttttgaccttgacgagctggtcacgacgctttccggcggtaacggggcgggtaaatccaccacgatggcggcgttcgttacggcgctgatccccgacctgaccctgctgcatttccgtaacactacggaagccggggccaccagcggttcgcgcgataaaggtctgcacggtaagctgaaagcgggtgtctgttattcgatgctcgacaccattaactcgcgccaccagcgcgtggtggtcggtgtgcgtctgcaacaggttgccggacgcgatcgtaaagtggatatcaaaccatttgccattcagggactgccgatgtcggtgcagccgacacagctggtgaccgaaaccctgaacgaacgccaggcgcgcgtgctgccgcttaacgagctgaaagacaagctcgaggcgatggaaggcgtgcagtttaaacagttcaactccattaccgattaccactcgctgatgttcgatctgggcatcatcgcgcgtcgtctgcgctccgcatctgaccgtagcaaattctatcgtctgatcgaagcttcgctgtatggcgggatctccagtgctattacccgttctctgcgcgactacctgttgccggaaaacagcggcgtgcgtaaagcgttccaggacatggaagcggcgctgcgtgaaaaccgcatgacgctggaagcgattcgtgtcacccagtcggaccgtgacctgtttaagcatctgatcagcgaagctaccaactacgtggcggcggactacatgcgtcacgccaacgagcgccgtgtccatctcgacaaagccctggagtttcgtcgcgagctacatacttcgcgtcagcaactggcggctgagcagtacaaacacgtcgatatggcgcgtgagctggcagagcacaacggtgccgaaggcgatctggaagcggattatcaggcggccagcgatcacctgaacctggtgcaaaccgcattgcgtcagcaggagaagatcgaacgctacgaagtggatctcgatgagctgcagatccgtctggaagagcaaaatgaagtggtggcagaagccatcgaacgccaggaagagaatgaggctcgcgcggaagctgccgaactggaagtggacgagctgaaaagccagcttgctgactaccagcaggcgctggacgtccagcaaacgcgcgcgatccagtataaccaggcgattgctgcgcttaatcgtgccaaagaactgtgccatctgccggacttaaccgccgacagcgccgccgaatggctggaaaccttccaggcgaaagagctggaagcgactgaaaaaatgctctctcttgagcagaaaatgagcatggcgcaaaccgcgcacagccagtttgagcaggcttatcagctggtggtggcaatcaacggcccgctggcgcgtaacgaggcgtgggatgtcgctcgcgaactattgcgcgaaggggttgatcagcgtcacctggcagagcaggttcagccgttgcggatgcgcttaagcgaactggaacagcgtctgcgtgagcagcaagaagctgagcgtctgctggcagatttctgcaaacgtcagggcaagaattttgatattgatgaactggaagctctgcatcaggagctggaagcacgcattgcctctctttccgatagcgtatctaacgcccgtgaagagcggatggcactgcggcaggaacaggaacagctgcagtctcgcattcagagtttgatgcagcgtgcaccggtttggctggcagcgcaaaacagtctcaaccagttgagtgaacagtgcggcgaagagttctcctccagccaggacgtcactgaatatctgcaacagttgctggagcgtgagcgcgaggcgattgttgaacgcgatgaagtaggcgcgcgcaaaaacgccgtcgatgaagagatcgaacgtttaagccagcctggcggctctgaagatcagcgtctgaacgcgctggcggagcgttttggtggtgtgctgctgtcagaaatttatgacgacgttagcctggaagatgcgccgtacttctcggctctgtatggcccgtcacgccacgccatcgtggtgccagatctgtcacaggtaaccgaacacctggaaggcttgaccgattgcccggaagatctctatttgatcgaaggggatccgcagtcattcgatgatagcgtgttcagcgttgatgagctggaaaaagcggtggtggtgaaaatcgccgatcgacagtggcgttattcacgtttcccggaagtgccgctgtttggtcgtgctgcgcgtgaaagccgtattgaaagcctccatgccgagcgtgaagtgctttccgaacgcttcgccacgctctcctttgatgtacagaaaacccagcgtctgcatcaggcgttcagccgctttatcggcagtcatctggcggtggcgtttgagtctgacccggaagcagaaatccgtcaactgaacagccgtcgagtcgaactggagcgggcgttgagtaatcatgaaaatgataaccagcagcagcgtattcagtttgagcaggcgaaagaaggcgttacggcgctgaaccgcattctgccgcgtctcaacctgttggctgatgacagcctggcggatcgcgtcgatgaaatccgcgaacgtctggatgaagcccaggaagccgcgcgttttgttcagcagtttggcaatcaactggcgaaactggaaccgatcgtttcggtattgcagagcgacccggaacagttcgaacagttaaaagaagattacgcgtactctcagcagatgcagcgcgatgcccgtcagcaagcgtttgccctgacggaagtggtgcagcgtcgtgcgcactttagctattctgactcggcagaaatgcttagcggtaacagcgatctcaacgaaaaactgcgtgaacgtctggaacaggcggaagcggagcgtacccgcgctcgcgaagcgttgcgcggtcacgcagcgcagttgagtcagtacaaccaggtgctggcttcgctgaaaagttcttacgacaccaaaaaagagctactcaacgatctgcaacgtgaattgcaggatatcggcgtgcgtgctgatagcggggcagaagagcgggcgcgtattcgccgtgacgagctgcatgcgcaactgagcaataaccgttcacgccgcaatcaactggaaaaagcgcttaccttctgcgaagcggagatggacaacctgacccgcaaactgcgcaagctggagcgggattactttgagatgcgcgagcaggtagtgaccgccaaagcgggctggtgtgcggtgatgcgcatggtgaaagataacggcgttgagcgccgcttacaccgtcgtgagctggcttatctctccgctgatgatttgcgttccatgtcggataaggcgttaggtgcgctgcgtctggcggtggcggataacgaacatctgcgcgacgtgctgcgcatgtcggaagatccgaaacgtccggagcgtaaaattcagttcttcgtggcggtttatcagcatctgcgtgaacgtattcgtcaggatattattcgtaccgatgatccggtggaagctatcgaacagatggagattgaacttagccgtctgaccgaagaattaacctcccgtgaacagaaactggcgatcagttcccgcagcgtggcgaacatcattcgcaaaaccattcagcgcgagcagaaccgtatccgtatgctcaaccaggggttgcagaacgtatcgtttggtcaggtgaacagcgtgcgtctcaacgtgaacgtgcgtgaaacgcacgccatgctgctggatgtgctctctgaacagcacgagcagcatcaggatctgtttaacagcaaccgtctgaccttctcggaagcgttggcgaaattgtatcagcgtcttaatccgcagattgatatggggcagcgcacgccgcagaccattggcgaagaactgctggattaccgcaactatctggaaatggaagttgaggttaaccgtggttccgatggttggttgcgcgcagagtctgatgcattgtcgaccggtgaggcgattggtaccggtatgtcgattctggtgatggtggtacaaagctgggaagatgaatctcgccgcctgcgcggtaaagatatctctccttgccgcctgctgttcctcgatgaagcagcgcgactggatgctcgttctatcgccacgctgtttgaattgtgtgaacgtttgcaaatgcagctcatcatcgcagcgccggaaaatatcagtccggaaaaaggcaccacctataaactggtacgtaaagtcttccagaataccgaacatgttcacgtcgtcggcctgcgaggatttgcgccgcaactccctgaaacgcttctaggaagagacgaagcgccttcccaggcgagttaa

SEQ ID NO: 472951 - DNA, 531 bp, Shigella flexneri
gtgagtattacgggtgttaatatcgggcgtctttttcgggaaggtttcagcaattatgatccgattggcgtattgaatgcaatggcgtcacaacgagcaaaagaggctcgtggtggagaattacaaatcaacgaattacttcccgccagcctggatgcagcaaaagcccatggactgaccgaacgcgatgtttatgaagcaactgactactataaaacaccacgcgggcaacaaccgggaggtgcgacaaaaatgttgttctcacatgcacagaaaacgctggcctgggatgccttcgcatttactgaagtgttactgacccagccggtgatggtagtagttggtgaaaaagtcggtgccttcggtgcttatcgtgatggactggaagtctatggccgggcgatggtttcgcaggatcgtcagttagtttcgttacccgatttctcacattatgaactatatgacaaaccggaagcagttcaggaggcgctggcaaaagttattccttttttcaacacccatctgggataa

SEQ ID NO: 472952 - DNA, 651 bp, Shigella flexneri
atgagaaatattatgaaaaatgtactgattcttggtgctggcggtcagatagcccgccatgtgattaatcaactggcagataaacaaactattaaacaaactttatttgcccgtcagccagcaaaaatacacaaaccctatccaactaatagccagattattatgggggatgtactgaatcatgcagcactgaagcaggccatgcagggacaggatattgtgtatgccaaccttacgggggaagatttagatattcaggcaaattcagtgatcgctgcgatgaaagcctgtgatgttaaacgtctgatctttgttctttccctcggtatttatgatgaagttccaggaaaatttgtcgaatggaataatgcagttattggtgaacccctaaaaccattccgcagggctgcggatgcaattgaggcttctggactggaatatacaattcttcgccctgcctggctgactgatgaagatattattgattatgagcttacctctcgcaatgaaccattcaaaggtacgatcgtatcacgtaagagtgtcgcagcattaattacagatatcatcgataaacctgagaaacacattggtgagaatataggcatcaatcaacccgggactgatggcgataagccattcttcatgtaa

SEQ ID NO: 472953 - DNA, 729 bp, Shigella flexneri
atgaccgtaacccgctcacgcgccgaacgcggcgcatttccgcccggaacagaacattacggacgttcattattgggcgcgccgttaatctggtttcctgcccctgcagccagccgcgaaagtggtttgattctggctggcactcacggtgatgaaaactcttcggtcgtcacgctctcctgtgctctgcggactttgacaccttctttgcgccgccatcatgtggtgctgtgtgtgaatcctgacggctgccagctggggttacgggccaatgctaatggtgtggatttaaacagaaactttccggcggcgaactggaaggaaggtgaaacggtttatcgctggaacagcgccgctgaagaacgtgatgtcgtattactgacaggtgacaaacctggctccgaacctgaaacccaggcgctgtgccagcttatacaccgcattcaacctgcctgggtggtctcattccacgatccactggcttgtattgaagatcccagacacagcgaattaggcgaatggctggcccagtcgtttgaattgcctctggtaaccagcgtcggttatgaaacgcctggctctttcggcagttggtgtgcagatctcaacttgcattgcatcaccgcagagtttccgcccatctcctccgacgaagccagcgaaaaatatctctttgcgatggcaaacttgctgcgctggcatcctaaagatgcaattcgcccgtcgtga

SEQ ID NO: 472954 - DNA, 966 bp, Shigella flexneri
atgagaatcgttaaggtatttgaggaagcctggcccttacataccccgtttgtgattgcccggggaagtcgcagtgaagcgcgcgtggtggtggttgaactggaagaagagggtattaaaggcaccggcgaatgcacgccgtatccgcgttatggagaaagtgatgcctcggtaatggcgcaaattatgagcgtcgtgccgcaattagagaaagggctgacacgggaggagttgcaaaaaattctccctgccggcgcagcacgtaatgcgctggattgtgcattgtgggatctcgcggcgcgaaaacagcagcaatcgctggctgatttgatcggcataacgcttcccgagacagttatcactgcacagacggttgtcatcggtacgcctgatcagatggccaatagtgcatcaacactctggcaggcaggcgcgaaattactgaaagtgaagctggataaccatcttatcagtgagcggatggtggcaattcgcaccgctgtgcccgatgccacgctgatcgttgatgcaaatgaatcctggcgtgcagaagggttggcggcgcgttgccagctattggcggatttaggcgttgcgatgcttgaacaaccgcttcctgcgcaggacgatgcggcgctggagaattttattcatccgttgccgatttgtgctgatgaaagttgtcatactcgtagcaatctgaaggcgctgaaagggcgctatgagatggttaacattaagctcgataaaaccggtggtctgacggaagcgctggcgctggcgactgaagcgcgtgcacaaggtttcagtctgatgctgggctgcatgttgtgtacctctcgtgccattagcgccgctttaccgctggtgccgcaggtcagtttcgccgatcttgacggaccgacctggctggcggtagatgtggaaccggcgcttcagttcacgacgggcgaattgcatctttag

SEQ ID NO: 472955 - DNA, 507 bp, Shigella flexneri
atgtcacaaaccgttcatttccagggcaacccggttacagtcgccaattccatcccgcaggcgggtagcaaagcgcagacttttactctcgtggcaaaagatctgtctgacgtcaccctcggtcagtttgcgggtaaacgcaaagtgctgaacattttcccgagtattgataccggtgtttgcgccgcatcagtacgtaagtttaaccaactggcaactgagatcgacaacaccgttgtgctgtgtatctctgccgatctgccgttcgcccagtctcgtttctgcggcgcagaaggtctgaacaacgttatcaccctctccactttccgtaacgctgaatttctgcaagcctacggtgtggcaattgctgatggcccactgaaaggtctggcagcgcgtgccgttgtggttattgacgaaaatgacaatgtgattttcagccagctggtggatgaaatcaccaccgagccggattacgaagcagctctggctgtactgaaagcataa

SEQ ID NO: 472956 - DNA, 1542 bp, Shigella flexneri
atgcgtctggaagtcttttgtgaagaccgactcggtctgacccgcgaattactcgatctactcgtgctaagaggcattgatttacgcggtattgagattgatcccattgggcgaatctacctcaattttgctgaactggagtttgagagtttcagcagtctgatggccgaaatacgccgtattgcaggtgttaccgatgtgcgtactgtcccgtggatgccttccgaacgtgagcatctggcgttgagcgcgttactggaggcgttgcctgaacctgtgctctctgtcgatatgaaaagcaaagtggatatggcgaacccggcgagctgtcagctttttgggcaaaaattggatcgcctgcgcaaccataccgccgcacaattgattaacggctttaattttttacgttggctggaaagcgaaccgcaagattcgcataacgagcatgtcgttattaatgggcagaatttcctgatggagattacgcctgtttatcttcaggatgaaaatgatcaacacgtcctgaccggtgcggtggtgatgttgcgatcaacgattcgtatgggccgccagttgcaaaatgtcgccgcccaggacgtcagcgccttcagccaaattgtcgccgtcagcccgaaaatgaagcacgttgtcgaacaggcgcagaaactggcgatgctaagcgcgccgctgctgattacgggtgacacaggtacaggtaaagatctttttgcctacgcctgccatcaggcaagccccagagcgggcaaaccttacctggcgctgaattgcgcgtctataccagaagatgcggtcgagagtgaactgtttggtcatgctccggaagggaagaaagggttctttgagcaggcgaacggtggttcggtgctgttggatgaaataggggaaatgtcaccacggatgcaggcgaaattactgcgttttcttaatgatggcactttccgtcgggttggcgaagaccatgaggtgcatgtcgatgtgcgggtgatttgcgctacgcagaagaatctggtcgaactggtgcaaaaaggcgtgttccgtgaagatctctattatcgtctgaacgtgttgacgctcaatctgccgccgctacgtgactgtccgcaggacattacgccgttaactgagctgttcgtcgcccgctttgccgacgagcagggcgtgccgcgtccgaaactggccgctgacctgaatactgtacttacacgttatgcgtggccgggaaatgtgcggcagttaaagaacgctatctatcgcgcactgacacaactggacggttatgagctgcgtccacaggatattttgttgccggattatgacgccgcaacggtagccgtgggcgaagatgcgatggaaggttcgctggacgaaatcaccagccgttttgaacgctcggtattaacccagctttatcgcaattatcccagcacgcgcaaactggcaaaacgtctcggcgtttcacataccgcgattgccaataagttgcgggaatatggtctgagtcagaagaagaacgaagagtaa

SEQ ID NO: 472957 - DNA, 1062 bp, Shigella flexneri
atgaccgaaccgttaaaaccacgtattgatttcgacggtccgctggaggtcgaacagaatccaaaattcagggcgcagcagacctttgacgaaaatcaggcgcaaaattttgccccggccacgctcgacgaagcgcaggaagaagaggggcaagtcgaagcggtaatggacgcagcgttacgtccgaaacgcagcctgtggcgcaaaatggtgatgggcgggctggctctgtttggcgcaagcgttgtcgggcagggtatacagtggacaatgaatgcctggcaaacccaggactgggtagcgctgggtggatgtgccgctggggcattgattatcggcgctggcgtaggttctgtggtaacagagtggcggcgcttatggcgcttgcgacagcgcgcccatgaacgcgacgaagcgcgtgatttattgcatagccacggcacgggcaaaggtcgcgcattttgcgaaaaactggcgcagcaggcgggtattgatcagtcgcatccggcgctgcaacgctggtatgcctcaatccatgaaacgcagaacgatcgtgaagtggtcagcctgtatgcgcatttggtccagccagttttagatgcccaggcgcggcgcgaaatcagccattcggcggcggaatcaacgttgatgattgcggtcagcccgctggcgttggtcgatatggcgtttatcgcctggcgcaatctgcgtttaattaatcgcattgccacgctgtatggcattgaactggggtattacagccgtttgcgtctgtttaagctggtattgctgaatatcgcttttgccggagccagcgaactggtgcgcgaagtggggatggactggatgtcgcaagatctcgctgctcgtttgtctacccgcgcagctcagggaattggtgctggacttctgacggtacgactcgggattaaagctatggagctttgccgcccgctgccgtggattgacgatgacaaacctcgccttggggatttccgtcgtcagcttatcggtcaggtgaaagaaactctgcaaaaaggcaaaacgcccagcgaaaaataa

SEQ ID NO: 472958 - DNA, 1398 bp, Shigella flexneri
atgaagcgacttaaaaatgaactcaatgcgctggtgaatcggggtgtcgacagacatctgcgcctcgctgtaaccggacttagccgcagcggcaaaacagcgtttatcaccgcgatggttaatcagttgctcaatattcatgccggagcacgtttgccgctgttaagcgcggtgcgtgaagagcgcttgctgggcgtaaaacgcattccccagcgtgactttggcattccgcgcttcacctatgatgaaggactggcgcagttatatggtgatcctcccgcctggccgacgcctacgcgcggcgtcagtgaaattcgcctggcgttacgttttaaatcgaacgattcgctgctgcgccactttaaggatacctccacgctgtatctggaaattgtggattatcccggcgaatggttgctcgacctgccgatgctggcgcaggattacttaagctggtcgcgccagatgacgggcttactcaatggtcagcgcggcgaatggtcggcgaaatggcgaatgatgtgcgaaggacttgacccgctagcgcctgccgacgaaaaccggctggcagacattgccgccgtgtggaccgattatctccaccactgtaaacagcaggggctgcactttattcagcctgggcgctttgtcttgccgggagatatggcaggtgcgcccgcgctgcaattcttcccgtggccggatgtcgatgcctgggacgagtccaaactggcgcaggccgataagcacaccaatgccggaatgctgcgcgagcggtttaattattactgcgagaaagtggtgaaggggttctataagaatcattttctgcgctttgaccgccagattgtgctggtggattgcctgcaacctctcaacagtgggccacaggcatttaatgatatgcgtctggcactgacgcagctgatgcaaagtttccactacgggcagcgcacgctgtttcgccgcttattctcgccggttatcgacaaactgctgtttgccgcgatgaaagcggaccatgtaacggtcgatcagcacgccaatatggtttcattactgcaacaactgattcaggatgcctggcaaaatgcggcgtttgaaaggattagtatggattgcctggggctggcctcggtgcaggcgaccaccagcggcattattgacgtcaacggcgagaaaattccggcattgcgcggtaaccggctcagcgatggtgcgcctctcaccgtttaccccggtgaagttcctgcgcgtttgcccggtcaggcgttctgggacaagcaagggttccagtttgaagcgtttcgcccgcaggtgatggatgtcgacaaaccgctgccgcatattcgtcttgatgccgcgctggaatttttaataggagataaattgcgatga

SEQ ID NO: 472959 - DNA, 999 bp, Shigella flexneri
atgtcccctactatttatgatattgccagggttgcaggcgtatcaaaatccaccgtatcacgcgtgctgaataagcaaactaatatctccccggaagcgcgcgaaaaagtgttacgggccattgaagaattacagtatcagccaaacaagctggcccgcgcgctgacctcttcgggttttgatgccattatggtgatttctacccgttcgaccaaaactacggcgggtaatccgtttttctctgaagttttgcatgccatcaccgccaaagcggaagaagaaggtttcgacgtgatattacaaacgtcgcacaatccggcagaagatctgcaaaaatgcgaaagcaaaattaaacagaaaatgattaaaggcattattatgctcagttcgccagcggatgagtcattttttgcccaactcgataaatacgatattccggtggtggtaattggcaaagttgaaggtcaatatgcccatgtttattctgtcgataccgataattttggtgacagcattgcgttgaccgatgcattaattgaaagtgggcatcaaaatattgcctgcctgcatgctccgcttgatgtccatgtttcggttgatcgcgttaatggctataagcaaagtctgtccgcgcataatattgcagtgcgtgataaatggattgttgacggcggttatacccatgaaacagcactgcaagcagcacggcaattattaagtcagtcaccgttgcctgaggcagtgtttgccactgacagcctgaaattaatgagcatttatcgtgcggcggcagagaaaaatattgctattccgcagcagttagcggtggtgggttatagtaatgaaacgctgtcgtttattttaacgcctgcaccaggcggcatcgatgttccgacgcaggagttaggtcaacaaagctgcgagttattattccgcttaatttcgggaaaaccgtcaccacagaatattaccgttgccacgcatatgacgctgaaataa

SEQ ID NO: 472960 - DNA, 681 bp, Shigella flexneri
atgtgtgcgggaatggcctgcgcacaggccgaggaaaagagcgactggcactttaatatcggtgcgatgtacgaaatagaaaacgtcgagggttatggcgaagatatggatgggctggcggagccttcagtctattttaatgccgccaacgggccgtggagaattgctctggcctattatcaggaagggccggtagattatagcgcgggtaaacgtggaacgaggtttgatcgcccggagctggaggtgcattatcagttcctcgaaagcgatgatttcagtttcggcctgaccggcggtttccgtaattatggttatcactacgttgatgaaccgggcaaagacacggcgaatatgcagcgctggaaaatcgcgccagactgggatgtgaaactgactgatgatttacgtttcaacggttggttgtcgatgtataaatttgccaacgatttgaacacgaccggttacgctgatacccgtgtcgaaacggaaacaggtctgcaatataccttcaacgaaacggttgctttgcgagtgaactattatctcgagcgcggcttcaatatggacgacagccgcaataacggtgagttttccacacaagaaattcgcgcctatttgccgctgacgctcggcaaccactcggtgacgccgtatacgcgcattgggctggatcgctag

SEQ ID NO: 472961 - DNA, 969 bp, Shigella flexneri
atggctcagctttcgttacaacatattcaaaaaatctacgataaccaggtgcatgtggtgaaggacttcaacctggaaattgccgataaagagttcatcgtatttgtcggcccgtcgggctgcggtaaatcgaccaccctgcgcatgattgccgggcttgaggagatcagcggcggcgatctgttgatcgacggcaaacgaatgaatgacgttccagccaaagcacgcaatatcgcgatggtgttccagaactacgcgttgtatccgcatatgacggtttacgacaacatggcgtttggcctgaagatgcaaaaaatcgccaaagaggtgattgatgagcgggtgaactgggcggcgcaaattctcggcctgcgtgagtacctgaaacgcaagccgggcgcgctttccggcgggcaacgccagcgtgtggcgctcgggcgggcgattgtgcgcgaagcgggcgtgtttttaatggatgaaccgctctctaaccttgatgccaagctgcgcgtacaaatgcgtgcagagatcagcaagctgcatcagaaactgaacaccaccatgatctacgtgacccacgatcagaccgaagcgatgaccatggcggcgcggattgtgattatgaaagacgggattgttcagcaagtaggtgcgccgaaaaccgtttataaccaacccgcgaatatgtttgttgccggatttattggatcaccagcgatgaattttattcgcggcacgatcgatggcgataaattcgttacggaaacgcttaaattaaccattctcgaagagaaattagcggttctgaaaacacaggaaagtttgcataagcccatcgtgatgggaatacgcccggaagatattcatccggacgcgcaagaggaaaataacatttccgccaaaattagcgtggcagaattaaccggtgcggaatttatgctctacaccacggttgggggcacgagttag

SEQ ID NO: 472962 - DNA, 660 bp, Shigella flexneri
atgaaactgcaaggggtaattttcgatctggatggtgtaatcaccgataccgcgcatctgcatttccaggcgtggcagcagattgccgctgaaattggcatcagtattgatgcgcagtttaacgaatctctaaaagggatcagccgcgatgagtctctgcggcgcattctgcaacacgggggcaaagagggcgactttaacccgcaggagcgggcgcaactggcgtatcgcaaaaatctgctttacgtccactcactgcgcgagctgacggttaatgctgtgctgcccggtattcgcaatttgctggcagagctccgtgcacagcagattccggtagggctggcttccgtctccctgaatgcgccgacgattttagcggcgctggagctgcgcgagtttttcaccttctgcgcggatgcttcccaacttaaaaactcgaaaccggatccggaaatctttctcgctgcctgtgccgggctgggcgtgccgccgcaggcatgtatcggcattgaagatgcgcaggcgggcattgacgccattaacgccagcggtatgcgctcggtggggatcggtgcgggcttaaccggggcgcaattactgttgccctcaacggactccctgacctggtcgcggttatcggccttctggcaaaacgtatag

SEQ ID NO: 472963 - DNA, 2268 bp, Shigella flexneri
atgaccaggccagtaacgttatcagaaccccatttcagccagcataccctgaacaagtatgcatcgctgatggcgcaggggaacggctatcttgggcttcgcgccagccatgaagaagattacacgcgccagacgcgagggatgtatctggcggggctgtatcatcgggcgggaaaaggtgaaatcaacgaactggtgaatctgcctgatatcttggggatggagattgccataaatggtgaggttttctcgttatcccgcgaagcctggcagcgtgaacttgactttgccagtggagaattacgccgtagcgttgtctggcgtaccagcaacggcgcaggttacaccatcgccagccgtcgctttgtttcggcagaccaactgccgctcattgcgctggaaatcactattatgccactggacgccgacgcgtcagtgctgatttcaacaggcattgacgccacgcaaaccaaccacggtcgccagcatctcgacgaaacccaggtgcgggtgtttggtcagcatttgatgcaggggatctacaccacccaggatgggcgcagtgatgtggccatcagttgttgctgccaggtgagcggtgatgtgcagcaatgctataccgccaaagagcgccgtttactgcaacataccagtacgcagcttcatgcaggcgagacagtgacgttgcaaaaactggtgtggatcgactggcgggatgacaggcaagctgctttagacgagtggggcagcgtgtcgcttcgccagcttgaaatgtgcgcgcaacagagttacgaccaacatcttgcagcatcaacagaaaactggcgtcaatggtggcagaaacgtcgtatcacggtaaatggcggcgatgcgcacgatcagcaagcgttagattatgcgctttatcatctgcgcatcatgacgccggctcacggcgagcgcagcagtattgcggcaaaaggcttaaccggcgaaggctacaaaggccacgttttctgggatacagaagtatttttgctgccgttccatctgtttagcgatccgacggttgcccgaagtttactgcgttatcgctggcacaacttgccaggcgcgcaggagaaagcgcgacgcaacggctggcagggcgcgctatttccgtgggaaagcgcgcgcagcggcgaagaagagacgccggaatttgccgccattaacattcgcaccgggctgcggcaaaaagtggcctcggcgcaggcggaacatcatctggtggccgatatcgcctgggcggttattcaatactggcagaccacgggggatgaaagtttcattgcgcatgaaggcatggcgctacttctggaaactgcaaagttctggattagccgcgcggtgagggttaacgaccgtctggaaattcatgatgttattgggccagacgaatataccgaacatgtcaataataacgccttcaccagctatatggtgtattacaacgtccagcaggcgctgagtattgcccgccagtttggctgtagtgacgacgcgtttattcatcgtgccgaaatgttccttaaagaactgcggctgccagaaattcagcccgacggtgttttgccgcaggatgattcgtttatgactaagccggcgattaatctggcgaaatacaaagcggcggcggggaagcaaaccattctgctggattattcacgcgcagaagtgaacgagatgcagatcctcaaacaagctgatgtggtgatgctcaattacatgctgccagagcagttctcatcggcatcgtgtcttgccaatctgcaattttatgaaccgcgcactattcacgactcgtcattaagtaaagcaatccacggcattgttgctgcacgctgtggcctgctgacccaaagttatcagttctggcgcgaggggactgaaatcgatcttggtgctgatccgcatagttgtgatgatggtatccatgctgccgcaactggcgctatctggctgggggcgattcagggttttgccggggtgagcgtgcgtgacggtgaattgcatctaaatccggcgttacttgagcagtggcaacagttgtctttccctctgttctggcagggctgcgaattacaggtcactctcgacgcgcagcgtattgcgattcgaacttctgcgcccgtttcactgcgtttgaacggtcagcttatatccgtggctgaagaatctgttttctgtttgggtgattttattttgcccttcaatgggaccgctaccacgcatcaggaggatgaatga

SEQ ID NO: 472964 - DNA, 624 bp, Shigella flexneri
gtgaccaacggcgttttgggagagatttacgttaccaccgcccgcgccctgcgtcgctgcggcgttcccggctggggtgtctttaccaataaagaactgcagggtggtggcctgctgatcgacatcggcattcatatgctggatgctgcgatgtatgtgctgggctttccggcggtgaaaagcgtgaatgcgcatagttttcaaaagatcggcacgcaaaagagctgtggtcaatttggcgagtgggatccggcaacttacagcgtcgaagattcgctgtttggcaccattgaatttcataacggcggcattctgtggctggaaacgtcatttgcactcaacatccgcgaacagttgattatgaacgtcagcttttgtggtgataaagccggtgcgacgctgtttccagcacatatctacaccgataacaacggtgaattaatgacgctgatgcaacgggaaatggcagacgacaaccgccatttgcgcagcatggaagcctttatcaatcacgtacagggcaagcccgtgatgatagccgacgccgagcaggggtacatcatccagcaactggtggcggcgttatatcaatccgcagaaacagggacgcgtgtggaattatga

SEQ ID NO: 472965 - DNA, 435 bp, Shigella flexneri
gtgaaaagtgcaatgacaagctctccgctgcgggtcgcgataataggcgcgggccaggtggcggataaggttcatgcttcgtactactgcacccgcaacgatctggaactggtggctgtctgtgacagccgcctttcccaggcgcaggcgctggcagaaaaatacgggaatgcatccgtgtgggacgatccgcaggccatgctgctggcggtgaaacctgatgtggttagcgtcggctcacctaaccgttttcattacgaacataccctgatggcactggaagcaggctgccatgtgatgtgcgaaaaaccgcccgccatgacgacagaacaggcgtgggaaatgtgcgataccgcgcgcaaactgggcaaggtgctggcctacgactttcaccatcgtttgcgctcgatacgcaacagctgcgtgaacaggtga

SEQ ID NO: 472966 - DNA, 423 bp, Shigella flexneri
gtggggcatgtttaccttccgcttaccgccgatgacctcgccgcgcgtaccggaaccgtggtgtatctcgaaccgttaaaccgctatcaggatcatatgatcaacaccctcgccgatgctcgtcgttacatcgtcgaaaacaatcttaaacatgtgcagattatcggcgatttctatcacatgaacatcgaagaagataacctggcgcaggcgctgcacgacaaccgtgacttgctcggtcatgtgcatattgccgataaccatcgttaccagccgggcagtggcaccctcgatttccacgcgctgtttgaacagctgcgcgccgataactatcagggttatgtggtgtatgaagggcgtatccgggcagaagatcctgcccaggcgtaccgtgattcgttggcctggttgcgtacctgctaa

SEQ ID NO: 472967 - DNA, 1053 bp, Shigella flexneri
atgaaaaagttagtagccacagcaccgcgtgttgctgcgctggttgagtatgaagatcgggcgattttagccaatgaagtgaagatccgcgtgcgtttcggcgcaccgaaacacggaacggaagtggtcgacttccgcgccgccagcccgtttatcgatgaagactttaacggcgagtggcagatgttcaccccgcgtccggcagatgcgccgcgcggcattgagtttggcaaattccagcttggcaacatggtggttggcgacattatcgagtgcggcagcgacgttacagactacgcggtgggcgacagcgtatgcggctacggcccgctctccgagacggtcatcattaacgcagtgaataactacaagctgcgcaaaatgccgcaaggcagctcctggaaaaacgccgtctgttacgacccggcgcagtttgccatgagcggcgtgcgcgatgccaacgtacgcgtaggggattttgtcgtggtggtagggcttggcgcgatcggtcaaattgccatccaactggcgaaacgcgctggcgcatcggtggtaattggcgtcgatcctatcgcccatcgctgtgatattgcccgtcgccacggtgctgatttctgccttaaccccattggcactgacgtaggcaaagagatcaaaacgctgaccggcaagcagggggctgatgtgattatcgaaaccagcggttacgccgacgcgctgcaatcggcgctgcgcggcctggcctacggcggcaccatctcctatgtcgcgtttgccaaaccatttgctgaaggttttaacctcggacgcgaagcgcatttcaataacgccaaaattgttttctcccgcgcgtgcagcgaaccgaacccggattatccgcgctggagccgtaagcgtattgaagaaacctgctgggaactgctgatgaacggttatctcaattgcgaagatttaatcgacccggtagtgacctttgccaacagcccggaaagctacatgcagtatgtcgatcagcatccggaacagagcatcaaaatgggcgttacgttttaa

SEQ ID NO: 472968 - DNA, 843 bp, Shigella flexneri
atggcaacaaataaacgcacgctcagtcgtatcggtttttactgcgggctggcgctgtttctcatcatcacgctgtttccgttttttgtgatgctgatgacctcgttcaaaagcgcgaaagaggcgatatcgctgcatcctacgctgctgccgcaacagtggacgctggagcattacgtcgacatttttaacccgatgattttcccgtttgtcgactacttccgtaacagcatggtggtgtcggtggtttcctccgtggtggcggtatttctcggcattctcggagcttacgcgctttcccgcctgcgctttaaaggccggatgaccatcaacgccagcttttacacggtgtatatgttctctggcattttgctggtggtgcctctgttcaaaatcatcaccgcgcttggtatttacgacaccgagatggcgctgatcattaccatggtgacgcaaaccctgcccaccgccgtgtttatgctgaaaagttacttcgacaccatccctgatgagatcgaagaagcggcgatgatggatggcctcaaccgtctgcaaatcatcttccgtatcaccgtgcccctggcgatgtccgggctgatatcggtgttcgtctactgctttatggtggcgtggaacgactatctgtttgcgtcgattttcctctccagcgccagcaatttcaccttaccagtgggcctgaacgcgctgttcagtacgcctgattacatctggggacggatgatggcggcctcgctggtgaccgcattgccggtggtgattatgtatgcgctttcggaacgttttattaagagtggtttgaccgccggtggcgtgaagggctaa

SEQ ID NO: 472969 - DNA, 882 bp, Shigella flexneri
atgaacaggcttttttcaggtcgttccgatatgccgtttgcgctgctgcttctcgcgcccagcttattactgctgggcggtctggtggcgtggccgatggtgtcgaatatcgaaatcagttttttacgtctgccgctcaatcccaacatcgagtcaacgtttgttggggtgagtaactatgtgcgcattctctccgatcccggcttctggcactcgctgtggatgacggtctggtatacggcgctggtggtggcgggcagcaccgtgctcgggctggccgtggcgatgtttttcaaccgcgagttccgcctgcgcaaaaccgcgcgttcgctggtgatcctctcctacgtaacgccgtccatttcgctggtgtttgcctggaaatacatgttcaacaacggctacggcattgtgaactacctcggcgtcgatcttctgcatctctatgagcaggcaccgctgtggtttgataatccgggcagtagctttgtgctggtggtgctgttcgccatctggcgctacttcccgtatgcctttatctcgtttctggcgattttgcagaccatcgacaaatcgctgtacgaagcggcagagatggatggcgctaatgcctggcagcggtttcgcatcgtcacgctgcccgcaattatgccggtcctggcgacggtggtgaccctgcgcaccatctggatgttctacatgttcgctgatgtttatctgctgacaaccaaggtcgatattcttggtgtctatctctacaaaaccgcctttgcctttaatgacttagggaaagcggcggcgatctcggtggtgctcttcatcattattttcgctgtcattctgctgaccaggaaacgggtgaacctcaatggcaacaaataa

SEQ ID NO: 472970 - DNA, 606 bp, Shigella flexneri
atgatgcaggcgctgacctattaccgcgaccttgctgccaacaccatgccgggttctaacgacatcatggaagtgaaagacgcctttatgaacggcaccgcgccgatggcgatttactccacctatatccttccggctgtgattaaagaaggcgacccgaaaaacgtcggtttcgtggtgccaaccgagaaaaactctgcggtctacggcatgttgacctcgctgaccattaccgccggacaaaagaccgaagcagcagaaaaatttgtcacctttatggagcaggcggacaacattgccgactgggtgatgatgtcgccaggtgctgcgctgccggtgaataaagcggttgtcactaccgccacctggaaagacaacgacgttattaaggcgctgggtgaactaccgaatcagctaatcggtgaactgccaaatattcaggtctttggcgcagtaggggataaaaactttacccgcatgggcgatgtgacgggttctggtgtggtgagctccatggtgcataacgtcaccgtgggtaaagccgatctccctggcacgctgcaagcgagccagaaaaagctggatgaactgatcgaacagcactaa

SEQ ID NO: 472971 - DNA, 519 bp, Shigella flexneri
atgaatgcgttaagccgccgcgagagtagcgatgaagaacgttgcaccaggtttatccttgcccatgcgattttgttaagtttccccggtgtacccgcgatatatattcaaagtattcttggctcgcgtaatgattacgcaggtgtcgaaaaactcggatataaccgtgcgattaaccgtaaaaaatatcacagtgaagagataacacgagaactgaacgatgaagctacattaaggcatgcggtatatcatgagttgtcgcgtttaattacacttcgtcgcagccataacgagtttcatccggataataattttaccatcgatacggttaattcatccgtaatgcgtattcaaagaagtaacgctgatggtaattgtctgactggattgtttaatgtcagtaaaaatattcagcatgtaaatattactgatctgcatggtcgggatctgattagtgaagttgatatattgggtaatgaaataacgctgcgcccctggcaggttatgtggattaaataa

SEQ ID NO: 472972 - DNA, 342 bp, Shigella flexneri; identical to SEQ ID NO: 4214

SEQ ID NO: 472973 - DNA, 1161 bp, Shigella flexneri
atgacatcggaaaacccgttactggcgctgcgagagaaaatcagcgcgctggatgaaaaattattagcgttactggcagaacggcgcgaactggccgtcgaggtgggaaaagccaaactgctctcgcatcgcccggtacgtgatattgatcgtgaacgcgatttgctggaaagattaattacgctcggtaaagcgcaccatctggacgcccattacattactcgcctgttccagctcatcattgaagattccgtattaactcagcaggctttgctccaacaacatctcaataaaattaatccgcactcagcacgcatcgcttttctcggccccaaaggttcttattcccatcttgcggcgcgccagtatgctgcccgtcactttgagcaattcattgaaagtggctgcgccaaatttgccgatatttttaatcaggtggaaaccggccaggccgactatgccgtcgtaccgattgaaaataccagctccggtgccataaacgacgtttacgatctgctgcaacataccagcttgtcgattgttggcgagatgacgttaactatcgaccattgtttgttggtctccggcactactgatttatccaccatcaatacggtctacagccatccgcagccattccagcaatgcagcaaattccttaatcgttatccgcactggaagattgaatataccgaaagtacgtctgcggcaatggaaaaggttgcacaggcaaaatcaccgcatgttgctgcgttgggaagcgaagctggcggcactttgtacggtttgcaggtactggagcgtattgaagcaaatcagcgacaaaacttcacccgatttgtggtgttggcgcgtaaagccattaacgtgtctgatcaggttccggcgaaaaccacgttgttaatggcgaccgggcaacaagccggtgcgttggttgaagcgttgctggtactgcgcaaccacaatctgattatgacccgtctagaatcacgcccgattcacggtaatccatgggaagagatgttctatctggatattcaggctaatcttgaatcagcggaaatgcaaaaagcattgaaagagttaggggaaatcacccgttcaatgaaggtattgggctgttacccaagtgagaacgtagtgcctgttgatccaacctga

SEQ ID NO: 472974 - DNA, 1122 bp, Shigella flexneri
atggttgctgaattgaccgcattacgcgatcaaattgatgaagtcgataaagcgctgctgaatttattagcgaagcgtctggaactggttgctgaagtgggcaaggtgaaaagccgctttggactgcctatttatgttccggagcgcgaggcatctatgttggcctcgcgtcgtgcagaggcggaagctctgggtgtaccgccagatctgattgaggatgttttgcgtcgggtgatgcgtgaatcttactccagtgaaaacgacaaaggatttaaaacactttgtccgtcactgcgtccggtggttatcgtcggcggtggcggtcagatgggacgcctgttcgagaagatgctgacactatcgggttatcaggtgcggattctggagcaacatgactgggatcgagcggctgatattgttgccgatgccggaatggtgattgttagtgtgccaatccacgttactgagcaagttatcggcaaattaccgcctttaccgaaagattgtattctggttgatctggcatcagtgaaaaatggaccattacaggccatgctggcggcgcacgatggcccggtactggggttacacccgatgttcggcccggacagcggtagcctggcaaagcaagttgtggtctggtgtgatggacgtaagccggaagcataccaatggtttctggagcaaattcaggtctggggcgctcggttgcatcgtattagcgctgtcgagcacgatcagaatatggcgtttattcaggctctgcgccactttgctacttttgcttacgggctgcacctggcagaagaaaatgttcagcttgagcaacttctggcgctctcttcgccgatttaccgccttgagctggcgatggtcgggcgactgtttgctcaggatccgcagctttatgccgacatcattatgtcgtcagagcgtaatctggcgttaatcaaacgttactataagcgtttcggcgaggcgattgagttgctggagcagggcgataagcaggcgtttattgacagtttccgcaaggtggagcactggttcggcgattacgcacagcgttttcagagtgaaagccgcgtgttattgcgtcaggcgaatgacaatcgccagtaa

SEQ ID NO: 472975 - DNA, 1071 bp, Shigella flexneri
atgcataaagacgcgctgaataacgtacatattaccgacgaacaggttttaatgactccggaacaactgaaggccgcttttccattgagcctgcaacaagaagcccagattgctgactcgcgtaaaaccatttcagatattatcgccgggcgcgatcctcgtctgctggtagtatgtggtccttgttccattcatgatccggaaactgctctggaatatgctcgtcgatttaaagctcttgccgcagaggtcagcgatagcctctatctggtaatgcgcgtctattttgaaaaaccccgtaccactgtcggctggaaagggttaattaacgatccctatatggatggctcttttgatgtagaagccgggctgcagatcgcgcgtaaattgttgcttgagctggtgaatatgggactgccactggcgacggaagcgttagatccgaatagcccgcaatacctgggcgatctgtttagctggtcagcaattggtgctcgtacaacggaatcgcaaactcaccgtgaaatggcctccgggctttccatgccggttggttttaaaaacggcaccgacggcagtctggcaacagcaattaacgctatgcgcgccgccgcccagccgcactgttttgttggcattaaccaggcagggcaggttgcgttgctacaaactcaggggaatccggacgggcatgtgatcctgcgcggtggtaaagcgccgaactatagccctgcggatgttgcgcaatgtgaaaaagagatggaacaggcgggactgcgcccgtctctgatggtagattgcagccacggtaattccaataaagattatcgccgtcagcctgcggtggcagaatccgtggttgctcaaatcaaagatggtaatcgctcaattattggtctgatgatcgaaagtaatatccacgagggcaatcagtcttctgagcaaccgcgcagtgaaatgaaatacggtgtatccgtaaccgatgcctgcattagctgggaaatgaccgatgccttgctgcgtgaaattcatcaggatctgaacgggcagctgacggctcgcgtggcttaa

SEQ ID NO: 472976 - DNA, 363 bp, Shigella flexneri
atgaaaaagtttatcgcccccttgttggctttactggttagcggatgtcagattgatccttatactcacgcgccaaccttgaccagcaccaactggtatgatgtcggtatggaagatgcgatatcgggcagcgccataaaagatgacgatgcatttagcgattcacaggcggatcgcggtctataccttaaaggatatgccgaagggcaaaagaaaacttgccagaccgattttacctatgcccggggactttccggtaaaagctttcctgccagctgcaacaatgttgaaaatgccagccaactgcatgaagtatggcaaaaaagggctgatgaaaatgccagcacaatacgattaaattaa

SEQ ID NO: 472977 - DNA, 519 bp, Shigella flexneri
atgcgtttttctcaccgactgttcttacttctgattctcctgctgacgggagcaccaatactcgctcaagagccttctgacgttgcgaaaaacgtgcgtatgatggtttccggtattgtcagttacacccgctggcctgcgctatcagggccaccaaagttatgtatcttttcatcttcacgttttagtaccgccctacaagagaatgccgcgacatctttgccttatctgcctgtcatcattcacactcaacaagaggcgatgatttcaggctgcaatggtttttattttggcaacgagtcaccgacattccagatggaattaaccgaacaatatccgtcaaaggcgttattattaattgccgaacaaaataccgagtgcattattggtagcgccttttgtctgatcatccacaataatgacgtcagatttgccgtaaacctggatgcctcatcgcgtagcggtgtaaaggtcaacccggatgtcttaatgctcgcacggaagaaaaatgatggataa

SEQ ID NO: 472978 - DNA, 360 bp, Shigella flexneri
atgatggataacgataattctcttaataagcgccccacgtttaaaagagcattacgcaacatcagtatgaccagcatatttatcactatgatgctgatctggttgctgctttccgtgacctcggtgctgaccctgaaacagtacgcgcaaaaaaacctggcactgacagcagcaacaatgacttacagtctggaagcagctgtcgtttttgccgatggccctgcagcaactgaaacactggcagcgctgggccagcaagggcattttcaactgcagaagtacgtgataagcagcaaaatattctggcatcctggcattacccccgtaaggatccaggcgatactttcagcaatttcataa

SEQ ID NO: 472979 - DNA, 672 bp, Shigella flexneri
gtggaagcactgaaaaatatcaccgatgtcgtacatgatgtgcgttccaaccgcaatttttcccgacgagtttcggaagaacgtatcgctgagtttcaccgcttcgctctcgacttcaacagtctgctggatgaaatggaagagtggcagcttcgtttacaggccaaaaatgcgcagcttctgcgtaccgcgctacatgacccattaaccgggctggctaaccgcgcagcgtttcgtagcggcatcaatacgttgatgaacaattccgatgcccgaaaaacgtcggcgttactatttcttgatggcgataatttcaaatatatcaatgatacctggggtcatgcgacgggcgatagggtcttgattgaaatcgcaaaacggttagctgaatttggcgggctgcgacataaagcataccgcctgggcggcgatgaattcgctatggtgctctatgatgtacagtcggaatctgaagtgcagcagatatgctcagcactgacacaaatctttaatctcccgtttgatcttcataatggccatcagaccaccatgacattaagcattggttacgcgatgaccattgagcacgcctctgcggaaaaattacaagagcttgccgatcacaatatgtatcaggccaaacaccagcgtgccgaaaagctggtgagataa

SEQ ID NO: 472980 - DNA, 483 bp, Shigella flexneri
atgataaagcacctggtagcacccctgattttcacctcactaatactgactggctgccagtcccctcagggaaagtttactcctgagcaagtcgccgctatgcaatcttatggatttactgaatccgccggcgactggtcgctgggcttatcagatgccattctgttcgcaaaaaatgactacaaattgctcccggaaagccagcaacagatccaaaccatggcagccaaattggcctcgacagggctaacacatgcccgtatggatggacacaccgataactatggtgaagacagttacaacgaaggcttatcattgaaacgggcgaatgtcgtggccgatgcatgggctattggtggacaaattccacgcagcaatctcaccacacagggtttaggaaaaaaatatcccatagccagtaacaagaccgcccagggccgcgccgagaaccgccgcgtcgcagtggtgattacaaccccttaa

SEQ ID NO: 472981 - DNA, 348 bp, Shigella flexneri; identical to SEQ ID NO: 4206

SEQ ID NO: 472982 - DNA, 768 bp, Shigella flexneri
atgtggattggcataattagcctgtttcctgaaatgttccgcgcaattaccgattacggggtaactggccgggcagttaaaaatggcctgctgagcatccagagttggagtcctcgcgacttcacgcatgaccggcaccgtaccgtggacgatcgtccttacggcggcggaccggggatgttaatgatggtgcaacccttgcgggacgccattcatgcagcaaaagccgcggcgggtgaaggcgcaaaggtgatttatctgtcaccacagggacgcaagcttgatcaagcgggcgtcagcgaactggcaacgaatcaaaaattgattctggtgtgcggtcgctacgaaggtatagatgagcgcgtgatccaaaccgaaattgacgaagaatggtcaatcggcgattacgttctcagtggtggtgagttaccagcaatgacgctgattgactccgtttcccggtttattccgggagtactgggacatgaagcctcggcaacggaagattcctttgctgaaggattgctggattgcccgcactatacgcggcctgaggtgttagaagggatggaagttccgccagtgttactgtcgggcaaccatgccgagatacgtcgctggcgtttgaaacagtcgctgggccgtacctggcttagaagacctgaacttctggaaaacctggctctgactgaagagcaagcaaggttgctggcggagttcaaaacggaacacgcacaacagcaacataaacatgatgggatggcgtaa

SEQ ID NO: 472983 - DNA, 549 bp, Shigella flexneri
atgagcaaacaactcaccgcgcaagcacctgttgatcccatcgttttgggaaaaatgggttcgtcttacggtattcgtgggtggctcagagtgttttcttccaccgaagacgccgaaagcatttttgactatcagccctggtttatccagaaggcgggtcagtggcagcaagtccagctggaaagctggaagcaccacaatcaggacatgatcatcaagctgaaaggcgttgacgatcgtgatgcggcgaacctgctgacgaattgtgaaattgtcgtggattcatcgcagctgcctcagcttgaagagggggactactactggaaagacctgatgggctgccaggtagtaaccactgaaggctacgatctcggtaaagtcgttgatatgatggaaaccggatctaatgacgttctcgtcattaaggcaaacctgaaagatgcgtttggtatcaaggaacgtctcgtaccgttcctcgatgggcaggttatcaagaaagtcgatctcactactcgttcaatcgaagtagattgggatcctggtttttaa

SEQ ID NO: 472984 - DNA, 249 bp, Shigella flexneri; identical to SEQ ID NO: 4203

SEQ ID NO: 472985 - DNA, 1362 bp, Shigella flexneri
atgtttgataatttaaccgatcgtttgtcgcgcacgctgcgcaatatcagtggccgtggacgcctcactgaagacaacgtaaaagatacgctgcgcgaagtgcgcatggcgctgctggaggcggacgtcgctctgccggtagtgcgtgagtttatcaatcgcgtaaaagagaaagcggttggtcatgaagttaataagagcctgacgccggggcaggagttcgtcaaaatcgtccgtaacgaactggttgcggcgatgggcgaagagaaccagaccctgaatctggctgcgcaaccgcctgcggtcgtgctgatggcaggcctgcaaggtgccggtaaaacaaccagcgttggtaaactcggtaatttcctgcgcgagaagcacaagaagaaagtgctggtggtttctgctgacgtctatcgcccggcggcaatcaaacagcttgagacgctggcagagcaggtgggcgttgatttcttcccttctgatgttggtcagaagccggttgatattgttaacgcggcgctgaaagaagccaaactgaaattctacgacgtgctgctggtggataccgctggtcgtctgcacgttgacgaagcgatgatggacgagatcaaacaagtccatgcgtcgattaacccggttgaaaccctgtttgtggttgacgccatgaccggtcaggatgcggccaatacggcaaaagcattcaatgaagcgttaccgcttaccggcgtagtgttgaccaaagtggacggcgatgcccgcggcggtgcggcgctctctattcgtcacatcactggcaaaccgatcaagttcctcggtgttggcgagaaaactgaggcgctggagccgttccatccggaccgcatcgcgtcgcgtattctcggcatgggcgacgtactgtcgctgatcgaagatatcgaaagcaaagttgaccgcgcgcaggcagagaaattagccagcaagctaaaaaaaggcgacggcttcgatctcaacgactttcttgagcaactgcgccagatgaaaaatatgggcggcatggccagcttgatgggcaaactgccgggcatggggcagatcccggataacgtcaagtcgcagatggacgataaagtgctggtgcgtatggaagccatcatcaactcaatgacgatgaaagagcgcgctaagccagaaatcatcaaaggttcgcgtaagcgtcgtatcgccgccggttgcgggatgcaggtacaggacgttaaccgccttctgaagcagttcgacgacatgcagcgcatgatgaagaaaatgaagaaaggcggaatggcgaagatgatgagaagcatgaagggaatgatgccgccgggatttcctggtcgctaa

SEQ ID NO: 472986 - DNA, 867 bp, Shigella flexneri
atgcaacggttggagcagcgttcacctgacgctatactgcttctctttcttattgctcaaactgtcgacattactatgcccgtttttgctctgctcgcgcttgtcgcctactccgtcagtcttgcgctgattgttcccggtctgctgcaaaaaaacggcggctggcggcgcatggctattatttctgcggtcattgcgctggtctgccacgcaatcgctctggaagcccgcatcctgcccgacggtgatagcggacaaaacctcagcctgctgaacgttggttcattggtcagtttggtgatctgtacggtaatgaccattgtggcttctcgcaatcgtggctggttgctgctacccattgtctatgcctttgcgcttatcaacctggcgctggcgaccttcatgcccaatgaatacatcacccatctggaagcaacgcctgggatgctgatgcacattggcttatcgctcttttcctatgccacgctaattatcgccgccctgtacgcgctgcaactggcgtggattgattaccaactgaagaacaagaagctggcatttaaccaggaaatgccgccattgatgagtatcgagcgtaaaatgttccacatcacgcagattggcgtggtgctgctaacgctcacgctttgcactggcctgttctacatgcacaacctatttagcatggaaaatatcgacaaggctgtgctctctatcgtggcgtggtttgtctatattgtgctgctgtggggacattaccatgaaggatggcgtggacgccgcgtcgtctggtttaacgttgcgggcgcggtaattctgacactggcctacttcggcagccgaattgtccagcagttaatcagctaa

SEQ ID NO: 472987 - DNA, 1242 bp, Shigella flexneri
atggtggtcatttcagcctatttttccgggtccgaaaccggaatgatgaccctcaaccgctatcgtcttcgacatatggcgaaacagggtaatcgctcggccaaacgcgtcgaaaaattgctgcgtaagccagaccgcctgataagcctggtgttaatcggcaataacctggtcaatattcttgcctccgcgctcggcactattgtcgggatgcgtttgtacggcgatgcgggcgtggcaattgcgactggtgtgctgacttttgtcgtactggtttttgctgaggtattgccgaaaaccattgccgcgctgtacccggaaaaagtcgcttatccgagtagttttctgctggctccgctgcaaattttgatgatgccgctggtctggttgctgaatgctatcacccgtatgctgatgcgcatgatgggtatcaaaaccgatatcgtggttagcggctctttgagcaaagaagagttgcgcactatcgtgcatgaatcgcgctcacaaatttcccgtcgcaatcaggatatgctgctgtcggtgctcgatctggaaaaaatgaccgttgatgacatcatggtaccgcgcagtgaaattatcggtattgatatcaacgatgactggaaatctattctgcgccaactctcccactcacctcacgggcgcatcgtgctttaccgtgattcgctggacgacgccatcagtatgctgcgagtacgtgaagcctggcggttgatgtcggagaaaaaagagttcaccaaagaaaccatgctgcgcgccgcggacgagatctattttgtgcctgaaggtacgccgctcagcacgcagttggtaaagtttcagcgcaacaaaaagaaagtcggcctggtcgtcaacgagtatggagacattcaggggctggtgacggttgaagatattctggaagagattgtcggcgatttcactacgtcgatgtcgccaacacttgccgaagaggtcacgccgcaaaacgacggttcggtgattatcgatggcaccgccaacgtgcgggaaatcaacaaagcctttaactggcatctaccggaagatgatgcccgcacggttaatggcgtcattcttgaggcactggaagagatccctgtcgcaggcacccgcgtgcgtattggcaagtacgatatcgatattctcgacgtacaggacaatatgattaagcaggtaaaagtttttcctgtgaaaccgctgcgcgagagtgtggcggagtaa

SEQ ID NO: 472988 - DNA, 594 bp, Shigella flexneri
atgagtagtaaagaacagaaaacgcctgaggggcaagccccggaagaaattatcatggatcagcacgaagagattgaggcagttgagccagaagcttctgctgagcaggtggatccgcgcgatgaaaaaattgcgaatctcgaagctcagctggctgaagcccagacccgtgaacgtgacggtattttgcgcgtaaaagccgaaatggaaaacctgcgtcgtcgtactgaactggatattgaaaaagcccacaaattcgcgctggagaaattcatcaacgaattgctgccggtgattgatagcctggatcgtgcgctggaagtggctgataaagctaacccggatatgtctgcgatggttgaaggcattgagctgacgctgaagtcgatgctggatgttgtgcgtaagtttggtgttgaagtgatcgccgaaactaacgtgccgctggacccgaatgtgcatcaggctatcgcaatggtggaatctgatgacgttgcgccaggtaacgtactgggcattatgcagaagggttatacgctgaatggtcgtacgattcgtgcggcgatggtaactgtagcgaaagcaaaagcgtaa

SEQ ID NO: 472989 - DNA, 879 bp, Shigella flexneri
atgaataatcatttcaagtgtattggcattgtgggacacccacggcaccctactgcactgacaacacatgaaatgctctaccgctggctgtgcacaaaaggttacgaggtcatcgttgagcaacaaatcgctcacgaactgcaactgaagaatgtgaaaactggcacgctcgcggagattgggcaactggctgatctcgcggtagtcgttggtggcgacggtaatatgctgggcgcggcgcgcacgctcgcccgttacgatattaaagttattggaatcaaccgtggcaacctgggtttcctgactgaccttgaccccgataacgcccagcaacaattagccgatgtgctggaaggtcactacatcagcgagaaacgttttttgctggaagcgcaagtctgtcagcaagattgccaaaaacgcatcagcaccgcgattaacgaagtggtacttcatcctggcaaagtggcgcatatgatagagttcgaagtgtatatcgacgagatctttgcgttttctcagcgatctgatgggctaattatttcgacgccaacaggctccaccgcctattccctctctgcgggcggtcctattctgaccccctctctggatgcgattaccctggtgcccatgttcccgcatacgttgtcagcacgaccactggtcataaacagcagcagcacgatccgtctgcgtttttcgcatcgccgtaacgacctggaaatcagttgcgacagccagatagcactgccgattcaggaaggtgaagatgtcctgattcgtcgctgtgattaccatctgaatctgattcatccgaaagattacagttatttcaatacattaagcaccaagctcggctggtcaaaaaaattattctaa

SEQ ID NO: 472990 - DNA, 1662 bp, Shigella flexneri
atgttggcacaactgaccatcagcaactttgctatcgttcgtgagcttgagattgattttcatagcggcatgaccgtaataactggcgagaccggtgcgggtaaatctattgcaatagatgccctcggtctttgtctcggtggtcgcgctgaagccgacatggtgcgtaccggcgctgctcgcgctgacctgtgcgcccgtttttctctgaaagatacgccagcggccctgcgctggctggaagaaaaccagcttgaagacgggcatgaatgtttgcttcgtcgcgtgatcagcagtgatggtcgctcccgtggtttcatcaacggtacagctgttcctctgtcacaactgcgcgaactgggtcagttgctgattcagatccatggtcagcacgctcatcaattactcaccaaacctgagcaccaaaaattcctgcttgatggctatgccaatgaaacctctctacttcaggaaatgaccgcacgttatcagttgtggcatcaaagctgccgtgacctcgcgcatcatcaacagttaagtcaggaacgcgccgcccgtgcggaactgctgcaataccaattaaaagaacttaacgaatttaatccgcagcccggagagtttgagcaaatcgacgaagagtacaaacgtctggcgaacagcggtcaattgctgaccaccagccagaatgcattggcattaatggccgacggtgaagacgcaaacctgcaaagtcagctttacacggctaaacaactggtgagcgaattgattggcatggacagcaaactgtccggcgtacttgatatgctggaagaagctaccatccagattgctgaagccagcgacgaactgcgccactactgcgatcgtctggatctcgatcccaaccgactgtttgaacttgaacagcgcatctcaaaacagatttcgctggcacgtaaacatcacgtcagccctgaggcattaccacagtattaccagtcgctactggaagaacagcagcaactggacgatcaggccgactcacaagaaacgctcgcgctggcggtaacgaaacatcatcagcaggcactggaaaccgcgcgcgcattacaccaacaacgccagcaatatgcagaagaacttgcacagctgatcaccgacagtatgcatgcgctctcaatgccgcatgggcagtttacgattgatgtcaaatatgacgagcatcacctgggcgctgacggtgccgatcgtattgagtttcgggtaaccaccaacccaggtcagccaatgcagcctattgccaaagtcgcatccggtggtgaattgtcccgcatcgcactggcaatccaggtcatcacggcgcgtaaaatggaaaccccggcactgatttttgatgaagtggatgtagggattagcggtccaacagcggcagttgtcggcaaactgctgcgtcaactcggcgaatcaactcaggtgatgtgtgttacccacctgccacaagtcgcgggatgtggtcatcaacactattttgtcagcaaagaaaccgatggtgcgatgacagaaacacatatgcaatctctggataaaaaagcgcggttacaagagctggcgcgcctgcttggtggcagtgaagtcacacgtaacacactggcgaatgcgaaagaactgcttgcagcgtaa

SEQ ID NO: 472991 - DNA, 342 bp, Shigella flexneri
atgcgctgtaaaacgctgactgctgcagcagcagtactattgatgttaaccgcaggctgttccactctggagcgagtggtttaccgtcctgacatcaaccaggggaactatctgaccgctaacgacgtatccaaaatacgtgttggcatgacgcaacaacaagttgcgtacgcattgggtacaccgctgatgtccgatccatttggtacgaatacctggttctatgtcttccgccagcaaccaggtcatgaaggtgtaacgcagcaaacgctgacgctgacctttaacagtagcggtgtgttgaccaatattgataacaaacctgcgctgagtggtaactaa

SEQ ID NO: 472992 - DNA, 291 bp, Shigella flexneri
gtgctaggtaaaattgccgttgaggtggcttatgcgctacctgagaagcaatacctgcagcgagtgacgctgcaggagggcgcgacggttgaagaagctattcgcgccagtggcttgctggaattgcgtaccgatatcgatttaactaaaaacaaagtcggcatttacagccgtccggcaaaactaagcgatagtgtgcatgatggcgatcgggtggagatttatcgccctctcattgccgatccgaaagagcttcgcaggcaacgagcagaaaaatcagcgaataaataa

SEQ ID NO: 472993 - DNA, 477 bp, Shigella flexneri
atgatattatttgttggatttttgttgatggaaattgttatgcctcagattagccggaccgcactggtaccctacagcgcggagcaaatgtatcagttagtgaatgacgttcagtcttatcctcagtttttgccaggttgtaccggaagtcggattctggagtccactcctgggcagatgactgcggcggtagatgtctctaaggctgggatcagcaaaacgtttactacccgcaaccagttgaccagtaaccaaagtattcttatgaatctggtggatgggccgttcaagaaattgattggtggatggaagtttacgccgctgagccaggaggcgtgtcgtatcgagtttcatctcgactttgagtttaccaataagttgattgaactcgcctttggtcgcgtgtttaaagagctggcggctaatatggtccaggcttttacggttcgtgcgaaagaggtttacagtgctaggtaa

SEQ ID NO: 472994 - DNA, 483 bp, Shigella flexneri
atgacgaagaaaaaagcacataaacctggttcagcgaccatcgcgcttaacaagcgcgcccgtcacgaatactttatcgaagaagagttcgaagcgggacttgccctgcaaggctgggaagttaaatccctgcgcgcaggaaaagccaatatcagcgacagctacgtccttctgcgtgacggagaggcatttctgtttggcgctaacatcacgccaatggccgtggcctccacgcatgtggtgtgcgatcctacccgtacccgcaagttacttctcaaccagcgcgaactggactcattgtacggtcgcgtcaatcgagaaggctataccgtagtggcgctctccctgtactggaaaaatgcctggtgcaaagtgaaaatcggcgtcgccaaaggtaaaaaacagcacgataaacgttcagatatcaaagaacgcgaatggcaggtggataaagcacgcatcatgaaaaacgcccaccgttaa

SEQ ID NO: 472995 - DNA, 126 bp, Shigella flexneri
atggcgctcataaatctggtatacttacctttacacattggggctgattctggattcgacgggatttgcgaaacccaaggtgcatgccgaggggcggttggcctcgtaaaaagccgcaaaaaatag

SEQ ID NO: 472996 - DNA, 1242 bp, Shigella flexneri
atggcaagacaaaccaaacctctatccgttaaggaaatcgaatctgctaaacccaaggaagcggactacgttctctatgatggcgatggccttgagctactcattaaatccagcgggagtaaaatctggcagtttcgctacattcgccctgtcaccaagacacgagcaaagaaaagcataggcccttacccgtcagttacccttgccgatgccagaaactaccgtgcagagtcccgctcactcctagctaaacagattgatccgcaggaacatcagcaagaacaattgcgtagttcgctggaagccaaaaccaatactttccagctcgtagctgaacgttggtggaatgtgaagaaagccagtgtgacagaggactatgcggaagatatctggcgctctcttgaaagagatgtctttcctgcgattggcgacgttagcgttacagatattaaagctcatacactggttcaggccgtacaaccggttcaggccagaggagcactggaaacggttcgtcgcctgtgtcaacgtattaatgaggtcatgatctatgcccagaacacagggctgattgatgctgttcccagcgttaatatcggtaaagccttcgaaaagcctcagaaaaagaacatgcccagcattcgaccggatcagctatctcaactgatgcagacaatgcgaacagccagcattagcctttccacacgctgcctgttcatgtggcaacttcttactattacccgccctgccgaagcggctgaagctcgctgggaagaagtagacatagaagcgcaagagtggaagattcccgcagcacgcatgaaaatgaaccgcgaccatactgttccattgtcagatgaagcaatagctgtgctggagatgatgaaaccgctaagcggcaaccgagaatttatctttcctagccgtatcaagcccaaccagcctatgaacagtcagactgttaacgcctcactaaaacgcgcaggttttggtggtgtgcttgtttcgcatggtctgagatcaattgccagtacggctcttaatgaacaaggctttccgcctgatgccattgaggcagcattggcccatgtggataagaatgaggttcgtcgtgcttataaccgcagcgattacctggaacagcgtcgcccgatgatgcaatggtgggcaaattttgtgatggcagcggatcgtggaagcatgattgaaggtgggataaaaggaatgaagctagttgggtga

SEQ ID NO: 472997 - DNA, 567 bp, Shigella flexneri
atgtttaaaggacaaaaaacattggccgcactggccgtatctctgctgttcacagcacctgtttatgcggctgatgaaggatccggtgaaattcactttaaaggtgaagttattgaagcaccgtgtgaaatacatcaggatgatattgataaagaggttgaactcggtcaggtgaccaccagccacattaatcagtcacatcacagcgatgccgttgctgtcgacctgctcttagtcaactgtgatctggaaaactccagcaacggttccggtggcaagatttctaaagttgcagtcacctttgatagctcagcgaaaaccaccggcgcagatccgattctcaacaacaccagcacgggtgaagccaccggcgtcggcgtacgtttaatgaataaagatcaaagcaatatcgttttaggcaccgctactccagatatcgacctggctccgacctccagcgaacaaacgctgaatttctttgcctggatggaacaaattgatcaggctacacctgtaacgccaggcgcagttacggcgaatgcaacctacgtgctggattataaataa

SEQ ID NO: 472998 - DNA, 2451 bp, Shigella flexneri
gtgaatatttatcgactctcttttgtatcctgcctggtcgtggcgatgccttgcgcattggcggtcgaattcaatctgaatgttctcgataaatcaatgcgcgaccgcattgatatttcattattaaaggaaaaaggagtcattgctcccggtgagtattttgttagcgttgcggtaaataataaccaaatcagtaacgagcaaaagattaactggcacaaaaatgacgataaaaccattccgtgcatcaatgatttactggtcgataaatttggcttaaaacctgaagtccgtcagtcgttaccattgataaatcagtgcgtcgattttagctcccgacctgaaatgctcttcaatttcgatcaagccaatcagcaactgaatattagtattccgcaagcctggctggcgtggcactcagaaaactggaccccaccctccacatggaaagaaggtgtcgccggtgtcctgatggattacaacttgtttgccagcagctaccgcccacaggatggcagcagcagcactaatcttaacgcctatggaacagccggaatcaacacgggggcatggcgcttacgcagtgattatcagttgaatcatactgatagcgatgataaccatgaacagtcaggcgaaatatcacgtacctatctttttcgcccgttaccgcaattaggttcaaaattaaccctcggcgaaacggattttagtcccaatattttcgacggtttttcttataccggcgcggcactggcaagtgacgatcgaatgttgccatgggaactacgcggctacgccccacaaattagcggtattgcacagaccaatgccacggtgacgatcagtcaatcaggccgcgtcatttaccagaaaaaagtcccaccaggcccatttatcattgacgaccttaatcagtctgttcagggcacactggatgtcaaagtgacggaagaagatggtcgggtgaacaatttccaggtttcagcagcatcgacgcccttcctgactcgtcagggacaggttcgctataaactggccgcgggtcagccacggccctccatgtcacatcaaactgaaaatgaaaccttttttagcaatgaagtttcctgggggatgctgtcaaacacctcgctgtacagcggcctgctgctttctggtgatgactaccattctgccgcaatgggtattgggcaaaatatgctgtggcttggtgcgctgtcgtttgatgtcacgtgggccagtagccattttgatactcagcaggacgagcggggcttaagctaccgttttaattacagcaaacaagtggatgccactaacagcacgatttccctcgccgcttatcgtttctccgatcgtcattttcacagctacgccaactatctggatcacaaatacaacgacagcgatgcgcaggacgaaaaacagacgatcagcttatctgtgggccaaccgattaccccactaaacctcaatctttacgccaacctgctacatcaaacctggtggaatgcagacgcctccacgaccgccaacatcacggcaggttttaatgttgatattggtgactggagagatatctctatttctacgtcattcaatacaacccattacgaagataaagatcgcgacaaccagatttacctgtcgatttcgctccccttcggtaacggtggtcgggttggctatgacatgcaaaacagtagccacagcaccacacaccgcatgtcgtggaacgatacgctggatgaacgtaatagctggggcatgtctgccggactgcaatccgaccgtcctgacaatggagcccaggtgagcggtaactatcagcacctgagttcagcgggtgagtgggatatttctggtacctatgccgccaatgattacagttccgtcagcagcagctggagcggttctttcaccgcaacccaatatggtgcagcgtttcatcgccgcagctccaccaatgaaccacgcctgatggtcagcaccgatggcgtggcagatattccggttcagggcaatctcgactacaccaaccattttggcattgcggtggtgccgttgatttccagttaccagccttccaccgtggcggtgaacatgaatgacttacccgacggcgtaacagttgcagaaaacgttatcaaagaaacgtggattgaaggcgcgataggttacaaatcactggcttcccgttccggtaaagacgttaacgtcatcattcgcaacgccagcggtcagtttcctcccctcggagcggatatccgccaggatgacagcggcattagcgtggggatggttggcgaggaaggacatgcctggttaagcggagtcgctgaaaatcaaaagtttaccgtggtctggggtgatagccagcattgctcgctccatcttcctgaacatatggaagacaccgcaaatcgcctgattttaccttgtcattaa

SEQ ID NO: 472999 - DNA, 732 bp, Shigella flexneri
atgacatttatgaaaggactaccccttttgttgttggttgccagtctgtgcagccacgctgcactacaacccgatcgcactcgtattgtgtttaacgctaatgataaagctaccagtctgcgggtggataatcgtagcgataaactcccctacctcgcttattcctggctcgaaaatgaaaaaggggagaaaagcgatgatcttctggtcgccctgccgccgatacaacgtctggaaccgaaagcaacaacacaggtacggatagtaaagcaagcctcgaccacaaaattaccgggcgatcgcgaaacgctatttttctacaatatgcgtgaaattcctcccgccccggaaaaaaacagcgaccatgccgttctgcaagtcgccattcagagtcgtatcaaggtgttctggcgaccggctgcattacgcaagaaagcaggagaaaaggtcgaactgcagttacaggtcagccagcagggcaaccaactgacactgaaaaatcctaccgcgtattatctgaccattgcctacctgggacgaaatgaaaaaggcgttctccccggcttcaaaaccgtgatggttgcgccttttagtacggtcaacacaaacaccggaaattatagcggcagccagttttatctcggttatatggatgattacggcgcgttacgcatgacgacgctcaactgcagcggacaatgccatttacaagccgtggaggcgaagaaatga

SEQ ID NO: 473000 - DNA, 285 bp, Shigella flexneri
atgagtgctggcaagggagtgttgctcgtcatctgtctgttatttctgtcgttgaagtctgcgcttgccctgaactgctactttggttcatccggtggctcggtagaaaaatcagaagcgattcaaccttttgctgtaccaggcaatgccaaactcggcgataagatctgggaatctgacgatattaaaataagatctgggaatctgacgatattaaaattcccgtctattgtgacaacaataccaacggcaactttgaaagcgaacatgtctacgcatgggtaa

SEQ ID NO: 473001 - DNA, 741 bp, Shigella flexneri
atggcgttgattatgacgccaaccagggaaaaagccgcatcgacactaaccagtgtatcgacagtaagaacattgacatttatacccctgatgggatggcagaacaaaatttgctcgggtgatcccgctaatattcacatgtcgcgaacctttctcgctcgcatgcggttatacgtcaaaatacgagaaatgccgccgcatgattatcaaagtacgcttagcgactatatcgtcgtgcaatttgacggtgccggtagcgttaacgaagaccctactgcccaaaacctgaaatatcatattactggtctggaaaacattcgcgtgctggattgcagcgtcaatttttccatttcaccggaaacacagatgattgattttggtaaatttaatttgctggatattcgtcgccacacaatgtcgaaaacattcagtattaagacgacaaaatcacaaaatgaccaatgcaccgacggatttaaagtcagttcctccttttataccgaagaaacgttggttgaagaagataaagcattgttgattggtaatggtctgaagctacgtttgctggatgaaaacgcctcgccttataccttcaataaatatgctgaatacgccgatttcaccagcgacatgttggtctacgaaaaaacctatacagctgaactttcgtccattgcaggtacccccatcgaggctgggcccttcgatacagtggtgctttttaaaattaactataactga

SEQ ID NO: 473002 - DNA, 1047 bp, Shigella flexneri
atgccagttttgcagtggggaatgttatgtgtgctatcacttctcctttctattggtttcctcgcggtacatctcccggcggcgctattacttgggccgatgatcgccgggatcatcttcagtatgcgcggaattactctgcaacttccccgctccgcttttctcgccgcgcaggccattcttggctgcatgattgcgcaaaacctcactggttcgattctcaccacgctggccgccaactggccgatcgtgcttgctattttactggtgacgctgctttccagcgccatcgtgggttggttattggtgcgctatagctcactgcctggaaataccggtgccaggggttcttctccaggcggcgcagcggcaatggtcgctatggcgcaagattacggcgcagatattcgcctggtggcgtttatgcaatatctgcgagtgctgttcgtcgcgggggccgctgttctggtcacccgcatgatgctgggtgataacgctgaagcggttaaccagcaaatcgtctggttcccgccagtgagcattaatctcctgcttacgattttgctcgcagtcgttgccggtacggcgggatgcatgctgcgtcttccttccggcacgatgctcatcccgatgctggcgggcgcagtgctccagtctggtcagctcatcaccatcgaactaccggaatggctgctggcgatggcgtatatggcaattggctggcggattggtcttggtttcgataaacaaatcttactgcgggcactacgcccgctaccgcaaatcctgctgtcgatttttgctctgctggctatttgtgcaggtatggcgtggggactgacccggtttatgcatattgattttatgactgcctacctcgccaccagtcccggcgggcttgataccgtggcggtcatcgccgcagggagcaatgccgatatggcgcttattatggcgatgcaaaccctgcgcctgttcagtattttgctgacggggccagccattgcgcggtttatttcaacctatgcgccgaagcggtcggcctag

SEQ ID NO: 473003 - DNA, 792 bp, Shigella flexneri
atgcctgaaggcccggagatccgccgtgcagcggataacctggaggcggcgatcaaaggcaaaccactaactgatgtctggtttgccttcccgcagttaaaaacttatcaatcacaacttatcggtcaacacgttacccatgtggaaacgcgtggtaaggcgttgttaactcattttcccaacggtttaacgctctacagccataatcagctttacggcgtctggcgcgtggttgataccggcgaagagccgcagaccacgcgagtattgcgggtaaaactgcaaacggctgacaaaaccattctgctttatagcgcctcggatattgagatgttgaggccggaacaactgaccacgcatccgtttttacaacgcgttggtcccgatgtgctggatccgaatctgacgccggaggtggtaaaggaacggttattgtcgccgcgctttcgtaaccgtcagtttgcaggattactgctcgatcaggcgtttctggctgggcttggcaattatttgcgggtggagatcctctggcaggttgggttgactggaaatcataaagcgaaagatctcaatgcggcgcaactggatgcactcgcacacgcgttactggagattcctcggttttcttacgctacgcgggggcaggtggatgagaataagcatcatggggcgctgtttcgctttaaggtttttcatcgtgatggcgaactgtgcgaacgctgtggcggcatcattgagaaaaccacgttgtcctcgcgcccgttttactggtgtccaggctgccagcactag

SEQ ID NO: 473004 - DNA, 735 bp, Shigella flexneri
atgaaaattgacctgaacgccgatctgggcgaaggctgcgccagcgacgcagagctattaacgctggtttcctctgccaatattgcttgtggatttcatgcaggcgatgcgcaaaccatgcaggcttgcgtgcgtgaagcaataaaaaatggtgtcgcgattggcgctcacccgagttttcccgacagggaaaattttggtcgcagcgccatgcagctgccgccggaaaccgtttacgcccagacgctgtatcaaattggcgcgctggcaacgattgcccgtgcgcaaggcggcgtaatgcgtcatgtcaaaccgcacggcatgttgtacaaccaggcggcgaaagaagcacaactggcagacgccatcgccagagcggtatacgcttgcgatccggcattggttctcgttgggctggcaggaagcgagctgattcgtgcaggcaagcaatatggcctgacaacgcgcgaggaagtgtttgccgatcgcggttatcaggctgacggctcgctggtgccgcgaagtcagccaggcgcgttgattgaaaacgaagaacaggcgttggcgcaaacgctggagatggtgcaacacggcagagtcaaaagtatcaccggcgaatgggcaacggtcgcggcgcaaacggtctgcctgcatggcgacggcgagcacgctctggcgttcgcccgccgattacgagctacatttgccaaaaaggggattgttgtcgcagcataa

SEQ ID NO: 473005 - DNA, 456 bp, Shigella flexneri
atggaagcgcagggcgttaaacagctgctgtggggcaaccgcattcgcgccttgccggggccggaatatcatgagttcgatcgcgcctcgcaggatgcattctggcgttcgccctggcagcttagctcgcaaagtaaccgaatgggctatcgtttacaggggcaaattttaaaacgcatcaccgatcgcgaactgttatctcacggtttgttaccgggcgtggtgcaggtgccgcataacgggcagccgattgtgttgatgaacgacgcacagaccaccggtggttatccacgtattgcctgtatcattgaggctgatatgtaccatctggcgcaaattccgctcggtcagccgattcattttgtccagtgttcactggaagaggcactgaaagcgcggcaagatcagcaacgttattttgaacaattagcgtggcggctgcacaatgaaaattga

SEQ ID NO: 473006 - DNA, 447 bp, Shigella flexneri
atgctgaagattattcgtgcgggcatgtacaccactgtgcaggatggcggtcgtcacggtttttgccagtcgggtatcagccactgtggcgcactggatatgcctgcgctgcgcattgctaacctgctggtgggtaatgacgccaatgcccccgcgctggagatcacgctcggtcagttaacagttgagttcgaaactgatgggtggtttgccctgacgggtgcaggttgcgaagcgcggttggatgataacgccgtctggaccggctggcgattgccgatgaaagcaggccagcgtttaacgcttaaacgcccgcagcacgggatgcgcagttatctggcggtcgcgggtggtattgatgttccgccggtaatggggtcatgcagcaccgatctcaaagtggggattggcgggctggaaggccgtttactgaaggatggtgactga

SEQ ID NO: 473007 - DNA, 657 bp, Shigella flexneri
gtgcaacgagcgcgttgttatctgataggtgaaacggcggtagtgctggaactggaaccgccggtgacgctggctagccagaaacggatctggcgactggcgcagcgtctggtggatatgccgaatgtggttgaagccattcccggcatgaacaatatcacggtgattttgcgtaatcctgagtcgctggcgctggatgccatagagcgtttgcaacgctggtgggaggagagcgaggccctggaacctgagtctcgctttattgaaattccggtggtttacggtggtgcaggcggaccggatttggcggtggtcgcggcgtattgcgggttgagcgaaaaacaggttgttgaattgcactcctccgtggaatacgtggtctggtttttaggttttcaaccgggcttcccgtatctcgggagtttgccggaacaactacacacgccacggcgcgctgaaccgcgcttgctcgttccggcaggttctgtcgggatcggcgggccgcagactggtgtttatccgctggcaacgccgggtggctggcagttgattggtcatacctcactcagcctgtttgatccggcgcgtgacgaccccatcttattacgtccgggagacagcgtgcgatttgtaccgcagaaggagggaatatgctga

SEQ ID NO: 473008 - DNA, 744 bp, Shigella flexneri
atgaaaaacaccgaactggaacaactgattaacgaaaaactgaacagcgcggcgattagtgattacgcgccgaatggtttgcaggtggaaggcaaagagacggtgcaaaaaattgttaccggtgtcaccgccagccaggctttgctcgatgaggcagtgcgtctgggcgcagatgcggtcattgtgcatcatggctacttctggaaaggagagtctccggtcattcgcggaatgaagcgtaaccgtttaaaaacgttgctggcgaatgatatcaacctgtatggctggcatttgccgcttgacgcacatcctgagctgggcaataacgcacagctggcggcgttactggggatcacggtcatgggcgaaattgagccgttggtgccgtggggagagctgaccatgcctgtgccgggaatggaactagcctcctggattgaagcgcgtctgggacgtaagccgttatggtgtggcgataccggacctgaggtggtccagcgcgtcgcctggtgcacgggcggcgggcaaagttttatcgatagcgccgcgcgttttggcgtggatgcttttattactggcgaagtttctgagcagaccattcattcagcccgcgagcagggattgcatttttatgctgcaggtcaccatgccactgaacgcggtggtattcgcgcattgagcgagtggctgaatgaaaataccgatcttgatgtgacctttattgatattcctaatcctgcataa

SEQ ID NO: 473009 - DNA, 1482 bp, Shigella flexneri
atgaataaacacgcatcacaaccgcgcgctatttactatgtcgttgcgctgcaaatctgggaatattttagcttttacggcatgcgtgccctgctgattctctatctcaccaatcaactaaaatacaacgatactcacgcctacgagttatttagcgcctactgttcgctggtgtatgtcacgccaatcctcggtggctttttggcggataaagttctcggcaatcgcatggcggtgatgctgggggcgttgttgatggcgatcggtcatgtggtgctgggtgccagtgagatccatccgtcattcctctatctgtccctggcgattatcgtctgcggctatggcctgtttaaatctaacgtaagctatctgctcggcgagctgtatgagccaaccgatccgcgtcgtgatggcggtttctcgctgatgtatgcggcgggtaacgtggggtctattatcgcacctatcgcctgtggttacgcccaggaagagtacagctgggcgatgggctttggcctggcggcggttggcatgatcgcgggtctggtcattttcttatgtggcaatcgtcatttcactcatacccgcggcgttaacaaaaaagtactgcgtgcgacaaactttctcctgccgaactggggatggctgctggttctgctggtggcaacgcctgcactgattaccgtgctgttctggaaagagtggtcggtatacgccttaattgtcgcgactattattggcctgggtgtactggcaaaaatttatcgcaaagcagaaaaccagaaacagcggaaggagctggggctgattgtgacgctcaccttcttcagtatgttgttctgggccttcgcacaacagggcggtagctcgattagcctttatatcgaccgcttcgttaaccgcgatatgtttggttataccgttccgaccgcgatgttccagtcgattaatgccttcgcagttatgctgtgcggtgtgttcctggcgtgggtggttaaagaaagcgtcgcaggtaatcgtaccgtgcgcatctggggaaaatttgctcttggccttggcctgatgagcgccggattctgcattctgaccttaagcgcccgctggtccgcaatgtatggtcactcttctctgccactgatggtgttaggcctcgcggtgatgggctttgcggaactgtttatcgacccggttgccatgtcgcaaattacgcgcattgaaattccgggcgtgaccggcgtattaaccggcatctacatgctgctttctggcgcgatcgcgaactatctggcgggcgtgattgccgatcagacatcgcaggcttcgtttgatgcttccggggcgatcaactactccatcaatgcatatattgaagtatttgatcaaattacctggggcgcactggcgtgtgtaggactggtactgatgatttggctgtatcaggcgctgaaattcagaaaccgcgcgctggcgctggagtcataa

SEQ ID NO: 473010 - DNA, 1419 bp, Shigella flexneri
atgactacccatctggcctggtttcgccaggatttacgtctgcacgataatctcgcactggctgccgcctgccgcaattcgtctgcacgcgtgctggcgctgtatatcgctacaccacgccagtgggagacgcataacatgtcgccgcgtcaggctgaacttatcaatgctcaactgaatgggctacaaatcgcgctggcggaaaaaggtattcctttattgttccgtgaagtggatgactttgtcgccagtgtcgaaatagttaaacaggtgtgcgcggaaaacagcgttactcatcttttttataactatcagtatgaggtgaatgagcgagcgcgggatgtggacgttgaaagagcgctgcgtaacgtggtgtgtgaaggatttgatgacagcgtgatcctgccgccgggggcggtgatgaccggcaatcacgagatgtacaaagtctttacgccttttaagaatgcctggctgaaacggctgcgggaagggatgccggagtgcgtcgctgcaccaaaagttcgtagtagcggatcgataaagcccgcgccatccattacgctgaattatcctcgtcagtctttcgatactgcgcatttcccggtggaagaaaaagcggcgattgcgcaattacgccagttttgcgagaacggtgctggagagtatgagcaacaacgagattttccggcagtggaaggcaccagccgtttgtccgccagcttggcaacgggcgggttatcgcctcgccagtgtttgcatcgcttgttggcggaacagccgcaggcgctggacggtggggccggtagtgtctggcttagtgagctgatctggcgcgagttctaccgtcatctgatgacgtattacccctcgttgtgtaaacatcgtccatttattgcctggacggatcgtgtgcagtggcaaagcaatcccgcacatttacaggcctggcagaaaggcaaaacgggatacccgattattgatgccgctatgcgtcagcttaacagcactggctggatgcataaccggctacggatgattacagccagttttctggtgaaagatttgttgatcgactggcgcgaaggcgagcgatatttcatgtcgcagctgattgatggtgatttggcagctaataacggtggctggcagtgggcggcttctacgggtactgatgctgcgccgtattttcgtattttcaatccgataactcagggcgagaaatttgaccgtgagggcgagtttattcgtcgatggttaccggagctgcgcgatgtaccagggaaagcggtgcatgagccgtggaagtgggcgcagaaagcaggtgtgaagctggattatccgcaaccgatagtcgagcacaaagaggcgagagtacaaacgttggcagcgtatgaggcggcgcggaaggggaaataa

SEQ ID NO: 473011 - DNA, 510 bp, Shigella flexneri
atgaatctacaacgatttgatgacagcaccctaatccgtatcttcgcccttcatgagttacatcgactgaaagaacatggcttaacgcgcggggcgcttctcgattatcacagccgctataaactcgtctttctggcccattctcagcccgagtaccgcaaacttggcccgtttgtggctgatattcatcagtggcaaaatctggatgatttttacaaccagtaccgccaacgcgtaattgttttgctttctcatcccgccaacccgcgcgatcacaccaacgttttgatgcacgttcagggttattttcgcccgcatattgattccacagaacgccagcagctggctgcgcttatcgacagttatcgccgtggcgagcaaccacttcttgcgccgctgatgcgtatcaaacactatatggcgctttatcctgacgcctggctttcagggcagcgttatttcgaactttggccgcgtgtgattaacttgcgccattcaggagttttatga

SEQ ID NO: 473012 - DNA, 288 bp, Shigella flexneri
atggctgaacacgatattacgccagaagtcaccatttccaaaacacagcgccgctataaagtcggctatgtcagagcccgccaccaggaccgcaaaaccggtatagcccggtattattcacaacatcccagcctgcaccttaagggcgactgtctgaaagaggccggatttgataccggacggggtgtcacggtgaagatttcggaggggggcctgaccatcatcgctgacagtgacgaggtgcaggaactgcgggatgggatgtttagtgtgctgaacgaaagttaa

SEQ ID NO: 473013 - DNA, 381 bp, Shigella flexneri
atgaacaatctcaatacattattaagtggaaaggttttgctcaaagaaattagtccattaatgcctggatatagaacatggattgaaatttcattgatcgatgaattaaaaccatcttatccttttagattagatgaatatgctatgatagggcattcaccttatgccaatgaatgtaataaagatgaagctaaatttaaactacgaatatcatcatttttagcttctgacatagataatgaatacgatccatcatatgattatgttggaaaatatgaaattatcgcttcacttaatgagttaaaaactaggttaagtactcttcatgtaaacttggagcaatttataaattcatcggaagatgatgagtatccattataa

SEQ ID NO: 473014 - DNA, 4665 bp, Shigella flexneri
atggaagaggcattctgggcggcaagacagggtgatgccctgctgcatacgtcgtttatggcagatgtgctgggggcggtgctggaggtggccgcaaatgtcgttattgatgccctcattgtcggcacaacctcgttactggcgacgtcagtggggatcacgatggggtgcacggccgtcgtgctgaccggttttgtggcgggtgtggcgatggtgtacaccggcgtgacagaaaaggtcagcgaagcctgttcagccctcgcaaatatgcttttcccgcctcagattgaaggttacatcctcaccggctctggtgacacatggatcaacagcaaacctgccgcgcgggcagcggcgactgcggcatcgcggcaggacatagaggcgcaggaagcgcaggcgaaggcagaacaggaagaagcgcagcgtcaggaggatgccagaacgttccgggatgtggccggggaatatctggaaatggcgggggccatagccctggcggttaacccggtgacagggcctgtgctgatgtcccgggctctgcacgaccagctcagtacggaagaagggcgttctgaaatggtggatggcgtgacacattttgtgtcggaactatggcagcccactgtggccagtgcggccccgggatccaccccgacccctgacgataaaatcgactgccataaacatccttcctcactgacgcagtttctcgcacaaaaaaaagccgcctttctggatgaccccctgggaacggcccttaacctgctgaatccgggcggtatgctggaaaccgtctttcagggagtgaatgcggttattggcagcatcagtaatctgttcaaaggcgatgacgagccgcccgcagcggaatatatcgcggaaggcgcgcgggatgtgcgtatcaacagccagccggcgacacgcagcggggcacgctgtacctgcgaggccagggtggtgaatgagccggggaacggggcgtttgtgtcaccggatgtgcgcattggcggtccgttactggtggtcagggatatcagaagcggcaggtcgcagataaccctggtggcaaccgtggcgctgatgtttcttcgcccgggcaaaatgctttctaaaatcgcctgttttgctgccagtgtcgggatgagcatgctgacgcagaaggccaccagtgcccttccgcatccggtcaatgccgccaccggggccaaatacctggccgatgacgatgacttcgatttcagtctgccgggccactttccgctggactggcagcgcgtgtacagcagtcgtgacgaacgtacggaaggaatgtttggtcagggctggagtgtaatgtatgaagtcagcctcgtgtgcacaccgggtagcgcagacgaaaactgcatgacctttgtgtcgggcatggggcgacgcttggatatggaagccgtactgccggggggcgggttttacagccccggtgaagggctggcggtaaggcgtggtgagcaggggcactggcttatcagcagcgatgacgggcagtgttttctgtttgaggctgacccgcaccacccgcagcgccagcggctgaaaatgctgggcgaccgtaacagcaactgtctgaatctgtactacgacgaccggggccgcattgtggaaatcagcggcgaacagcagcgtccgtgcatccgtctgtattacgaactggcggcgcatccccggcgggtgacacagatttatcagcatttccctgagactgcacctttactgctgcgtcgttacagctatgacgaggccggccacctgaacggcgtgtacgacagcacggggcacctgctgcgtgagtttgcttacgacgaaaaccactgcatgacgctgcaccgccagccgggcggcgaagggtattattaccagtggggctggtatgaaggtccggatgacgcggcatggcgggtgacggggcaccacacggacagcggtgaacagtaccggctggcgtgggacctggcgcagcgcaggctgtgcgtgacggacggactggggcgcacacgttatcaccagtgggatgcgcagaatcaggtgacggcgtaccaggacgaagccggacaggtgacgacattccgctggagcgacgaagaacgactgttgctggggatgaccgaccctcagggcggcaaatggcgctatgtgtatgacctgcaggggcatatcacggagacgcacgacccgctggggcgggtggagcaggcgcagtggcacccggtgtggcaccagccggaaacggaggtggacgcggcgggaaacacctggcgctgtgtgtacgatgaacgcggcaaccttcttgccgtgaccgacccgctgcagcagaacacccggtatcagtatgaccaccacggccaggtggtgcagataacggatgcgcgcggggggaataaatacctccagtggaatgaagacgggcagctcatgcggcacacggactgttccggctcgcagacggcgtggttctacgacgaacgcacgaggcttatcagaatgacggatgcgcagagccacagcacgcgctacgggtatgacgacagcggtcatctgacggaggtgatactggcggacggccgcacggtgaattaccagtcagacgcggcgggcaggctggtaaagtacaccagcccgatggggaggataacgcgctggcagcgggacgggcagggccgggtgcgcagccggacggacgcgatggggcgcaggacggcattcgggtacgacgcttacgggcgtctggtcacgctcacgaacgagaacggagaacgctaccggttccgccatgatgtgctggaccgtctggcggagcagataaacccggacggctgccgccagtcgtaccgctacaacgcgctgaacgcggtcacggaagtggtgttcaccggggaccggggcggtgaaatccgccaccggctggcgcgtgatgcggcgggccggctcacggcaaaagagacagccgatggccgtacggaatacgtccatgatgcggcagaccagctactggaaatccgtcgccagcggcacgaaactgacgcgccggaagttatccgcttcagctacgacagactggggcggatgctgagcgaggagacggcgcagggcatcctgacccaccagtacgataaactgggcaaccggactgccaccacctttccggacggcagaacgcagcgccatctgtactacggcagcggccatctccagcagataaatctggaccgggaggtcatcagcgagttcacgcgcgaccacctgcaccgtgaagtgctcagaagccaggggcgactgagcacgcggcagctttacgaccccggcgggcggctgaagcgcagggagacatacagcgggatgcgcggggtggtaccggagacgttcacggaccggcagtacagctacagtggcgaggatgaactgctgaagacgcggcacagccggcggggggaaacggattacttctacgaccccacggggcgcatcacggcgtgtcgttcggaggatgaggggtatctggcgagctggcagtacgacgcggcgggaaacctgctggggaggcgcgcgggggaaagggccacggcagaaaacagcgtggtgccgttcaaccggctgatgtcttaccgtggtgtgcactaccgttatgacgaatttggccgtgcggtggaaaaggagggccggagcggaacgcagagttaccgttatgatgcggaacaccggatggtggaagtgacgacagcgcgggggacataccggtatgtgtacgatgcactggggaggcggacggaaaaacagcacatcagccctgacggtaagccgtacaaccggacaaaatttttatgggacggaatgcggctggcgcaggagagcaggccggagggaacaggcagcctgtacatctacagggaccaggggagttatgaaccgctggcgcgggtggataaggcgggcaaagagggcccgaaccggatactgtattttcacacggatgtgaacggcgcgccggaagagatgacggacagcgacgggaaaatcgtgtgggagacggggtatcaggtctggggtaacacgatacaggagaaggaccacggcggggtggagcagaacctgcgctaccagggacagtacctcgacagggaaacggggctgcactacaatctgcacaggtactatgatccggatgtcgggcggttcatggtaactgacccgatagggttgagaggcggtttaaatctctacagttatgcacctaatcctctaaaatatgctgatccacttggattaactccatgtgctgttagtaaccaaaaagcgaatcgtttattagatagtagtgaaaccaaagttactgttaggtctagaagtgacgctgaacaattgtttatggatagatatttaggtcataattataaaaatatgacaggtgagtcaggccccagcactaagaacttaatggaatatcttactggaaataaaacaaaagcaggttcatatcattgggatgatataaaagatccttctgtaacaaaaccttcatatagagtgtcaggtcatggaccaggaaatcctgatggtgatttaccacatttacaagttcatcaacatggtggaagtgttagacatatatttttcccgtgggagacataa

SEQ ID NO: 473015 - DNA, 861 bp, Shigella flexneri
ttggagtcattacccaattttggcgttaaaactctggatgaagaagaaaatacggctggagtagttaaagacaaattttatcagtggaacgaatcgaatgattattatgtttcctgtgattgcgataaagacaatgtcagaagtggccgatgggcattcgccgcggattcaccgttagtctatttaggcgacaactggtacaaaattaatgactatcttgccgccaaagttttattgcaggttaaaggcagttctcctactgcggttcctttcgaaaacgtgggcacaggggcagatacacgatggcatatttgcgatcccggcggtcaacgtttaggtggccagggggctagcggtaatagcggtagcttttcactgaaaatattgcagccgttcgttggttcggtcgtcattcctcctatggcgctggcgcgattatttgaatgctacaacatacccgcaggtgattcctgcacgactactggtacaccggttttagtgtattacctgtctggtacgatcaattcacttggctcatgttccgtcaatgccggagaaacaatcgaggttgatctgggcgacgtatttgcggctaactttcgtgttgtagggcataagcctcttggggccagaacggcagaacttgcaattccggtcaggtgtaacacgggaaacgcagggttagttaacgtcaatctgagtctgacggcaacctcagaccccagctatccccaggcgattaagacgtcacgtcctggcgtgggcgtggtggtgaccgatagccagaacaacattatttcccctgctggtgggacactaccgctctctattcctgatgatgcagacagtatccgcgaatga

SEQ ID NO: 473016 - DNA, 543 bp, Shigella flexneri
atgaagaaaaaaacgatatatcagtgcgttattttgttctttagccttcttaacatccatgtcgggatggctgggcctgaacaagtcagtatgcatatttatgggaatgtggtcgatcagggctgtgatgtcgccaccaaaagtgcattacaaaatattcatattggtgattttaatatcagtgattttcaggccgcgaataccgtaagcactgctgctgatttgaatattgatatcaccggttgtgccgctggtattactggcgcggacgtcctttttagcggcgaggctgacacccttgcgccgacactgctcaaactaactgacacaggcggaagcggtggtatggcaacggggattgccgtgcaaattcttgatgcgcaaagtcagcaagaaatcccgctcaatcaggtccagcctcttacgcccttaaaagccggggataacacactcaaatatcaacttcgttataagtccacaaaggcgggagcaacgggcggtaatgcgacggcggttctctattttgatctggtttaccagtga

SEQ ID NO: 473017 - DNA, 564 bp, Shigella flexneri
atgcgacggcggttctctattttgatctggtttaccagtgaaggagtgatgttgaaacggataatctggattctgttcttactgggattaacggggggctgtgagctatttgcccatgatggcacggtcaacattagcggatcgtttcgccgtaatacatgcgtgctggcacaggatagcaagcaaatcaatgtgcagttaggcgatgtctcgctgacaggtttttttcatgggaattatggcccggagaaatctttcatcattaatttgcaggattgcggaacagatgtcagcacggttgatgtcaccttttcaggaacccccgacggagtgcagagcgaaatgctgtccattgaaagtggtacggatgcagccagtgggctggcaattgcgattctggatgatgcgaagatattgattccgcttaaccaggcgagtaaagactacagcctacatagcggtaaggtgccattaactttttatgcgcaattgcgacctgtcaatagcgatgtgcagtcgggtaaagtgaatgccagcgcgacatttgtacttcattatgactaa

SEQ ID NO: 473018 - DNA, 486 bp, Shigella flexneri
gtgccagcactattactggccgctccgccacttattctcctgaagcccggtactacaggcacgttgcgcttgctgagaacggaaagcgacatcttgcctgtggatcgcgaaacgctatttgagttaagcattgccagcgtgccatccggcaaagttgaaaatcagagcgtaaaagtggcgatgcgctcggtatttaaactgttctggcgacccgaaggtttgccgggcgacccgctggaagcttatcaacaattacgctggacacggaattcgcagggtgtacaactcactaacccaacgccttactacattaacctgattcaggtgagcgtaaatggtaaagcgttaagtaatgcgggagtcgtgccgcctaaaagccagcgtcagacaaactggtgtcaggtaatagcaccgtgtcatgtcgcctggcggacgataaatgattacggcgggttgagtgcaaagaaggagcaaaatctgccctga

SEQ ID NO: 473019 - DNA, 1011 bp, Shigella flexneri
atgtactaccccttcgttcgtaaagcccttttccagctcgatccagagcgcgctcatgagtttacttttcagcaattacgccgcattaccggaacaccgtttgaagcactggtgcggcagaaagtgcctgcgaaacctgttaactgcatgggcctgacgtttaaaaatccgcttggtctggcagccggtcttgataaagacggggagtgcattgatgcgttaggcgcgatgggatttggatcgatcgagatcggtaccgtcacgccacgtccacagcctggtaatgacaagccgcgtctctttcgtctggtagatgccgaaggtttgatcaaccgtatgggctttaataatcttggcgttgataacctcgtagagaacgtaaaaaaggcccattatgacggcgtcttgggtattaatatcggcaaaaataaagatacgccagtggagcagggcaaagatgactatctgatttgtatggaaaaaatctatgcctatgcgggatatatcgccatcaatatttcatcgccgaataccccaggattacgcacgctgcaatatggtgaagcgctggatgatctcttaaccgcgattaaaaataagcaaaatgatttgcaagcgatgcaccataaatatgtgccgatcgcagtgaagatcgcgccggatctttctgaagacgaattgatccaggttgccgatagtttagttcgccataatattgatggcgttattgcaaccaataccactctcgatcgttctctggttcagggaatgaaaaattgcgatcaaaccggtggcttaagtggtcgtccgcttcagttaaaaagcacagaaattattcgccgcttgtcactagaattaaacggtcgcttaccgatcatcggtgttggcggcatcgactcggttatcgctgcgcgtgaaaagattgctgcgggtgcctcactggtgcaaatttattctggttttatttttaaaggtccgccgctgattaaagaaatcgttacccatatctaa

SEQ ID NO: 473020 - DNA, 543 bp, Shigella flexneri
atgcgaattaaaccagacgataactggcgttggtattacgatgaagagcacgatcgaatgatgctcgatttagccaatggtatgctatttcgctcacgttttgcgcgcaaaatgttgactccagatgccttttctcccgcaggcttttgtgttgatgatgccgcgctctatttctcttttgaagaaaagtgccgcgattttaatttatctaaagaccaaaaagccgaactggtgctgaatgcactggtagcaattcgttatctcaaaccgcaaatgccgaaaagctggcattttgtctcccatggtgaaatgtgggtgcccatgccgggcgatgcggcctgcgtttggttgagcgatactcacgagcaggtcaatttgctggtcgttgaatctggcgaaaatgccgcgctatgcctgctggcacaaccctgcgttgttattgcgggtcgcgcgatgcagttgggcgacgccattaaaatcatgaacgacaggctgaaaccgcaggtgaatgttgacagcttcagcctcgaacaggcagtctaa

SEQ ID NO: 473021 - DNA, 1110 bp, Shigella flexneri
gtggcgacattaacccggctttttattcatcctgttaaatcgatgcgcggcattggtcttacacatgctctggctgatgtcagtggtctggccttcgatcgcatctttatgatcacggaacctgacggtacgtttattaccgctcgccagtttccccagatggtacggtttactccttcacctgtgcatgatggcttgcatctcaccgcaccagatggcagtagcgcatatgttcgttttgctgatttcgccacacaagacgcaccaaccgaagtttggggcacacattttaccgcgcgaattgcgccagacgcgatcaacaaatggctaagtggatttttctcccgcgaagtgcaattacgctgggtggggccacaaatgacccggcgcgtgaaacgccacaacactgtacctctgtcatttgctgatggctatccttaccttcttgctaacgaagcctcgttacgtgatctccaacaacgttgtccggccagtgtaaaaatggagcaattccgcaccaatctggtggtttccggcgcgtcagcctgggaagaagatagctggaaagtgattcgcattggtgatgtggtgtttgatgtggttaaaccttgtagccgctgtattttcaccaccgtcagcccagaaaaagggcaaaaacatccggcaggcgaaccattaaaaacattgcaatctttccgcactgcccaggataacggcgatgtcgattttggtcagaatttaattgcccgtaatagcggcgtgattcgcgttggcgatgaggtggaaattctggcaacggctccggcaaaaatttacggcgcagctgccgctgatgataccgccaacatcacgcaacaaccggacgcaaatgtagatattgactggcagggacaggcatttcgtggaaataaccaacaagtgttgctggagcaattagaaaatcagggaattcgtatcccttattcttgccgcgcgggcatttgtggaagttgccgtgttcagcttttagaaggcgaagtcacgccgctgaaaaaatcagcaatgggcgatgatggcaccattctttgctgtagctgtgtaccgaagactgcccttaagctgacgcgttag

SEQ ID NO: 473022 - DNA, 2109 bp, Shigella flexneri
atgaattctctgtttgccagtacggcccgtgggctggaagagctgttaaaaactgaactggaaaatctgggggccgttgaatgccaggtggttcagggtggggtctatttcaagggcgacacacggcttgtttaccagagcctgatgtggagccgcctggcctcgcgtattatgttgccgctgggcgagtgtaaggtttacagcgatttagacctctatctcggtgttcaggcgatcaactggacagagatgtttaatcctggcgcgaccttcgctgtccacttcagtggtttgaatgacaccatccgcaacagtcagtacggcgcgatgaaagtgaaagacgcgatcgtcgatgctttcacgcggaaaaatctgccgcgtccaaatgttgatcgcgatgcgccggatatccgcgttaacgtctggctgcataaagaaaccgccagtatcgctcttgatctgagtggtgatggtttacatctgcgtggctatcgcgatcgtgctggtattgcgccgatcaaagaaaccctggcagccgctattgtgatgcgatccggctggcagtcaggaacaccgctgctcgatccgatgtgtggttccggtacgttgctgattgaagcggcgatgctggcgaccgatcgcgcaccaggcttgcaccgtgggcgttggggctttagcggctgggcgcagcatgatgaagctatctggcaggaagtgaaagcggaagcgcaaactcgcgcccgtaaaggcctggctgagtatagctctcatttttacggttcggacagcgacgcacgggtgattcaacgtgcgcgcactaacgcccgtcttgcggggattggtgaactgatcacctttgaggtgaaagatgtcgcgcaactgaccaatccgctgccgaaagggccgtacggtacagtgttgagcaacccgccatacggtgaacgtctggacagcgaaccggcgctgattgcgctgcatagtctgctgggccgaatcatgaaaaaccagttcggtggctggaatctctctttgtttagtgcctcgccggatctgctaagctgcctgcagctgcgtgcagacaaacagtacaaggcgaaaaacggcccgctggactgcgtacagaaaaattaccacgttgccgaaagcacaccagacagtaaaccggcaatggtagcggaagattacgccaaccgcctgcgtaagaacctcaaaaaattcgagaagtgggcacgccaggaagggattgaatgttaccgcctgtatgacgccgatctgccggaatataacgttgccgttgaccgttatgccgactgggtggtggtgcaggagtatgcgccgccaaaaactattgatgcgcacaaagcgcgtcagcgtctgttcgatattatcgctgcaaccatttcggtactggggattgcgccaaacaaactggtgctgaaaacccgtgaacgccataagggcaaaaaccagtaccagaaactgggcgagaagggcgagtttcttgaagttaccgaatataacgctcacttgtgggtgaacctgacggattatctcgatactggtctgttcctcgatcaccgtatcgcccgccgtatgctcggtcagatgagcaaaggcaaagatttcctcaacctgttttcttataccggcagcgccaccgtgcatgcgggattaggcggtgcacgcagcaccaccaccgtggatatgtcgcgtacttatctggaatgggcagaacgcaacctgcgtctgaatggcctgactaggcgtgcgcatcgcctgattcaggccgattgcctggcgtggctgcgtgaggcaaatgaacagttcgatctgatctttatcgatccgccaaccttctctaactcaaaacgaatggaagatgcgtttgatgttcagcgcgatcatctggcgctgatgaaagatttgaaacgtctgctgcgtgcaggtgggacgatcatgttctcgaacaacaaacgtggcttccgtatggatctcgacggcctggcaaaactgggactgaaagcacaagaaattacgcaaaaaacgctctcccaggatttcgcccgtaaccgccagatccacaactgctggctgattaccgcagcctga

SEQ ID NO: 473023 - DNA, 1908 bp, Shigella flexneri
atgtcattaatcagtatgcatggcgcatggctgtcgttcagcgacgcgccgcttctcgataacgcagaactgcatatcgaagataacgaacgtgtttgtctggtgggccgcaacggcgcaggaaaatcgacgttaatgaaaatcctcaaccgtgaacaagggctggatgacggtcgcattatttatgagcaagatttgattgtagctcgtctgcaacaggatccaccgcgtaacgttgagggtagcgtttatgatttcgttgccgaaggcattgaagaacaagcggaatatctgaaacgctatcacgatatttcgcgcctggtgatgaacgacccgagcgagaaaaatctcaacgaactggcgaaggttcaggaacagctggatcaccacaacctgtggcagctggaaaaccgcatcaacgaagtgctggcgcaactggggttagatcctaacgttgcgctgtcgtcgctttccggcggctggttgcgtaaagcggcattaggacgcgcgctggtgagcaatccgcgcgtattgctgctggacgaaccgactaaccatctggatatcgaaaccatcgactggctggaggggttccttaaaaccttcaatgggacgattattttcatctcccacgaccgttcgtttatccgcaatatggcgacgcgcattgttgatctcgatcgcggcaagctggtgacctatccagggaattacgaccagtacctgcaggaaaaagaagaagccctgcgcgtggaagaactacaaaatgccgagttcgatctcaaactggcgcaggaagaagtgtggattcgccaggggatcaaagcacgccgtacccgtaatgaaggccgcgtacgcgccctgaaagcgatgcgtcgcgaacgtggtgaacgtcgcgaagtgatgggtaccgcaaagatgcaggtggaagaggccagccgctccggtaagatcgttttcgaaatggaagacgtttgctaccaggttaacggtaagcaactggtgaaagatttttctgcccaggttctacgtggcgacaaaattgccctgattggtccgaatgggtgcggcaaaaccacgctgctgaaactgatgctcggtcagcttcaagcggacagcgggcgtattcacgttggcaccaaactggaagtggcttatttcgatcagcaccgcgcggaactggatcccgataaaacggtgatggataaccttgccgaaggtaagcaagaggtgatggttaatggcaagccacgccacgtattgggctatttgcaggactttctgttccatccgaaacgggcgatgacgccagtacgtgcgttttctggcggtgagcggaaccgcttgctgctggcgcgtttgttcctcaaaccaagcaacttattgattcttgacgaaccgaccaacgatcttgatgtcgaaacgctggaactgctggaagaactgatcgacagctatcagggcacggtattgctggttagccacgatcgtcagtttgtcgataacaccgttacagaatgctggatcttcgaaggcggcggtaaaattggtcgttatgttggcggttatcatgatgcccgtggtcagcaagaacaatatgtggcactcaaacagcctgcggtgaaaaaaagcgaagaagccgccgcgccaaaagcagaaactgtaaaacgcagcagtagcaaactaagctataaattgcagcgcgaactggagcagctaccgcaattgctcgaagatctggaggcgaagctggaagccctacagacgcaagtggcggatgcttccttcttcagtcagccgcatgagcagacgcaaaaagtgcttgctgatatggctgctgcagagcaggagctggagcaagcctttgaacgctgggagtatcttgaagcgttaaaaaatggtggctga

SEQ ID NO: 473024 - DNA, 1254 bp, Shigella flexneri
atgtgcgaacatcatcatgccgcgaagcacatcctgtgctcgcagtgtgacatgctggtggcgttaccgcgccttgagcatggtcagaaagcggcatgtccccggtgtggcacaacgttaaccgtggcgtggtatgcccctcggcagcgtcccaccgcctatgcgttggctgcactgttcatgctgttgctgtccaacttgtttccttttgtgaatatgaacgttgcaggagttaccagtgaaattacattactggaaattcccggcgtgcttttttctgaggactacgccagcctcggcacctttttcctgttgtttgtgcaactggttcccgcgttttgtctgataaccattctgttactggtgaatcgcgcggaattaccggtccgtttaaaagagcaactggcacgggtgctttttcaactcaaaacctggggaatggcggagattttcctcgcgggtgtgctggtcagtttcgttaaactgatggcttacggcagcattggggtaggcagcagctttctcccctggtgtttattttgtgtcctgcaactgcgcgcttttcagtgcgttgatcgtcgctggttatgggacgacatcgccccgatgccagaactgcgccagccgctaaaaccaggcgtcacggggatacgtcaggggctgcgttcgtgctcctgttgtacggcaatccttcctgctgatgaacccgtgtgcccgcgttgtagtaccaaagggtacgttcggcgtagaaacagcctgcagtggacactcgcgctgcttgtaacgtccatcatgctgtatcttccggctaatattttgcccatcatggtgacggatttattaggctcgaagatgccgtcgacgattctcgctggggtcattctgttatggagcgaaggctcttatcccgtcgctgcggtgatctttctggccagtattatggtgccaacgttaaagatgatcgccatcgcgtggctgtgttgggatgccaaagggcatggcaagcgcgacagtgaaagaatgcatttgatttatgaagttgttgagtttgtaggccgctggtcgatgattgacgttttcgttatcgcggtgctctcggcgctggtgcgtatgggaggtttaatgagtatttatccggcaatgggtgcattaatgtttgctttagtcgtcataatgacaatgttttctgctatgacgtttgacccgcgtttgtcgtgggatcgtcaacctgaatcagagcatgaggagtcctga

SEQ ID NO: 473025 - DNA, 1641 bp, Shigella flexneri
atggaatctaataatggggaagccaaaatccagaaagtgaagaactggtctcccgtgtggatatttcctatcgtcacggcgctcattggggcctgggttcttttttatcattacagccatcagggaccggaagtgaccctgatcaccgcgaatgcggaaggaattgaaggtggcaaaaccaccattaaaagccgtagcgttgacgtcggcgtggttgaaagcgccacactggctgatgatttgacgcacgttgaaatcaaagcgcggctgaattccggtatggaaaaattgctgcataaagacaccgtcttttgggtggtgaaaccgcagattggtcgcgaagggattagcggcctgggaacgctgctgtctggagtttatatcgaactgcagccaggcgcgaaaggcagcaaaatggataaatacgatttgctggactcaccaccgttggccccgcctgatgcgaaaggtatccgtgtgattctcgatagcaaaaaagccgggcagctctcgccaggagatccggtgctgttccgtggctatcgggtaggttcggttgaaaccagcaccttcgatacgcaaaaacgcaatatcagttatcaactgttcatcaatgcaccttatgaccgactggtgaccagcaatgttcgcttctggaaagatagtggcattgcggttgatctgacgtcagcggggatgcgtgtggagatgggctcattgacaacgctgcttagtggcggtgttagctttgatgtgccggaaggtctggatttagggcagccagtggcaccgaaaacagctttcgttttgtatgatgatcagaagagcattcaggattcgttgtacaccgatcacattgattatctgatgttctttaaagattcggtacgcggtctgcaaccgggagctccggtagaattccggggtattcgcctgggtaccgtaagcaaagtgccattctttgcgccgaatatgcgtcagacatttaacgatgattaccgtattccggtactgattcgtatcgagccagagcggctgaaaatgcagcttggcgaaaatgcggatgttgttgagcaccttggcgaattgttgaaacgtggtttacgcggatcgctgaaaaccggaaacctggtcactggtgcactgtatgttgatctcgatttctatccaaatacgcctgcaataaccggtattcgtgaatttaatggttatcagattatcccgactgttagcggcggcttggcgcaaatccagcaacgactgatggaagcgttggataagatcaacaaactgccattgaatccgatgattgaacaggcaaccagtacgctttctgaaagtcagcgcacaatgaaaaacctgcaaacgacgctggatagcatgaacaagatcctcgccagccagtcgatgcagcagttgccgacggatatgcagtcaacgttgcgtgaattgaatcgcagcatgcagggcttccagcctggctccgcagcctacaacaagatggtggcggatatgcagcgccttgatcaggtgttgcgagaactgcaaccggtgctgaaaacgctcaatgagaagagtaacgcgctggtatttgaagcgaaggacaaaaaagatccagagccgaagagggcgaaacaatga

SEQ ID NO: 473026 - DNA, 564 bp, Shigella flexneri
atgaaaaagtggctagtgacgattgcagcactgtggctggccggatgcagctccggcgaaattaataaaaactattaccagttacctgtggtgcagagcggtacacaaagtaccgccagccagggcaatcgtctgttatgggtagagcaggtcactgttcctgactatctggcggggaatggtgtggtttatcaaaccagtgatgtgaagtatgtgattgccaacaacaacttgtgggccagcccgttggatcaacagttgcgcaacaccctggttgccaacctgagtacgcaactgcccggctgggtggttgcctcccagcctctgggaagcgcccaggacacgctcaatgttaccgtaacggagtttaacggtcgctatgatggcaaggtcattgtcagtggtgagtggctgttgaaccaccagggacaactgatcaaacgtccgttccgtctggaaggagtgcaaactcaggatggttacgatgagatggttaaagtgctggccggtgtctggagtcaggaagccgcttctattgcacaagagataaagcgtctaccttaa

SEQ ID NO: 473027 - DNA, 168 bp, Shigella flexneri
atgaagagacaaaaacgagatcgcctggaacgggcacatcaacgtggttatcaggccggcatcgccggacgctcaaaagaaatgtgtccctatcagacgctgagtcaaaggtcacaatggctgggaggctggcgagaagccatggcggacagggtagtaatggcctga

SEQ ID NO: 473028 - DNA, 627 bp, Shigella flexneri
atggccattacgttggctgaactggtttattccgaactgatcggacttgttcagcgtacacgtgttagctatcctgcgtgcttcaataaaataaggcttacagagaacatggtagataaacgcgaatcctatacaaaagaagaccttcttgcctctggtcacggtgaactgtttggcgctaaaggcccgcaattgccagcaccgaacatgctgatgatagaccgtgtggtcaaaatgaccgaaacgggtggtaacttcgacaaagggtatgttgaagcagaactggatatcaatccggatctgtggttcttcggatgccacttcattggcgatccggttatgccgggatgcctgggcctggacgcaatgtggcagctggtagggttctacctcggctggctgggcggcgaaggtaaaggccgcgcgctgggcgttggcgaagtgaaattcactggtcaggtactgccgacagcgaaaaaagtgacctaccgtattcactttaaacgcattgttaatcgtcgtctgattatgggtctggcagatggcgaagtgctggttgattgtcgtctgatctataccgccagcgacctgaaagtcggtctgttccaggatacgtctgccttctga

SEQ ID NO: 473029 - DNA, 1761 bp, Shigella flexneri
ttgaccattacgaaacttgcatggcgtgacctggttcctgataccgatagctatcaggaaatatttgctcagccacatttgattgacgaaaacgatcctttattcagtgatactcaaccgcgactgcaatttgcgctggagcagttgctgcatacgcgagcatcctcctcttttatgctggctaaggccccggaagagtctgagtatctgaatcttattgccgatgccgcgcgtacgctacaaagcgatgcaggccaactggtgggcgatcactatgaggtttccggccactccatccgcttacgtcacgcagtgagtgcagatgataattttgcgactttaacgcaagttgtcgctgccgactgggtagaagcggagcaactctttggctgcctgcgccagtttaatggcgacattaccctgcagcctggtctggtgcatcaggcaaatggcggtattctcatcatctctttgcgtacactgctggcgcaacctctgctgtggatgcggctgaaaaatatcgttaaccgcgagcgttttgactgggttgcgtttgatgagtcgcgccctctccccgtctctgtgccttcgatgccattgaagctgaaagtcattctggtaggcgaacgcgaatcattggctgatttccaggagatggagccagagctttcagagcaggctatttatagcgaatttgaagatactctgcagattgtcgatgcggagtcagtaagccagtggtgtcgctgggtgacatttaccgccagacataatcacttacctgccccgggagcggatgcttggccggtacttatccgcgaagcagcacgctacaccggtgaacaagaaacacttccgcttagcccgcagtggatcctccgccagtgtaaagaggtcgcctccctgtgtgatggcgacaccttctccggcgagcagctaaacttaatgctgcagcagcgtgaatggcgcgaaggtttcctcgctgaacgtatgcaggatgagatccttcaggagcaaatcctgattgaaaccgaaggcgaacgcatcgggcaaattaacgccctttcggtcattgaatttccgggtcatccacgcgcttttggcgaaccttctcgcattagctgcgttgtgcatattggcgatggtgaattcaccgacatcgaacgcaaagcggagcttggcggcaatatccatgcgaaagggatgatgatcatgcaggcgttcctgatgtcggaactacagcttgagcaacagatccccttctcagcatcgctgacatttgagcagtcatacagtgaagtggatggcgatagtgcctcgatggctgaactctgcgccctgataagcgccctcgctgatgtgccagtgaatcagagtatcgctatcacaggttcagtcgatcagttcggccgcgtccagccggtcggtggtttaaatgagaaaatcgaaggcttctttgctatttgccagcaacgtgagttaacggggaaacaaggtgtcattatccccactgctaacgttcgccatttaagtcttcacagtgaactggtgaaagcggtagaagaaggcaaattcaccatctgggcagtagacgatgtgactgacgcactgccgttattattaaatctggtgtgggatggcgaaggccaaacgacgctgatgcaaaccatccaggaacgtatcgcgcaagcatcgcaacaggaaggacgtcaccgttttccatggccattacgttggctgaactggtttattccgaactga

SEQ ID NO: 473030 - DNA, 453 bp, Shigella flexneri
atgaaatatcaacaacttgaaaatcttgaaagcggttggaaatggaagtatctggtgaagaagcatcgcgaaggggagttaattacccgttacatagaagccagtgccgcccaggaagccgtcgatgtgttgctctcgctcgaaaatgaacccgtgctggtaaatggctggattgacaagcatatgaatccggaactggtcaatcgcatgaagcagaccattcgggccagacggaagcgccattttaatgcggaacaccagcatacgcgcaaaaaatcgatcgatctggaatttattgtctggcaacgtctggctggtcttgcacagcgtcgcggtaaaacgctttctgaaacgattgttcagctgattgaagatgcggaaaacaaagagaaatacgcgaataaaatgtcttctcttaagcaggatctgcaggcattgctgggtaaggaataa

SEQ ID NO: 473031 - DNA, 1047 bp, Shigella flexneri
atgaaaaagacagctatcgcgattgcagtggcactggctggtttcgctaccgtagcgcaggccgctccgaaagataacacctggtacactggtgctaaactgggctggtcccagtaccatgacactggttttattcctaacaatggtccgacccacgaaaaccaactgggtgcaggtgcttttggtggttaccaggttaacccgtatgttggttttgaaatgggttacgactggttaggtcgtatgccgtacaaaggcgacaacatcaacggcgcatacaaagctcagggcgttcagctgaccgctaaactgggttacccaatcactgacgatctggacatctacactcgtctgggtggtatggtatggcgtgcagacaccaaggctaacgtacctggtggcgcatcctttaaagaccacgacactggcgtttctccggttttcgcaggtggtgttgagtacgcgatcactcctgaaatcgctacccgtctggaataccagtggaccaacaacatcggtgacgcaaacaccatcggtactcgtccggacaacggtctgctgagcctgggtgtttcctaccgtttcggtcagggcgaagcagctccggtagttgctccagctccggcaccggaagtacagaccaagcacttcactctgaagtctgacgttctgttcaacttcaacaaagcaaccctgaaaccggaaggtcaggctgctctggatcagctgtacagccagctgagcaacctagatccgaaagacggttccgtagttgttctgggttacactgaccgcatcggttctgacgcttacaaccagggtctgtccgagcgccgtgctcagtctgttgttgattacctgatctccaaaggtatcccggcagacaagatctccgcacgtggtatgggcgaatccaacccggttactggcaacacctgtgacaacgtgaaacagcgtgctgcactgatcgactgcttggctccggatcgtcgcgtagagatcgaagttaaaggtatcaaagacgttgtaactcagccgcaggcttaa

SEQ ID NO: 473032 - DNA, 510 bp, Shigella flexneri
atgtacacttcaggctatgcacatcgttcttcgtcgttctcatccgcagcaagtaaaattgcgcgtgtctctacggaaaacactacagccgggcttatcagtgaagttgtctatcgcgaagatcagcccatgatgacgcaacttctactgttgccattgttacagcaactcggtcagcaatcgcgctggcaactctggttaacaccgcaacaaaaactgagtcgggaatgggttcaggcatctgggctacccttaacgaaagtaatgcagattagccagctctccccttgccacacagtggagtcaatggttcgcgctttacgcacgggcaattacagtgtggtgatcggttggttgacagatgatttgactgaagaagagcatgctgaacttgttgatgcggcaaatgaaggtaacgctatggggtttattatgcgtccggtaagcgcatcctctcacacaacgagacaactttccgggctaaaaattcactctaatttgtatcattaa

SEQ ID NO: 473033 - DNA, 426 bp, Shigella flexneri
atgaaaagcctctcctataagcggatctataaatcacaagaatacctggcaacgttgggcacaattgaataccgatcattgtttggcagttacagcctgaccgttgacgacacggtgtttgcgatggtttctgatggtgagttgtatcttcgggcttgtgagcaaagtgcacagtactgtgtaaaacatccgcctgtctggctgacatataaaaagtgtggccgatccgttaccctcaattactatcgggttgatgaaagtctatggcgaaatcaactgaagctggtgcgtctgtcgaaatattctctcgatgcagcgctgaaagagaaaagcacgcgcaatacccgggaaagactgaaagatttgcccaatatgtcttttcatctggaagcgattctcggggaggtgggtagactggccccctga

SEQ ID NO: 473034 - DNA, 366 bp, Shigella flexneri; identical to SEQ ID NO: 462994

SEQ ID NO: 473035 - DNA, 465 bp, Shigella flexneri
atgaggggatctctcagcgccgagcagctgtttgagctacgcgaaatgctcgaaacacattcacttcagcactttctcaacctgcctgatcatgatccccgctggctgcaggcgaaaaccatgctagaacgtcatcggctactgcgtgacaacatcggcaatagctttcgcatgttctcgcaacttgacagagattttcactccttactgctttcagctgccgacaatatcttttttgatcaatcgcttgagatcatctcagtcatctttcattttcactatcaatgggacgaaagcgatcttaaacagcgcaatatcattgccgtcgatgaacatatgaccattctcagcgctctgatttgccgcagtgaccttgatgccacccttgcgctccgtaaccatttgaattcagctaaacaatcaatgattcgatccattaatgagaacacgcgttatgctcattaa

SEQ ID NO: 473036 - DNA, 1362 bp, Shigella flexneri
gtggaaaaagaaaatatcaccctcgatccgcgttcttcatttactccatcttcgtcggcagatattcccgtgccaccagatggattagttcaacgcagtacccgaattaaacgcattcaaaccaccgccatgttgttattattttttgcggcggtaatcaattatctcgaccgcagttcgctgtcggtagcaaatttaacgattcgtgaagaattgggattaagtgccaccgaaatcggcgctttgctctccgtgttttcactcgcttacggcattgcgcaacttccttgcggcccactattggatcgtaaaggcccacgcctgatgctgggactggggatgttcttctggtcactgttccaggccatgtctggcatggtgcacagctttacgcagttcgtgttggtgcgtatcggtatggggattggtgaagcgccgatgaacccatgcggtgtaaaagtcattaacgactggttcaacatcaaagagcgcggacgcccgatgggcttcttcaacgcagcttctaccattggcgttgctgtaagcccaccgattctggcggcaatgatgctggtgatgggctggcgcgggatgtttattaccattggtgtactggggatttttctcgccatcggctggtatatgctctatcgcaaccgcgagcacgtagaactgactgccgttgaacaagcttatctcaatgcaggtagcgtcaatgcccgccgagatccgctcaattttgccgaatggcgcagcctgttccgtaaccgcacaatgtggggaatgatgctcggattcagtggcatcaactacactgcgtggctgtatctggcctggcttcctggttacctgcaaacagcctataacctggatttaaaaagcacagggttgatggcggctatccctttcctgtttggggctgccgggatgctggtcaacggttacgttactgactggctggtcaaagggggaatggctccgattaaaagccgtaagatctgcattattaccgggatgttctgttctgccgcctttacgctgatagtaccacaagcgacaacatccatgatggcggttctgctgattggcatggcactgttctgtattcactttgccggaacatcctgctggggcttgatccacgtcgcagttgcttctcgcatgactgcgtcggtgggcagtatccagaactttgccagcttcatctgcgcctctttcgcgccgatcattactggttttattgttgatacaacccactcattccgtctggcactaatcatttgcggttgcgtcaccgcagcgggagcactggcgtacatcttcctggttcgccagccgatcaacgacccgcgtaaagattaa

SEQ ID NO: 473037 - DNA, 1665 bp, Shigella flexneri
atgttaaaacgtatcaagatcgtgaccagcttactgctggttttggccgtttttggccttttacaactgacatcaggcggtctgttttttaatgccttaaagaatgacaaagaaaatttcactgttttacaaaccattcgccagcagcaacccacgctgaatggcagctgggtcgcgttgttgcagacgcgtaacaccctcaaccgcgcgggtatccgctacatgatggatcagaataatattggtagcggttcaaccgttgctgagctgatgcagagtgccagtatttcgctgaaacaggcggaaaaaaactgggcggattacgaagcgttgccgcgtgacccgcgtcagagcaccgccgcagcggcagagatcaaacgtaattacgatatttatcacaatgcgctggcggagctgatccaactgttaggtgcaggcaaaatcaacgagttctttgatcagccgacccagggatatcaggacggtttcgagaagcagtatgtggcttacatggagcaaaacgatcggctctatgatatcgccgtcagcgataacaatgcctcctacagccaggcgatgtggattctggtgggcgtgatgatcgtcgtactggcggtcatcttcgccgtctggttcggtattaaagcctcgctggtagcgccaatgaatcgcctgattgacagcattcgtcatattgcaggcggcgatctggtgaaaccgattgaggtggatggctctaatgagatggggcaactggcagagagtttgcgccatatgcagggagagctgatgcgtaccgtcggtgatgtgcgcaacggggccaatgccatctatagcggtgccagcgaaatcgctaccggcaataatgatctctcttcgcgcaccgagcaacaggccgcttcgctggaagagacggcagccagcatggagcaactgaccgcaacggtgaaacagaacgccgagaatgcgcgccaggccagccatctggcattaagtgcttctgaaacggcgcaacgcggcggcaaagtggtagataacgtggtgcagactatgcgcgatatctccaccagttcgcagaaaatcgccgatattatcagcgtaattgacggcattaccttccagaccaatattctggctttgaacgcggcggttgaagcagcgcgtgcgggtgagcaaggacgtggttttgcggtggttgcgggagaagtgcgtaatctggcccagcgtagcgcccaggcggttcgtgaaattaaaagcctgattgaagactcggtggggaaagtggatgttggctctacgctggtcgaaagcgccggggaaacaatggcggagattgtcagtgctgtgacccgcgtgacggacattatgggcgaaatagcttctgcttctgatgagcagagccgtggtatcgatcaggttggcttagcggttgctgagatggaccgggtaactcaacagaacgccgcgctggtggaagaatctgccgctgccgccgccgcgctggaagagcaggccagtcgcctgaccgaagctgtggcagtgttccggattcagcaacagcagcaacagcagcgtgaaacatcggctgtggtaaaaaccgtgacgccagctacgccgcgtaaaatggcagtggcagatagcggggagaactgggaaacgttttaa

SEQ ID NO: 473038 - DNA, 447 bp, Shigella flexneri
atgcacgactcactaaccattgcgttgctccaggcgcgagaagcggcgatgagttattttcgcccaatcgttaaacggcataatttgactgagcaacagtggcgcatcgtgcgtattctggcggaaagcccatcaatggattttcacgatctggcgtatcgcgcctgcattttgcgcccaagcctgaccgggatcctcacgcggatggaacgcgacggtttagtgttgcgattaaagccgatcaatgatcagcggaagctctatatctcgctgaccaaagaggggcaggcgctgtataaccgcgctcagacacagattgaagaagcctatcggcagattgaagctcagtttactgccgagaaaatgcaacagttaacccatctgttagaggaatttattgctctgggcaattcccgacaagaagacatcccgggcgataatgaataa

SEQ ID NO: 473039 - DNA, 1290 bp, Shigella flexneri
atgaaaggcactatcttcgccgtagcgttgaaccatcgcagccaacttgatgcctggcaggaagcgttccagcaatctccctacaaagccccgcctaaaactgcggtctggtttattaaaccgcgcaatacggtgattggttgcggtgaaccgattccctttccacagggtgaaaaagtactgagcggtgcgactgttgcgctgattgtggggaaaacggcgacgaaagtacgtgaagaagatgcggcagagtacatcgccggatatgcgctggctaacgacgtcagcctgccggaagagagcttttaccgtccggcaatcaaagcaaaatgtcgtgatggattctgccccattggcgaaaccgtggctctcagcaatgtcgataatctgactatctataccgagatcaacgggcgtcctgccgatcactggaataccgccgatttacaacgtaacgccgcacagctgctgagcgccctgagcgaatttgccacgctgaatccaggcgatgctattctgctcggcacgccacaggcgcgcgtggaaatacagccaagcgatcgcgtgcgtgttctcgcagaaggtttcccgccgctggaaaatccggtagtggacgaacgtgaagtgaccacgcgcaagagcttcccaacgctgccacacccgcacggtacgctgtttgccctcggcctgaactacgccgaccacgccagcgaactggaatttaagccaccggaagagccgctggtgttcctgaaagcgccgaataccctcactggcgacaaccagacctccgtgcgcccgaacaatattgaatacatgcactacgaagcggagctggtggtagttattggcaagcaggcgcgtaacgtcagcgaagccgatgccatggattatgtcgcgggctacaccgtgtgtaacgactacgccattcgcgactatctggaaaactactaccgccctaacctgcgggtcaaaagccgcgacggactgacgccgatgctttcaaccatcgtgccgaaagaggcgatcccggacccgcataatctgacccttcgcaccttcgtcaacggcgagttacgccagcaaggcaccaccgccgatctgatcttcagcgtgcccttcctgatcgcctacttaagcgaatttatgaccctgaatccgggcgacatgatcgccaccggcacaccaaaaggcttatctgacgtggtgcctggcgatgaagtagtggtggaagtagaaggcgtgggccgcctggtgaaccgaattgtgagtgaggaaacagcgaaatga

SEQ ID NO: 473040 - DNA, 1467 bp, Shigella flexneri
atgaaaaaagtaaatcattggatcaacggcaaaaatgttgcaggtaacgactacttccagactaccaatccggcaacgggtgaagtgctggcggatgtggcctctggcggtgaagcggagatcaatcaggcggtagcggcagcgaaagaggcgttcccgaaatgggctgatctgccgatgaaagagcgtgcgcgcctgatgcgccgtctgggcgatctgatcgaccagaacgtgcctgagatcgccgcgatggaaaccgcggacacgggcctgccgatccatcagaccaaaaatgtgttgatcccacgcgcttctcacaactttgaatttttcgcggaagtctgccagcagatgaacggcaagacctatccggttgacgacaagatgctcaactacacgctggtgcaaccggtaggcgtttgtgcgctggcgtcgccgtggaacgtgccgtttatgaccgccacctggaaggtcgcgccgtgtctggcgctgggcaataccgcggtgctgaagatgtcggaactctccccgctgaccgccgaccgcctgggtgagctggcgctggaagctggtattccggcgggcgtgctaaacgtggtacaggactacggcgcaaccgcaggcgatgcgctggtccgtcatcatgacgtgcgtgccgtgtcgttcaccggcggtaccgccaccgggcgcaacatcatgaaaaacgccgggctgaaaaaatactccatggagctgggcggtaaatcaccggtgctgatttttgaagatgccgatattgagcgtgcgctggacgccgccctgttcaccatcttctcaatcaacggcgaacgctgcaccgccggttcgcgcatctttattcagcagagcatctatccagaattcgttaaacgctttgccgaacgcgccaaccgtctgcgcgtgggcgatccgaacgatccgaatacccaggttagggcgcttatcagtcagcaacactgggaaaaagtctccggctatatccgtctcggcattgaagaaggcgcaaccctgttggcgggcggcccggataaaccgtccgacctgcctgcgcacctgaaaggcggcaacttcctgcgcccaacggtgctggcggacgtagataaccgtatgcgcgttgcccaggaagagattttcgggccggtcgcctgcctgctgccgtttaaagacgaagccgaaggcttacgcctggcaaacgacgtggagtacggcctcgcgtcgtacatctggacacaggatgtcagcaaagtgttacgcctggcgcgtggcattgaagcaggcatggtgttcgtcaacacccagaacgtgcgcgacctgcgccagccatttggcggcgtaaaagcctccggcaccgggcgtgaaggcggtgagtacagcttcgaagtgttcgcggaaatgaagaacgtctgcatttccatgggcgaccatccaattccgaaatggggagtctga

SEQ ID NO: 473041 - DNA, 852 bp, Shigella flexneri
atgggtaagttagcgttagccgccaagatcacgcacgtaccgtcgatgtatctctctgaactaccaggaaaaaaccacggttgtcgccagggtgcgatcgacgggcataaagagatcagcaagcgttgccgggaaatgggcgtcgataccattatcgttttcgatactcactggctggtcaacagtgcttatcacatcaactgtgcagaccattttgaaggcgtctacaccagcaacgagctgccgcattttattcgcgacatgacctacaactacgagggcaacccggagttggggcagctaattgccgaggaagccttaaagctcggcgtgcgggcaaaagcgcacaatattcccagcctgaaactggaatacggcacgctggtaccgatgcgctacatgaatgaagacaagcacttcaaagtggtctccatttcggctttctgcacggttcacgattttgccgacagccgcaagctgggcgaagcgattctgaaagcgatcgaacagtacgacggcaccgtggcggtccttgccagcggttcgttatcgcaccgctttattgacgatcagcgtgcggaagaagggatgaacagctacacccgcgagttcgaccgccagatggacgagcgtgtggtgaagctgtggcgcgaaggccagttcaaagagttttgcaatatgctgccggagtacgccgactactgctacggcgaaggcaatatgcacgacacggtgatgctgctggggatgctcggctgggataaatacgacggcaaggtggagtttattaccgagctgttcccaagctctggcaccggtcaggttaacgctgttttcccgctgcccgcgtaa

SEQ ID NO: 473042 - DNA, 381 bp, Shigella flexneri
atgccgcactttatcgtggaatgtactgaaaatattcgtgaagaagcccgcttacctgagctgtttgccagtgttaacactgcactggcggcaacggggatttttccgcttgggggaatacgtagccgggcgcactggatcgatacctggcaaatggctgatggcaagcacgattacgcctttgtgcatatgacgctaaaaatcggcagcggacgcagtctggaaagccgtcaggaagtgggcgaaatgctgtttgatctgattaaaacgcacttcgcctcactgatggagagccgttacctagcgctttcatttgagattgcagagctgcacccgacgttgaatttcaaacagaacaacgtacacgcgttgtttaaataa

SEQ ID NO: 473043 - DNA, 804 bp, Shigella flexneri
atgttcgataaacacacccacaccctgatcgcccagcgtctggatcaggcagaaaaacagcgcgaacagatccgcgcgatctcgctggattacccggagatcaccatcgaagacgcctacgccgtgcagcgcgaatgggttcgcctgaaaatcgccgaaagtcgcacgctgaaaggccacaaaatcggtctgacctcgaaagcgatgcaggcaagctcgcagatcagcgaaccggattacggtgcactgctggacgacatgttcttccacgatggcagcgatatcccgaccgatcgctttatcgtgccgcgcattgaagtggagctggcttttgtgctggcaaaaccgctgcgtgggccaaactgcacgctgttcgacgtttacaacgccacggactatgtgatcccggcgctggagctgatcgacgctcgctgccacaacatcgatccggaaacccagcgcccgcgcaaagtattcgacaccatttccgataacgccgccaacgccggagtgatcctcggaggtcgtccgatcaaaccagacgaactggatctgcgttggatctccgccctgatgtatcgcaatggcgtgattgaagaaaccggcgtcgccgctggtgtgctgaatcatccggcaaacggcgtggcctggctggcgaacaaactcgcaccgtatgacgtacaactggaagccgggcaaatcattctcggtggttcgttcacccgcccggttccggcgcgtaagggcgacaccttccacgtcgattacggcaacatgggctccattagctgccgctttgtttaa

SEQ ID NO: 473044 - DNA, 804 bp, Shigella flexneri
atggaaaacagttttaaagcggcgctgaaagcaggccgtccgcagattggattatggctggggctgagcagcagctacagcgcggagttactggccggaccaggattcgactggttattgatcgacggtgagcacgcgccgaataacgtgcaaaccgtgctcacccaactacaggcgattgcgccctaccccagccagccagtggtacgcccatcgtggaacgatccggtgcaaatcaaacaactgctggacgtaggcacacaaaccttactggtgccgatggtacaaaacgccgacgaagcccgtaaagcggtacgcgccacccgttatccccccgccggtattcgcggtgtgggcagtgcgctggctcgcgcctcgcgctggaatcgcattcctgattacctgcaaaaagccaacgatcaaatgtgcgtgctggtgcagatcgaaacgcgtgaggcaatgaagaacttaccgcagattctggacgtggaaggggtcgacggcgtgtttatcggcccggcggatctgagcgccgatatgggttatgccggtaatccgcagcacccggaagtacaggccgccattgagcaggcgatcgtgcagatccgcgaagcgggcaaagcgccggggatcctgatcgccaatgagcaactggcaaaacgctatctggaactgggcgcgctgtttgtcgccgtcggcgttgacaccaccctgctcgcccgcgccgccgaagcgctggcagcacggtttggtaatagttcttctatttcgatggcgaagcaaaacaacaactctgtctactaa

SEQ ID NO: 473045 - DNA, 1356 bp, Shigella flexneri
atgacgacctctaccctgcaatataaagataataaaactgttgaaattgaacatcgtgtcattaataaattatttcgtcgcctaatcatttttctttttattctgtttgttttttcgtttcttgatcgcatcaatataggatttgccggactgacaatgggcaaggatcttggcctgacgtccacaatgtttggcctcgccgcaacactcttttatgtcacgtacgtcatgtgcgggatccccagtaatatgatgttagcgaaaattggcgctcgtcgatggatcgctgggatcatggtggtctggggaattgcttccacctgcacaatgtttgcaacaagccccgaaacactctatctactgcgtatgctggttggtattgctgaggcgggttttttacctggtattttggtttatctgacctggtggttcccggcatatcatcgggccagagccaatgccttatttatgatagcgatgccagtcactatgatgctgggattgatcctttcaggctacattctggccttggatggactgtggaatctaaaaggctggcaatggctctttttgctggaaggtctgccatcggtcattcttggtgtcgtcacctggttttatctcaacgacacaccagaccaggcgacctggcttgatgaaaacgaaaaacaggctttaaaaacgatgattctccgtgaacaagagagtgcatttgcccatgcatctgttccacgctcaaccttacgtgaagtcctgaccccagccatcatgctatatacacttgcttatttttgcctgactaatactctgagtgcgattaatatctggacgccgcaaatcctacagagtttcaatactggcagtagcaacatcatgattggtttgctggcggccatcccccaattctgcacaatttttggcatgatctggtggagtcgtcgttccgaccgtcttaaagaacgcaaaaagcatacgattcttccctacctgtttgccgctgccggatggttactcgcttctgcgacagatcacagcctcattcaactgagcagcatcattatggcctcaatgggatcatttaccgcgatgactatcttttggacaacaccggatcaagttataagcttgcaatcgcgtgccgttgcgatggctgtcatcaatgctgtcggcaatgtaggttcagcagtcagtccattacttatcggtattttgaaagatgcaaccggcagttttagctcaggtttgtggtttgtagcaggattgctggtactgggcgcgttagtcatgacccgaatccctatggggagtcgggaacactctctttcatctgaacttatcgcaccaaaaccgcaataa

SEQ ID NO: 473046 - DNA, 891 bp, Shigella flexneri
atgtccagtgaagctatctttgaacatggttatgaaaatattgatttggtccgggaatatgatgcccgctacgctggtgaagatgtgcattatgaaacatttgcccggttagcgaatttctttggacgcgatatgcgccctcactggcacgatagatattttcaactccattatctggtcactggacgcattactttacaactggatgagcacttctattctgtgcgcgcaccgctttttgtactaacaccaccatcggtgccacatactttctttactgatcctgatagcgatgggcatgttctgaccgtacgtcaggagttaatttggcccctggtagaaaagctctggcctggtagtggagatgccgcaatgctacaaggtatctgtctgtcactggagggaatggaacatacacaggcggcattaaatcattattggccgataatatccctggagtttcaacaaaataagcaaggacgggaaattctattgcaatcactggcgcaaagtatttttacaatcctactgcgtgaagcaccaccaaatgatatttcaacatgcagcgtgcgcggcgagatgtgtttattccagaagtttaatcggctgattgacgaaaattatcgccaacatttaatggtccctgaatatgcaacaatgctcggtatgagtgaatcacggcttaccgagctgtgccgacgttttgccaatcaatcgccgaagagattgattttcgaacgagtgagccgggaagccagacggcttctgctctatagcgagcaaagcatcaaccagatagcccttgatcttggctacaaagatcccgcctatttcgcccgttttttcaaccgaatgatgggttgctcaccaacacaattccgtggtcgctga

SEQ ID NO: 473047 - DNA, 831 bp, Shigella flexneri
atgaaaattgtactacttggaacgaaaggtggcccttctttattaaaagctgaccgtttaccgatggcaacggcacttattattggcaataaaacctggttaattgatgctggttacggggccagcttacaactggtaaaaaataatattccactgcgccagattgataatattttactcacccatttacacagtgatcatattctggactatccatcagtcttaatgaatgcatgggctagcggtctgcaggacaaaactattcatgtattcggtccgccaggcacccgagccatgaccgctgccagttggcaggtcttcgatcgggacatcacactgcgtatggaagaagaaggaaaacccgatcctcgcaaactcgttacagctcaagatgttggtgaaggcgtagtttataaagatgataccgtgaccgtgactgcattaaaggtccctcattctcctttccctgacggtgaggcttttgcttatcgcttcgacacacaaggcaagcgaattgtcttctcaggagatacctcgtactttcccccactggcaactttctcagaaggcgctgatatacttgtgcatgaggccgtacatgagccctccgtcgctaagctggcagacagtattggcaatggtaaaacactggcaaaagccattgcttctcaccatacgactattgaggatgtaggcaaaattgccaatgaagcaaaagtgaaaaaactcatccttagccacctggtaccaatcaccgttccggatgaaacatggaagcaagaagcacagaaaactattcaggccctatcgtcgttggtcatgaaaatatga

SEQ ID NO: 473048 - DNA, 510 bp, Shigella flexneri
atgaaaccagaagatttccgcgccagtacccaacgtcctttcaccggggaagagtatctgaaaagcctgcaggatggtcgcgagatctatatctatggcgagcgagtgaaagacgtcaccactcatccggcatttcgtaatgcggcagcgtctgttgcccaactgtacgacgcgctgcacaaaccggagatgcaggactctctgtgttggaacaccgacaccggcagcggcggctatacccataaattcttccgcgtggcgaaaagtgccgacgacctgcgccagcaacgcgacgccatcgctgaatggtcacgcctgagctatggctggatgggccgtaccccagactacaaagccgctttcggttgcgcactgggcgcgaatccgggcttttacggtcagttcgagcagaacgcccgtaactggtatacccgtattcaggaaactggcctctactttaaccacgcgattgttaacccaccgatcgtcatttgccgaccgataaagtga

SEQ ID NO: 473049 - DNA, 1053 bp, Shigella flexneri
gtgaaagacgtttacatcaagctggaaaaagagactgacgccgggattatcgtcagcggtgcgaaagtggttgccaccaactcggcgctgactcactacaacatgattggcttcggctcggcacaagtgatgggcgaaaacccggacttcgcactgatgttcgttgcgccaatggatgccgatggcgtgaaattaatctcccgcgcctcttatgagatggtcgcgggtgctaccggctcgccatacgactacccgctctccagccgcttcgatgagaacgatgcgattctggtgatggataacgtactgatcccatgggaaaacgtgctgatctaccgcgattttgatcgctgccgtcgctggacgatggaaggcggtttcgcccgtatgtatccgctgcaagcctgtgtgcgcctggcagtgaaactcgacttcattacggcactgctgaaaaaatcactcgaatgtaccggcaccctggagttccgtggtgtgcaggccgatctcggtgaagtggtggcgtggcgcaacaccttctgggcattgagtgactcgatgtgttcagaagcgacgccgtgggtcaacggggcttatttaccggatcatgccgcactgcaaacctatcgcgtactggcaccaatggcctacgcgaagatcaaaaacattatagaacgcaacgttaccagtggcctgatctacctcccttccagtgcccgtgacctgaacaatccgcagatcgaccagtatctggcgaagtatgtgcgcggttcgaacggtatggatcacgtccagcgcatcaagatcctcaaactgatgtgggacgccattggcagcgaatttggtggtcgtcacgagctgtatgaaatcaactactccggtagccaggatgagattcgcctgcaatgtctgcgccaggcacaaagctccggcaatatggacaagatgatggcgatggttgatcgctgcctgtcggaatacgaccagaacggctggactgtgccgcacctgcacaacaacgacgatatcaacatgctggataagctgctgaaataa

SEQ ID NO: 473050 - DNA, 513 bp, Shigella flexneri
atgcaattagatgaacaacgcctgcgctttcatgacgcgatggccagcctgtcggcagcggtaaatattatcaccaccgagggcgacgccggacaatgcgggattacggcaacggctgtctgctcggtcacggatacaccaccgtcgctgatggtgtgcattaacgccaacagtgcgatgaacccggtttttcagggcaacggcaagttgtgcgtcaacgtcctcaaccatgagcaggaactgatggcgcgccacttcgcgggcatgacaggcatggcgatggaagagcgttttagcctctcatgctggcaaaaaggtccgctggcgcagccggtgctaaaaggttcgctggccagtcttgaaggagagatccgcgatgtgcaggcgattggcacacatctggtgtatctggtggagattaaaaacatcatcctcagtgcagaaggtcacggacttatttactttaaacgccgtttccatccggtgatgctggaaatggaagctgcgatttaa

SEQ ID NO: 473051 - DNA, 2151 bp, Shigella flexneri
atggatacgaaaaaactattcaagcacataccctgggtgattctcggaatcatcggtgcattctgcctcgcggtagttgcattacgtcggggggagcacgtcagcgccctgtggatcgtggtcgcctctgtgtcggtgtatctggtggcgtatcgctactacagtctgtacatcgcccagaaggtgatgaaactcgaccccacgcgcgcgacgcctgcggttattaacaacgacggtctgaactacgttccgaccaaccgttacgtgttgtttggtcaccacttcgccgctatcgccggtgctggtccgctggtgggaccggttctcgccgcgcagatgggctacctgcctggcacgctgtggctgctggcgggggtagtgctggccggtgcggtacaggactttatggtgctgtttatctcctctcgccgtaacggcgcatctctcggtgagatgatcaaagaagagatggggccagtaccggggactatcgcgctgtttggctgtttcttaatcatgatcatcatcctcgccgttctggcgctgattgtggttaaagccctggccgaaagtccgtggggtgtcttcaccgtttgctcaaccgtaccgattgcgctgtttatgggtatctacatgcgctttatccgtccggggcgtgtgggtgaagtctctgttattggtatcgtgctgctggttgcctctatctacttcggtggcgtgattgctcacgatccgtactggggtccggcactgacctttaaagacaccaccattaccttcgcgctgattggctatgcgtttgtttccgcactgctgccggtgtggctgatcctcgcaccgcgcgactatctggcaaccttcctgaaaatcggcgttatcgtcggcctggcgctgggtatcgtggtgctgaacccggaactgaaaatgcctgcgatgacccagtacattgacggtactggcccgctgtggaaaggcgctctgttcccgttcctgttcatcaccatcgcctgtggtgcggtatctggcttccacgcgctgatctcttccggtacgacgccgaaactgctggctaacgaaaccgacgcgcgtttcattggctacggcgcaatgctgatggagtccttcgtggcgattatggcgctggttgcagcgtccatcatcgaaccgggtctttacttcgcgatgaacaccccgcctgctggccttggcatcaccatgcctaacctgcatgaaatgggtggcgagaacgcgccgatcatcatggcgcagctgaaagacgttaccgcacacgcggcagcgaccgtcagctcctggggcttcgtgatttcgccagagcagatcctgcaaaccgcgaaagacattggtgagccttctgtcctgaaccgtgcaggtggtgcgccgacgctggcggtaggtatcgctcacgtgttccacaaagtgctgccgatggctgacatgggcttctggtatcacttcggtattctgttcgaagccctgttcatcctgaccgcgctggatgcgggtacccgttctggccgctttatgctgcaagacctgctgggtaacttcatcccgttcctgaaaaaaaccgactctctggttgccggtatcatcggtactgcgggctgtgtgggtctgtggggctacctgctgtatcagggcgtggtcgatccgctgggcggcgttaagagcctgtggccgctgttcggtatctccaaccagatgctggcagccgtagcgctggtactgggcaccgttgtgctgattaagatgaagcgcacccaatacatctgggtaactgttgttccggctgtatggctgcttatctgcaccacctgggcgctgggtctgaaactgttcagcaccaacccgcagatggaaggcttcttctacatggcaagccagtacaaagagaagattgctaacggtactgacctgacggcgcagcagattgccaacatgaaccacatcgttgtgaacaactacaccaacgcaggcctgagtattctgttcctgattgtggtgtacagcatcatcttctacggtttcaaaacctggcttgcggtgcgtaacagcgacaaacgtactgacaaagaaacaccgtacgttccaatcccggaaggcggcgtgaagatctcttcgcaccactaa

SEQ ID NO: 473052 - DNA, 204 bp, Shigella flexneri
atgtttggtaacttaggacaggcaaaaaaatatctcggccaggcggcgaagatgttgattggtattccagactacgacaactacgtcgagcatatgaagaccaaccatcccgacaagccgtacatgagctatgaagaattcttccgcgaacgccagaacgcgcgctacggcggcgatggtaaaggcggtatgcgctgttgttaa

SEQ ID NO: 473053 - DNA, 957 bp, Shigella flexneri
atgaacccgattgcagttaccctactcaccggttttttaggcgcgggcaaaactaccctgctgcgccatattcttaacgaacaacacggctacaagattgccgtgattgaaaacgaattcggcgaagtctccgttgatgatcaactgattggcgaccgcgccacgcagatcaaaacgctgaccaacggctgcatctgctgttcgcgctccaacgagctggaggacgcactactcgacctgctggataatctcgacaagggcaatattcagttcgatcgtctggtgattgaatgcaccggcatggccgatcccggcccgattattcagacctttttctcccatgagattttatgccagctctacctgctggacggcgtgattgcgctggtggatgcggtacatgccgatgagcagatgaaccagttcaccatcgcccagtcccaggtgggctacgccgaccgtattctgctgactaaaaccgacgtcgcaggcgaagcagagaaactgcgtgaacgcctggcgcgcatcaacgcccgcgcaccggtctacaccgtcacccacggcgacatcgacctgggcctgctgttcaacaccaacggttttatgctggaagagaacgtcgtcagcaccaaaccgcgtttccactttatcgcggataaacaaaacgatatttcgtcaattgtggtggaactggattacccggtagatatcagcgaagtttcccgcgtgatggaaaacctgctgctggaatcggcggataaactgctgcgttacaaagggatgctgtggattgacggcgaacctaaccgcctgctgttccagggcgtccagcgcctctacagcgccgactgggacaggccgtggggcgatgaaaaaccgcatagcacaatggtgtttatcgggattcagttgccggaggaagagattcgggcggcgtttgcgggattgaggaagtaa

SEQ ID NO: 473054 - DNA, 648 bp, Shigella flexneri
atgaatcgaatggctcgtacagaagattttaatttagatgatttttctcaatttattaccgcctttgagaaggtatatatgcatgggtggttaaaaaaacaaattaaaagccaaagagaaatggtttgttattctgctctggtagcaataaataatgatatgccttttgattctgtgataaatcagataaaccaacatgcagataattcaggttttatagctgctctggatgaagatttatatgagcctcgtccgaatcaagtgaacttaataaaagcaattttgcttcgcttagatatggagcaacaagatgagagcgtgattaaaacctatacggggagaatcacaattgagcatattcttcctcaagcattagttaatgaatactggattaatagattccaacctcaagagcatgtctactggctgcataaaataggtaatttaacactcataagtggttccaaaaattctgaaacacaacactatgattttatcaaaaagaaatctatttatgagaaacttaatagtaaaagctctttttatttaacaaaagatgtttgtaattcttcagaatggggattggctgaactgaaaatgagacatgaaaaaatgaaaacgcaattgaagaagctttggttggtctga

SEQ ID NO: 473055 - DNA, 1413 bp, Shigella flexneri
atgaaaaagaccaaaattgtttgcaccatcggaccgaaaaccgaatctgaagagatgttagctaaaatgctggacgctggcatgaacgttatgcgtctgaacttctctcatggtgactatgcagaacacggtcagcgcattcagaatctgcgcaacgtgatgagcaaaactggtaaaaccgccgctatcctgcttgataccaaaggtccggaaatccgcaccatgaaactggaaggcggtaacgatgtttctctgaaagctggtcagacctttactttcaccactgataaatctgttatcggcaacagcgaaatggttgcggtaacgtatgaaggtttcactactgacctgtctgttggcaacaccgtactggttgacgatggtctgatcggtatggaagttaccgccattgaaggtaacaaagttatctgtaaagtgctgaacaacggtgacctgggcgaaaacaaaggtgtgaacctgcctggcgtttccattgctctgccagcactggctgaaaaagacaaacaggacctgatctttggttgcgaaaaaggcgtagactttgttgctgcttcctttattcgtaagcgttctgacgttatcgaaatccgtgagcacctgaaagcgcacggcggcgaaaacatccacatcatctccaaaatcgaaaaccaggaaggcctcaacaacttcgacgaaatcctcgaagcctctgacggcatcatggttgcgcgtggcgacctgggtgtagaaatcccggtagaagaagttatcttcgcccagaagatgatgatcgaaaaatgtatccgtgcacgtaaagtcgttatcactgcgacccagatgctggattccatgatcaaaaacccacgcccgactcgcgcagaagccggtgacgttgcaaacgccatcctcgacggtactgacgcagtgatgctgtctggtgaatccgcaaaaggtaaatacccgctggaagcggtttctatcatggcgaccatctgcgaacgtaccgaccgcgtgatgaacagccgtctcgagttcaacaatgacaaccgtaaactgcgcatcaccgaagcggtatgccgtggtgccgttgaaactgctgaaaaactggatgctccgctgatcgtggttgctacccagggcggtaaatctgctcgcgcagtacgtaaatacttcccggatgccaccatcctggcactgaccaccaacgaaaaaacggctcatcagttggtactgagcaaaggcgttgtgccgcagctggttaaagagatcacttctactgatgatttctaccgtctgggtaaagaactggctctgcagagcggtctggcacacaaaggtgacgtcgtagttatggtttctggtgcactggtaccgagcggcactactaacaccgcatctgttcacgtcctgtaa

SEQ ID NO: 473056 - DNA, 237 bp, Shigella flexneri; identical to SEQ ID NO: 1349

SEQ ID NO: 473057 - DNA, 1005 bp, Shigella flexneri
atgaaacgcgcgtctttgcttacactcacgcttatcggcgcttttagcgccatccaggctgcctgggcggttgattatccgctaccaccaaccggaagccgactggttgggcaaaatcaaacgtatacggtgcaagaaggggataaaaaccttcaggctattgcccgacgttttgatactgcagcaatgttgatccttgaagccaataacactatcgccccggtgccaaaacctggtacgacgataactattccttcacaactgttattacctgatgcaccgcgtcaggggattatcgttaaccttgcagagctgcgcctttattattatccgccgggagaaaatattgtgcaggtttatccaataggtattggattgcaggggctggaaacgccggtgatggaaacgcgtgttgggcagaaaatccctaacccaacctggacgcctacggcaggcattcgtcagcgttcgctggagcgtggcattaaattaccgccagtcgttcctgccggaccaaataacccgctaggacgttacgcactgcgcctcgcgcatggtaatggcgaatacctcattcatggcaccagtgcgccggacagcgttggtttgcgcgtcagttcagggtgtattcgcatgaatgcaccggatattaaagccttgttctccagcgtgcggacgggaacgccggtgaaagtgatcaacgaaccgatgaaatattccgtggaacctaacgggatgcgttatgttgaagtacatcgaccactatcagcagaagaacagcaaaacgttcagacaatgccatacacactgccagcaggctttacgcaatttaaagacaataaggctgtagatcagaagttagtcgataaagcgttgtatcgtcgggcagggtatccggtttcggtgagcagtggagcaactcccgcagccagcaatgcgccttcagtagagtcagcgcagaatggtgaaccagagcaagggaatatgttacgcgcgacgcagtag

SEQ ID NO: 473058 - DNA, 417 bp, Shigella flexneri
atggctttattgccggataaagaaaaattgctgcgtaattttttacgctgcgccaactgggaagagaaatatctctacattattgagctgggccagcgtctgccagaattacgcgccgaagacggaagcccacaaaatagcattcagggctgccagagtcaggtgtggattgtcatgcgccagaatgcgcagggaattattgaattgcagggcgacagcgatgcggcgattgtgaaagggcttattgcggtcgtctttattctctacgatcagatgacgccgcaggatattgtcaatttcgatgtgcgtccgtggtttgaaaaaatggcgctcacccaacatctcaccccatctcgttcacaaggtctggaagcgatgattcgcgcaattcgcgccaaagccgctgcacttagctaa

SEQ ID NO: 473059 - DNA, 1221 bp, Shigella flexneri
atgactttttccgtcgacaaagtgcgggccgactttccggtgctttcgcgtgaggtaaacggtttgccgctggcttatctcgacagcgccgccagtgcacagaaaccgagccaggtgattgacgccgaggccgagttttatcgtcatggctacgcggcggtgcatcgcggtattcataccttaagcgcccaggcgaccgagaaaatggagaacgtgcgcaagcgggcatcgctgtttattaatgcccgttcggcggaagagctggtgttcgtccgcggcacgacggaagggatcaatctggtcgccaatagctggggcaacagcaatgtgcgggcgggcgataacatcatcatcagtcagatggagcaccacgctaacattgtcccctggcagatgctttgcgcacgcgttggcgcagagctgcgtgtgatccctctcaaccccgacggtacgctgcaactggagacgctgcctacgctgtttgatgagaaaactcgcctgctggcaattactcatgtctccaacgtgcttggcacagaaaatccactggcggaaatgatcacgcttgcgcaccagcatggcgcaaaagtgctggtggatggcgctcaggcggtgatgcatcatccggtggatgttcaggcgctggattgcgacttttacgtgttctccgggcataaactgtatggccccaccggaattggcattctttatgtgaaagaagccttgttgcaggagatgccgccgtgggaagggggcggttctatgatcgccaccgtcagcctgagtgaaggcactacctggaccaaagcaccatggcggtttgaagccggtacacccaataccgggggcatcattggtcttggcgcggcgctggagtatgtttcggcgctggggcttaatagcatagccgagtatgaacagaatctgatgcattatgcgctatcacagctggaatctgtaccggatctcactctctatggccaacaaaacaggcttggcgttattgcttttaatctcggtaaacaccacgcctatgatgttggcagttttctcgataattacggcattgctgtgcgtaccggacatcactgcgctatgccattaatggcctattacaacgtccctgcgatgtgtcgggcgtcgctggccatgtataacacccatgaagaagtggagcgtctggtgaccggcctgcaacgtattcaccgtctgctgggataa

SEQ ID NO: 473060 - DNA, 1272 bp, Shigella flexneri
atggctggcttaccgaacagcagtaatgcgctgcaacagtggcatcacttgtttgaagctgaagggacaaaacgctcaccgcaagcacagcagcatttacaacaattgctgcgtaccggactgccgacacgtaaacatgaaaactggaaatatacgccgctggaagggctgaccaatagtcagtttgtcagcattgcgggagatatatccccacagcagcgtgatgccttagcgttaacgttagacgccgtgcggctggtgtttgtcgatggacgttacgtgcccgcgctgagcgatgcaattgaaggcagcggatatgaagtgagcattaacgacgaccgtcaggggttacccgacgctattcaggcggaagtgtttctgcatttgacggaaagcctggcacaaagcgtgacgcatatcgccgtgaagcgcggtcaacggccggcaaagccattgctgttaatgcatatcacccagggcgtggcaggtgaagaggtgaacactgcccattaccggcatcatctggatctggcggaaggtgccgaagcaacggtgatcgaacattttgtcagccttaatgatgctcgtcattttaccggggcacggttcactatcaatgtcgcagcgaacgcccacttgcagcatatcaagctggcgtttgaaaacccggtcagtcaccactttgcccataacgatttgttgctggctgacgatgccaccgcatttagccatagtttcctgctgggtggcgcagtgttacgacacaacaccagtacgcaactcaatggcgaaaacagcacgctgcggatcaatagcctggcgatgccggtgaaaaacgaggtgtgtgatacccgtacctggctggaacacaataaaggtttttgtaacagccgacagttgcacaaaactatcgtcagcgacaaaggccgcgcggtatttaacggtttgatcaacgtcgcgcagcacgccatcaaaacggatggtcagatgaccaacaataatctgctgatgggcaaactggcggaagtggatacaaaaccgcagctggaaatctatgcagatgatgtgaaatgcagccacggcgcgacggtggggcgtattgatgatgaacagatgttctatctgcgctcgcgcgggatcaatcagcaggatgcccagcagatgatcatttacgcctttgctgccgaactgacggaagcactgcgtgatgaggggcttaaacagcaggtgctggcccgaatcggtcaacggctgccaggaggtgcaagatga

SEQ ID NO: 473061 - DNA, 747 bp, Shigella flexneri
atgttaagtattaaagatttacacgtcagcgtggaagataaagctatcctgcgtggattaagcctcgacgttcgtcccggcgaagttcacgccattatggggccaaacggttcgggcaaaagtaccttatcggcaacgcttgccgggcgcgaagattatgaagtgacgggcggcacggttgagttcaaaggcaaagatttgcttgcactgtcgccggaagatcgtgcaggcgaaggcatctttatggccttccagtatccggtggagattccaggcgtcagtaaccagtttttcctgcaaacggcacttaatgcagtgcgcagctatcgcggccaggaaacgctcgaccgctttgattttcaggatttgatggaagagaaaatcgctctcctgaagatgccggaagatttattaacccgttcggtaaacgttggtttttccggcggcgagaaaaagcgcaacgatattttgcaaatggcggtgctggaaccggagttatgcattcttgatgagtcggactccgggctggatattgacgcattaaaagtggtcgccgatggcgtgaactcgctgcgtgatggcaagcgctcattcatcattgttacgcactaccaacgcattctcgactacatcaagcctgattacgttcatgtgctatatcagggacgaattgtgaaatccggcgatttcacgttggtcaaacaactggaggagcagggttatggctggcttaccgaacagcagtaa

SEQ ID NO: 473062 - DNA, 1488 bp, Shigella flexneri
atgtctcgtaatactgaagcaactgacgatgtcaaaacctggaccggcggcccgctgaattataaagaaggattcttcacccagttagccaccgatgagctggcaaaggggataaacgaagaggtggtgcgcgcaatttcggcgaagcgtaatgagccggagtggatgctggagtttcgtctaaacgcctatcgcgcatggctggagatggaagaaccgcactggttgaaagcgcactacgacaagctgaattatcaggattacagctactactcagcaccatcgtgcggtaattgtgacgacacttgcgcgtctgaacctggcgcggtgcagcaaactggcgcgaacgcctttttaagtaaagaggtggaggcggcgtttgagcagttgggcgttcccgtgcgggaaggcaaagaggtggcggtggatgccattttcgactctgtttcggttgccaccacttatcgcgaaaaactggcggagcagggaattattttctgttcctttggtgaggcgatccacgatcacccggaactggtgcgtaaatatctcggcaccgtggtgccggggaatgacaacttctttgcagcacttaatgcggcggtagcctctgacggtacgtttatttatgtgcctaaaggcgtgcgctgcccgatggaactttccacctattttcgcattaacgcggaaaaaaccgggcagtttgagcgcacaattctggtggccgacgaagacagctacgtcagctacattgaaggctgttccgctccggtgcgtgacagctatcagttgcacgcggcagtggtggaagtcatcatccataaaaacgccgaggtgaaatattccacggtacaaaactggttccctggcgataacaacaccggcggtattctcaacttcgtcaccaagcgtgctttgtgcgaaggcgaaaacagcaaaatgtcatggacgcaatcagaaaccgggtcagcgattacgtggaaatatcccagctgcattttgcgcggcgataactccattggtgagttttactcagtggcgctgaccagcggtcatcagcaagcggataccggcaccaagatgatccacatcggtaaaaacaccaaatcgaccattatctcgaaagggatctctgccggacatagtcagaacagttatcgcggcttagtgaaaatcatgccgacggcaaccaatgcgcgcaatttcactcagtgcgactcaatgctgattggcgctaattgtggggcgcataccttcccgtatgtcgaatgtcgcaataacagcgcacaactggagcacgaggcaacgacatcacgtattggtgaagatcaactgttttactgcctgcaacgcgggatcagcgaagaagacgccatctcgatgattgttaacggtttctgcaaagacgtgttctcagaactgccgctggaatttgccgttgaagcacaaaaactcctcgccatcagtcttgaacacagcgtcggataa

SEQ ID NO: 473063 - DNA, 369 bp, Shigella flexneri
atggacatgcattcaggaacctttaacccacaggatttcgcctggcaaggcttaacgctgacacccgcagcggcgatacacatccgcgagctggtggcaaagcagccaggtatggtcggcgtgcgcttaggtgtgaagcaaacgggctgcgcgggctttggctatgtgctcgacagtgttagcgagccggacaaagacgatctgctgtttgaacacgacggcgcgaagctgtttgtcccgctgcaatcgatgccgtttattgatggcacggaagtcgatttcgttcgtgaaggacttaatcagatattcaaatttcacaaccctaaagcccagaatgaatgtggctgtggcgaaagctttagggtatag

SEQ ID NO: 473064 - DNA, 189 bp, Shigella flexneri; identical to SEQ ID NO: 459585

SEQ ID NO: 473065 - DNA, 411 bp, Shigella flexneri
atgatatggaaacggaaaatcaccctggaagcactgaatgctatgggtgaaggaaacatggtggggttcctggatattcgctttgaacatattggtgatgacacccttgaagcgacaatgccagtagactcgcggacaaagcagcctttcgggttgctgcatggaggagcatccgtggtactggccgaaagtatcggttccgttgccggttatttatgtaccgaaggtgagcaaaaagtggttggtctggaaatcaatgctaatcacgtccgctcggcacgagaagggcgggtgcgcggcatatgtaaaccgttgcatctcggttcgcgtcaccaggtctggcagattgaaatcttcgatgagaaagggcgtttgtgctgttcgtcacgattgacgactgccattttgtga

SEQ ID NO: 473066 - DNA, 3057 bp, Shigella flexneri
atgattccacagatttccctggcacccggcgtcgttcaactggtgcttaattttttgcaagagctggagcaacaaggttttaccggcgatgcggcgacaagttatgccgatcgtctgacaatgtcgaccgacaacagtatttaccaacttctccccgatgcggtggtatttccgcgttcaaccgcagatgtggcgctgatcgcccgtcttgccgcgcaggaacgctattcatcgctgatctttaccccccgcggcggcggcaccggcactaacggtcaggcgctcaaccaggggattattgttgatatgtcccgccatatgaaccgcatcatcgaaattaaccctgaagagggctgggtgcgcgttgaggccggggtgataaaagaccaactcaatcagtacctgaaaccgttcggctacttttttgcgccggaactttcgaccagcaaccgggcaacgctcggtgggatgatcaataccgatgcatccggtcagggatcgctggtctatggcaaaacgtcagatcacgtacttggcgtacgcgcggtgttgttggggggcgatattctcgatacgcaacctttacccgtcgagctggcggaaacgctgggtaaatccaataccacaatcgggcgaatttataacacggtttatcaacgttgccgtcagcaacgccagttaatcatcgacaacttccccaaacttaaccgctttcttaccggttacgatctgcgtcatgtctttaacgatgagatgaccgagttcgacctgacgcgcattctgacgggttcagaagggacgctggcctttattaccgaagcgcggctggatattacgcgcttgcctaaagtgcgccgtctggtgaatgtcaaatatgactcttttgactctgcgctgcgtaacgcgccgtttatggttgaggcgcgggcgctttcggtagagacggtggactcaaaagtgctgaatctggcgcgggaagatattgtctggcattccgtcagcgagttgattaccgatgtgcctgacaaagagatgctcggactgaacattgtggaatttgctggtgatgatgaggcgctgattgacgagcgagttaatgcactctgtgtgcggcttgatgagctgattgccagccaacaggcaggtgtgattggctggcaggtgtgccgcgagctggcgggggttgaacgtatctatgcgatgcgcaaaaaagccgttggtctgcttggcaatgccaaaggtgccgctaagccaattccgtttgctgaggatacctgcgtaccgccggaacatctggccgattatattgctgaatttcgcgcgctgctcgacagccacggcttaagctacggtatgttcggtcacgtcgacgcaggtgtcttgcacgtccgtccggcactggatatgtgcgatccgcaacaagagattttgatgaagcaaatctctgatgacgtggtggcgctgactgcgaaatacggtggtttgttgtggggcgagcacggcaaaggttttcgcgctgaatacagcccggcgtttttcggtgaggaactttttgcagaactgcgcaaagtgaaagcggcatttgacccgcataaccgactcaacccagggaagatttgcccgccagaaggtctcgatgcgccgatgatgaaagtggacgcggtgaagcgcggtacattcgatcggcagatccccattgcggtacgccagcagtggcgcggtgcgatggagtgtaacggcaacggtttatgcttcaactttgatgcccgtagtccgatgtgtccgtcgatgaagatcacccagaaccggattcattcaccgaaagggcgcgcaacgctggtgcgtgaatggctgcgcttgttggcggatcgcggcgttgacccactcaaactggaacaagaactgcctgaatccggcgtcagtttgcggacgttaattgcccgcacgcgcaatagctggcatgcgaataaaggcgaatatgacttctcacacgaagtcaaagaggcgatgtcgggctgtctggcctgtaaagcttgttcgacccagtgccccatcaaaattgatgtgccggagtttcgctctcgttttctgcagctctatcacacccgttatttacgcccgcttcgcgaccacctcgttgctacggtcgagagctacgcaccgctgatggcacgcgcgccgaaaacctttaacttcttcattaaccagccgctggtgcgcaaactctcggaaaaacatatcggcatggttgatttgccactgctgtcggtcccctcgctacaacaacaaatggtggggcatcgctcggcaaacatgacgctggaacagcttgaagctctcaatgcagagcagaaagcgcgcacggtgttggtggtgcaggacccctttaccagctattacgatgcgcaagtggtggcggattttgtccgtctggttgaaaaattaggtttccagcctgtgttactgccattttcgccaaatggcaaagcccagcatatcaaaggctttcttaatcgttttgcgaagacggcgaaaaagacggcggatttcctcaaccgtatggctaagcttgggatgccaatggtgggcgtcgatccggcgctggtactttgttatcgcgatgaatataaactggcgctgggcgaggaacgtggcgagtttaacgtcttacttgcgaatgaatggctggcaagcgcacttgagtcacatccagtggctacagtcagcggtgaatcatggtatttctttggtcactgtaccgaggttaccgctttgccgggcgcgccagcacaatgggccgcgatatttgcccgttttggcgcgaaactggaaaatgtcagcgtgggttgctgcggcatggcagggacttacggacatgaagcgaaaaaccatgaaaattcgctcgggatctatgagttatcctggcatcaggctatgcagcgactgccgcgtaaccgctgtctggcgaccggatattcctgccgtagccaggtaaaacgggttgaaggcacgggggtacgccatcctgtgcaggctttactggagattattaaatga

SEQ ID NO: 473067 - DNA, 1113 bp, Shigella flexneri
atggtaaatgttcgtcagcccagggatgtcgcacaaattctgctttcggtgctgtttttagccatcatgattgtggcatgtctgtggattgttcaaccctttattctcggctttgcatgggccggtacggtggttatcgccacctggccggtattgttacgtttgcaaaagatcatgtttggccgccgctctctcgccgttctggtgatgacgctgttattagtgatggtgtttatcatccctattgctttgctggttaacagtatcgtcgacggcagcggcccgctaattaaagccatttccagcggcgacatgacgttacccgatctggcgtggcttaataccattccggtgattggcgcgaagctgtatgcaggctggcacaacttgctggatatggggggtacggcgatcatggcgaaagtccgcccttatattggcaccaccaccacctggttcgttgggcaggcggcgcatatcgggcgctttatggtgcattgtgcgctgatgcttctcttcagtgccctgctgtactggcgcggtgaacaggtggcacaaggcattcgccattttgcaacccgtctggcaggcgttcgcggagatgccgccgtgctgctggcggcacaggctatccgcgcggtggcgctgggtgtggtggtgacggcgttagtacaggcagtgcttggcggtatcggcctcgccgtatccggcgtaccttatgcaacgttgctaacggtgttaatgatcctctcctgccttgtccagcttggcccgttgccggtactgattccggcgattatctggctctactggaccggcgataccacctggggaacggtattgttagtgtggagcggtgtggttggcacgctggataacgtcatccgcccaatgttaattcgcatgggtgccgatttaccgctgatcctgatcctctctggcgttattggtggtttgattgctttcgggatgatcggtctgtttattggtccggttctgttagccgtttcctggcgtctgtttgccgcgtgggtggaagaagtcccgccaccgacggaccaaccggaagaaattctcgaagaacttggcgaaatcgagaaaccgaataagtaa

SEQ ID NO: 473068 - DNA, 357 bp, Shigella flexneri
atgaacgcttatgaactccaggcactccgccatatttttgccatgactattgatgaatgcgcgacctggattgcccagaccggtgacagtgaaagctggcgtcagtgggaaaatggcaaatgcgccattcctgattgtgtagtcgagcaactgttggctatgcgtcagcaacgaaaaaaacatcttcatgccatcatagagaaaataaataaccgcatcggcaacaacaccatgcgttttttccccgacttaaccgcgtttcaacaagtctaccctgatggcaattttattgactggaagatctatcaatcggtagccgctgaattatatgcacacgatctggagcggctttgttaa

SEQ ID NO: 473069 - DNA, 1206 bp, Shigella flexneri
atgaaaaatccctattaccctaccgcacttgggttgtattttaattacctggtgcatggtatgggcgtcattttgatgagcctgaatatggcctcgctggagacactttggcagactaatgccgcgggtgtctcgatagttatctcatcgctgggcattggtcgattaagtgtcttgctttttgcaggattattatccgatcgctttggtcgccgcccttttatcatgctcgggatgtgctgctatatggccttcttttttgacatcctgcagaccaataacatcattatcgcttatgtttttggctttctggcgggaatggcaaacagttttctcgatgcaggcacttatcccagtttgatggaagcttttccacgctcacctgggacagccaatattttaattaaagcatttgtttccagcggacaatttttattaccgctaatcattagcctgttagtgtgggctgaactgtggttcggttggtcctttatgattgctgcaggcattatgtttattaacgctctgtttttataccgttgtacgttcccaccccatccgggtcgtcgcttacctgtcataaagaaaaccaccagctctacggaacatcgctgttcaattatcgatttagccagttataccttatatggctatatctcaatggcaacgttttatctggttagccagtggctggcacagtacggacaatttgttgcaggcatgtcatacactatgtcgatcaaactactcagtatctacaccgtgggttcgctgctttgtgtatttattaccgctccactcattcgtaataccgttcgcccaacaacattactgatgctgtacacctttatctcatttattgctctgtttaccgtctgcctgcatcccacattttatgtggtgataatatttgcttttgtcattggttttacctctgctggaggtgttgtgcaaattggcctgacgttaatggctgaacatttcccttacgctaaaggtaaagctacagggatctattacagtacgggcagtattgcgacctttactattccgttgattacggctcatctgtcccaaagaagtattgtcgatattatgtggttcgatactgccatcggttttttactggcactgtttatcggcttacgcagccgcaaaaaaacgcggcatcactcgctaaaggaaaatgtcgctccgggtgggtaa

SEQ ID NO: 473070 - DNA, 1161 bp, Shigella flexneri
atgacatctctggcagaaaagttttccactgacaacgcgggcattgcctatttaatttccggtatcggtttggggcgattgatcagtattttattcttcggtgtgatctccgataagtttggtcgtcgggcggtgatattaatggcagtaataatgtatctgctattcttctttggtattcccgcttgcccgaatttaactctcgcctacggtctggcagtgtgcgtaggtatcgctaactcagcgctggatacgggtggctaccccgcgctcatggaatgctttccgaaagcctctggttcggcggtcatactggttaaagcgatggtgtcatttgggcaaatgttctacccaatgctggtgagctatatgttgctcaataatatctggtacggctatgggctgattattccgggtattctgtttgtactgatcacgctgatgctgttgaaaagcaaattccccagccagttggtggacgccagcgtagctaatgaattaccgcaaatgaacagcaaacctttagtctggctggaaggtgtttcatcggtactgttcggtgtagccgcattctcgaccttttatgtgattgtggtgtggatgcccaaatatgcgatggcttttgctggtatgtcagaagctgaggcattaaaaaccatctcttattacagtatgggctcgttggtctgtgtctttatttttgccgcactactgaaaaaaatggtccggcccatctgggctaatgtatttaactctgcgctggcaacaataacagctgccattatctacctgtacccttctccactggtgtgtaatgccggcgcctttgttatcggtttctcagcagctggcggcattttacagctcggtgtttcggtcatgtcagagtttttccccaaaagcaaagccaaagtcaccagtatttatatgatgatgggtggactggctaactttgttattccgctgattaccggttatctgtcgaacatcggcctgcaatatatcattgttctcgattttactttcgcgctgctggccctgattaccgcaattattgtttttagccgctattaccgcgtttttattattcctgagaatgatgtgcggtttggcgaacgcaaatttagcacccggttaaacacaattaagcatagaggttaa

SEQ ID NO: 473071 - DNA, 867 bp, Shigella flexneri
atggatgttaccgcaaaatacgaattgattggattgatggcttatcctatccgccacagtttatcgcctgaaatgcagaataaagccttagaaaaagcgggattgccatttacctatatggccttcgaagtggataacgatagctttcccggagcaattgaaggattaaaagccctcaaaatgcgcggaactggtgtgtcgatgccgaacaaacaactggcgtgtgaatatgttgatgaattaacgccagcagccaaactggtgggtgccatcaacaccatcgttaatgatgatggctatctgcgtggctataacaccgacggcacgggccatattcgcgccattaaagagagcggttttgatatcaaaggcaaaacgatggtgctgttaggggccggaggtgcctcaacggcgattggcgcgcagggggcaattgaaggtttaaaagaaattaaactctttaaccgtcgggatgagttcttcgataaagccctcgccttcgcgcagcgggttaacgaaaacaccgattgtgtcgtcacggataccgatctcgccgatcagcaagcctttgctgaagccctggcttccgccgacattttaaccaatggcacaaaagtaggtatgaaaccccttgagaatgaatcattggttaatgatatcagtctgttacatccgggactgctggtcactgaatgcgtgtataacccgcatatgacgaagttattgcagcaggcacaacaagctggttgcaaaacgattgatggatacggcatgttgttgtggcaaggggctgaacagttcacgttatggactggcaaagatttccctctggaatatgttaaacaggtcatggggttcggtgcctga

SEQ ID NO: 473072 - DNA, 759 bp, Shigella flexneri
atgaaaaccgtaactgtaaaagatctcgtcattggtgcgggcgcacctaaaatcatcgtctcgctgatggcgaaagatatcgcccgcgtgaaatccgaagctctcgcctatcgtgaagcggactttgatattctggaatggcgtgtggaccactttgccgacctctccaatgtggcgtctgtcatggcggcggcaaaaattctccgtgaaaccatgccagaaaaaccgctgctgtttaccttccgcagtgccaaagaaggcggcgagcaggcgatttccaccgaggcttatattgctctcaatcgtgcagccatcgacagcggcctggttgatatgatcgatctggagttatttaccggcgatgatcaggtcaaagaaaccgtcgcctacgcccacgcgcatgatgtgaaagttgtcatgtccaaccatgacttccataaaacgccggaagccgaagaaatcattgcccgtctgcgcaaaatgcagtccttcgacgccgatattcctaagattgcgctgatgccgcaaagtaccagcgatgtgctgacgttgcttgccgcgaccctggagatgcaggagcagtatgccgatcgtccaatcatcacgatgtcgatggcaaaaactggcgtaatttctcgtctggttggtgaagtatttggctcggcggcaacttttggtgcggtaaaaaaagcctctgcgccagggcaaatctcggtaaatgatttgcgcacggtattaactattttacatcaggcataa

SEQ ID NO: 473073 - DNA, 549 bp, Shigella flexneri
atgcaagatttaagcggtttctcggtgccgaaagggttccggggcggcaacgctattaaagtgcaattatggtgggcagtacaggcaacaatatttgcctggtcgccacaagtattgtatcgctggcgggcttttttattacgtttattcggagcaaaaataggaaaaaacgtagttattcgtccgtcagtaaaaattacctatccgtggaaattaaccttaggtgattacgcgtgggttggcgatgacgtcaatttatataccctcggtgaaataaccattggcgcacattcggtgatatcgcaaaaaagttatttatgcaccggtagccacgaccatgcaagtcaacatttcaccattaacgccacgcctattgtgattggcgagaaatgctggctggcaaccgatgtctttgttgccccaggcgtcacaatcggcgacggcaccgtcgtgggtgcacgaagcagtgtttttaaatcgcttccggcaaatgtggtttgccgggggaaccccgcagtggtgatacgcgaacgcgttgaaactgaataa

SEQ ID NO: 473074 - DNA, 1122 bp, Shigella flexneri
atgtcaaaagtcgctctcatcaccggtgtaaccggacaagacggttcttacctggcagagtttctgctggaaaaaggttacgaggtgcatggtattaagcgtcgcgcatcgtcattcaacaccgagcgcgtggatcacatttatcaggatccgcacacctgcaacccgaaattccatctgcattatggcgacctgagtgatacctctaacctgacgcgcattttgcgtgaagtacagccggatgaagtgtacaacctaggcgcaatgagccacgttgcggtctcttttgagtcaccagaatataccgctgacgtcgacgcgatgggtacgctgcgcctgctggaggcgatccgcttcctcggtctggaaaagaaaactcgtttctatcaggcttccacctctgaactgtatggtctggtgcaggaaattccgcagaaagaaaccacgccgttctacccgcgatctccgtatgcggtcgccaaactgtacgcctactggatcaccgttaactaccgcgaatcctacggcatgtacgcttgtaacggaattctcttcaaccatgaatccccgcgccgcggcgaaaccttcgttacccgcaaaatcacccgcgcaatcgccaacatcgcccaggggctggagtcgtgcctgtacctcggcaatatggattccctgcgtgactggggccacgccaaagactacgtaaaaatgcagtggatgatgctgcaacaggaacagccggaagatttcgttatcgcgaccggcgttcagtactccgtacgtcagtttgtggaaatggcggcagcacagctgggcatcaaactgcgctttgaaggcacgggtgttgaagagaagggcattgtggtttccgtcaccgggcatgacgcgccgggcgttaaaccgggtgatgtgattatcgccgttgatccgcgttacttccgtccggcagaagttgaaacgctgctcggcgacccgaccaaagcgcacgaaaaactgggctggaaaccggaaatcaccctcagagagatggtgtctgaaatggtggctaatgacctcgaagcggcgaaaaaacactctctgctgaaatctcacggctacgacgtggcgatcgcgctggagtcataa

SEQ ID NO: 473075 - DNA, 969 bp, Shigella flexneri
atgagtaaacaacgcatttttatcgctggccattgtgggatggtcggttctgccatcaagcggcagctcgaacagcgcggtgatgtggagctggtattacgtacccgcgatgaactgaacctgctggacagccgcgccgtgcatgatttctttgccagcgaacgcattgaccaggtctatctggcggcggcgaaagtgggcggcattgttgccaacaacacctatccggcggatttcatctaccagaacatgatgattgagagcaacatcattcacgccgcgcatcagaacgacgtgaacaaactgatgtttctcggatcgtcctgcatctacccgaaactggcaaaacagccgatggcagaaagcgagttattgcagggcacgctggagccgaccaacgagccttacgccattgccaaaatcgccgggatcaaactgtgcgaatcttacaaccgccagtatggacgcgattaccgcactgtcatgccgaccaacctgtacgggccgcatgacaacttccacccgagtaactcccatgtgataccagcattgctgcgtcgcttccacgaggcgacggcacagaatgcgccggacgtggtggtatggggcagcggtacaccgatgcgtgaattcctgcacgtcgatgatatggcggcggcgagcattcatgtcatggagctggcgcatgaagtctggctggagaatacccaaccgatgctgtcgcacattaacgtcggcacgggcgttgactgcactatccgcgagctggcgcaaaccatcgccaaagtggtgggttacaaaggtcgggtggtttttgatgccagcaaaccggatggtacgccgcgcaaactgctggatgtgacgcgcctgcatcagcttggctggtatcacgaaatctcactggaagcggggcttgccagcacttaccagtggttccttgagaatcaagaccgctttcggggggaatga

SEQ ID NO: 473076 - DNA, 483 bp, Shigella flexneri
atgatgtttttacgtcaggaagactttgccactgtagtgcgctccacaccgcttgtctctctcgactttattgtcgagaacagtcgcggcgagtttctgcttggcaaaagaaccaaccgcccggcgcagggttactggtttgtgccgggagggcgcgtgcagaaagacgaaacgctggaagccgcatttgagcggctgacgatggcggaactggggctgcgtctgccgataacagcaggccagttttacggtgtctggcagcatttttatgacgataacttctccggcacggatttcaccactcactatgtggtgctcggttttcgcttcagagtagcggaagaagagctgttactgccggatgagcagcatgacgattaccgctggctgacgccggacgcgctgctcgccagtaacgatgttcacgctaacagccgagcctattttctcgctgagaagcgtgccggagtacccggattatga

SEQ ID NO: 473077 - DNA, 1224 bp, Shigella flexneri
atgaaaatactggtctacggcattaactactcgccggagttaaccggcatcggcaaatacaccggcgagatggtggaatggttggcggcacaaggtcatgaggtgcgggtcattaccgcaccgccttactacccgcaatggcaggtgggtgagaactattccgcctggcgctacaaacgagaagaaggggctgccacggtgtggcgctgcccgctgtacgtgccaaaacagccgagcaccctgaaacgcttgttgcatctcggcagttttgccgtcagcagtttctttccactgatggcgcaacgtcgctggaagccggatcgcattattggcgtagtgccaacgctgttttgcacgccgggaatgcgcctgctggcgaagctctctggtgcgcgtaccgtgctgcatattcaggattacgaagtggacgccatgctggggctgggccttgccggaaaaggcaaaggcggcaaagtggcacagctggtaacggcgttcgaacgtagcggactgcataacgtcgataacgtttccacgatttcgcgttcgatgatgaataaagccatcgaaaaaggcgtggcggcggataacgtcatcttcttccccaactggtcggaaattgcccgttttcagcatgttgcagacgccgatgttgatgcccttcgtaaccagcttggcctgccggataacaaaaaaatcattctttactccggcaatattggtgaaaagcaggggctggaaaacgttattgaagctgccgatctcctgcgcgatgaaccgctgatttttgccattgtcgggcagggcggcggcaaagcgcggctggaaaaaatggcgcagcagcgtggactgcgcaacatgcaatttttcccgctgcaatcgtatgacgctttacctgcactgctgaagatgggcgattgccatctggtggtgcaaaaacgcggcgcggcagatgccgtattgccgtcgaaactgaccaatattctggcggtaggcggtaacgcggtgattaccgcagaggcccacacagaactggggcagctttgcgaaacctttccgggtattgcggtttgcgtagaaccggaatcggtcgaggcgctggtggcggggattcgtcaggcgctcctgctgcccaaacataacacggtggcacgtgaatatgccgaacgcacgctcgataaagagaacgtgttacgtcaatttataaatgatattcggggataa

SEQ ID NO: 473078 - DNA, 1437 bp, Shigella flexneri
atggcgcagtcgaaactctatccagttgtgatggcaggtggctccggtagccgtttatggccgctttcccgcgtactttaccccaagcagtttttatgcctgaaaggcgatctcaccatgctgcaaaccaccatctgccgcctgaacggcgtggagtgcgaaagcccggtggtgatttgcaatgagcagcaccgctttattgtcgcggaacagctgcgtcaactgaacaaactcaccgagaacattattctcgaaccggcagggcgtaacactgcacctgccattgcactggcggcgctggcggcaaaacgtcatagcccggagagcgacccgttaatgctggtattggcggcggatcatgtgattgccgatgaagacgcgttccgtgccgccgtgcgtaatgccatgccttatgccgaagcgggcaagctggtgacctttggcattgtgccggatctaccagaaaccggttatggctatattcgtcgcggtgaagtgtctgtgggtgagcaggatacggtggcctttgaagtggcgcagtttgtcgaaaaaccgaatctggaaaccgcccaggcctatgtagcaagcggcgaatattactggaacagcggcatgttcctgttccgcgccggacgctatctcgaagaactgaaaaaatatcgcccggatatcctcgatgcctgcgaaaaagcgatgagcgccgtcgatccggatctcgattttattcgtgtggatgaagaagcgtttctcgcctgcccggaagagtcggtggattacgcggtcatggaacctacggcagatgctgttgtggtgccgatggatgcgggctggagcgatgttggttcctggtcttcattatgggagatcagcgcccacaccgccgagggcaacgtttgccacggcgatgtgattaatcacaaaactgaaaacagctatgtgtatgccgaatcaggcctggtcaccaccgtcggggtgaaagatctggtagtggtgcagaccaaagatgcggtgctgattgccgaccgtaacgcggtacaggatgtgaaaaaagtggtcgagcagatcaaagccgatggtcgccatgagcatcgggtgcatcgcgaagtgtatcgtccgtggggcaaatatgactctatcgacgcgggcgaccgctaccaggtgaaacgcatcaccgtgaaaccgggcgagggtttgtcggtacagatgcaccatcaccgcgcggaacactgggtagtggtcgcgggaacggcaaaagtcaccattgatggtgatatcaaactgcttggtgaaaacgagtccatttatattccgctgggggcgacgcactgcctggaaaacccggggaaaattccgctcgatttaattgaagtgcgctccggctcttatctcgaagaggatgatgtggtgcgcttcgcggatcgctacggacgggtgtaa

SEQ ID NO: 473079 - DNA, 1371 bp, Shigella flexneri
atgaaaaaattaacctgctttaaagcctatgatattcgcgggaaattaggcgaagaactgaatgaagatatcgcctggcgcattggtcgcgcctatggcgaatttctcaaaccgaaaaccattgtgttaggcggtgatgtccgtctcaccagcgaaaccttaaaactggcgctggcaaaaggtttacaggatgcgggcgtcgatgtgctggatatcggtatgtccggcaccgaagagatctatttcgccacgttccatctcggcgtggatggcggcattgaagttactgccagccataatccgatggattacaacggcatgaagctggtgcgcgagggggctcgcacgatcagcggtgataccggactgcgcgacgtccagcgtctggctgaagccaacgactttcctcccgtcgatgaaaccaaacgcggtcgctatcagcaaatcaacctgcgtgacgcttacgttgatcacctgttcggttatatcaatgtcaaaaatctcacgccgctcaagctggtgatcaactccgggaatggcgcagcgggtccggtggtggacgccattgaagcccgctttaaagccctcggcgcgcccgtggaattaatcaaagtacacaacacaccggacggcaatttccccaacggtattcctaacccgctgctgccggaatgtcgcgacgacacccgcaatgcggtcatcaaacacggcgcggatatgggcattgcctttgatggcgattttgaccgctgttttctgtttgacgaaaaagggcagtttatcgagggctactacattgtcggcctgctggcagaagcgttcctcgaaaaaaatcccggcgcgaagatcatccatgatccgcgtctctcttggaacactattgatgtggtgactgctgcaggcggcacgccggtaatgtcgaaaaccggacacgcctttattaaagaacggatgcgcaaggaagacgccatctacggtggcgaaatgagcgcccaccattacttccgtgatttcgcttactgcgacagcggcatgatcccgtggctgctggtcgccgaactggtgtgcctgaaaggaaaaacgctgggcgaactggtgcgcgaccggatggcggcgtttccggcaagcggtgagatcaacagcaaactggcgcaacccgttgaggcgattaaccgcgtggaacagcattttagccgtgaggcgctggcggtggatcgcagcgatggcatcagcatgacctttgccgactggtgctttaacctgcgcacctccaataccgaaccggtggtgcgcctgaatgtggaatcgcgcggtgatgtgccgctgatggaagcgcgaacgcgaactctgctgacgttgctgaacgagtaa

SEQ ID NO: 473080 - DNA, 1395 bp, Shigella flexneri
atgacaaatctaaaaaagcgcgagcgagcgaaaaccaatgcatcgttaatctctatggtgcaacgcttttcagatatcaccatcatgtttgccgggctatggctggtttgcgaagtcagcggactgtcattcctctacatgcacctgttggtggcgctgattacgctggtggtgttccagatgctgggcggcatcaccgatttttatcgctcatggcgcggtgttcgggcagcgacagaatttgccctgttgctacaaaactggaccttaagcgtgattttcagcgccggactggtggcgttcaacaatgatttcgacacgcaactgaaaatctggctggcgtggtatgggctgaccagcatcggactggtggtttgccgttcatgtattcgcattggggcgggctggctgcgtaatcatggctacaacaagcggatggtcgccgtagcgggggatttagccgccggacaaatgctgatggagagtttccgtaatcagccgtggttagggtttgaagtggtgggcgtttaccacgacccgaaaccgggcggcgtttctaacgactgggcgggtaacctgcaacagctggtcgaggatgcaaaagcgggcaagattcataacgtctatatcgcgatgcaaatgtgcgacggcgcacgagtgaaaaaactggtccatcaactggcggataccacctgttcggtgctgctgatccccgacgtctttaccttcaacattctccattcacgtctcgaagagatgaacggcgttccggtggtgccgctgtatgacacgccgctttcgggggttaaccgcctgctaaaacgtgcggaagacattgtgctggcgacgcttattctgctgctgatctccccggtgctgtgctgtattgcgctggcggtgaaactcagttcaccagggccggttattttccgccagactcgctatggtatggatggcaagccgatcaaagtgtggaagttccgttccatgaaagtgatggagaacgacaaagtggtgacccaggcgacgcagaacgatccgcgcgtcactaaagtggggaactttctgcgccgcacctcgctggacgaattgccgcagtttatcaatgtgctgaccggggggatgtcgattgtcggtccacgtccgcacgcagtagcgcataacgaacagtatcgccagctcattgaaggctacatgctgcgccataaagtgaaaccgggcattaccggctgggcgcagattaatggctggcgcggcgaaaccgacacgctggagaaaatggaaaaacgcgtcgagttcgaccttgagtacatccgcgaatggagcgtctggttcgatatcaaaatcgttttcctgacggtattcaagggcttcgttaacaaagcggcatattga

SEQ ID NO: 473081 - DNA, 1479 bp, Shigella flexneri
atgagcttacgtgaaaaaaccatcagcggcgcgaagtggtcggctattgccacggtgatcatcatcggcctcgggctggtgcagatgaccgtgctggcgcggattatcgacaaccaccagttcggcctgctgactgtgtcgctggtgattatcgcgctggcagatacgctttctgacttcggtatcgctaactcgattattcagcgaaaagaaatcagtcaccttgaactcaccacgctgtactggctgaacgtcgggctggggcttgtggtatgtgtggcggtgtttttgttgagtgatgtcatcggcgacgtgctgaataacccggacctggcaccgttgattaaaacattgtcgctggcgtttgtggtgatcccccacgggcaacagttccgcgcgttgatgcagaaggagctggagttcaacaaaatcggcatgatcgaaaccagcgcggtgctggcgggcttcacttttacggtagttagcgcccatttctggccgctggcgatgaccgcgatcctcggttatctggtcaatagtgcggtgagaacactgctgtttggctactttggacgcaaaatttattgccccggtctgcacttctcgctggcgtctgtggcaccgaacttacgttttggtgcctggctgacggcggacagcatcatcaactatctcaacaccaacctttcaacgctggtgctggcgcgtattcttggcgcgggcgtggcagggggatacaacctggcgtacaacgtggccgtcgtaccgccgatgaagctgaacccaatcatcacccgcgtgttgtttccggcgtttgccaaaattcaggacgacaccgaaaagctgcgtgttaacttctacaagctgctgtcgatagtggggattatcaactttccggcgctgctggggctgatggtggtgtcgaataacttcgtaccgctggtattcggcgaaaagtggaacagcattattccggtgctgcaattgctgtgtattgtgggtctgctgcgctccgtgggtaacccgattggttcgctgctgatggcgaaagcgcgggtcgatatcagctttaaattcaacgtattcaaaacatttctgtttattccggcgattgttattggtgggcagatggcgggcgcaatcggcgtcacgctcggtttcctgctggtgcagattatcaacaccattctgagttacttcgtgatgattaaaccggttcttggttccagttatcgccagtacatcctgagtttgtggctgccgttttatctctcgttgccgacgctggtggtcagttatgcgctgggcattgtgctgaaagggcaactggcgctggggatgctgctggcggtgcaaatagccgcgggcgtgctggcgtttgtggtgatgattgtgctgtcacgccatccgctggtggtggaagtgaagcgtcagttttgtcgcagcgaaaaaatgaaaatgcttttacgggcggggtga

SEQ ID NO: 473082 - DNA, 1281 bp, Shigella flexneri
atgaaattacttattctgggcaaccacacttgcggcaatcgtggcgacagcgccatcttgcgcggcttacttgatgccatcaacatcctcaatccacataccgaagtggacgtgatgagccgctatccggtcagttcttcctggctgctcaaccgcccggtaatgggcgatccgctgttcctgcagatgacacaacacaatagcgcggcgggcgttgtcgggcgcattaaaaaagtcctccgtcgccgctaccagcatcaggtattgctctcacgcgtcaccgacactggcaagctgcgcaatatcgccatcgcccagggattcaccgacttcgtgcgcctgctgtcaggttacgacgccattattcaggtcggcggatcgttttttgtcgatctctacggcgtgccgcagtttgaacatgcgctttgcacatttatggcgaaaaagccgctgtttatgattggtcacagcgtcggccccttccaggatgagcaatttaaccaactggcgaactatgtctttggtcactgcgacgcgctgatcctgcgcgaatcggtcagccttgatttgatgaaacgcagaaatatcaccaccgcaaaagtggaacatggcgtcgataccgcgtggctggtcgatcaccacaccgaagacttcaccgccagctatgccgttcaacactggctggacgttgccgcacaacagaaaacagtggcaattaccctgcgcgaactggcaccgttcgacaaacgtctcggcaccactcaacaagcgtatgaaaaagcctttgccggggtggtcaatcgcattctcgatgaaggctatcaggtgattgcgctctccacctgtacgggtatcgacagctataacaaagacgaccgcatggtggcgctcaatctgcgccagcacatcagcgatcctgcccgttaccacgtagtgatggatgaactcaacgatctggaaatgggcaaaattctcggagcctgtgaactcaccgtcggtacgcgcctgcactccgccattatctcaatgaactttgctactccggcgattgccatcaactatgaacataaatccgccgggattatgcagcagctgggactgccagagatggcgattgatattcgtcatttactggacggcagcctgcaagcgatggttgcggataccttaggccagcttccggtgctgaacgctcgatttaacgaagccgtcagtcgcgaacgtcagacgggaatgcagatggtgcagtctgtgcttgagcgcatcggggaggtgaaatga

SEQ ID NO: 473083 - DNA, 1221 bp, Shigella flexneri
atgaaggtcggcttcttcttattgaaattcccgctgtcgtcggaaaccttcgtcctcaatcaaattaccgcgtttattgatatgggctttgaagtggagattgtcgctttgcaaaaaggcgatacagagaacacccacgcggcatggacgaaatacaaccttgtcgccagaacccgctggttacaggacgaacctgcgggcaaagtagcgaaactgcgccaccgcgccagccagaccttacgtggcattcatcgtaaaaatacctggcatgcgctcaacctcaaacgctatggtgccgagtcgcggaacctgattttgtctgccatttgtggtcaggtcgcaacaccgtttcgcgccgatgtgttcatcgctcattttggcccggcgggggtaaccgcagcaaaactacgcgaactgggtatcattcgcggcaaaattgccaccatcttccacggtattgatatctccagtcgggaagtgctcaaccactacactcccgaatatcaacaactgtttcgccgtggcgacctgatgttaccgataagcgatctgtgggccggaaggctgcaaaaaatgggctgccccagagaaaaaatcgccgtatcgcgtatgggcgtggacatgacgcgctttagcccgcgtccggtgaaagcgcccgcaacgccgctggaaatcatatctgtcgcacgcttaaccgagaaaaaaggcctgcatgtggcgattgaagcctgccgtcagttgaaagagcagggcgtggcatttcgctatcgcatcctcggcattggcctgtgggaacgacgcctgcgcaccctcatcgaacaatatcaactggaagatgtggtagagatgccgggctttaaaccgagccatgaagtgaaggagatgctcgacgacgcggatgtcttcctgttgccatcggtaacgggcgcggatggcgatatggaaggcattccggtggcgctaatggaagcgatggcggtcggtattccggtggtttctactctgcatagcggaattcctgaactggtggaggccgataaatccggctggctgctgcctgagaacgatgctcgcgcactggcacaacgtctggcggcgtttagccaactggataccgacgaactggctccggtcgtcaaacgtgcgcgcgaaaaagtcgaacacgattttaaccagcaggtgattaatcgagaactcgccagcttgctgcaggctttatag

SEQ ID NO: 473084 - DNA, 1395 bp, Shigella flexneri
atgccatttaaaacactctcccgacgcaccttcctgacggcaagctcggcgcttgccttcctccatacccctttcgctcgcgcacttcccgcccgacaaagcgttaacattaacgactacaacccacatgactggatcgcctcatttaaacaagccttcagcgaagggcaaacggtcgtcgtgcctgccggattcgtttgtgacaatatcaacaccggcatcttcatccctcccggcaaaacgttacacatccttggaagcctgcgcggcaacggcagagggcgatttgtcttacaggacggcagccaggtgacagggggagagggcggcggtatgcataacattaccctggatgtgcgtggttctgactgcaccatcaaagggctggcgatgagcggctttggcccggtaatgcagatttatattggcggcaaaaacaaacgggtcatgcgcaacctgaccatcgataacctcactgtcagccacgctaattacgccatcttacgccagggatttcataaccagattatcggtgccaacattaccaactgtaagttcagcgacttacagggcgacgccattgaatggaacgtggcaattaacgacagtgatattttgatatctgaccatgtcatcgagcgtatcaactgtaccaacggcaaaatcaactggggcatcggcataggccttgcgggaagcacttatgataacaactacccggaagaccaggcagtgaaaaactttgtcgtggcgaatatcacgggatcggattgtcggcagttgatccatgttgaaaatggtaaacattttgttattcgtaatatcaatgcccgcaatatcacgccggatttcagtaagaaagcgggcattgataacgcgacagtcgctatttacggttgtgacaatttcgtgattgataatattgaaatgattaatagcgccgggatgttaatcggctatggggtaattaaaggcaaatatctctcgataccgcaaaatttccgagtgaataatattcaactggataatacccatcttgcttataaattgcgcggcatccaaatctccgccgggaatgccgtctcctttgtgtcgctaactaacattgagatgaagcgtgcctcgctggagttacacaacaagccgcaacatctttttatgcgaaatatcaatgtgatgcaggaatcctcagttggaccagcattgagcatgaacttcgacatgcgcaaagacgttcgcggcgtctttatggcgaaaaaagaaacactgctgtctcttgcaaatgttcatgcggtgaatgaaagagggcaaagctccgtcgatatcgacaggattaatcaccatattgttaatgtggaaaagattaactttagattgccggaacggagggagtag

SEQ ID NO: 473085 - DNA, 894 bp, Shigella flexneri
atgacgaatttaaaagcagttattcctgtagcgggtctcgggatgcatatgttgcctgccactaaggcgatacccaaagagatgctaccaatcgtcgacaagccaatgattcagtacattgttgacgagattgtggctgcagggatcaaagaaatcctcctggtaactcacgcgtccaagaacgcggtcgaaaaccacttcgacacctcttatgagttagaatcactccttgagcagcgcgtgaagcgtcaactgctggcggaagtacagtccatctgtccgccgggcgtgatcattatgaacgtgcgtcagggcgaacctttaggtttaggccactccattttgtgtgcgcgacctgccattggtgacaacccatttgtcgtggtactgccagacgttgtgatcgacgatgccagcgccgacccgctacgttacaaccttgctgccatgattgcacgtttcaacgaaacgggccgcagccaggtgctggcaaaacgtatgccgggtgacctctctgaatactccgtcatccagactaaagagccgctggaccgtgagggtaaagtcagccgcattgttgaatttatcgaaaaaccggatcagccgcagacgctggactcagacatcatggccgtaggtcgctatgtgctttctgccgatatttggccggaactggaacgtactcagcctggtgcatggggacgtattcagctgactgatgctattgccgagctggcgaaaaaacaatccgttgatgcaatgctgatgaccggcgacagttacgactgcggcaaaaaaatgggctatatgcaggcgtttgtgaagtatggcctacgcaacctgaaagaaggggcgaagttccgtaaaggtattgagaagctgttaagcgaataa

SEQ ID NO: 473086 - DNA, 1086 bp, Shigella flexneri
gtgaagatacttgttactggtggcgcagggtttattggttctgctgttgttcgtcacataataaataatacgcaagatagtgttgttaatgtcgataaattaacatacgccgggaacctggaatcactcgctgatgtttctgattctgaacgttatgcttttgagcatgcagatatctgcgatgctgtagccatgtcgcgtattttcgcacagcaccagccagacgcggtgatgcacctggcggcagagagccacgttgaccgttcaataacgggccctgcggcatttattgaaaccaatattgtggggacttatgttcttttagaagcggcgcgcaattactggtctgctctgaatgatgaaaagaaaaaaagtttccgctttcatcatatttctactgatgaagtttatggtgacttaccccatccggatgaagcaaataataacgaagcgttaccgctatttacggaaacgacagcttacgcgccaagtagcccgtattctgcgtctaaagcttccagcgatcatttggtacgtgcctggaagcggacttatggtttaccaaccattgtgactaattgctcgaacaattatggtccttatcacttcccggaaaaacttattccattggttattctgaatgctctggaaggtaaggcattacctatttatggtaaagggaatcaaattcgcgactggttgtatgtagaggatcatgctcgtgcgttatataccgtcgtaaccgaaggtaaagcgggtgaaacttataacattggtggacataacgaaaagaaaaacatcgacgtagtgctcactatttgtgatttgttggatgagattgtaccgaaagagaaatcttatcgtgagcaaattacttatgttgccgatcgcccggggcatgaccgccgttacgccattgatgccgataaaattagccgcgaattgggctggaaaccgcaagaaacgtttgagagcgggattcgtaaaacggtggaatggtatctggctaatacaaattgggttgagaatgtgaaaagcggtgcttatcagtcgtggattgaacaaaactatgagggccgtcagtaa

SEQ ID NO: 473087 - DNA, 900 bp, Shigella flexneri
atgaatatcctgcttttcggcaaaacagggcaggtgggttgggaactgcagcgtgctctggctcctctgggtaacttgattgcgctcgatgttcactccactgattattgtggagatttcagcaaccccgaaggtgtggctgaaaccgtcaaaaaaattcgccccgatgttattgttaatgctgctgctcacactgcagtagacaaagcggaatcagaaccgaatttcgcgcaattacttaacgcgacatgcgtcgaagcgattgcaaaagcagctaatgaagtcggagcctgggttatacactactccactgattatgttttcccaggcaacggtgacacgccatggctggaaacggatgcaacagcaccgctaaatgtctacggtgaaaccaagctagctggggaaaaagcgttacaagaacattgcgcaaagcatcttattttccgtaccagctgggtatacgctggtaaaggaaataactttgccaaaacgatgttgcgcctggcaaaagaacgcgaagagttggctgtaataaacgatcaattcggcgcaccaacgggggctgaattactggctgattgcaccgctcatgccattcgcgtggccgcaaataaaccagaagttgctggtttgtaccatctggttgctggtggtacaacaacctggcacgattatgccgctctggtatttgaagaagcgcgcagagcggggatcaaccttgctcttaacaaacttaatgccgtgccgacaacggcctatcccacaccagcacgtcgtccccataattctcgcctcaataccgaaaaatttcagcagaactttgcgcttgtcttgcctgactggcaggtgggcgtgaaacgtatgctcaacgaattatttacgaccacggcaatttaa

SEQ ID NO: 473088 - DNA, 879 bp, Shigella flexneri
atgaaaacgcgtaaaggtattattctggctggtggttccggcactcgtctttatcctgtgacaatggctgtgagcaaacaactgctaccgatttatgataaaccgatgatttattatccgctttcaacgcttatgttggcgggtattcgagatattctgattatcagtacgccgcaggatacaccacgttttcaacaattgcttggtgatggaagccagtgggggcttaatctgcaatataaagtacaaccgagtccggatggtctggcgcaagcatttatcattggtgaagaatttataggtggtgatgattgtgcgctggtacttggtgataatatcttctatggtcacgacctgccgaaattaatggataccgctgttaacagagagagtggcgcaacggtttttgcctatcacgtaaatgatcctgagcgctacggtgtggtggaatttgatgataacggtacggcaattagtctggaagaaaaaccgctggaaccaaaaagtaactatgcggttactgggctttatttctatgacaatgacgttgtagaaatggcgaaaaaccttaaaccatctgcacgtggcgaactggaaattaccgatattaaccgtatttatatggaccaaggacgtttgtctgtcgctatgatggggcgtggttatgcatggctggacacggggacacatcaaagtcttattgaagcaagcaacttcattgcaacaattgaagagcgtcaggggctgaaagtttcctgcccggaagaaattgcttaccgtaaaggctttattgatgctgagcaagtgaaggtattagccgagccgctgaagaaaaatgcttatggtcagtatctgctgaaaatgattaaaggttattaa

SEQ ID NO: 473089 - DNA, 546 bp, Shigella flexneri
atgaacgtaattaaaactgaaattcctgatgtgctaatttttgaaccaaaagtatttggtgatgagcggggcttttttatggaaagcttcaatcagaaagttttcgaagaggctgtaggacgaaaggttgagtttgttcaggataaccattctaaatcaactaagggtgtgttacgcggactgcactatcagctggaaccttatgctcaaggaaaactggtacgctgtgttgtcggtgaagtttttgacgtagctgttgatattcggaaatcatcaccaacatttggcaagtgggttggtgtaaatttgtcggcggagaataagcgtcaattatggataccggaaggattcgctcatgggttttgcgttcttagtgatgaagcagaatttgtctacaaaacaaataatttctattcaaaaatgcaagagcgtgggattttatggagcgacaaaagtataaatatagaatggccggttcaaaatccattgctttctgataaagatattaatggtcaaaaatttgtagatgctgattattttatatga

SEQ ID NO: 473090 - DNA, 1830 bp, Shigella flexneri
atgtgtggaattgttggcgcgatcgcgcaacgtgatgtagcagaaatccttcttgaaggtttacgtcgtctggaataccgcggatatgactctgccggtctggccgttgttgatgcggaaggtcatatgactcgcctgcgtcgcctcggtaaagtccagatgctggctcaggcagcggaagaacatcctctgcatggcggcaccggtattgctcacactcgctgggcgacccacggtgaaccttcagaagctaacgcgcatccgcatgtttctgaacacattgtggtggtgcataatggcatcatcgaaaaccatgaaccgctgcgtgaagagttaaaagcgcgtggctataccttcgtttctgaaaccgacaccgaagtgattgcccatctggtgaactgggagctgaaacaaggcgggactctgcgtgaggctgttctgcgtgctatcccgcagctgcgcggtgcgtacggtacagtgatcatggactcccgtcacccggataccctgctggcggcacgttctggtagtccgctggtgattggcctgggtatgggcgaaaactttatcgcttctgaccagctggcgctgttgccggtgacccgtcgctttatcttccttgaagagggcgatattgcggaaatcactcgccgttcggtaaacatcttcgataaaactggcgcggaagtaaaacgtcaggatatcgaatccaatctgcaatatgacgcgggcgataaaggtatttaccgtcactacatgcagaaagagatctacgaacagccgaacgcgataaaaaacacccttaccgggcgtatcagccacggtcaggttgatttaagcgagctgggaccgaacgccgacgaactgctgtcgaaggttgagcatattcagatcctcgcctgtggtacttcttataactccggtatggtttcccgctactggtttgaatcgctggcaggtattccgtgcgacgtcgaaatcgcctctgaattccgctatcgtaaatctgccgtgcgtcgtaacagcctgatgatcaccttgtcacagtctggcgaaaccgcggataccctggcgggcctgcgtctgtcgaaagagctgggttaccttggttcgctggcaatctgtaacgttccgggttcttctctggtgcgcgaatccgatctggcgctgatgaccaacgcgggtacggaaatcggcgtggcgtccactaaagcattcaccactcagttaactgtgctgttgatgctggtggcgaagctgtctcgcctgaaaggtctggatgcctccattgaacatgacattgtgcatggtctgcaggcgctgccgagccgtattgagcagatgctgtctcaggataaacgcattgaagctctggcagaagatttctctgacaaacatcacgcgctgttcctgggccgtggcgatcagtacccaatcgcgctggaaggcgcattgaagctgaaagagatctcttacattcacgctgaagcctacgctgcaggcgagctgaaacacggcccgctggcgctgattgacgcggatatgccggttatcgtcgttgcaccgaacaacgaactgttggaaaaactgaaatccaacattgaagaagttcgcgcgcgtggcggtcaattgtatgtcttcgccgatcaggatgcgggttttgtaagtagcgataacatgcacatcatcgagatgccgcatgtggaagaggtgattgcaccgatcttctacaccgttccgctgcagctgctggcttaccatgtcgcgctgatcaaaggcaccgacgttgaccagccgcgtaacctggcaaaatcggttacggttgagtaa

SEQ ID NO: 473091 - DNA, 1371 bp, Shigella flexneri
atgttgaataatgctatgagcgtagtgatccttgccgcaggcaaaggcacgcgcatgtattccgatcttccgaaagtgctgcatacccttgccgggaaagcgatggttcagcatgtcattgatgctgcgaatgaattaggcgcagcgcacgttcacctggtgtacggtcacggcggcgatctgcttaaacaggcgctgaaagacgacaaccttaactgggtgcttcaggcagagcagctgggtacgggtcatgcaatgcagcaggccgcacctttctttgccgatgatgaagacattttaatgctctacggcgacgtgccgctgatctctgtcgaaacactccagcgcctgcgtgatgctaaaccccagggtggcattggtctgctgacggtgaaactggatgatccgaccggttatggacgtatcacccgtgaaaatggcaaagttaccggcattgttgagcacaaagatgccaccgacgagcagcgtcagattcaggagatcaacaccggcattctgattgccaacggcgcagatatgaaacgctggctggcgaagctgaccaacaataatgctcagggcgaatactacatcaccgacattattgcgctggcgtatcaggaagggcgtgaaatcgtcgccgttcatccgcaacgtttaagcgaagtagaaggtgtgaataaccgcctgcaactctcccgtctggagcgcgtttaccagtccgaacaggctgaaaaactgctgttagcaggcgttatgctgcgcgatccggcgcgttttgatctgcgcggtacgcttactcacgggcgcgatgttgaaattgatactaacgttatcatcgagggcaacgtgactctcggtcatcgcgtgaaaatcggcaccggttgcgtgattaaaaacagcgtgattggcgatgattgcgaaatcagtccgtataccgttgtggaagacgcgaatctggcagcggcctgtactattggcccgtttgcccgtctgcgtcctggtgctgagttgctggaaggtgcacacgttggtaacttcgttgagatgaaaaaagcgcgtctgggtaaaggcacgaaagccgggcatctgacttacctgggcgatgcggaaattggcgataacgttaacatcggcgcgggaaccattacctgcaactacgatggtgcgaataaatttaagaccattatcggcgacgatgtgtttgtcggttccgacactcagctggtggccccggtaacagtaggcaaaggcgcgaccattgctgcgggtacaactgtgacgcgtaatgtcggcgaaaatgcattagctatcagccgtgtgccgcagactcagaaagaaggctggcgtcgtccggtaaagaaaaagtaa

SEQ ID NO: 473092 - DNA, 420 bp, Shigella flexneri; identical to SEQ ID NO: 1843

SEQ ID NO: 473093 - DNA, 1383 bp, Shigella flexneri; identical to SEQ ID NO: 459195

SEQ ID NO: 473094 - DNA, 864 bp, Shigella flexneri
atggccggcgcaaaagagatacgtagtaagatcgcaagcgtccagaacacgcaaaagatcactaaagcgatggagatggtcgccgcttccaaaatgcgtaaatcgcaggatcgcatggcggccagccgtccttatgcagaaaccatgcgcaaagtgattggtcaccttgcacacggtaatctggaatataagcacccttacctggaagaccgcgacgttaaacgcgtgggctacctggtggtgtcgaccgaccgtggtttgtgcggtggtttgaacattaacctgttcaaaaaactgctggcggaaatgaagacctggaccgacaaaggcgttcaatgcgacctcgcaatgatcggctcgaaaggcgtgtcgttcttcaactccgtgggcggcaatgttgttgcccaggtcaccggcatgggggataacccttccctgtccgaactgatcggtccggtaaaagtgatgttgcaggcctacgacgaaggccgtctggacaagctttacattgtcagcaacaaatttattaacaccatgtctcaggttccgaccatcagccagctgctgccgttaccggcatcagatgatgatgatctgaaacataaatcctgggattacctgtacgaacccgatccgaaggcgttgctggataccctgctgcgtcgttatgtcgaatctcaggtttatcagggcgtggttgaaaacctggccagcgagcaggccgcccgtatggtggcgatgaaagccgcgaccgacaatggcggcagcctgattaaagagctgcagttggtatacaacaaagctcgtcaggccagcattactcaggaactcaccgagatcgtctcgggggccgccgcggtttaa

SEQ ID NO: 473095 - DNA, 1542 bp, Shigella flexneri
atgcaactgaattccaccgaaatcagcgaactgatcaagcagcgcattgctcagttcaatgttgtgagtgaagctcacaacgaaggtactattgtttctgtaagtgacggtgttatccgcattcacggcctggccgattgtatgcagggtgaaatgatctccctgccgggtaaccgttacgctatcgcactgaacctcgagcgcgactctgtaggtgcggttgttatgggtccgtacgctgaccttgccgaaggcatgaaagttaagtgtactggccgtatcctggaagttccggttggccgtggcctgctgggccgtgtggttaacactctgggtgcaccaatcgacggtaaaggtccgctggatcacgacggcttctctgctgtagaagcaatcgctccgggcgttatcgaacgtcagtccgtagatcagccggtacagaccggttataaagccgttgactccatgatcccaatcggtcgtggtcagcgtgaattgatcatcggtgaccgtcagacaggtaaaaccgcactggctatcgatgccatcatcaaccagcgcgattccggtatcaaatgtatctatgtcgctatcggccagaaagcgtccaccatttctaacgtggtacgtaaactggaagagcacggcgcactggctaacaccatcgttgtggtagcaaccgcgtctgaatccgctgcactgcaatacctggcaccgtatgccggttgcgcaatgggcgaatacttccgtgaccgcggtgaagatgcgctgatcatttacgatgacctgtctaaacaggctgttgcttaccgtcagatctccctgctgctccgtcgtccgccaggacgtgaagcattcccgggcgacgttttctacctccactctcgtctgctggagcgtgctgcacgtgttaacgccgaatacgttgaagccttcaccaaaggtgaagtgaaagggaaaaccggttctctgaccgcactgccgattatcgaaactcaggcgggtgacgtttctgcgttcgttccgaccaacgtaatctccattaccgatggtcagatcttcctggaaaccaacctgttcaacgccggtattcgtcctgcggttaacccgggtatttccgtatcccgtgttggtggtgcagcacagaccaagatcatgaaaaaactgtccggtggtatccgtaccgctctggcacagtatcgtgaactggcagcgttctctcagtttgcatccgaccttgacgatgcaacacgtaagcagcttgaccacggtcagaaagtgaccgaactgctgaaacagaaacagtatgcgccgatgtccgttgcgcagcagtctctggttctgttcgcagcagaacgtggttacctggcggatgttgaactgtcgaaaattggcagcttcgaagccgctctgctggcttacgtcgaccgtgatcacgctccgttgatgcaagagatcaaccagaccggtggctacaacgacgaaatcgaaggcaagctgaaaggcatcctcgattccttcaaagcaacccaatcctggtaa

SEQ ID NO: 473096 - DNA, 534 bp, Shigella flexneri
atgtctgaatttattacggtagctcgcccctacgccaaagcagcttttgactttgccgtcgaacaccaaagtgtagaacgctggcaggacatgctgacgtttgccgccgaggtaaccaaaaacgaacaaatggcagagcttctctctggcgcgcttgcgccagaaacgctcgccgagtcgtttatcgcagtttgtggtgagcaactggacgaaaacggtcagaacctgattcgggtaatggctgaaaatggtcgtcttaacgcgctcccggatgttctggagcagtttattcaccttcgtgccgtgagtgaggctaccgctgaggtagacgtcatttccgctgccgcactgagtgaacaacagctcgcgaaaatttctgctgcgatggaaaaacgtctgtcacgcaaagttaagctgaattgcaaaatcgataagtctgtaatggcaggcgttatcatccgagcgggtgatatggtcattgatggcagcgtacgcggtcgtcttgagcgccttgcagacgtcttgcagtcttaa

SEQ ID NO: 473097 - DNA, 471 bp, Shigella flexneri; identical to SEQ ID NO: 459191

SEQ ID NO: 473098 - DNA, 240 bp, Shigella flexneri; identical to SEQ ID NO: 1849

SEQ ID NO: 473099 - DNA, 816 bp, Shigella flexneri
atggcttcagaaaatatgacgccgcaggattacataggacaccacctgaataaccttcagctggacctgcgtacattctcgctggtggatccacaaaaccccccagccaccttctggacaatcaatattgactccatgttcttctcggtggtgctgggtctgttgttcctggttttattccgtagcgtagccaaaaaggcgaccagcggtgtgccaggtaagtttcagaccgcgattgagctggtgatcggctttgttaatggtagcgtgaaagacatgtaccatggcaaaagcaagctgattgctccgctggccctgacgatcttcgtctgggtattcctgatgaatctgatggatttactgcctatcgacttgctgccgtacattgctgaacatgtactgggtctgcctgcactgcgtgtggttccgtctgcggacgtgaacgtaacgctgtctatggcactgggcgtatttatcctgattctgttctacaacatcaaaatgaaaggcatcggcggcttcacgaaagagttgacgctgcagccgttcaatcactgggcgttcattcctgtcaacttaatccttgaaggggtaagcctgctgtccaaaccagtttcactcggtttgcgactgttcggtaacatgtatgccggtgagctgattttcattctgattgctggtctgttgccgtggtggtcacagtggatcctgaatgtgccgtgggccattttccacatcctgatcattacgctgcaagccttcatcttcatggttctgacgatcgtctatctgtcgatggcgtctgaagaacattaa

SEQ ID NO: 473100 - DNA, 381 bp, Shigella flexneri
atgtctgtgtcgctcgtgagtcgaaacgttgctcggaagcttctgctcgttcagttactggtggtgatagcaagtggattgctgttcagcctcaaagaccccttctggggcgtctctgcaataagcgggggcctggcagtctttctgcctaacgttttgtttatgatatttgcctggcgtcaccaggcgcatacaccagcgaaaggccgggtggcttggacattcgcatttggcgaagctttcaaagttctggcgatgttggtgttactggtggtggcgttggcggttttaaaggcggtattcttgccgctgatcgttacgtgggttttggtgctggtggttcagatactggcaccggctgtaattaacaacaaagggtaa

SEQ ID NO: 473101 - DNA, 624 bp, Shigella flexneri
gtgctcaacaaactctccttactgctgaaagacgcaggtatttcgcttactgatcaccagaaaaaccagcttattgcctacgtgaatatgctgcataaatggaacaaagcgtacaacctgacttcggtccgcgatcctaatgagatgctggtacgccatattctcgatagcattgtggtggcaccgtatctgcaaggtgaacggtttatcgatgtcggcaccggaccaggactgccaggcattccactctctatcgtgcgtcctgaagcccatttcactctgttggatagccttggtaaacgcgtgcgtttccttcgtcaggtgcaacatgagcttaaactggagaatattgaaccagtacagagcagggtagaagagtttccttcagagccgccatttgatggcgtaattagccgcgcttttgcctctctgaacgatatggtgagctggtgccaccatcttcctggtgagcaaggccgtttctacgcgctgaaagggcaaatgccggaagatgaaatcgctttgttgcccgaagaatatcaggtcgaatcagtggttaaacttcaggttccagccctggatggcgaacgtcatctggtggtgattaaagcaaataaaatttaa

SEQ ID NO: 473102 - DNA, 1890 bp, Shigella flexneri
atgttttatccggatccttttgacgtcatcatcattggcgggggtcatgcaggcaccgaggccgcgatggctgcggcgcgtatgggtcaacagactctgcttttgacacacaatatcgacactctggggcagatgagctgcaacccggcgatcggcggtattgggaagggacatctggtaaaagaagtggatgcactcggcggtctgatggcgaaagcgatcgatcaagcgggtatccagtttaggatactaaacgcaagcaaaggaccggcggttcgcgctacccgagctcaggcggatcgtgtgcgctaccgtcaggcggtacgtacggcgctggagaaccaaccgaacctgatgatcttccagcaggcggttgaagatcttattgtcgaaaacgatcgcgtggtcggtgctgttacccaaatgggactgaagttccgtgccaaagctgtggtgctcaccgttgggacgttcctcgacggcaaaattcatatcggtctggataattacagcggtggccgtgctggcgatccgccatccattccgctctctcgccgtttgcgtgaactgccgctgcgcgttggtcgtctgaaaaccggtactccgccgcgtattgatgctcgaaccatcgactttagcgtgctggcgcaacagcatggcgataacccaatgccggtattctcgtttatgggcaatgcgtccctgcatccccagcaggtgccgtgttatatcactcataccaacgagaaaacccatgatgtgatccgcagtaacctcgatcgtagcccaatgtatgcaggggtgatcgaaggtgtcggcccacgctactgcccgtcgatcgaagacaaagtcatgcgcttcgcagacagaaatcagcatcagatcttccttgaaccggaaggactgacctctaatgaaatttatccgaacggtatctccaccagcctgccgttcgatgtgcagatgcaaatcgtccgctctatgcaggggatggaaaacgcgaagatcgtgcgtccgggttatgccattgagtatgacttcttcgatcctcgcgacctgaaaccgacgctggagagcaagtttatccaggggctgttctttgctggtcagattaacggcactaccggttacgaagaagccgctgcgcaaggtttgctggccggtcttaacgctgcccgtctgtctgctgacaaagaaggttgggctccggcacgttctcaggcgtatctcggcgtactggttgatgacctgtgcactttaggaaccaaagaaccgtatcgtatgtttacttcgcgcgcagaatatcgtctgatgctgcgcgaagataatgcggatctgcgtttgactgaaatcggtcgtgaactgggcctggtggatgacgaacgttgggcgcgctttaacgagaaacttgagaatatcgagcgtgagcgtcagcgtctgaaatcgacctgggtaaccccgtcggcggaagctgcagccgaagtgaatgctcacctgactgcgccgctttcccgtgaagccagtggtgaagatctgctgcgtcgtccggaaatgacttatgaaaaattaaccacgctgacgccgtttgcccctgcgttgacagacgaacaggcggcggaacaggttgagattcaggttaaatacgaaggttatatcgcgcgccagcaagatgagatcgaaaagcagctgcgtaacgagaacaccctgctacccgcgacactggattaccgccagatatccggtctttctaacgaagtgatcgccaaacttaacgatcacaaaccggcctctatcggccaggcttcgcgtatttctggcgtcacgcctgcggccatctccattctgctggtgtggctgaaaaaacagggtatgctgcgtcgtagcgcataa

SEQ ID NO: 473103 - DNA, 444 bp, Shigella flexneri
atggcagatatcactcttatcagcggcagcaccctcggcggtgccgaatatgtagcagaacacctggctgaaaagctggaagaggtgggttttaccaccgaaacgctgcacggtccgctgttggaagatttatctgcctcggggatctggctggttatcagctccacccacggtgccggagatattccggacaacctttctcctttctatgaagcattgcaggaacagaagcccgatctttctgcggtccgctttggcgcaatcggtattggcagtcgtgaatatgacaccttttgtggggctatcgataaactcgaggcagaactcaaaaattccggtgcaaaacagacaggcgaaacactgaagatcaacattcttgatcacgacattccggaagatccggcagaagaatggctgggatcgtggattaatttactcaaataa

SEQ ID NO: 473104 - DNA, 459 bp, Shigella flexneri
atggaaaattatctgatcgacaatctggaccgtggcatcctggaagcattaatgggcaatgcgcgcaccgcttacgccgaactggcgaaacaatttggcgtcagtccggggacgattcacgttcgagtagagaaaatgaagcaggcggggatcattaccggggcgcgtattgatgtcagcccgaagcagctcggttatgacgtaggctgctttatcggcattatattaaagagcgccaaagactacccttccgcgctggcaaagctggaaagccttgatgaagtcactgaagcctattacacaaccggccactacagcatctttataaaagttatgtgccgttcgatcgacgctctccagcatgtacttatcaacaagatccaaacaattgatgaaattcagtccaccgagacattgatcgtcctgcaaaacccgatcatgcgtaccatcaagccctga

SEQ ID NO: 473105 - DNA, 993 bp, Shigella flexneri
atgaaaaccgcttacattgccaaacaacgccaaattagcttcgtgaaatctcacttttctcgccaactggaagaacgtctggggctgatcgaagtccaggcgccgattcttagccgtgtgggggatggcacgcaggataacttgtcgggctgtgaaaaagcggtgcaggtaaaagtgaaagctctgcctgatgcccagttcgaagtggttcattcactggcgaagtggaaacgtcagaccttagggcaacacgacttcagcgcgggcgaagggctgtacacgcacatgaaagcccttcgccccgatgaagaccgtctttctccgttgcactcggtctatgttgaccagtgggactgggaacgcgtaatgggcgacggtgagcgtcaactctcgactctgaaaagcacggtagaggcgatctgggcgggaattaaagcaaccgaagctgcggttaacgaagagtttggcctggcaccgttcctgccggatcagattcacttcgtacacagccaggagttactgtctcgttatccggatctcgatgccaaagggcgtgagcgggcgattgcgaaagatcttggcgcggtattcctcgtcgggattggcggcaagttgagtgatggtcatcgtcacgacgtgcgcgcaccggattatgatgactggagcaccccgtcagagctgggccatgcgggcctgaacggcgatattctggtgtggaacccggtactggaagatgcgtttgagctttcttccatggggatccgcgtggatgccgacacgctgaagcatcagctggcgctgaccggtgatgaagatcgtctgcagctggaatggcatcaggcgctgctgcgcggtgaaatgccgcagaccatcggcggcggtatcggccagtctcgtttgactatgctgctgctgcaactgccgcatatcggccaggttcagtgtggagtatggccagctgctgttcgcgagagcgtcccttctctgctgtaa

SEQ ID NO: 473106 - DNA, 1452 bp, Shigella flexneri
atgctaacgctggatacgcttaatgtgatgctggccgtcagcgaagagggattgatcgaagagatgatcatcgcactgctggcctcaccgcagctggcggtcttctttgaaaaattcccacgactgaaggcggcaatcactgatgatgttccccgctggcgtgaggcgctgcgcagtcggctgaaagatgcccaagtcccgccggaactcaccgaagaggtgatgtgctatcagcaaagccagctcctctccacgccgcagtttattgtgcagctaccacagatcctggacttactgcatcgtctgaattccccatgggcagaacaagcccggcagttggttgatgctaacagcacaataacttcagcgttacacacgctttttctccagcgttggcgtttaagtctgatcgtgcaagcaacgacgttaaatcaacagctattagaagaagaacgcgaacaactgttaagtgaagttcaggaacgcatgacgctgagcggacaacttgaaccgattctcgcagataacaataccgcagctggtcgtctgtgggatatgagcgccggtcaacttaaacgtggcgactatcagtttattgtgaaatacggtgaatttcttaacgaacagccggaactgaaacgcctggcagagcagctggggcgttctcgggaagccaaatcaataccgcgcaacgatgcgcagatggaaaccttccgcaccatggtgcgcgaaccggcgacggttcctgagcaggttgatggtctgcaacaaagcgatgatattttacgtctcctgccgccagaactggcgacactagggataacggaactgaagtatgagttttaccgtcggctggtggaaaaacagttgctcacctatcgcctgcacggtgagtcgtggcgtgaaaaagtgctcgaacgtccggtggtacataaagattacgatgaacagccgcgcgggccgtttattgtctgtgtggatacttccggctcaatgggcggctttaatgaacagtgtgcgaaagcgttctgcctggctttgatgcgcattgctctcgctgaaaaccggcgctgttatattatgctattttccaccgagatcgtccgttatgagctttcaggcccacaaggcatcgaacaagcaatccgttttttaagccagcagtttcgtggcggcaccgatcttgccagttgttttcgcgccattatggaacgcttgcaaagcagggaatggtttgatgccgatgcggtggtgatttctgattttatcgctcagcggttgcctgacgacgtgacgagtaaagtgaaagagctgcagcgggtacatcagcatcgctttcatgccgtggcgatgtcggcacacggcaaacccggcatcatgcgcattttcgatcatatctggcgctttgataccgggatgcgaagccgcctgctcagacgctggcggcgataa

SEQ ID NO: 473107 - DNA, 1497 bp, Shigella flexneri
atggctcaccctcatttattagcggaaagaatttcccgcctgagcagttcgttggaaaaggggctttatgaacgtagccacgccatccgcttgtgtttattagcggcattaagtggtgaaagtgtgttcctccttggcccgccaggtattgccaaaagtttgatcgcccggcgcttaaaattcgcctttcagaatgcccgcgcgtttgaatatctgatgacccgcttctccacgccggaagaagtttttggtcccctttctattcaggcgctaaaagatgaagggcgctatgaacgtttaaccagcggttacctgccggaagcagaaatcgtctttctggatgagatctggaaagcgggcccggcaattcttaataccttgctcaccgccattaacgagcgccagttccgcaacggtgcacacgtagaaaaaatcccgatgcgtctactggtggcggcctccaacgagctgccggaagcagacagcagtctggaagcgttatatgaccgcatgctgattcgtctatggttagataaagtgcaagataaagcgaatttccgctccatgctgaccagtcaacaggatgaaaacgacaatccggttcctgatgccttgcaggtcacagatgaagaatatgaacgctggcagaaagagattggtgaaattacgctgcccgatcatgtatttgagctgatttttatgctgcgccagcaactggataaattaccggatgcgccttatgtctcggatcgtcgctggaaaaaagcgatccgcttattgcaggccagcgccttttttagcggtcgcagtgctgttgccccggttgatctcattttgctgaaagattgcctgtggtatgacgcgcaaagcctgaatttgatacaacaacaaattgatgtattgatgaccggtcatgcctggcaacagcaagggatgttgacccgcctgggcgcgattgtgcaacgtcacctgcaactccagcagcaacaaagcgataaaacagccttaacgttaattcgtctgggcggcattttcagccgtcgtcagcagtatcaacttcctgttaacgttactgcttccactctgactctgctgctgcaaaaaccgttaaaactgcatgatatggaagtggttcatatctcctttgagcgtagcgcgctggaacagtggctgagtaaaggtggtgaaattcgcggcaaactgaacggtatcggctttgcccagaaactgaatctggaagttgatagcacccaacatcttgttgtacgcgatgtaagtttacaaggcagtacgctggcacttcccggttcatcggctgaaggtctgccaggtgaaataaaacaacaactggaagagcttgaaagcgactggcgtaagcaacacgctttattcagcgaacagcaaaaatgtctgtttatccctggcgactggttaggtcgcattgaagacagcctacaggatgtcggtgcacagattcgtcaggcacaacaatgctaa

SEQ ID NO: 473108 - DNA, 1089 bp, Shigella flexneri
atgcttgacaacttaataggggcacgttaccttgaagcgctgatcaattatgaagatcgctggttctggaagcatccgggggttaatccattctcggtggcgcgcgcagcatggcaagatctcacttcgggacgggttatttccggtggcagcacgctcactatgcaggttgctcgtctgcttgatcctcaccccaaaacatttggtggcaaaattctccagctctggcgcgcgttgcaactggagtggcatttgtctaagcgtgaaattctgatcttgtatcttaaccgcgctccgtttggcggtacgttgcaggggatcggtgcggcaagttgggcttatctcggaaaatcgcctgcgaatttaagctattccgaggcggcaatgctggcggtgttaccgcaagtgcccagccgactgcgcccggatcgttggccggagcgtgccgaagccgcgcgtaataaagtgctcgaacggatggctgcgcaaggtgtgtggtcccgtgagcaggtaaaagagtcaagggaagaacccatctggctggcaccccgacaaatgccgcaactggcaccgctgttttcgcgcatgatgctcggtaaaagcaaaagcgacaaaatcgttactacgctggatgccggtcttcaacgacgtctggaagaactggcgcaaaactggaaagggcggttgccaccgcgcagctcactggcgatgatcgtggttaatcataccgatatgcgtgttcgcggctgggtgggatcggttgatctcaacgatgattcacgctttggtcatgttgatatggtcaatgcgatccgatcgccaggatcggtgctcaaaccgtttgtttatggtctggcgctggatgaaggcttgatccacccggcatcactgctgcaagacgtcccccggcgcaccggtgattatcgaccaggtaactttgatagcggttttcatggcccgatcaacatgagcgaggcgctggtgcaaaactggaagatatggcggcagcgtataccgcgtttgctcgccacggcaaggcaggcaaattgcgcttacagcctgacgatccgctgcttgaacggcctttaa

SEQ ID NO: 473109 - DNA, 621 bp, Shigella flexneri
atgtcgtcgggggcggcgtggatcattcgccggattatggctgatgaagcgcaacccttgccggatagtgccttgccgcgcgtcgccccactggcatggaaaacgggcaccagctatggctatcgtgacgcctgggcgattggggttaacgctcgctatgtcattgggatctggactggcagacctgacggcacgcccgttgttggtcagtttggctttgccagtgccgtaccattgttgaatcaggtcaataatatcttactgtcgcgcagtgcgaatctgccggaagacccgcgcccgaactcagtcactcgtggcgttatctgctggccgggcggacagtctttgccggaaggtgacggtaactgtcgccgccgcctggcaacctggctgctggatggcagccagccgccaacgctgttactgtcagagcaggaagggattaatggcattcgcttccccatctggctggatgacaaagggcagcgcgtcgccgctgactgcccgcaggcgaagcaagaaatggtaaatgtctggccgctaccgctggaaccctggctgcccgcatcagaacgtcgcgctgtgcgcttaccaccggcctcgacaatttgcccgccatag

SEQ ID NO: 473110 - DNA, 432 bp, Shigella flexneri
atggctattgaacgtactttttccatcatcaaaccgaacgcggtagcaaaaaacgtcattggtaatatctttgcgcgctttgaagctgcagggttcaaaattgtcggcaccaaaatgctgcatctgaccgttgaacaggcacgtggcttttatgctgaacacgatggaaaaccgttctttgatggtctggttgaattcatgacctctggcccgatcgtggtttccgtgctggaaggtgaaaacgccgttcagcgtcaccgcgatctgctgggcgcgaccaatccggcaaacgcactggctggtactctgcgcgctgattacgctgacagcctgaccgaaaacggtacccacggttctgattccgtcgaatctgccgctcgcgaaatcgcttatttcttcggcgaaggcgaagtgtgcccgcgcacctgttaa

SEQ ID NO: 473111 - DNA, 1155 bp, Shigella flexneri
atgtctgaacaattagtcacacctgaaaacgtcaccacgaaagatggaaaaatcaacctgctggatctcaaccgtcagcagatgcgggagttttttaaagatttaggtgaaaaaaccttccgcgccgatcaggtgatgaagtggatgtatcactattgctgcgacaactttgatgagatgaccgacatcaacaaagtgttgcgcggcaaactgaaagaggtggcggaaatccgcgcaccggaagtggttgaagaacagcgttcatccgacggcaccattaaatgggcgatcgccgttggcgatcagcgcgtcgaaacggtgtatatcccggaagacgaccgtgccacgctctgcgtctcttcgcaggtggggtgtgcgctggagtgtaaattctgttccaccgcccagcagggctttaaccgcaacctgcgggtatcggaaattattggccaggtgtggcgtgcggcgaaaatcgtcggcgcagcaaaagtcaccggtcagcgcccaatcactaacgtcgtgatgatgggcatgggcgagccgctgctcaacctgaacaacgtcgttccggcgatggaaatcatgcttgatgatttcggttttggcctgtctaaacgtcgcgtgacgctttccacttccggtgtagttccggcgctggataaactgggcgatatgatcgacgttgcactggcaatttccctgcacgcgccgaacgacgaaattcgtgacgaaattgtgccgatcaacaaaaagtacaatatcgaaacgttccttgctgcggtgcgccgttatctggagaaatccaacgccaatcagggccgagtcactattgaatacgtgatgcttgaccacgttaacgacggcactgaacacgcgcaccaactggcggaactgctgaaagatacgccgtgtaagatcaacctgatcccgtggaacccgttcccggacgcgccgtatggacgcagttcgaacagccgtatcgaccgtttctcaaaagtgctgatgagctacggtttcaccactattgtgcgtaaaacgcgtggtgatgatatcgatgctgcctgtggtcagttggcgggcgatgttatcgaccgtacgaaacgtactctgcgtaaacggatgcagggtgaagccatcgatattaaagcggtctga

SEQ ID NO: 473112 - DNA, 1014 bp, Shigella flexneri
atgaatactgaagccacgcacgaccaaaatgaagcacttactaccggcgctcgcctgcgtaatgctcgcgaacaactaggacttagtcagcaggccgttgccgagcgactttgcctgaaggtttccacggtacgcgacattgaagaagataaggcacccgccgatcttgcttcaacattcctgcgcggatatatccgctcttatgcgcgtctggtacatattccagaagaagaactgctgccagggctggaaaagcaggctccacttcgggctgcaaaagttgcgccaatgcagagtttttccctcggtaaacgccgcaaaaaacgcgacggctggctaatgaccttcacctggctggtgttgtttgtggttatcggcctgagcggtgcctggtggtggcaagaccacaaagctcagcaggaagagatcaccactatggccgatcaatcttcggcggaactgagcagtaatagcgagcaggggcagagtgttccgttaaatacgtcgacaactacagacccggctacaacgtccacgccgccagcgtctgtggatactaccgcaaccaacacgcaaacacctgccgtaactgcgccagcaccagctgttgatccgcaacagaatgcggttgtttcgccttcgcaggcaaatgttgataccgccgcgaccccggtaccaacggcagcaacaacgccagatggtgctgcgccgttgccaaccgatcaggctggcgtgaccacgccggcggctgatccgaatgcgctggtgatgaactttactgccgattgctggctggaggtcactgatgctaccggtaaaaaattgtttagcgggatgcagcgtaaagacggtaatttgaatttaaccggccaggcaccgtataaactgaaaattggtgcgccagccgcagtacagatccagtatcaagggaaacctgtcgatctgagtcgttttatcagaactaaccaggttgcgcgtctgaccctcaatgccgaacaatcaccggcgcagtaa

SEQ ID NO: 473113 - DNA, 1128 bp, Shigella flexneri
atgcataaccaggctccaattcaacgtagaaaatcaacacgtatttacgttgggaatgtgccgattggcgatggtgctcccatcgccgtacagtccatgaccaatacgcgtacgacagatgtcgaagcaacggtcaatcaaatcaaggcgctggaacgcgttggcgctgatatcgtccgtgtctccgtaccgacgatggacgcggcagaagcgttcaaactcatcaaacagcgggttaacgtgccgctggtggctgacatccacttcgactatcgcattgcgctgaaagtagcggaatacggcgtcgattgtctgcgtattaaccctggtaatatcggtaatgaagagcgtattcgcatggtggttgactgtgcgcgcgataaaaacattccgatccgtattggcgttaacgccggatcgctggaaaaagatctgcaagaaaagtatggcgaaccgacgccgcaggcgttgctggaatccgccatgcgtcatgttgatcatctcgatcgcctgaacttcgatcagttcaaagtcagcgtgaaagcgtctgacgtcttcctcgctgttgagtcttatcgtttgctggcaaaacagatcgatcagccgctgcatctggggatcaccgaagccggtggtgcacgcagcggggcagtaaaatccgccattggtttaggtctgctgctgtcggaaggcatcggcgacacgctgcgtgtatcgctggcggccgatccggtcgaagagatcaaagtcggtttcgatattttgaaatcgctgcgtatccgttcgcgagggattaacttcatcgcctgcccgacctgttcgcgtcaggaatttgatgttatcggtacggttaacgcgctggagcaacgcctggaagatatcatcactccgatggacgtttcgattatcggctgcgtggtgaatggcccaggtgaggcgctggtttctacactcggcgtcaccggcggcaacaagaaaagcggcctctatgaagatggcgtgcgcaaagaccgtctggacaacaacgatatgatcgaccagctggaagcacgcattcgtgcgaaagccagtcagctggacgaagcgcgtcgaattgacgttcagcaggttggaaaaataataacgtga

SEQ ID NO: 473114 - DNA, 1275 bp, Shigella flexneri
gtggcaaaaaacattcaagccattcgcggcatgaacgattacctgcctggcgaaacggccatctggcagcgcattgaaggcacactgaaaaacgtgctcggcagctacggttacagtgaaatccgcttgccgattgtagagcagaccccgctattcaaacgtgcgattggtgaagtcaccgacgtggttgaaaaagagatgtacacctttgaggatcgcaatggcgacagcctgactctgcgccctgaagggacggcgggctgtgtacgcgccggcatcgagcatggtcttctgtacaatcaggaacagcgtctgtggtatatcgggccgatgttccgtcacgagcgtccgcagaaagggcgttatcgtcagttccatcagttgggctgcgaagttttcggtctgcaaggtccggatatcgacgctgaactgattatgctcactgcccgctggtggcgtgcgctgggtatcttcgaacacgtaactcttgagctgaattctatcggttcgctggaagcacgcgccaattaccgcgatgcgctggtggcattccttgagcagcataaagaaaagctggacgaagactgcaaacgccgcatgtacactaacccgctgcgcgtgctggattcaaaaaatccggaagtgcaggcgcttctcaacgacgctccggcattaggtgattatctggacgaggaatctcgtgagcattttgccggtctgtgcaaactgctggagagcgcggggatcgcttacaccgtaaaccagcgtctggtgcgtggtctggattactataaccgtaccgttttcgagtgggtgactaacagtctcggctcccagggcaccgtgtgtgcaggcggtcgttatgacggtcttgtggaacaactgggcggtcgtgcaacaccggctgtcggttttgcgatgggcctcgaacgtcttgtattgttagtacaggccgttaatccggaatttaaagccgatcctgttgtcgatatatacctggtggcttcaggtgctgatacacaatctgcggctatggcattagctgagcgtctgcgtgatgaattactgggcgtgaaattgatgaccaaccacggcggcggcaactttaagaaacagtttgcccgtgctgataaatggggtgcccgcgttgctgtggtgctgggtgagtctgaagtggctaacggcacagcagtagtgaaggatttgcgctctggtgagcaaacggcagttgcgcaggatagcgtagccgcgcatttgcgcacgttactgggttaa

SEQ ID NO: 473115 - DNA, 621 bp, Shigella flexneri
gtggaaatttacgagaacgaaaacgaccaggtagaagcggttaaacgcttttttgctgaaaatggcaaagcactggctgttggggggattttgggcgttggcgcactgattggctggcgctactggaacagccatcaggttgattctgcacgctccgcttctcttgcctatcaaaatgcggttaccgcagtgagcgaaggcaaaccggatagcatcccggcggcggaaaaatttgctgctgaaaataaaaatacttatggtgcgctggcttctttggaacttgcgcagcaatttgttgacaaaaatgaactagagaaagctgccgcccagttacaacaggggctggcagacacgagcgatgaaaatctcaaagccgtgataaatctgcgtcttgctcgcgttcaggtacagctcaagcaggctgatgccgcgctgaaaacccttgataccatcaaaggtgaagggtgggctgccattgttgccgacttgcgtggtgaagcattgctgagcaaaggtgataagcaaggtgcgcgtagtgcatgggaagcaggcgtgaaaagcgatgttactccggcactgagcgaaatgatgcagatgaaaattaataatttgtccatctga

SEQ ID NO: 473116 - DNA, 1179 bp, Shigella flexneri
atgcaattgcgtaaattactgctgccaggactgctttccgttacccttttaagcggctgttcgctgtttaacagcgaagaagatgtggtaaagatgtccccattgccaaccgttgaaaaccagtttacgccgaccacggcgtggagcacttccgttggtagcggcattggcaacttctattccaatcttcatccggcactggcggacaacgttgtctatgcagcggaccgcgctggtttggtaaaagcgctgaatgcggatgatggcaaagaaatctggtctgtcagcctggccgagaaagatggctggttctctaaagagcctgcattactttctggcggtgtgaccgtgtctggtgggcatgtctacattggcagcgaaaaggcgcaggtttacgcgctgaataccagcgatggtactgtggcatggcaaacaaaagtcgcgggtgaagcactttcgcgcccggtggtcagcgacggtctggtgttaatccacaccagtaacggtcagttacaagcgctgaacgaagctgacggcgctgtcaaatggacagttaacctcgatatgccttcgctctctttgcgtggcgagtctgcgccggcaacggcttttggtgcggccgtcgtgggtggcgataatggtcgcgtcagcgcagtgctgatggaacagggccagatgatttggcagcagcgtatttcccaggcgaccggttctaccgaaattgaccgtctgagcgatgttgacacgactcccgtcgttgttaacggcgttgttttcgcgctggcctataatggtaacctgacggcgcttgatctgcgcagtggtcagattatgtggaaacgcgaactgggttcggtgaatgatttcatcgtcgatggcaatcgcatctatctggtcgatcaaaatgaccgggtgatggcgttgaccattgatggcggcgttacgctgtgggcacaaagcgatctgctgcatcgcctgctgacttctccggtgctgtataatggcaacctggtggtcggtgacagtgaaggttatctgcactggattaacgtcgaagatggtcgtttcgttgcccagcaaaaagttgatagttccggtttccagactgaaccggttgccgctgacggcaaactgctgatccaggcaaaagacggaaccgtgtactctattacacgttaa

SEQ ID NO: 473117 - DNA, 1473 bp, Shigella flexneri
atggtacctgtggtcgcgcttgtcgggcgccctaacgtaggaaaatccacgttatttaaccgtctaactcgcacccgagatgcgctggttgcggatttcccgggtctgactcgtgaccgtaagtacggtcgtgcggaaattgaaggccgtgagtttatctgtattgataccggcgggattgatggcacagaagacggtgtagaaacccgcatggcggaacagtcgctgctggcgattgaagaagcggacgtcgtactgtttatggtggatgcgcgcgcgggcctgatgccggcagatgaagcgattgccaaacatctgcgctcccgtgaaaaaccgaccttcctggtggtaaacaaaactgacggtctggatcccgatcaggcagtggttgatttctactcgcttggtttaggtgaaatctacccgatcgccgcgtctcacggtcgtggcgtattaagtctgctggagcatgtgctgctgccgtggatggaagatctcgcaccgcaagaggaagtcgacgaagacgctgaatactgggcgcaatttgaagcggaagagaacggcgaagaagaagaggaagacgacttcgacccgcaaagtctgccgatcaaactggcgattgtgggtcgtccgaacgtaggtaagtctacactcactaaccgtattcttggagaagagcgcgttgttgtttacgacatgcctggcacgacgcgtgacagcatctacatcccaatggaacgcgatggacgtgagtatgtgctcattgacaccgctggcgtacgtaaacgcggcaaaatcaccgatgctgtagagaaattctccgtaatcaaaacgttgcaggccattgaagacgccaacgtggtgatgttagtgattgatgcgcgcgaaggtatttccgatcaggatctctcgctgctgggctttattctcaatagtgggcgctcacttgtcattgtggtgaataagtgggatggcctgagccaggaagtgaaagagcaggtgaaagaaacgctggacttccgtctgggctttatcgattttgctcgtgtgcactttatctctgccttgcacggcagtggtgttggtaacttgtttgaatcagtacgtgaagcgtatgacagctccacccgtcgtgtggggacctctatgctgacgcgcatcatgacgatggctgttgaagatcaccaaccgccgctggtacgcggtcgtcgtgtgaagctgaaatatgcccacgctggtggttataacccgccgattgtggtgattcacggtaatcaggtgaaagacctgcctgattcctacaagcgctacttgatgaactacttccgcaaatcgctggacgtaatgggatcgccgattcgtattcagttcaaagaaggggaaaacccgtatgcgaacaagcgtaacaccctgacgccaacccagatgcgtaaacgtaagcgtctgatgaagcacatcaagaaaaataaataa

SEQ ID NO: 473118 - DNA, 216 bp, Shigella flexneri
atggaactgcattgtccaaaatgtcagcatgtgcttgatcaggataacggccatgcgcgttgcccatcctgcggggaatttattgaaatgaaagctctttgtccagactgccatcaaccgttgcaggtgttaaaagcctgcggtgcagtagattacttctgtcagcacgggcatggcttgatatcgaaaaaacgcgttgaattcgtgctggcttaa

SEQ ID NO: 473119 - DNA, 1371 bp, Shigella flexneri
atgttaccttctcaatcccctgcaatttttaccgttagtcgcctgaatcaaacggttcgtctgctgcttgagcatgagatgggacaggtttggatcagcggcgaaatctctaatttcacacaaccggcttccggtcactggtactttacactcaaagacgacaccgcccaggtacgctgcgcgatgttccgcaacagcaaccgccgggtcaccttccgtccgcagcatgggcaacaagttttagttcgcgccaatattacgctctacgagccgcgcggcgactaccaaataatcgttgagagtatgcagccggccggtgaagggctgctgcaacagaagtacgaacagctcaaagcgaagttgcaggctgaaggtttgttcgatcagcaatacaaaaaaccacttccctcccctgcgcattgcgttggtgtgatcacctcaaaaaccggtgctgcgctacatgatattttgcatgtgttaaaacgtcgcgatccttctctaccggtgatcatctaccccacctccgttcagggcgatgacgcgccggggcaaattgttcgcgccattgaactggcgaatcagcgcaatgagtgcgacgtgttgatcgttgggcgcggcggcggttcgctggaagatttatggagttttaacgacgaacgcgtagcgcgggcgatttttgccagccgcattccggtcgtcagcgccgtcgggcatgagacggatgtgaccattgccgattttgttgccgatctgcgtgcgccaacgccgtctgccgccgctgaagtagtgagccgtaatcagcaagagttactgcgccaggtgcaatcggcccgtcaacggctggagatggcgatggattattatctcgccaaccgtacacgtcgctttacgcagattcatcatcgcttgcagcagcagcatccgcagctccggctggcacgccagcaaaccatgcttgaacgcctgcaaaaacggatgagctttgcgctggaaaatcagcttaagcgtgccgggcaacagcagcagcgattaacacagcggctgaatcagcaaaatccacagccgaagattcatcgcacgcaaacgcgcattcagcaactggaatatcgtttagcagaaatcctgcgcgcacagcttagcgccacgcgtgaacgtttcggtaatgcagtaacgcacctcgaagccgtaagcccactgtcaacgctggcgcgtggatacagcgttactactgctactgacagcaatgtactgaaaaaagtgaagcaagttaaaacgggtgaaatgctaaccacacgtctggaagacggctggatagaaagtgaagtaaaaaacatccagccggtaaaaaaatcgcgtaaaaaggttcattaa

SEQ ID NO: 473120 - DNA, 1467 bp, Shigella flexneri
atgctacgtatcgctaaagaagctctgacgtttgacgacgttctcctcgttcctgctcattctaccgttctgccgaatactgctgacctcagcacccagctgacgaaaactattcgtctgaatatccctatgctttccgcagcaatggataccgtaacggaagcgcgcctggctattgctctggctcaggaaggcggtatcggctttatccacaaaaacatgtccattgaacgccaggcagaagaagttcgccgtgtgaaaaaacacgaatctggtgtggtgactgatccgcagactgttctgccaaccacgacgctgcgcgaagtgaaagaactgaccgagcgtaacggttttgcgggctatccggtcgttaccgaagaaaacgaactggtgggtattatcaccggtcgtgacgtgcgttttgttaccgacctgaaccagccggttagcgtttacatgacgccgaaagagcgtctggtcaccgtgcgtgaaggtgaagcccgtgaagtggtgctggcaaaaatgcacgaaaaacgcgttgaaaaagcgctggtggttgatgacgaattccacctgatcggcatgatcaccgtgaaagacttccagaaagcggaacgtaaaccgaacgcctgtaaagacgagcaaggccgtctgcgtgttggtgctgcagttggcgcaggtgcgggtaacgaagagcgtgttgacgcgctggttgccgctggcgttgacgttctgctgatcgactcctcccacggtcactcagaaggcgttttgcagcgtatccgtgaaacccgtgctaaatatccggatctgcaaatcatcggcggcaacgtggcaacagctgcaggtgcacgcgctttggcagaagctggttgcagcgcggttaaagtcggtatcggccctggttctatctgtacgactcgtatcgttactggcgtaggtgttccgcagatcactgccgttgctgacgcagttgaagccctggaaggcaccggtattccggttatcgcagatggtggtattcgcttctccggcgacatcgccaaagctatcgccgctggcgcaagcgcggtgatggtaggttccatgctggcgggtactgaagaatctccgggtgaaatcgaactctaccagggccgttcttataaatcttaccgtggtatgggttccctgggcgcgatgtccaaaggttcctctgaccgttatttccagagcgataacgctgccgacaaactggtgccggaaggtatcgaaggtcgcgtagcttataaaggtcgcctgaaagagatcattcaccagcagatgggcggcctgcgctcctgtatgggtctgaccggctgtggtactatcgacgaactgcgtactaaagcggagtttgtacgtatcagcggtgcgggcattcaggaaagccacgttcacgacgtgaccattactaaagagtccccgaactaccgtctgggctcctga

SEQ ID NO: 473121 - DNA, 1578 bp, Shigella flexneri
atgacggaaaacattcataagcatcgcatcctcattctggacttcggttctcagtacactcaactggttgcgcgccgcgtgcgtgagctgggtgtttactgcgaactgtgggcgtgggatgtgacagaagcacaaattcgtgacttcaatccaagcggaattattctttccggcggcccggaaagtactactgaagaaaacagtccgcgtgcgccgcagtatgtctttgaagcaggcgtaccgatattcggcgtttgctatggcatgcagaccatggcaatgcagttgggcggtcacgttgaagcctctaacgaacgtgaatttggctacgcgcaggtagaagtcgtaaacgacagcgcactggttcgcggtatcgaagatgcgctgaccgcagacggtaaaccgctgctcgatgtctggatgagccacggcgataaagttaccgctatcccgtccgacttcgtcaccgtagccagcaccgaaagctgcccgtttgccattatggctaacgaagaaaaacgcttctatggcgtacagttccacccggaagtgactcacacccgccagggtatgcgcatgctggagcgttttgtgcgtgatatctgccagtgtgaagccctgtggacgccagcgaaaattatcgacgatgctgtagctcgcatccgcgagcaggtaggcgacgataaagtcatcctcggcctctctggtggtgtggattcctccgtaaccgcaatgctgctgcaccgtgctatcggtaaaaacctgacttgcgtattcgtcgacaacggcctgctgcgtctcaacgaagcagagcaggttctggatatgtttggcgatcactttggtcttaacattgttcacgtaccggcagaagatcgcttcctgtcagcgctggctggcgaaaacgatccggaagcaaaacgtaaaatcatcgggcgcgttttcgttgaagtattcgatgaagaagcgctgaaactggaagacgtgaagtggctggcgcagggcaccatctaccctgacgttatcgaatctgcggcttctgcaaccggtaaagcacacgtcatcaaatctcaccacaacgtgggcggcctgccgaaagagatgaagatgggcctggttgaaccgctgaaagagctgttcaaagacgaagtgcgtaagattggtctggagctgggcctgccgtacgacatgctgtaccgtcatccgttcccgggaccaggccttggcgttcgtgttctgggtgaagtgaagaaagagtactgtgacctgctgcgccgtgctgacgccatcttcattgaagaactgcgtaaagcggacctgtacgacaaagtcagccaggcgttcaccgtcttcctgccagtacgttccgttggcgtaatgggcgatggtcgtaagtatgactgggttgtctctctgcgtgctgtcgaaaccatcgactttatgaccgcacactgggcgcatctgccgtacgatttcctcggtcgcgtttccaaccgcattatcaatgaagtgaacggtatttcccgcgtggtgtatgacatcagcggcaagccgccagctaccattgagtgggaatga

SEQ ID NO: 473122 - DNA, 540 bp, Shigella flexneri
atgaagaaagtttttctttgcgccatcttagcctccttaagctatccggctatagcctcatcattgcaggatcaactctctgctgtcgcagaagcggaacagcaaggtaaaaatgaagagcaaaggcagcatgacgaatgggtcgcggagcgcaacagggaaatccagcaagagaagcaacgtcgcgcaaatgcccaggccgccgcgaacaaaagagcggcaacggcagcggcaaataagaaagctcgtcaggataaactggacgccgaagccactgcggacaaaaaacgcgatcaaagttatgaagatgagctacgcagcttagagattcagaaacaaaaactggcgctggcgaaagaagaagcccgcgttaagcgcgaaaacgaatttatcgatcaggaactgaagcacaaagctgcgcaaaccgatgtggtgcaatctgaagctgacgcaaacagaaatatgactgaaggcggtcgcgatctgatgaaaagcgtgggcaaagcagaagagaacaaatcggacagctggtttaattaa

SEQ ID NO: 473123 - DNA, 516 bp, Shigella flexneri
atgaaatttaaaaaatgtcttctgcctgtggcaatgttagcgtcattcactctggcaggatgccagtcaaatgctgacgatcatgccgccgatgtttatcaaaccgatcaactgaataccaaacaagaaactaaaaccgttaatattatttccattcttcccgcaaaagttgccgtagacaactcccaaaataaacggaacgcacaagccttcggcgcgcttattggcgcagtcgctggcggtgttatcggccacaacgtcggttctggcagcaattccggaacgacggcaggggcagttggcggcggagctgtaggcgcggcagcgggttctatggtgaatgataaaaccttagtggaaggtgtttctttaacatataaggaaggcaccaaagtgtatacctccacccaggagggtaaagagtgccagtttacgacaggtttagccgttgttattaccacaacgtataacgaaacgcgtattcagccaaataccaaatgtcctgaaaagagctaa

SEQ ID NO: 473124 - DNA, 174 bp, Shigella flexneri; identical to SEQ ID NO: 2652

SEQ ID NO: 473125 - DNA, 153 bp, Shigella flexneri; identical to SEQ ID NO: 28671

SEQ ID NO: 473126 - DNA, 1155 bp, Shigella flexneri
atgaaactgaatgcaacttatataaaaatacgtgataaatggtgggggcttccgctgttcctgccttctttaatcttgcccattttcgcccacattaatactttcgcgcatatttcttccggtgaggtttttctcttttatctgcctttggcactgatgatcagcatgatgatgtttttcagctgggcggcattgccagggatcaccttagggatttttgtccgcaaatatgcagagctgggtttttacgaaacgctctcattaacggctaattttattatcattatcattctctgttggggcggttacagggtctttactccccggcgtaacaacgtttcacatggtgatacccgtttaatttcccagcgtatattctggcagatagtgtttcctgcaacgctgtttctgatacttttccagtttgctgcatttgtaggattactggcgagcagagaaaatctggtcggtgtcatgccttttaacctcgggactttaatcaattatcaggccttactggtgggtaatctgatcggtgtcccgctgtgctacttcatcattcgggtagtgcgaaatccattttatttacgtagctattattcgcaattaaaacagcaggttgatgccaaagtcaccaaaaaagagttcgcgctctggctactggcattaggtgctttattgttgctgttatgcatgccgttaaatgaaaaaagcacaatttttagcaccaattataccttgtcattattgctgcccctgatgatgtggggagcaatgcgctatggttataagctgatttcgctgctctgggcggtcgtgttgatgatcagcatccacagctatcaaaattacattcccatttatcctggctataccacgcagctgaccataacctcctccagttatctggtattctcttttattgtcaattatatggctgtactggcaactcgtcagcgagcggtagtcagacgcattcagcggcttgcgtatgtggacccggtggttcatctgccaaatgttcgcgccctgaatcgcgcgttgcgtgatgccccctggtctgcgctttgttatttacgcatccctggcatggaaatgctggttaagaactatggcatcatgctgcggattcaatatgaggtgtactggcaatag

SEQ ID NO: 473127 - DNA, 225 bp, Shigella flexneri; identical to SEQ ID NO: 133446

SEQ ID NO: 473128 - DNA, 2286 bp, Shigella flexneri
atgaatcagaatctgctggtgacaaagcgcgacggtagcacagagcgcatcaatctcgacaaaatccatcgcgttctggattgggcggcagaaggactgcataacgtttcgatttcccaggtcgagctgcgctcccacattcagttttatgacggtatcaagacctctgacatccacgaaactattatcaaggctgccgcagacctgatctcccgtgatgcgccggattatcagtatctcgccgcgcgcctggcgatcttccacctgcgtaaaaaagcctacggccagtttgagccgcctgcgctgtacgaccacgtggtgaaaatggtcgagatgggcaaatacgataatcatctgctggaagactacacggaagaagagttcaagcagatggacacgtttatcgatcacgaccgtgatatgaccttctcttatgctgccgttaagcagctggaaggcaaatatctagtacagaaccgcgtgaccggcgaaatctacgaaagcgcccagttcctttatattcttgttgccgcgtgcctgttctcgaactacccgcgtgaaacgcgcctgcaatacgtgaagcgtttttatgacgcggtttccacatttaaaatttcgctgccgacgccaatcatgtccggcgtgcgtaccccgactcgtcagttcagctcctgcgtactgatcgagtgcggtgacagcctggattccatcaacgccacctccagcgcgattgtgaaatatgtttcccagcgtgccgggatcggcatcaacgccggacgtattcgtgcgctgggcagcccgattcgcggtggcgaagcgttccataccggctgtatcccgttctacaaacatttccagacagcggtgaaatcctgctctcagggcggtgtgcgcggcggtgcggcaacgctgttctacccgatgtggcatctggaagtggaaagcctgctggtgttgaaaaacaaccgtggggttgaaggcaaccgcgtgcgtcatatggactacggggtacaaatcaacaaactgatgtatacccgcctgctgaaaggtgaagatatcaccctgttcagcccgtccgacgtaccggggctgtacgacgcgttcttcgccgatcaggaagagtttgaacgcctgtataccaaatatgagaaagacgacagcatccgcaagcagcgtgtgaaagccgttgagctgttctcgctgatgatgcaggaacgtgcgtctaccggtcgtatctatattcagaacgttgaccactgtaatacccatagtccgtttgatccgaccatcgcgccagttcgccagtctaacctgtgcctggaaattgccctgccgaccaaaccgctgaacgacgtcaacgacgagaacggtgaaatcgcgctgtgtacgctgtctgctttcaacctgggcgcaattaatagcctggatgaactggaagagctggcgattctggcggttcgtgcacttgacgcgctactggattatcaggattacccgatcccggccgccaaacgtggagcgatggggcgtcgtacgctgggtattggtgtgattaacttcgcttactatctggcgaagcacggtaaacgctactccgacggcagcgccaacaacctgacgcataaaaccttcgaagcgattcagtattacctgctgaaagcgtctaatgagctggctaaagagcaaggcgcgtgcccgtggtttaacgaaaccacttacgcgaaagggatcctgccgatcgatacctataagaaagatctggatgccatcgctaatgagccgctgcattacgactgggaagcattgcgtgaatcaatcaaaacgcacggcctgcgtaactccacgctttctgccctgatgccgtccgagacctcttcgcagatctctaacgccactaacggtattgaaccgccgcgcggttacgtcagcatcaaagcgtcgaaagacggtattttgcgccaggtggtgccggactacgagcacctgcacgacgcctatgagctgctgtgggaaatgccgggtaacgatggctacctgcaactggtaggtatcatgcagaaatttatcgatcagtcgatctctgctaacaccaactacgatccgtcacgtttcccgtcaggaaaagtgccgatgcagcagttgctgaaagacctgctcaccgcctacaaattcggggtcaaaacgctgtattatcagaacacccgtgacggcgctgaagacgcgcaggacgatctggtaccgtcaatccaggacgatggctgcgaaagcggcgcatgtaagatctga

SEQ ID NO: 473129 - DNA, 1131 bp, Shigella flexneri
atggcatataccaccttttcacagacgaaaaatgatcagctcaaagaaccgatgttctttggtcagccggtcaacgtggctcgctacgatcagcaaaaatatgacatcttcgaaaagctgatcgaaaagcagctctctttcttctggcgtccggaagaagttgacgtctcccgcgaccgtatagattaccaggcgctgccggagcacgaaaaacacatctttatcagcaacctgaaatatcagacgctgctggattccattcagggtcgtagcccgaacgtggcgctattgccgcttatttctattccggaactggaaacctgggtcgaaacctgggcgttctcagaaacgattcattcccgttcctatactcatatcattcgtaatatcgttaacgatccgtctgttgtgtttgacgatatcgtcaccaacgagcagatccagaaacgtgcggaagggatctccagctattacgatgaactgatcgaaatgaccagctactggcaccttctgggcgaaggcacccacaccgttaacggtaaaaccgtaaccgttagcctgcgcgagctgaagaaaaaactgtatctctgcctgatgagcgttaacgcgctggaagcgatccgcttctacgtcagctttgcttgttcctttgcctttgcagaacgcgaactgatggaaggtaacgccaagattattcgcctgattgcccgcgatgaagccctgcacctgaccggtactcagcatatgctgaatctgctgcgcagcggcgcggatgatccggagatggcggaaattgccgaagaatgtaagcaggagtgctatgacctgtttgtccaggcggcacagcaagagaaagactgggcggattatctgttccgtgacggttcgatgattggtctgaataaagatattctctgccagtacgttgaatacatcaccaatatccgcatgcaggcagtcggtttggatctgccgttccagacgcgctccaacccgatcccgtggatcaacacctggctggtgtctgataacgtgcaggttgctccgcaggaagtggaagtcagttcttatctggtcgggcagattgacgcggaagtggacaccgacgatttgagtaacttccagctctga

SEQ ID NO: 473130 - DNA, 255 bp, Shigella flexneri
atggcccgcgttaccctgcgcatcactggcacacaactgctgtgccaggatgaacacccttcccttctggcggcgctggaatcccacaatgtggcggttgagtaccagtgccgcgaaggttactgcggctcctgtcgcacccgactggtcgcaggtcaggtggactggattgccgaaccgttagcctttattcagccgggggaaattttgccctgttgttgccgggcaaaaggcgatattgaaatcgagttgtga

SEQ ID NO: 473131 - DNA, 651 bp, Shigella flexneri
atggcagtttcagcaaagtacgacgaatttaatcactggtgggcaacagagggcgactgggttgaagagcctaactatcgccgtaatggtatgagcggggtgcaatgcgtcgagcgcaacggcaaaaagctgtatgtaaagcgcatgacgcatcatctgtttcattcagtacgttatccgttcggccgaccaacgattgtccgtgaggttgcggtaattaaagaactggaacgggccggtgtcatcgtgccgaagatcgtttttggtgaagcggtgaaaattgagggtgaatggcgcgcgttgctggtgactgaagatatggcggggttcatcagcattgctgactggtatgcccggcatgcagtatcgccttattctgacgaagtacggcaagccatgttgaaagcagtggcactggcgtttaagaaaatgcatagcgttaatcgtcagcatggctgttgctatgttcgccatatctatgtgaaaacagaaggtaaggcagaagctggttttcttgatctggagaaaagtcgtcgccgcttgcgtcgcgataaagcgattaatcatgacttccgccagctggaaaaatatctggagccgatccctaaagcggactgggagcaggtgaaagcgtattactacgccatgtaa

SEQ ID NO: 473132 - DNA, 207 bp, Shigella flexneri
atgaattttattcgacagggattaggcatcgccttacaaccagagttaacgctgaaaagcattgcaggtgaattgtgttccgttcctcacgaaccaaccttctatcgacagatttcgttgctgactaaagaaaagccggtagaaggcagtccactgtttttactacaaatgtgcatggaacaattagtggcgattggaaaaatttga

SEQ ID NO: 473133 - DNA, 1077 bp, Shigella flexneri
atgaaattgaagctgaaaaaccttagcatggcgatcatgatgagcactatagtcatgggaagcagtgcaatggcggcggacagcaacgaaaaaatagtcatcgcccatcgcggtgccagtggatatttgccggagcatacgctgccagcaaaagcgatggcgtatgcgcagggagcggattatctggaacaggatttggtgatgaccaaagacgaccatctggttgttctgcatgaccattatctcgatcgtgttactgatgttgccgatcgtttcccggatcgggcgcgcaaagacggtcgttactacgcgatagatttcacgctggatgaaattaagtcgctgaaatttaccgaaggtttcgatattgaaaacggtaaaaaagtacagacttatccggggcgtttcccaatgggtaagtccgacttccgggtgcacacctttgaagaagagattgaatttgttcaggggttaaatcactctaccgggaaaaatatcggtatctatccagaaatcaaagcgccgtggttccatcatcaggaagggaaggatattgcggcaaaaacgctggaagtgctgaagaaatatggttacaccggtaaagacgataaagtttatttgcaatgttttgatgctgatgagctgaagcgtattaagaatgagctggaacccaaaatgggcatggagctcaatctggtacagctgattgcctataccgactggaatgaaacgcagcagaaacagccggatggaagctgggttaattacaactacgactggatgtttaagccgggagccatgaaacaggtggcggaatatgcagatggtattggtccggattaccatatgttgattgaggagacatcgcagccgggtaatatcaaactcactggcatggtgcaagatgcccagcagaataaactggtagtgcatccttataccgtgcggtcagataaactgcctgaatacactcctgatgtgaatcagttatatgatgctctgtataacaaagcgggtgtaaatgggctgtttactgatttccctgataaggcagtaaaatttcttaataaagagtaa

SEQ ID NO: 473134 - DNA, 1359 bp, Shigella flexneri
atgttgagtatttttaaaccagcgccacacaaagcgcgcttacctgccgcggagatcgatccgacttatcgtcgattgcgctggcaaattttcctggggatattctttggctatgcggcttactatttggttcgtaagaactttgcgcttgctatgccttatctggttgagcagggattctcacgcggtgatttaggttttgccctttcggggatctcgattgcttatggattttcgaaattcatcatgggttcggtatcggatcgctcgaatccgcgcgttttcctgcccgcaggtttgattctggcggcggcagtgatgttgtttatgggctttgtgccatgggcgacgtcgagcattgcggtgatgtttgtactgttgttcctctgcggttggttccaggggatggggtggccgccgtgtggtcgtactatggtgcactggtggtcgcagaaagaacgtggcggcattgtgtcagtgtggaactgtgcgcacaacgtcggtggtggtattccgccgctgctgttcctgctggggatggcctggttcaatgactggcatgcggcgctctatatgcctgctttctgcgccattctggtggcattattcgcctttgcgatgatgcgcgataccccgcaatcctgtggcttgccgccgatcgaagagtacaaaaatgattatccggacgactataacgaaaaagcggaacaggagctgaccgcgaagcaaatcttcatgcagtacgtgctgccgaacaaactgctgtggtacatcgccatcgccaacgtgttcgtttatctgctgcgttacggcatcctcgactggtcaccgacttatctgaaagaggttaagcatttcgcgctggataaatcctcctgggcctacttcttctatgagtatgcgggtattccgggcaccctgctgtgcggctggatgtcggacaaagtcttccgtggtaaccgtggggcaaccggcgtcttctttatgacactggtgaccatcgcgactatcgtttactggatgaacccggcaggtaacccaaccgtcgatatgatttgtatgattgttatcggcttcctgatctacggtcctgtgatgctgatcggtctgcatgcgctggaactggcaccgaaaaaagcggcaggtacggcagcgggctttaccgggctgtttggttacctgggcggttcggtggcggcgagcgcgattgttggctacaccgtggacttcttcggctgggatggcggctttatggtaatgattggcggcagcattctggcggttatcttgttgattgttgtgatgattggcgaaaaacgtcgccatgaacaattactgcaaaaacgcaacggaggctaa

SEQ ID NO: 473135 - DNA, 1629 bp, Shigella flexneri
atgaaaactcgcgactcgcaatcaagtgacgtgattatcattggcggcggcgcaacgggagccgggattgcccgcgactgtgccctgcgcgggctgcgcgtgattttggttgagcgccacgacatcgcaaccggtgccaccgggcgtaaccacggcctgctgcacagcggtgcgcgctatgcagtaaccgatgcggaatcggcccgcgaatgcattagtgaaaaccagatcctgaaacgcattgcacgtcactgcgttgaaccaaccaacggcctgtttatcaccctgccggaagatgacctctcattccaggccacttttattcgcgcctgcgaagaagcagggatcagcgcagaagctatagactcgcagcaagcgcgcattatcgaacctgccgttaacccggcactgattggcgcggtgaaagttccggatggcaccgttgatccatttcgtctgaccgcagcaaacatgctggatgccaaagaacacggtgccgttatccttaccgctcatgaagtcacggggctgattcgtgaaggcgcgacggtgtgcggtgttcgtgtacgtaaccatctcaccggcgaaactcaggcccttcatgcacctgtcgtggttaatgccgctgggatctgggggcaacacattgccgaatatgccgatctgcgcattcgcatgttcccggcgaaaggatcgctgctgatcatggatcaccgcattaaccagcatgtgatcaaccgctgccgtaaaccttccgacgccgatattctggtgcctggcgataccatttcgctgattggtaccacctctttacgtattgattacaacgagattgacgataatcgagtgacggcagaagaggttgatattctgctgcgtgaaggggaaaaactggcccccgtgatggcgaaaacgcgcattttgcgggcctattctggcgtgcgcccgctggttgccagcgatgacgacccgagcggacgtaacgtcagccgtggcatcgtgctgctcgaccatgctgaacgcgatggtctggacggatttatcaccatcaccggtggcaaactgatgacctatcggctgatggctgaatgggctaccgacgcggtatgccgcaaactgggcaacacgcgcccctgtacgactgccgatctggcactgcctggttcacaagaacccgctgaagttaccttgcgtaaagtcatctccctgcctgccccgctgcgcggttctgcggtttatcgtcatggcgatcgcacgcctgcctggctgagcgaaggccgtctacaccgtagcctggtatgtgagtgcgaagcggtaactgcgggtgaagtgcagtacgcggtagaaaatttaaacgttaatagcctgctggatttacgccgtcgtacccgtgtggggatgggcacctgccagggcgaactctgcgcctgccgcgctgccggactgctgcaacggtttaacgtcacgacgtccgcgcaatctatcgagcaactttccaccttccttaacgaacgctggaaaggcgtgcaacccatcgcctggggagacgcactgcgcgaaagcgaatttacccgctgggtttatcagggactgtgtggtctggagaaggagcagaaagatgcgctttga

SEQ ID NO: 473136 - DNA, 1260 bp, Shigella flexneri
atgcgctttgatactgtcattatgggcggcggcctcgccggattactctgtggcctgcaactgcaaaaacacggcctgcgctgtgccattgtcacgcgtggtcaaagcgcgttgcatttctcatccggttcgctggatttgctgagccatctgccagatggtcaacccgtggcagacattcacagtggactggaatctttgcgtcagcaggcacctgcacatccttactctcttctcgggccacaacgcgtgctcgatctcgcttgccaggcgcaggcattaatcgctgaaagcggtgcgcaattgcagggcagcgtagaactggctcaccagcggattacgccgctcggcactttgcgtgcaacctggttaagttcgccagaagttcccgtctggccgctacccgcgaagaagatatgtgtagtggggataagcgggctgatagatttccaggcgcatcttgcggcggcttcgttgcgcgaactggatctttcggttgaaaccgcagaaatagagctgccggaactggatgtcctgcgcaataacgccaccgaatttcgcgcggtgaatatcgcccgtttccttgataatgaagaaaactggccgctgttacttgatgcacttattcctgtcgccaatacctgcgaaatgatcctgatgcccgcctgcttcggcctggccgatgacaaactgtggcgttggttgaatgaaaaactaccttgttcactgatgcttttgccaacgctgccgccttccgtgctgggcattcgtctgcaaaaccagttacagcgccagtttgtgcgccaaggtggagtgtggatgccgggcgatgaagtgaaaaaagtgacctgtaaaaatggcgtagtgaatgaaatctggacccgcaatcacgccgatattccgctacgtccacgtttcgcggttctcgccagcggcagtttctttagtggcggactggtagcggaacgtaacggcattcgcgagccgattctcggccttgatgtgctacaaaccgccacgcggggtgaatggtataagggcgatttttttgcgccgcaaccgtggcagcagttcggtgtaaccactgatgagacgctacgcccgtcgcaggcagggcaaaccattgagaacctgtttgccatcggttcggtgctgggcggatttgatcccatcgcccagggatgcggcggcggtgtttgtgccgtcagtgctttacatgccgctcaacagattgcccaacgcgcaggaggccaacaatga

SEQ ID NO: 473137 - DNA, 1191 bp, Shigella flexneri
atgaacgacaccagcttcgaaaactgcattaagtgcaccgtctgcaccaccgcctgcccggtgagccgggtgaatcccggttatccagggccaaaacaagccgggccggatggcgagcgtctgcgtttgaaagatggcgcactgtatgacgaggcgctgaaatattgcatcaactgcaaacgttgtgaagtcgcctgcccgtccgatgtgaagattggcgatattatccagcgcgcgcgggcgaaatatgacaccacgcgcccgtcgctgcgtaattttgtgttgagtcataccgacctgatgggtagcgtttccacgccgttcgcaccaatcgtcaacaccgctacctcgctgaaaccggtgcggcagctgcttgatgcggcgttaaaaatcgatcatcgtcgcacgctaccgaaatactccttcggcacgttccgtcgctggtatcgcagcatagcggctcagcaagcacaatataaagaccaggtcgctttctttcacggctgcttcgttaactacaaccatccgcagttaggtaaagatttaattaaagtgctcaacgcaatgggtaccggtgtacaactgctcagcaaagaaaaatgctgcggcgtaccgctaatcgccaacggctttaccgataaagcacgcaaacaggcaattacgaatgtagagtcgatccgcgaagctgtgggagtaaaaggcattccggtgattgccacctcctcaacctgtacatttgccctgcgcgacgaatacccggaagtgctgaatgtcgacaacaaaggcttgcgcgatcatatcgaactggcaacccgctggctgtggcgcaagctggacgaaggcaaaacgttaccgctgaaaccgctgccgctgaaagtggtttatcacactccgtgccatatggaaaaaatgggctggacgctctacaccctggagctgttgcgtaacatcccggggcttgagttaacggtgctggattcccagtgctgcggtattgcgggtacttacggtttcaaaaaagagaactaccccacctcacaagccatcggcgcaccactgttccgccagatagaagaaagcggcgcagatctggtggtcaccgactgcgaaacctgtaaatggcagattgagatgtccacaagtcttcgctgcgaacatccgattacgctactggcccaggcgctggcttaa

SEQ ID NO: 473138 - DNA, 951 bp, Shigella flexneri
atgaccgaatcaacaacctcctccccgcatgatgcggtatttaaaacctttatattcacacccgaaaccgcacgggattttctcgaaatacatttaccagaaccactgcgcaagctttgcaacctgcaaaccttacgcctggaacccactagttttattgaaaaaagtttacgcgcttactactcggatgttttgtggtccgtggaaaccagcgacggtgacggctatatctactgcgtgattgaacatcaaagctctgcagaaaagaatatggcttttcggccaatgcgctatgccactgccgccatgcagagtcacctagataaaggctatgacagagttccgctggtggtgccattgctgttttatcatggcgaaacatcgccctacccgtactcacttaactggctggatgagtttgacgatccgcaacttgcccggcagttgtacaccgaagcttttccgttggtggatatcaccatcgtacctgacgatgagatcatgcaacatcggcgtatagctctgctggaactgattcaaaagcatattcgcgaccacgatttaatcggcatggtcgacaggatcaccacgcttttggttagaggcttcactaatgacagccagctacaaacactgtttaattatctgctgcaatgcggcgatacctcccgtttcacccgttttattcaggagattgccgaacgttcaccactacaaaaggagagattaatgactattgctgaacggctacggcaggaaggacatcaaattggctggcaagaaggtaaattagtaggtttgcagcaaggtaaattagaaggtttgcaggaaggtatgcatgaacaagccattaaaattgctttgcgcatgctggaacagggcattgatcgtgaccaagtgctcgcggccacccagctaagcgaagccgatctggcagcgaataaccactaa

SEQ ID NO: 473139 - DNA, 390 bp, Shigella flexneri
atggcgcaagtcaacgattcgctttgtctgttagtgcaggtggaaagtaaaacggcactggataacctggacgagatcctcgacgtcgaagggattgatggcgtgtttattggaccagcggatctttctgcgtcgttgggctacccggataacgccgggcacccggaagtgcagcgaattattgaaaccagcattcggcggatccgtgctgcgggtaaagcggctggttttctggctgtggctcctgatatggcgcagcaatgcctggcgtggggagcgaactttgtcgctgttggcgttgacacgatgctctacagcgatgccctggatcaacgactggcgatgtttaaatcaggcaaaaatgggccacgcataaaaggtagttattga

SEQ ID NO: 473140 - DNA, 1203 bp, Shigella flexneri
atgttaaaagtggaaatgctatccaccggggatgaagtgttatacgggcaaatcgttgacactaacgctgcctggctggccgattttttctttcatcaggggctgccattatctcgccgcaatacggtgggggataaccttgatgacttagtcaccattcttcgcgaacgtagtcagcacgccgatgtgctgatcgttaacggcgggctgggaccgaccagcgatgatttaagcgcactcgccgctgcgacagcaaaaggtgaaggcctggtgctgcatgaagcctggctcaaagagatggaacgctatttccacgaacgtggacgagtaatggcaccgagcaaccgtaaacaagcggagctgcctgccagtgctgaatttatcaataacccggtaggcaccgcctgtggttttgccgtgcagcttaatcgttgcctgatgttctttactcccggcgtaccgtcagaatttaaggtgatggtcgagcacgaaatcctgccgcgcctgcgcgagcgtttttctttaccacagccgccggtttgtctgcgtttaactacctttggtcgttcggaaagcgatctggcacaaagcctggacactctacaactgccgccgggcgtaacaatgggctatcgctcctcaatgccgatcatcgaactgaaactcaccggaccggcaagcgagcaacaggcgatggaaaaactgtggctggacgttaaacgtgttgccggacagagcgtgattttcgaaggcaccgaaggactgcccgcgcagatcagtcgcgaattgcaaaaccgccagttcagcctgacgttgagcgagcaattcaccggtggtttattggctttgcaactttctcgcgcaggtgctccattgctggcgtgtgaagtgattccttcacaggaagaaaccctggcgcaaactgcgcactggattacagaacggcgggccaaccattttgccgggctggcactggctgtttcgggtttcgagaacgagcatctcaactttgcgctagccacgccagacggcactttcgctctgcgtgtgcgtttcagcactacacgctacagcctggctatccgtcaggaagtgtgcgcaatgatggcactgaatatgctacgccgttggttaaacggccaggacatcgctagtgagcatggctggattgaggttgttgagtccatgactttatccgtctga

SEQ ID NO: 473141 - DNA, 543 bp, Shigella flexneri
atgaaaaaaattgcgctagcaggtctggccggaatgctgttggtttctgcatcggtcaatgcaatgagcatcagcggccaggcgggtaaagaatacaccaatattggtgtcggttttgggactgaatcgacgggcctggctttaagcggtaactggacacataacgacgacgacggtgacgtcgcgggcgtggggctggggttgaatctgcctctcgggccgttaatggcgaccgttggcggaaaaggcgtgtacaccaacccgaattacggcgatgaaggttatgccgcagcggtaggaggtggtttgcagtggaaaattggcaacagcttccgtttgtttggcgagtattactactctccggattcgctctccagcggtattcaaagttatgaggaagcgaatgctggcgcgcgttacaccattatgcgtccagtcagtattgaggcgggttatcgctacctgaatctgtcgggtaaagacggtaaccgcgacaacgctgtggctgacggcctgtatgttggggttaacgccagtttctga

SEQ ID NO: 473142 - DNA, 426 bp, Shigella flexneri
gtgcgacaacggactattgtatgccctttgattcaaaatgatggtgcttatttgctgtgcaaaatggccgacgatcgcggcgttttccccggtcaatgggcgctttcgggtggcggcgtggagtctggcgaacgaattgaagaggcactacgccgcgaaattcgcgaagaactgggagaacagctgcttttgacagaaatcacgccgtggaccttcagcgatgatattcgcaccaagacatatgcagatggtcgcaaggaagagatttatatgatttacctgatttttgactgcgtttctgccaaccgagaagtgaaaataaacgaagagtttcaggactacgcgtgggtaaaacctgaagatctggtgcattatgatttaaatgttgccacccgaaaaacgttacgtttgaaaggtcttctttaa

SEQ ID NO: 473143 - DNA, 603 bp, Shigella flexneri
gtgttagctttttgccgctcatcattgaagtcaaaaaaatatttcatcattttactggcgctcgctgcaattgccggactgggtactcatgccgcctggagtagcaatggtttgccacgtatcgacaataaaacattggccagactggcacagcagcacccggttgtcgttttgtttcgccatgctgaacgttgcgatcgttcaaccaatcaatgcttgtcagataaaacaggtattacggttaaaggtacccaggatgcccgtgaactgggcaacgcttttagcgctgacatccctgatttcgatctttattccagtaataccgtccggaccattcagtcggcgacctggttttccgcgggtaaaaagctgacggtagataaacgacttcttcagtgcggtaatgagatttatagtgcaattaaggacttacaaagcaaagcgcctgataaaaatatcgttattttcacccataatcattgcctgacatatattgctaaaaataagcgtgatgcgatatttaaacctgattatctggatggtttagtcatgcatgtggaaaaaggcaaagtttatctggatggggaattcgttaaccactaa

SEQ ID NO: 473144 - DNA, 1044 bp, Shigella flexneri
atgagcgtaatgtttgatccagacacggcgatttatcctttccccccgaagccgacgccgttaagcattgatgaaaaagcgtattaccgcgagaagataaaacgtctgctaaaagaacgtaatgcggtgatggttgcccactactataccgatcccgaaattcaacaactggcagaagaaaccggtggctgtatttctgattctctggaaatggcgcgcttcggtgcaaagcatcccgcttctactttgttagtcgctggggtgagatttatgggagaaaccgccaaaattctcagtccggaaaaaacaattctgatgccgacacttcaggttgagtgttcactggatctcggctgccctgttgaagaatttaacgcattttacgatgcccatcccgatcgtactgtcgtcgtctacgccaacacttctgctgcggtaaaagcgcgcgcagattgggtggtaacttcaagcattgccgtcgaacttattgatcatcttgatagtttgggtgaaaaaatcatctgggcacccgacaaacatctggggcgttacgtgcaaaaacagacgggtggagacattttatgctggcagggtgcctgcattgtgcatgatgaatttaagactcaggcgttaacccgcttgcaagaagaatacccggatgctgccatactggtgcatccagaatcaccacaagctattgtcgatatggcggatgcggtcggttccaccagtcaactgatcgctgctgcaaaagcattgcctcatcagaggcttattgtggcaaccgatcggggtattttctacaaaatgcagcaggcggtgccagataaagagttactggaagcaccaaccgcgggtgagggcgcaacctgccgcagctgcgcgcattgtccgtggatggccatgaatgaccttcaggctatcgcagaggcattagaacaggaaggaagtaatcacgaggttcatgtcgatgagaggctgcgagagagggcgctggtgccgctcaatcgtatgctggattttgcggctacactacgtggataa

SEQ ID NO: 473145 - DNA, 720 bp, Shigella flexneri
atggatttttttagtgtgcagaatatcctggtacatataccaataggggcgggcggttatgatctctcatggatcgaagcggtaggcacgatcgccgggttgctgtgtattggccttgccagtctggagaagatcagcaactacttctttggcctgatcaacgttaccttgtttggcattattttctttcagattcagctgtatgccagcctgctattacaggtgtttttctttgccgcgaatatttacggctggtatgcgtggtcgcgacaaaccagtcagaacgaggcggagttgaaaattcgctggttgccattgccgaaggcactcagctggttggcggtttgcgttgtttcgattggtctgatgacggtatttatcaatccggtgtttgcatttttgacccgcgtggcagtcatgatcatgcaagcattaggattacaggttgtgatgcctgaactgcaaccggacgctttcccgttctgggattcatgcatgatggtgttatctatcgtggcaatgattctgatgacgcgtaagtatgtggaaaactggctgttgtgggtgattattaacgtgattagcgtcgttatttttgcacttcagggcgtttacgccatgtctctggagtacatcatcctgacctttattgcgctcaacggcagccggatgtggatcaacagcgcacgtgaaagaggctcacgcgcgctgtcccattaa

SEQ ID NO: 473146 - DNA, 942 bp, Shigella flexneri
atggcgcactcacactcacacacgtcctcacacctgccagaagataataatgctcgtcgcttgttgtatgctttcggcgtgactgccgggtttatgctggtagaagtcgttggtggttttctttctggttctctggcattgctggccgatgcgggtcatatgttgaccgatactgccgccctgcttttcgccctactcgccgtgcaattttcacgtcgtcctcccaccattcgccacactttcggttggctaagactgaccacgctcgcggcgtttgtgaatgccatcgccctcgtggtaattaccattttgattgtctgggaggcgatagaacgcttccgcacgccgcgtccggtcgagggaggcatgatgatggcaattgccgtggctgggttgctggcaaatatactttctttctggttacttcatcacggcagcgaagagaaaaacctcaacgtacgagcagcggcactgcatgtgctcggggacctgctgggttcggttggggctattattgccgcgttgattattatctggactggctggacacctgctgaccccattctctcgatactggtgtcgcttctggttctgcgtagcgcgtggcgactgttgaaagatagcgtgaatgaattacttgaaggtgcaccggtatcgctggatatcgctgaactgaagcgtcgtatgtgccgggaaatcccggaagtccgcaatgtgcaccatgtacatgtatggatggtaggcgagaagccggtgatgacgttgcatgtgcaggtgatcccgccacacgatcacgatgccttgttggatcagatccaacactacctgatggatcactatcagattgagcacaccaccattcagatggaatatcaaccttgtcataggccagactgccacctgaatgaaggggtgtctggccattcacatcatcaccattaa

SEQ ID NO: 473147 - DNA, 381 bp, Shigella flexneri
atgaaaatgacaaaactggccacattatttctgactgccactctaagccttgccagcggtgccgcactggctgccgatagcggagcgcaaactaataacggccaggcaaacgccgcagctgatgcgggccaggtagcccctgacgcccgtgaaaatgtcgcgccaaataacgtcgacaataacggggtaaataccggttctggcggcacaatgctgcattcggatggttcttcaatgaacaatgacggaatgaccaaagatgaagagcacaagaacaccatgtgcaaagatggtcgatgtccggatatcaataaaaaggtacaaaccggtgatggcatcaataatgatgtcgataccaaaaccgacggtaccacgcagtaa

SEQ ID NO: 473148 - DNA, 1053 bp, Shigella flexneri
atgaattatcagaacgacgatttacgcatcaaagaaatcaaagagttacttcctcctgtcgcattgctggaaaaattccccgcaactgaaaatgccgcgaatacggttgcccatgcccgaaaagcgatccataagatcctgaaaggtaatgatgatcgcctgttggtggtgattggcccgtgctcaattcatgatcctgtcgcggctaaagagtatgccactcgcttgctggcgctgcgtgaagagctgaaagatgagctggaaatcgtaatgcgcgtctattttgaaaagccgcgtaccacggtgggctggaaagggttgattaacgatccgcatatggataacagcttccagatcaacgacggtctgcgtatagcccgtaaattgctgcttgatattaacgacagcggtctgccagcggcgggtgagtttctcgatatgatcactcctcagtatctcgctgacctgatgagctggggcgcaattggtgcacgtaccacggaatcgcaggtgcaccgcgaactggcgtctggtctttcttgtccggtaggttttaaaaatggcacagacggtacgattaaagtggctatcgatgccattaatgccgccggtgcgccgcactgcttcctgtccgtaactaaatgggggcattcggcgattgtgaataccagtggtaacggcgattgccatatcattctgcgcggcggtaaagagcctaactacagcgcgaagcacgttgctgaagtgaaagaagggctgaacaaagcaggtctgccagctcaggtgatgatcgatttcagccatgctaattcgtccaaacaattcaaaaagcagatggatgtttgtgctaacgtttgccagcagattgccggtggcgaaaaggccattattggcgtgatggtggaaagccatctggtggaaggcaatcagagcctcgatagcggggagccgctggcctacggtaagagcatcaccgatgcctgcattggctgggaagataccgatgctctgttacgtcaactggtgaatgcagtaaaagcgcgtcgcgggtaa

SEQ ID NO: 473149 - DNA, 753 bp, Shigella flexneri
atggctgtaactaagctggttctggttcgtcatggcgaaagtcagtggaacaaagaaaaccgtttcaccggttggtacgacgtggatctgtctgagaaaggcgtaagcgaagcaaaagcagcaggtaagctgctgaaagaggaaggttacagctttgactttgcttacacttctgtgctgaaacgcgctatccataccctgtggaatgtgctggacgaactggatcaggcatggctgcccgttgagaaatcctggaaactgaacgaacgtcactacggtgcgttgcagggtctgaacaaagcggaaactgctgaaaagtatggcgacgagcaggtgaaacagtggcgtcgtggttttgcagtgactccgccggaactgactaaagatgatgagcgttatccgggtcacgatccgcgttacgcgaaactgagcgagaaagaattgccgctgacggaaagcctggcgctgaccattgaccgcgtgatcccttactggaatgaaaccattctgccgcgtatgaagagcggtgagcgcgtaatcatcgccgcacacggtaactccctgcgtgcgctggtgaaatatcttgataacatgagcgaagaagagattcttgagctgaatatcccgactggcgtgccgctggtgtatgagttcgacgagaatttcaaaccgctgaaacgctattatctgggtaatgctgacgagatcgcggcgaaagcagcagccgttgcgaaccagggtaaagcgaagtaa

SEQ ID NO: 473150 - DNA, 1041 bp, Shigella flexneri
gtgctgaacgaaactcccgcactggcacccgatggtcagccgtaccgactgttaactttgcgtaacaacgcagggatggtagtcacgctgatggactggggtgcgactttactttccgcccgtattccgctttccgatggcagcgtccgcgaggcgctgctcggctgtgccagtccggaatgctatcaggatcaggctgcgtttctgggggcctctattggtcgttatgccaaccgcatcgccaatagtcgctatacctttgacggtgaaaccgtgacgctttcgccaagccagggcgttaaccagctgcacggcggcccggaagggttcgacaaacgtcgctggcagattgtgaaccagaacgatcgtcaggtgctgtttgccctgagttcagatgatggcgatcagggcttcccgggtaatctcggcgcgacggtgcaatatcgtctgaccgacgataaccgtatctccattacttatcgcgccacagttgataaaccttgcccggtgaatatgactaatcacgtctatttcaatcttgacggcgagcagtctgacgtgcgcaatcacaagttgcagattctggcggacgaatatcttccggttgatgaaggcggcattccgcacgacggcttgaaatctgtcgccggaacgtcttttgatttccgcagcgccaaaatcatcgccagtgagtttcttgccgacgacgatcagcgcaaagtgaaaggttacgatcacgcattcttgttacaggccaaaggcgatggcaagaaagtggcggcgcatgtctggtcagcagatgaaaaattgcagctgaaggtctacaccaccgctccggctcttcaattctactccggcaacttcctcggcggcacaccgtcgcggggaaccgaaccttacgccgactggcaagggctggcgttggaaagcgagtttctgccggacagcccgaaccaccctgaatggccgcaaccggactgcttcctgcgtcctggcgaagagtattccagcctgacggaatatcagtttattgctgagtaa

SEQ ID NO: 473151 - DNA, 1149 bp, Shigella flexneri
atgagtctgaaagaaaaaacacaatctctgtttgccaacgcatttggctaccctgccactcacaccattcaggcgcctggccgcgtgaatttgattggtgaacacaccgactacaacgacggtttcgttctgccctgcgcgattgattatcaaaccgtgatcagctgtgcaccacgcgatgaccgtaaagttcgcgtgatggcagccgattatgaaaatcagctcgacgagttttccctcaatgcgcccattgtcgcgcatgaaaactatcaatgggcgaactacgttcgtggcgtggtgaaacatctgcaactgcgtaacaacagcttcggcggtgtggacatggtgatcagcggcaatgtgccgcagggtgccgggttaagttcttccgcttcactggaagtcgcggtcggaaccgtattgcagcagctttatcatctgccgctggacggcgcacaaatcgcgcttaacggtcaggaagcagaaaaccagtttgttggctgtaactgcgggatcatggatcagctaatttccgcactcggcaagaaagatcatgccttgctgattgactgccgctcactggggactaaagcagtttccatgccgaaaggtgtggctgtcgtcatcatcaacagtaacttcaaacgtaccctggttggcagcgaatacaacacccgtcgtgaacagtgcgaaaccggtgcgcgtttcttccagcagccagctctgcgcgatgtcaccattgaagagttcaacgctgttgcacatgagctggacccaatcgtggcgaaacgcgtgcgtcatatcctgactgaaaacgcccgcaccgttgaagctgccagcgcgctggagcaaggcgacctgaaacgtatgggcgagttgatggccgagtctcatgcctctatgcgcgatgatttcgaaatcaccgtgccgcaaattgacactctggtagaaatcgtcaaagctgtgattggcgacaaaggtggcgtacgcatgaccggcggcggatttggcggctgtatcgtcgcgctgatcccggaagagctggtgcctgccgtacagcaagctgtcgctgaacaatatgaagcaaaaacaggtattaaagagactttttacgtttgtaaaccatcacaaggagcaggacagtgctga

SEQ ID NO: 473152 - DNA, 1047 bp, Shigella flexneri
atgacgcaatttaatctcgttgatcatccacatcgccgctacaacccgctcaccgggcaatggattctggtttcaccgcaccgcgctaagcgcccctggcagggggcgcaggaaacgccagccaaacaggtgttacctgcgcacgatccagattgcttcctctgcgcaggtaatgtgcgggtgacaggcgataaaaaccccgattacaccgggacttacgttttcactaatgactttgcggccttgatgtctgacacgccagatgcgccagaaagcaacgatcctttgatgcgttgccagagcgcgcgcggtaccagccgggtgatctgcttttcaccggatcacagtaaaacgttgccagaactgagcgttgcggcattgacggaaatcgtcaaaacctggcaggagcaaaccgcagagctgggaaaaacgtacccgtgggtgcaggtctttgaaaacaaaggtgcggcgatgggctgctctaacccgcatccgcacggacagatttgggcaaatagcttcctgcctaacgaagctgagcgcgaagaccgcctgcaaaaagaatattttgccgaacagaaatcaccaatgctggtggattatgttcagcgcgagctggcagacggtagccgtaccgttgtcgaaaccgaacactggttagccgttgtgccttactgggctgcctggccgttcgaaacgctactgctgcccaaagcccacgttttgcggatcaccgatttgaccgacgcccagcgcagcgatttggcgctggcgttgaaaaagctgaccagtcgttatgacaacctcttccagtgctccttcccctactctatgggctggcacggcgcaccatttaatggcgaagagaatcaacactggcagctgcacgcgcacttttatccgcctctgctgcgctccgccaccgtacgtaaatttatggttggttatgaaatgctggcagagacccagcgagacctgaccgcagaacaggcagcagagcgtttgcgcgcagtcagcgatatccattttcgcgaatccggagtgtaa

SEQ ID NO: 473153 - DNA, 1017 bp, Shigella flexneri
atgagagttctggttaccggtggtagcggttacattggaagtcatacctgcgtgcaattactgcaaaacggtcatgatgtcatcattcttgataacctctgtaacagtaagcgcagcgtactgcctgttatcgagcgtttaggcggcaaacatccaacgtttgttgaaggcgatattcgtaacgaagcgttgatgaccgagatcctgcacgatcacgctatcgacaccgtgatccacttcgccgggctgaaagccgtcgccgaatcggtacaaaaaccgctggaatattacgacaacaatgtcaacggcactctgcgcctgattagcgccatgcgcgccgctaacgtcaaaaactttatttttagctcctccgccaccgtttatggcgatcagccccaaattccatacgttgaaagcttcccgaccggcacaccgcaaagcccttatggcaaaagcaaattgatggtggaacagatcctcaccgacctgcaaaaagcccagccggactggagcattgccctgctgcgctacttcaacccggttggcgcgcatccgtcgggcgatatgggcgaagatccgcaaggcattccgaataacctgatgccatacatcgcccaagttgctgtaggccgtcgcgactcgctggcgatttttggtaacgattatccgaccgaagatggtactggcgtacgcgattacatccacgtaatggatctggcggacggtcacgtcgtggcgatggaaaaactggcgaacaagccaggcgtacacatctacaacctcggtgctggcgtaggcagcagcgtgctggacgtggttaatgccttcagcaaagcctgcggcaaaccggttaactatcattttgcaccgcgtcgcgaaggcgaccttccggcctactgggcggacgccagcaaagccgaccgtgaactgaactggcgcgtaacgcgcacactcgatgaaatggcgcaggacacctggcactggcagtcacgccatccacagggatatcccgattaa

SEQ ID NO: 473154 - DNA, 1473 bp, Shigella flexneri
atgtcatcgttgcaaattttgcaaggcacgtttcgtcttagcgacacaaaaacgctgcaattgcctcagctaacgttaaacgcgggtgatagttgggcgtttgtcggttcgaatggaagtggaaagtcggcgctggcccgcgcgctggcgggggaacttccgcttttgaaaggtgaacggcaaagccagttttcccacatcactcgtctctccttcgagcaattgcaaaagctcgtcagcgacgaatggcaacggaataacaccgatatgctcggccctagcgaagattacaccggacgcactatggctgagattattcaggatgaagtaaaggatgcaccgcgttgcatgcaactggcgcagcagttcggtattaccgccctcctcgaccgacgctttaaatacctttccactggcgagacgcgaaaaaccctgctgtgtcaggcgctgatgtcggagcctgacttgttgattcttgatgagccgttcgatggcctggatgttgcctcacgtcagcagctggctgagcgactcgcctcgttacatcagtccggtattactttggtactggtgctcaatcgcttcgataagatcccggaatttgtccagtttgctggcgtgctggcggattgtacgttagcggaaactggcgctaaagaggaactgctccagcaagcactcgtcgcgcaacttgcgcatagtgaacagcttgaaggtgtgcaactgccggagccggatgaaccttcagcacgtcacgccttacccgccaacgaatcgcgcattgtgctgaacaatggcgtggtttcttataatgatcgccccattcttaataaccttagctggcaggtgaatccaggcgaacactggcaaattgtcgggccaaatggcgcgggaaaatcgacgttattaagcctgattactggcgatcatccgcaaggttacagcaacgatttgacgcttttcggccgacgtcgcggcagcagcgaaaccatctgggacatcaaaaagcatatcggttacgtcagcagtagtttgcatctggattaccgggtcagcactaccgtgcgtaatgtgattctttctggctattttgattcgattggcatttatcaggtcgtttcggatcgccagcaaaaactggtgcagcagtggctggatattctcggcattgataaacacacggctgacgctccgttccatagtctttcctggggacagcagcgtctggcgctgatcgtccgcgcactggtgaaacatccgacgttgcttattctcgatgaaccactacaggggcttgatccgctcaatcgccaacttatccgccgttttgttgatgtgctgattagcgaaggtgaaacgcaattgttgtttgtttcgcaccacgctgaagatgcgcctgcctgtattacccatcgccttgagttcgtgccggacggtggactctatcgctatgtgctgacaaaaatatattga

SEQ ID NO: 473155 - DNA, 789 bp, Shigella flexneri
atgcaggccgaaatccttctcacccttaagctccaacaaaaattattcgccgacccgcgccgcatttcgctactaaaacacattgcgctttccggttccattagccagggagcgaaagatgccggtatcagctataaaagcgcctgggatgccattaacgagatgaatcagttaagtgagcatattctggtcgagcgcgcaacaggcggtaaaggtggcggaggcgcagtactgacccgctatggtcagcgactgattcagctctatgacttactggcgcaaatccagcaaaaagcctttgatgtgttaagtgacgatgacgccctgccgctgaacagcctgctggccgcgatctcacgtttttcactgcaaaccagcgcccgtaaccagtggttcggtaccatcaccgcccgcgatcatgatgacgttcaacagcatgttgatgtcttactggctgacggaaaaacacgcctgaaagtcgcaattaccgcacaaagcggcgcacgtctggggctggatgaaggcaaagaagtgttgatattgctaaaagcgccgtgggtaggcattactcaggacgaagcggtcgcacaaaacgccgacaaccaattaccgggtattattagtcatattgagcgcggcgcagagcagtgcgaagtattaatggcgctacccgacgggcaaacactgtgcgccacagtgccggtaaatgaagcgacttctcttcagcaagggcagaatgtcacggcctactttaatgccgacagcgtgattatcgccacgctgtgctaa

SEQ ID NO: 473156 - DNA, 150 bp, Shigella flexneri; identical to SEQ ID NO: 261810

SEQ ID NO: 473157 - DNA, 774 bp, Shigella flexneri
atggctcgtaaatggttgaacttgtttgccggggcggcactctctttcgcagttgctggcaatgcactggcagatgaagggaaaatcacggtgttcgccgccgcatcactgactaacgcaatgcaggacattgctacgcagtataaaaaagagaaaggcgtggatgtggtttcttctttcgcttcgtcatctactctcgcccgtcagattgaagcgggtgcccctgcggatctgtttatttctgccgatcagaaatggatggattatgcggttgataaaaaagcgatcgatactgctacgcgtcagacactgctcggcaatagcctggtcgttgtagcaccgaaagccagcgagcagaaagatttcaccatcgacagcaaaactaactggacttcgctgctgaatggcggtcgcctggcggttggcgatccggaacatgttcccgctggcatttatgcaaaagaagcactgcaaaaactgggcgcatgggatacgctctctccgaaactggccccagcggaagatgttcgtggggcgctggcgctggtcgaacgtaacgaagcgcctctgggcattgtctacggttctgacgcagttgccagcaaaggggtaaaagtggttgccaccttcccggaagattcacataaaaaagtggaatatccggttgctgttgtggaagggcataacaatgcgacagtgaaagcattttatgattatctgaagggaccgcaggcagcggaaatctttaaacgttacggatttacaaccaagtaa

SEQ ID NO: 473158 - DNA, 690 bp, Shigella flexneri
atgatactgaccgatccagaatggcaggcagttttattaagcctgaaagtttcttccctggctgtgctgtttagcctgccgtttgggatcttttttgcctggttactggtgcgttgcacgtttccgggcaaagctctgctcgacagcgtactgcatctaccgctggtgttaccgcccgtggtcgtcggttacttattattagtttcgatgggacggcgcggatttatcggtgaacgtctgtatgactggtttggtattaccttcgcctttagctggcgcggcgcggttctcgctgccgccgtcatgtcgtttccgctgatggtgcgggcaattcgtctggcgctggaaggggttgatgtcaaactggaacaggccgcaagaacactaggtgccgggcgctggcgcgttttctttactatcacgttaccgctgaccttaccgggaattattgttggtacggtactggcttttgctcgttctctcggtgagtttggtgcaaccatcacctttgtgtcgaacattcctagcgaaacgcgaaccattccttctgccatgtataccctgatccagacccccggcggggaaagtggcgcggcgagactgtgcattatttctattgcgctggcgatgatctccctgttgatttcagaatggctggccagaatcagccgtgaacgggcggggcgctaa

SEQ ID NO: 473159 - DNA, 1059 bp, Shigella flexneri
atgctggagctgaatttttcccagacgttgggcaaccattgcctgaccattaatgaaacgctgcccgccaatggcatcactgctatctttggcgtctccggtgccggaaaaacttcgctgattaacgccatcagtggactgacgcgcccgcaaaaagggcggattgtcctcaatgggcgggtactaaatgatgccgaaaaaggtatctgcctgacgccggaaaagcgtcgtgttggctatgtttttcaggatgcgcggttgttcccgcattacaaagtgcgtggcaatctgcgctacggcatgtcgaaaagtatggtcgatcagttcgataagctggtggcgcttttaggcattgaaccgttgcttgaccgtttaccaggcagcctgtccggaggcgaaaaacagcgcgtggcgattggtcgggctttgctgacagcaccggaattgctgttgctggatgaaccgctggcgtcactggatattccgcgtaaacgcgaactgttgccttatctgcaacggctgacacgggaaatcaacattccgatgttgtatgtcagccattcgctggatgagatcctccatctggcagacagagtgatggtactggaaaacggtcaggtgaaagcctttggcgcgctggaggaagtgtggggcagtagcgtgatgaatccgtggctgccgaaagagcaacaaagtagcattctgaaagtgacggtgcttgagcatcatccgcattacgcgatgaccgcgctggcgctgggcgatcagcatttgtgggtcaataagctgggcgaaccgctgcaagctgcgctacgtatccgcattcaggcttccgatgtttctctggttttacaaccgccgcagcaaaccagcattcgtaacgtattgcgggcaaaagttgttaatagttatgacgacaacggccaggtggaagtggagctggaagtcggcggtaaaacgctgtgggcacgtatcagcccgtgggccagggatgaactggcgatcaaacctggcctgtggctgtacgcgcaaattaaaagtgtgtcgataaccgcctga

SEQ ID NO: 473160 - DNA, 819 bp, Shigella flexneri
atgaccacacgcgtgattgctctcgacttagacggcaccttattgaccccgaaaaagaccttgcttccatcatcgatagaagccctggcccgcgctcgcgaagcaggctatcaattaatcatcgtcacaggtcgccatcacgtcgctattcatcctttttatcaggcgctggcgctggatacacctgctatttgctgtaatggcacctatttgtatgattatcatgcaaaaaccgtgctggaagcggacccaatgcccgttaataaagccctgcaactcattgagatgctgaatgaacaccacattcacggtctgatgtatgtcgatgatgcaatggtctatgagcacccgaccgggcatgtcattcgcacgtctaactgggcgcaaaccctgccgccggaacagcgtccgactttcacacaagtcgcttctctggctgaaacgacgcaacaagttaacgccgtatggaagttcgccctgacgcacgatgacctgccgcaattgcagcattttggtaagcatgtcgaacatgaactgggactggagtgtgaatggtcctggcacgatcaggttgatattgcacacggcggcaacagcaaaggtaaacgtttgacgaaatgggttgaggcgcaaggttggtcgatggaaaacgtcgtggcattcggcgataactttaatgatatcagtatgctggaagccgcaggtacaggcgtggcgatgggcaacgccgatgacgcggtaaaagcgcgcgccaacattgtgattggtgataacaccaccgacagcattgcccagttcatttatagccacctgatttaa

SEQ ID NO: 473161 - DNA, 123 bp, Shigella flexneri; identical to SEQ ID NO: 10480

SEQ ID NO: 473162 - DNA, 567 bp, Shigella flexneri
atgaatatcactgctactgttcttcttgcgtttggtatgtcgatggatgcatttgctgcatcaatcggtaaaggtgcccccctccataaaccgaaattttctgaagcattgcgaaccggccttatttttggtgccgtcgaaaccctgacgccgctgatcggctggggaatgggcatgttagccagccggtttgtccttgaatggaatcactggattgcgtttgtgctgctgatattcctcggcgggcgaatgattattgagggttttcgtggcgcagatgatgaagatgaagagccgcgccgtcggcacggtttctggctactggtaaccaccgcgattgccaccagcctggatgccatggctgtgggtgttggtcttgctttccttcaggtcaacattatcgcgaccgcattggccattggttgtgcaaccttgattatgtcgacattagggatgatggttggtcgctttatcggctcaattattgggaaaaaagcggaaattctcggcgggctggtgctgatcggcatcggcgtccagatcctctggacgcacttccacggttaa

SEQ ID NO: 473163 - DNA, 810 bp, Shigella flexneri
atgtcgttttcctgtccactttgccatcagcctctttcgcgtgaaaaaaacagctatatctgtccccaacgacatcagtttgatatggcgaaagaagggtatgtcaatctgctgcccgttcagcataaacggtctcgtgatccgggcgacagcgcggaaatgatgcaagcacgccgcgcattcttagatgccggacattatcagccgctgcgtgatgcaattgtcgcccaactgcgggaacggcttgatgaaaaggccacggcggtgctggatattggctgtggtgaagggtattacacacacgcatttgccgatgcgttgcccgaaatcaccacgtttggcctggatgtctcgaaggtagcgataaaagcggcggcgaaacgctatccgcaggtcactctttgtgtcgcttccagccaccgtttgccgttttccgataccagtatggacgccataatacgtatttacgcgccgtgtaaagcagaagaattagcacgagtagtgaagcccggcggctgggtcattactgccacgccgggaccgcgacatttgatggagctgaaggggctgatttacaatgaagtacatcttcatgcacctcatgcagaacaactggaaggttttacattacagcagagtgcggagttgtgttatccgatgcgtcttcgcggtgatgaagccgtcgcattattgcagatgacgccgtttgcctggcgtgcgaagccagaagtctggcaaacactggcagcaaaagaagtgttcgactgccagacggactttaatattcacctctggcagcgttcttattaa

SEQ ID NO: 473164 - DNA, 210 bp, Shigella flexneri
atggcaaagattaaaggtcaggttaagtggttcaacgagtctaaaggttttggcttcattactccggctgatggcagcaaagatgtgttcgtacacttctccgctatccagggtaatggcttcaaaactctggctgaaggtcagaacgttgagttcgaaattcaggacggccagaaaggtccggcagctgttaacgtaacagctatctga

SEQ ID NO: 473165 - DNA, 288 bp, Shigella flexneri; identical to SEQ ID NO: 459803

SEQ ID NO: 473166 - DNA, 240 bp, Shigella flexneri
atgcgattcatcattcgcacagttatgctgatagcactggtatggataggattattactcagcggatatggcgttttgattggaagcaaagagaatgccgcaggattaggtttgcaatgtacctatctgactgccagaggcaccagcacggtacaatacttgcacactaaaagtggtttcttggagataacagattgcccactgttacgtaaaagcaatatcgtggtcgataatggttaa

SEQ ID NO: 473167 - DNA, 792 bp, Shigella flexneri
atggctaacgcagatctggataaacagcctgattctgtatcttccgtgctaaaagtttttggcattttgcaggcgctgggtgaagagcgcgaaatagggataaccgagctgtcgcagcgcgtcatgatgtcaaaaagcaccgtttatcgctttttacagaccatgaaaaccttaggttatgtggcgcaggaaggggagtcggagaaatattccctgaccctgaaattgtttgaactgggcgctcgcgcgttacaaaacgtcgatttaattcgtagcgcagatatccagatgcgtgagatctcccgcctgaccaaagaaactatccacctcggcgcactggacgaagacagtattgtttacattcacaaaattgactctatgtacaatttgcgcatgtattcacggattgggcgtcgtaatccgctgtacagcaccgcgattggtaaggtactgctggcatggcgcgatcgcgatgaagtgaagcaaattcttgagggcgtggagtataaacgcagtaccgagcggaccatcaccagtacagaagcgttattacccgttctggaccaggtgcgcgagcaggggtatggagaagataacgaagagcaggaagaagggctgcaatgcattgcggtaccggtatttgatcgctttggcgtggtcattgccggtttgagcatctccttcccgacgttgcgtttctctgaagagcgtttacaggaatatgtcgcaatgttgcataccgcagcgcgcaaaatttctgcccaaatgggttatcacgactatccgttctga

SEQ ID NO: 473168 - DNA, 1374 bp, Shigella flexneri
atgccaaaagttcaggccgacggcctgccattgccccagcgatacggtgcgatattaaccattgtgattggtatttcgatggctgtccttgacggcgcaatcgccaacgtcgccctgccaacaattgccacggaccttcatgccacaccagccagttccatctgggtagtgaacgcctatcaaatcgccattgtcatctccctgctctcgttttcgtttctgggcgatatgtttggctatcgacgtatttataaatgcggtctggtcgtttttctgttgtcttcactgttctgcgccctttctgattcgctgcaaatgctcacccttgcgcgtgtcatacaaggtttcggcggtgcagcgttgatgagcgttaataccgcacttatccgcctgatctatccacaacgttttctggggagagggatgggcataaactcgtttattgttgccgtctcttctgctgccgggccgacaattgctgcagcaatcctctccatcgcatcctggaaatggttatttttaatcaacgtaccgttaggtattatcgccctgcttctggcgatgcgttttctgccacccaatggttctcgcgccagtaaaccccgtttcgacctgcccagcgccgtgatgaacgcgttaaccttcggcctgcttatcactgcgttgagtggtttcgctcaggggcaatcgctgacgttaattgctgcggaactggtggtaatggttgttgttggtattttctttattcgccgccagctttctcttcccgtaccgctgctaccggtggatttactgcgtatcccgctgttttcactttctatttgcacatctgtttgctctttctgcgcacaaatgctggcaatggtttccctgcccttttacctgcaaaccgtgctcgggcgtagtgaagtcgaaacaggtttacttctgacaccgtggccgttagcaacgatggtgatggctccgctggcaggctatttgattgaacgcgtacatgcaggattgctgggtgctttagggttgttcatcatggctacggggcttttttccctggttctgctgcccgcgtcacctgcggatatcaatattatctggccgatgatcttatgtggcgctggatttggcttattccagtcacccaataaccacaccattattacctccgctccgcgcgaacgtagcggtggggccagtggcatgttaggaacggctcgtctactgggtcagagtagtggcgcggcgctggtggcgctgatgctaaatcagtttggtgataatggtacgcacgtctcgctgatggctgcggctattctggcagtgattgctgcctgtgtcagtggtttacgtatcactcagccacgagccagggcataa

SEQ ID NO: 473169 - DNA, 882 bp, Shigella flexneri
atgatgcgaatcgcgctcttcctgctaacgaacctggccgtaatggtcgttttcgggctggtactgagcctgacagggatacagtcgagcagcgttcaggggctgatgatcatggccttgctgttcggttttggtggttccttcgtttcgcttctgatgtccaaatggatggcattacgatctgttggcggggaagtgatcgagcaaccgcgtaacgaaagggaacgttggctggtcaatactgtagcaacccaggctcgtcaggcggggatcgctatgccgcaagtggctatctaccatgcgccggacatcaacgcttttgcaaccggtgcgcgccgtgatgcctctctggttgctgtcagcaccggtttgctgcagaacatgagcccggatgaagccgaggcggtaattgctcacgaaatcagccacatcgccaatggtgatatggtcaccatgacgctgattcagggcgtggtgaacaccttcgttatctttatttcccgtattctggcgcagcttgccgcgggttttatgggcggaaatcgtgatgaaggtgaagagagcaacggcaacccgctgatctactttgcggttgcaacggttctggaactggtgtttggtattctggcgagcattatcaccatgtggttctcgcgtcatcgtgaattccatgctgatgccggttcggcaaaactggttggtcgcgagaaaatgattgccgcgctgcagcgcctgaaaaccagctatgaaccgcaagaagcaaccagcatgatggctttctgcattaacggtaagtcgaaatcgctcagtgagttgttcatgactcacccgccgctggataaacgtattgaagctctgcgtacgggtgaatacctgaagtaa

SEQ ID NO: 473170 - DNA, 2049 bp, Shigella flexneri
atgaacatgttttttaggcttaccgcgttagctggcctgcttgcaatagcaggccagaccttcgctgtagaagatatcacgcgtgctgatcaaattccggtattaaaggaagagacgcagcatgcgacggtaagtgagcgcgtaacgtcgcgcttcacccgttctcattatcgccagttcgacctcgatcaggcattttcggccaaaatctttgaccgctacctgaatctgctcgattacagccacaatgtgctgctggcaagcgatgttgaacagttcgcgaaaaagaaaaccgagttaggcgatgaactgcgttcaggcaaactcgacgttttctacgatctctacaatctggcgcaaaagcgccgttttgaacgttaccagtacgctttgtcggtactggaaaagccgatggatttcaccggcaacgacacttataaccttgaccgcagcaaagcgccctggccgaaaaacgaggctgagttgaacgcgcagtgggacagtaaagtcaaattcgacgagttaagcctgaagctgacaggaaaaacggataaagaaattcgtgaaaccctgacacgccgctacaaatttgccattcgtcgtctggcgcaaaccaacagcgaagatgttttctcgctggcaatgacggcgtttgcgcgtgaaatcgatccgcataccaactatctttccccgcgtaataccgaacagttcaacactgaaatgagtttgtcactggaaggtattggcgcagtgctgcaaatggatgatgactacaccgttatcaattcgatggtggcaggtggtccggcagcgaagagtaaagctatcagcgttggtgacaaaattgtcggtgttggtcaaacaggcaagccgatggttgatgtgattggctggcgtcttgatgatgtggttgccttaattaaagggccgaagggcagtaaagttcgtctggaaattttacctgctggtaaagggaccaagacccgtactgtaacgttgacccgtgaacgtattcgtctcgaagaccgcgcggttaaaatgtcggtgaagaccgtcggtaaagagaaagtcggcgtgctggatattccgggcttctatgtgggtttgacagacgatgtcaaagttcaactgcagaaactggaaaaacagaatgtcagcagtgtgatcatcgacctgcgtagcaatggcggtggggcgttgaccgaagcggtatcgctctcaggtctgtttattcctgcgggtcccattgttcaggtccgcgataacaacggcaaggttcgtgaagacagcgataccgacgggcaggtgttctataaaggcccgctggtggtactggttgaccgtttcagtgcttcggcttcagaaatctttgccgcggcaatgcaggattacggtcgtgcgctggttgtgggtgaaccgacgtttggtaaaggcaccgttcagcaataccgttcattgaaccgtatttacgatcagatgttacgtcctgaatggccagcgctgggttctgtgcagtacacgatccagaaattctatcgcgttaacggcggcagtacgcaacgtaaaggcgtaacaccagacatcatcatgccgacgggtaatgaagaaacggaaacgggtgagaaattcgaagataacgcgctgccgtgggatagcatcgatgccgcgacttatgtgaaatcaggagatttaactgcctttgaaccggagctgctgaaggaacataatgcgcgtatcgcgaaagatcctgagttccagaacatcatgaaggatatcgcgcgcttcaacgctatgaaggacaagcgcaatatcgtttctctgaactacgctgtgcgtgagaaagagaataatgaagatgatgcgacgcgtctggcgcgtttgaacgaacgctttaaacgagaaggtaaaccggagttgaagaagctggatgatctatcgaaagattaccaggagccggatccttatctggatgagacggtgaatatcgcactcgatctggcgaagcttgaaaaagccagacccgcggaacaacccgctcccgtcaagtaa

SEQ ID NO: 473171 - DNA, 699 bp, Shigella flexneri
atggaaaatcaacctaagttgaatagcagtaaagaagtaatcgcgtttctggccgaacgttttccccactgtttcagtgcggaaggtgaagcgcgtccgctgaaaattggtatttttcaggatttggtcgatcgtgttgccggggaaatgaacctgagcaaaacgcaattacgatccgctttacgtctctacacttcgagctggcgttatctttacggtgttaaacccggcgcaacgcgtgtcgatcttgacggcaacccatgcggtgagctggacgagcaacatgtagagcatgctcgcaagcagcttgaagaagcgaaagcgcgtgttcaggcacagcgtgctgaacagcaagcgaaaaaacgcgaagctgccgcagctgctggtgagaaagaagacgcaccgcgccgcgaacgcaagccacgtccgaccacgccacgccgcaaagaaggcgctgaacgtaaacctcgtgcgcaaaagccggtagagaaagcgccaaaaacagtaaaagcacctcgcgaagaacagcacaccccggtttctgacatttcagctctgactgtcggacaagccctgaaggtgaaagcgggtcaaaacgcgatggatgccaccgtattagaaatcaccaaagacggcgtccgcgtccagctgaattcgggtatgtctttgattgtgcgcgcagaacacctggtgttctga

SEQ ID NO: 473172 - DNA, 498 bp, Shigella flexneri
atgaacaaaacagaattttacgcggatttaaatcgcgactttaacgcgctgatggcgggagaaaccagttttctggcaacgcttgcgaacaccagtgcgttgttatacgagcgtctcactgacgttaactgggcaggtttttatttgcttgaggacgatacactggtactcggaccatttcagggcaaaattgcctgtgtccggatacccgtcgggcgcggggtgtgcggcacagcggttgcccgcaatcaagtgcagcgtatcgaggatgttcacgcgtttgacgggcatattgcctgtgatgcggcgagtaattctgaaattgttctgccgctggtggtgaaaaatcagattattggtgttctcgacatcgatagtaccgtcttcgctcgctttacagacgaggacgagcaaggcttacgtcagcttgtggcacagcttgaaaaagtgcttgcaacgacggattacaaaaaattctttgcgagcgtcgcaggataa

SEQ ID NO: 473173 - DNA, 558 bp, Shigella flexneri
atggctcttaacacaccacaaattacgccgacaaaaaagataacagtgagggcaatcggcgaggaactgccgcgtggtgattaccaacgttgcccgcaatgtgacatgctgtttagcctgcccgagataaattctcatcaaagtgcctattgtccgcgctgtcaggcaaaaattcgcgacgggcgcgactggtcgctaacgcgcctggcggcaatggccttcaccatgctgttgcttatgccgtttgcctggggcgaaccgctgttgcatatctggctgttaggcattcgtattgacgccaacgtcatgcaaggcatctggcaaatgaccaaacagggcgatgcgataacgggatcaatggtctttttctgcgttattggtgcccccctcattctggtgtcctccatagcatatttatggtttggtaaccgactgggaatgaatttacgtccggtactgctgatgcttgagcgacttaaagagtgggtaatgctggatatctacctggtcggcattggcgttgcttctataaaggtacaggattatgcccatatctag

SEQ ID NO: 473174 - DNA, 714 bp, Shigella flexneri
ttgttctcttttgtggcgttggtgattttaacgacggtgacgttgtcacatcttaatgttgaggagctgtgggagcgatattatccgcagcgccccgctacgcgtagggacgagaaacttcgtgtctgtcttgggtgccattttaccggctatcctgatcagcgtggtctctgcccgcgttgccatatcccgctacgcctgcgtcgtcgtcatagtttgcaaaaatgctgggcggcgctgttagcgtcaatcgttttgttgttaccagccaacctattgcctatttctatcatttatctgaatggtggccggcaggaagatacgattctttccggaattatgtcgctggcaagtagcaacattgcggttgcgggaatcgtgtttatcgccagtattctggtaccgtttactaaagtgatcgtcatgttcactttactgttgagcattcattttaaatgccagcaaggtttacgcacacgcattctgttactgcggatggtgacctggattggacgctggtcgatgctcgacctgtttgtcatatctttaaccatgtcgctgattaatcgcgatcagatcctcgcttttactatgggaccggctgcgttttattttggcgctgccgtaattttgactattcttgctgtggaatggctggacagccgcttactttgggatgcacatgagtcaggaaacgcccgcttcgacgactga

SEQ ID NO: 473175 - DNA, 666 bp, Shigella flexneri
atgagtcaggaaacgcccgcttcgacgactgaagcgcagattaaaaataaacgccgtatctcacctttctggctgctgcctttcatcgcgctaatgattgccggttggctgatttgggacagttatcaggaccggggtaataccgtcaccatcgactttatgtcggcggatggtattgttccgggccgtacgactgttcgttatcagggcgttgaagtcggaacagtgcaggatatcagcctcagcgacgatcttcgtaagattgaagtcaaggtcagcatcaagtccgatatgaaagatgcgctgcgcgaagagactcagttctggctgatgacgccaaaagcatcgttggcaggtgtctccgggctggacgccctcgtcggtgggaactatatcggcatgatgccgggtaaaggtaaagagcaggatcactttgtcgcgctcgatacccaaccgaaatatcggctggacaatggcgatctgatgatccacctgcaagcccccgctctcggttcgctgaacagcggttcattggtctatttccgcaagatcccggtgggaaaagtctacgactatgccatcaatcccaacaagcaaggcgtggtgattgatgtcctgatcgagcggcgttttaccgatctggtgaaaaaaggtagccgtttctga

SEQ ID NO: 473176 - DNA, 1446 bp, Shigella flexneri
atgctcgtggcccaacacaccgtttatttcccggacgcgtttctgacacaaatgcgcgaagctatgccttcgacgctctcatttgatgattttcttgccgcctgtcagcgcccgttgcgccgcagcattcgcgttaatacgctgaaaatctccgttgctgatttcctgcaattaaccgctccttatggctggacgcttacgccaattccgtggtgtgaagaaggtttctggattgaacgcgacaatgaagatgcattgccattgggtagtaccaccgagcatttaagtggcctgttttatattcaggaagccagttcaatgttgcccgtcgccgccttgtttgctgacggtaatgcaccacagcgggtgatggatgtcgctgctgcgccaggctcaaaaacgacgcaaattgccgcgcggatgaataacgaaggggcaatccttgccaatgagttttccgccagttgggtaaaagtgttacatgccaatatcagccgctgtggcatcagtaatgttgcgctcacacattttggtggccgcgtgtttggtgcggcagtgccagaaatgtttgatgccattttgctggacgctccctgctccggcgaaggcgtggtgcgtaaagatcccgatgcgctaaaaaactggtcacccgaaagcaatcaggaaatcgcagctacccaacgggaactgattgacagcgcctttcatgcattacgtcctggcggtacgctggtttactcgacctgtaccttaaaccgggaagaaaacgaagccgtttgccggtggctgaaagagacttaccccgacgaagtagagtttttaccacttggcgatctcttccctggtgcaaacaaggcgctgaccgaagaaggttttttgcatgttttcccacaaatttacgactgcgaaggcttcttcgttgctcgtctgcgtaaaactcaggcgatccccgccttacccgccccaaaatacaaagtgggcaatttcccgttcagcccggtgaaagatcgcgaagccggacaaattcgtcaggcggctgcaagtgttggcttaaactgggatggaaacctgcgactctggcaacgcgacaaagaactgtggttgttcccggtaggcattgaagccctgatcggtaaagtccgattttctcgcttagggattaaacttgccgaaacgcataacaaaggttatcgctggcagcatgaagcggttattgcccatgcctcccccgacaatgtaaacgcttttgaactgacaccgcaggaagcggaggagtggtatcgcgggcgcgatgtttacccgcaagccgcgccagtggcggatgacgtgttggttactttccagcatcagccgattggtttagccaaacggattggttcgcgactgaaaaacagctacccgcgtgaactggtgcgggacgggaaactttttaccagtaacgcatga

SEQ ID NO: 473177 - DNA, 237 bp, Shigella flexneri
atgaaaaccagtgtgcgcataggcgcttttgaaatcgacgacggcgaattacacggtgaatcgccgggtgatcgaacgttaaccattccttgtaaatctgaccccgatttatgtatgcaactggatgcctgggatgctgaaaccagtatccctgccctgctaaatggcgaacactctgtcctttaccgtacccgttacgatcaacaatctgatgcctggattatgcgtcttgcctga

SEQ ID NO: 473178 - DNA, 276 bp, Shigella flexneri
atggcgggttatttgtcctggttattcccccgttgtaaaatctctcctaaacttaacggtacggcaccacacttcggggatgaaatgttcgcgctggtactttttgtttgctacctagatggcggttgtgaagatattgttgtggatgtctacaacacggaacagcagtgtctttattctatgagcgatcaacggatccgccatggcggttgttttccgattgaggattttatagatggtttctggcgaccagcacaggagtatggtgatttttaa

SEQ ID NO: 473179 - DNA, 225 bp, Shigella flexneri
atgtcgcgtaaaggtaactgttacgacaacgctccgatggaaagcttctggggaacgctgaaaaatgagaacctgagccactatcgttttaataaccgggatgaagccatctcagtaatacgggaatacattgagattttctacaatcgtcagcgtcgtcactctcgtctggggaatatctccccggcagccttcagggaaaaatatcatcagatggctgcttaa

SEQ ID NO: 473180 - DNA, 456 bp, Shigella flexneri
atgcctaatgattacaacccaaacaacgtggcaccacccgaaaaaaaactgctgcaaaaatccattgaaatagatggttttacccaacccattgtggtcacacatacggataaaaatgccatggaaatcgtggatggttttcaccgccatgaaattggtaaaggctcatcatcattaaaattacgcttaaaaggttatttgccggtgacctgtctggaaggtacgcgtaatcaacgcatcgccgcgactattcgtcataatcgcgctcgtggacgccatcaaatcaccgccatgtcggaaatcgtccgtgaacttagccagttgggatgggatgataataaaattggcaaagagctgggaatggacagcgacgaagtgctgcgactgaagcaaattaacggcctgcaagagttgtttgccgaccgtcaatattcccgcgcctggacggttaaatag

SEQ ID NO: 473181 - DNA, 1161 bp, Shigella flexneri
atgacaaataaccctctgattccacaaagcaaacttccacaacttggcaccactattttcacccagatgagcgcgctggcgcagcaacaccaggcgattaacctgtcgcaaggctttcctgattttgatggtccgcgctatttacaggagcggctggcgtaccacgttgcccagggggcaaaccaatacgcgcccatgaccggcgtgcaggccttgcgcgaggcgattgctcagaaaacggaacgtttgtatggctatcaaccagatgccgatagcgatatcaccgtaacggcaggggcgacggaagcgttatacgcggcgattaccgcactggtgcgcaatggcgatgaagtgatttgttttgatcccagctatgacagttacgcccccgccatcgcgctttctgggggaatagtgaagcgtatggcactgcaaccaccgcattttcgcgttgactggcaggaatttgccgcattattaagcgagcgcaccagactggtgatcctcaacactccgcataaccccagtgcaactgtctggcagcaggctgatttcgccgctttgtggcaggcgatcgccgggcacgagatttttgtcattagcgatgaagtctacgagcacatcaacttttcacaacagggccatgccagtgtgctggcgcatccgcagctgcgtgagcgggcagtggcggtttcttcatttggcaagacctatcatatgaccggctggaaagtgggttattgtgttgcgccagcgcccatcagcgccgaaattcgcaaggtacatcagtatctgaccttttcggtgaataccccggcacagctggcgcttgctgatatgctacgtgcagaacctgagcattatcttgcgttaccggacttttatcgccagaagcgcgatattctggtgaatgctttaaatgaaagccggctggagattttaccgtgtgaaggtacatactttttgctggtggattacagcgcggtttctaccctggatgatgttgagttttgccagtggctgacgcaggagcacggcgtagcggcgattccgctgtcggtgttttgcgccgatcccttcccacataaactgattcgtctctgttttgccaagaaggaatcgacgttgctggcagcagctgaacgcctgcgccagctttag

SEQ ID NO: 473182 - DNA, 1089 bp, Shigella flexneri
atgcctcacaatcctatccgcgtggtcgtcggcccggctaactacttttcacatccaggaagtttcaatcacctgcacaattttttcactgatgaacaactttctcgcgcggtgtggatctacggcaaacgcgccattgctgcggcgcaaaccaaacttccgccagcgtttggacttccaggggcaaagcatattttgtttcgtggtcattgcagcgaaagcgatgtacagcaactggcggctgagtccggtgacgatcgcagcgtggtgattggcgtcggcggcggcgcactgctcgacaccgcgaaagccctcgcccgccgtctcggtctgccatttgttgccgctccgacgatcgccgccacctgcgcagcctggacaccgctctccgtctggtataacgatgccggacaggcgctgcattatgagattttcgacgacgccaattttatggtgctggtggaaccggagattatcctcaatgcaccgcaacaatatctgctggcggggatcggtgacacgctggcgaaatggtatgaagcggtggtgctggctccgcaaccagaaacgttgccgctaaccgtgcggctggggatcaataatgcgcaggccattcgcgacgtcttgttaaacagtagcgaacaggcacttgccgatcagcaaaatcagcagttaacgcaatcattttgcgatgtggtggatgctattattgctggtggtgggatggtcggtggtctgggcgatcgttttacgcgtgtggcggcggctcatgccgtgcataacggtctgactgtcctgccgcaaaccgagaagtttcttcacggcaccaaagtcgcttacggaattctggtgcaaagcgccttgctgggtcaggatgatgtgctggcgcaattaaccggggcgtatcagcgttttcatctgccgactacgctggcggagctggaggtggatatcaataatcaggcggagatcgacaaagtgattgcccacaccttgcgcccggtggagtccattcattacctgccagtcacgctgacaccagatacgttgcgtgcagcgttcgaaaaagtggaatcgtttaaagcctga

SEQ ID NO: 473183 - DNA, 198 bp, Shigella flexneri
atgtttgattcactggcaaaagccggaaaatatttaggtcaggcggcgaagctgatgattggtatgcctgattacgacaactatgtcgaacatatgcgggttaatcatcccgatcaaacgccgatgacctacgaggagtttttccgtgagcggcaggacgcgcgctacggtggaaaaggcggcgcgcgctgctgctaa

SEQ ID NO: 473184 - DNA, 2106 bp, Shigella flexneri
atgaacaaatcagggaaatacctcgtctggacagtgctctctgtaatgggagcatttgctctgggatacattgctttaaatcgtggggaacagatcaacgcgctgtggattgtggtggcgtcggtctgtatctatctgatcgcttaccgtttttatgggctgtatatcgccaaaaatgtgctggcggttgacccgacgcgtatgacgccagcggtgcgccataacgacgggctggactatgtgccgacggacaagaaagtgctgttcggtcaccattttgcggccattgccggagcagggccgctggtggggccggtgctggcagcgcaaatgggctacctgccggggatgatctggctgctcgccggggtggttctcgccggtgcggtgcaggatttcatggtgctgtttgtttctacgcgccgtgacggtcgctcgctgggtgagctggtcaaagaagagatggggccaactgccggggtgattgcactggtagcctgctttatgatcatggtcattatccttgcagtactggcgatgatcgtggtgaaagccctgactcatagcccgtggggaacgtataccgttgcgttcaccattccgctggcgatttttatgggaatctacctgcgctatctgcgtccgggccgcattggcgaagtgtcagtgattggcctggtgttcctgattttcgccattatctctggcggctgggtggcagaaagtccgacctgggcaccgtactttgactttaccggcgtgcagctgacctggatgctggtgggctacggttttgtggcggcggtgctgccggtgtggttgctgctggccccgcgtgactatctctcgaccttcctgaaaatcgggactatcgtcggtctggcggtaggcattttgattatgcgcccgacgctgaccatgcctgcgctgaccaaatttgtcgatggcactggcccggtatggaccggtaacctgttcccgttcctgtttatcaccatcgcctgtggtgcggtgtctggcttccatgcgctgatctcttccggcaccacgccgaagatgctggcgaacgaagggcaggcgtgctttatcggctacggtgggatgttgatggaatccttcgtggcgattatggcgctagtttctgcctgtatcatcgatccgggcgtgtattttgccatgaacagcccaatggcggtgctggctccggcagggacggcggatgtagtcgcttctgccgcgcaggtggtgagtagctggggctttagcattacaccagatacgctcaaccagattgccagcgaagtgggtgaacagtcgatcatttcccgtgcgggcggtgcgccgacgttggcggtggggatggcttacatcctgcacggtgcgctgggtggtatgatggatgtggcgttctggtatcacttcgccattctgtttgaagctctgtttattctgacggcggtagatgcgggtacgcgtgctgcgcgctttatgttgcaggatctgctgggcgtggtgtctcctggcctgaagcggaccgattcactgcctgctaacctgctggcaacagcgctgtgcgtactggcgtggggctacttcctccatcagagcgtggtcgatccgctgggcggtattaacactctgtggccgctgtttggtattgccaaccagatgctggcagggatggcgctgatgctctgtgccgtggtgttgttcaagatgaaacgtcaacgttacgcctgggtggcgctggtaccaacggcctggctgctgatttgtaccctgaccgctgactggcagaaagcgtttagcccggatgcgaaagtcggcttcctggccattgctaacaagttccaggcaatgatcgacagcggcaatattccgtcgcagtatactgagtcacagctggcgcaactggtgttcaacaaccgtctggatgccgggttaaccatcttctttatggtggtcgtggtggtcctggcactgttctcgattaagacggcacttgcggcattgaaagatccgaagccaacggcgaaagaaacgccgtatgagccgatgccggaaaatgtcgaggagatcgtagcgcaggcgaaaggcgcgcactaa

SEQ ID NO: 473185 - DNA, 414 bp, Shigella flexneri
atgatctggaaacgccatttaacgctcgacgaactgaacgccaccagcgataacacaatggtggcgcatctgggaattgtgtatacccgtctgggagatgatgtgctggaagccgaaatgccggttgatacccgtactcatcagccgtttggcctgctgcatggcggcgcgtcggcggcgctggctgaaacgctgggatcgatggccggatttatgatgacccgtgacgggcagtgtgtggtgggcacggaacttaacgccacccatcatcgcccggtgtctgaaggcaaggtacgtggcgtctgccagccgctgcatcttgggcggcaaaatcagagctgggaaatcgtcgttttcgatgaacaggggcggcgttgctgcacttgtcggctgggtacggcagttttgggatga

SEQ ID NO: 473186 - DNA, 747 bp, Shigella flexneri
atggatttcagcggtaaaaatgtctgggtaaccggcgcaggtaaaggtatcggctacgccacggcgctggcgtttgttgaggcgggagcgaaagttacaggttttgatcaagcgttcactcaggagcaatatccctttgcgaccgaagtaatggatgttgccgacgccgggcaggtggcgcaggtatgtcagcgactgttagctgaaacggagcgactggacgtgctgatcaatgcggcgggaattttgcgcatgggcgcgaccgatcagctcagtaaagaggactggcagcagacttttgcggttaacgtcggcggtgcgtttaacctgttccagcaaaccatgaaccagtttcgccgtcagcggggcggggcgattgtcactgtggcgtccgacgccgcacacacggcgcgtattggtatgagtgcttatggcgcatcgaaagcggcgctgaaaagcctggcgttgagcgtcgggctggaactggcgggtagcggcgtgcgctgtaatgtggtttcgcttggctccaccgacaccgatatgcaacgcacgctgtgggtgagcgatgacgccgaagaacagcgtattcgcggctttggcgagcagtttaaactcggcattccgctggggaaaatcgcccgtccacaagagatcgccaacacgattttgttcctcgcctctgacctcgccagccatatcaccctacaggatattgtggtcgatggcggctcaacgctgggggcataa

SEQ ID NO: 473187 - DNA, 858 bp, Shigella flexneri
atggctattccaaaattacaggcttacgcactgccggagtctcacgatattccgcagaataaagttgactgggcctttgaaccgcaacgtgccgcgttgttaatccatgatatgcaggactattttgtcagcttctggggcgagaactgcccgatgatggagcaggtgatcgcgaatattgctgcgctgcgcgactactgcaaacagcacaatatcccggtttattacaccgcccagccgaaagagcagagcgatgaagatcgggcgctgttgaatgatatgtgggggccgggcctgacccgctcgccggaacagcaaaaggtggtggatcgcctgacgccagatgccgacgacacggtgctggtgaagtggcgctacagcgcgtttcatcgttctccgctggagcaaatgctcaaagagagtggacgtaaccagctgattattacaggagtatatgcccacattggctgtatgaccaccgcaaccgacgcatttatgcgcgatattaaaccgtttatggtggcggatgcgctggctgatttcagccgtgacgagcatttgatgtcgctgaaatatgtggccggacgttctggccgggtggtgatgaccgaagaattactgccagcacctatccccgccagcaaagcggcgctgcgtgaggtgatcctgccgttgctggacgagtccgatgaaccgttcgatgacgacaacctgatcgactacggtctggattcggtgcgcatgatggcgctggcggcgcgctggcgcaaagtgcatggtgatatcgactttgtcatgctggcgaaaaacccgaccatcgacgcctggtggaagctactctcccgcgaggtgaaataa

SEQ ID NO: 473188 - DNA, 1611 bp, Shigella flexneri
atgagcattccattcacccgctggccggaagagtttgcccgtcgctatcgggaaaaaggctactggcaggatttgccactgaccgacattctgactcgccacgctgcgagtgacagcatcgcggttatcgacggcgagcggcagttgagttatcgggagctgaatcaggcggcggataacctcgcctgtagtttgcgccgtcagggcattaaacctggtgaaaccgcgctggtacaactgggtaacgtcgctgaactttacattacctttttcgcgctgctgaaactgggcgtcgcgccggtgctggcgctgttcagccatcagcgtagtgaactgaacgcctacgccagccagattgaaccggcgttactgattgccgatcgccagcatgcgctatttagcggggatgatttcctcaacacatttgttgcagagcattcttccattcgcgtggtgcaactgcacaacgacagcggtgagcataacttgcaggatgcgattaaccatccggcagagggttttactgccacgccatcacctgctgatgaagtggcctatttccagctttccggcggcaccaccggcacaccgaaactgatcccgcgcactcataacgactattactacagcgtgcgtcgtagcgccgagatttgtcagttcacacaacagacgcgctacctgtgcgcgatcccggcggctcataactacgctatgagttcgccaggatcgctgggcgtctttcttgccggaggaacggttgttctggcggccgatcccagcgccacgctttgcttcccgttgattgcaaaacatcaggttaacgttaccgcgctggtgccgccggcagtcagcctgtggttgcaggcgctggctgaaggcgaaagccgggcgcagctttcctcgctgaaactgttacaggtcggcggcgcacgtctttctgccacgcttgcagcgcgtattcccgctgagattggctgccagttgcagcaggtgtttggcatggcggaagggctggtgaactacacccgtcttgatgatagcgcggagaaaattatccatacccagggttacccaatgtgtccggacgatgaagtgtgggttgccgatgccgaaggaaatccactgccgcaaggggaagttggacgcctgatgacgcgcgggccgtacaccttccgtggctattacaaaagtccgcagcacaatgccagtgcctttgatgccaacggtttttactgttccggcgatctgatctctattgatccagaggggtacatcaccgtgcaggggcgcgagaaagatcagatcaaccgtggcggcgagaagatcgctgccgaagatatcgaaaacctgctgctgagccatccggcagtgatctatgccgcactggtgagcatggaaaatgagctgatgggcgaaaaaagctgtgcttatctggtggtaaaagagccgctgcgcgcggtgcaggtgcgtcgtttcctgcgtgaacagggtattgccgaatttaaattaccggatcgcgtggagtgtgtggattcacttccgctgacggcggtcgggaaagtcgataaaaaacaattacgtcagtggctggcgtcacgcgcatcagcctga

SEQ ID NO: 473189 - DNA, 828 bp, Shigella flexneri
gtggtggaacgccaggcaattcctgaacaaaccacgtttgaacagatgggtgcccgcgccgccgcacttaccgccacgccgcaggtcgacaaagtggtgttgtcacgattgattgatatcaccactgacgccgccattgatagtggcgtattgctggaacggttgattgcgcaaaacccggttagttacaacttccatgtcccgctggctgatggtggcgtcctgctgggggccagcccggaactgctgctacgtaaagacggcgagcgttttagctccattccgttagccggttccgcgcgtcgtcagccggatgaagtgctcgatcgcgaagcgggtaatcgtctgctggcgtcagaaaaagatcgccatgaacatgaactggtgactcaggcgatgaaagaggtactgcgcgaacgcagtagtgagttacacgttccctcctctccacaattgattaccacgccgacgctgtggcatctcgcaactccctttgaaggtaaagcgaattcgcaagaaaacgcactgactctggcctgtctgctgcatccgacccccgcgctgagcggtttcccgcatcaggccgcgacccaggttattgctgaactggagccgttcgaccgcgaactgtttggcggcattgtgggttggtgtgacagcgaaggtaacggcgaatgggtggtgaccatccgctgcgcgaagctgcgggaaaatcaggtgcgtctgtttgccggagcggggattgtgcctgcgtcgtcaccgttgggtgagtggcgcgaaacaggcgtcaaactttctaccatgttgaacgtttttggattgcattaa

SEQ ID NO: 473190 - DNA, 282 bp, Shigella flexneri
atggatacgtcactggctgaggaagtacagcagaccatggcaacacttgcgcccaatcgctttttctttatgtcgccgtaccgcagttttacgacgtcaggatgtttcgcccgtttcgatgaaccggctgtgaacggggattcgcccgacagtcccttccagcaaaaactcgccgcgctgtttgccgatgccaaagcgcagggcatcaaaaatccggtgatggtcggggcgattcccttcgatccacgtcagccttcgtcgctgtatattcccgaatcctag

SEQ ID NO: 473191 - DNA, 957 bp, Shigella flexneri
gtgagactcgccccgctctaccgcaacgcccttctattaacaggacttttgctttcaggaatagccgtagttcaggccgccgactggccgcgtcagattactgacagccggggcactcataccctggaaagccagccgcagcgtattgtttccaccagcgtcaccctgaccggatcactgctggcgattgatgctccggtgatcgccagcggcgcgaccacgccgaataaccgcgtcgcagatgaccagggctttttacgccagtggagcaaggtggcgaaagaacgcaaactgcaacggctctatatcggcgaaccgagcgccgaagccgttgccgcgcaaatgccggatctgattttaattagcgcaaccggcggggattcggcgctggcgctgtatgatcagctttccaccatcgccccgacattaatcatcaattacgacgacaaaagctggcagtcgctgttaacgcagcttggcgaaattaccgggcatgagaaacaagcggcagagcggattgcacagtttgataagcaactggcagcggcgaaagagcaaatcaaattaccgccgcagccggtcactgccattgtctataccgccgctgcacacagtgccaatctctggacgccggaatcagcacaagggcagatgctggaacaactcggctttacgctggcgaaattgcccgcagggttaaacgccagccaaagccagggcaaacgccatgacatcattcagcttggtggggaaaatctggctgcggggttaaacggtgaatcgctattcctgttcgctggtgatcagaaagatgccgatgcgatttatgccaatccactgctcgcgcacctgcctgcggtacaaaacaagcaggtttatgcgctgggaaccgagacgttccgcctggattactacagcgccatgcaagtgctggaacggcttaaggcgctgttttaa

SEQ ID NO: 473192 - DNA, 1233 bp, Shigella flexneri
atgaataaacaatcctggctgcttaacctcagcctgttgaaaacgcacccggcgtttcgcgcagtattcctcgctcgttttatctcaattgtgtctctgggtttgctcggcgtcgcggtgccggtgcagatccagatgatgacccattctacctggcaggtggggctttcggtgacgctgaccggcggcgcgatgtttgttggcctgatggttggcggtgtgctggcggatcgctatgaacgcaaaaaagtgattttgctggcgcgcggcacctgtggcattggcttcattggactgtgccttaatgcactgctgccggagccgtcattgctggcaatctatttacttggtttatgggatggttttttcgcatcacttggtgttacggcgctactggcggcaacatctgcactggtagggcgtgaaaacttaatgcaggccggggcgatcaccatgttgaccgtgcgcctggggtcggtgatttcgcccatgattggcggtttattgctggcgaccggcggcgtagcctggaactacgggctggcggcggcgggcacgtttattaccttgttaccgttattaagccttccggcgttgccaccgccaccgcagccgcttgagcatccgttgaaatcattactggcaggatttcgttttctgcttgccagcccgctgctgggtggtttattgacgatggcgagcgcggtgctggtactgtatccggcgctggctgacaactggcagatgtcagcggcacagattggttttctctacgcggcgatcccgctcggcgcggctattggtgcgttaaccagcgggaagctggcacatagtgcgcgaccagggttattgatgctgctctccacgctgggatcgttcctcgccattggtctgtttggcctgatgccgatgtggattttaggcgtggtttgtctggcgctgttcggctggctgagcgcggttagttcgttgctgcaatatacaatgctgcaaacgcaaaccccggaagcgatgttagggcggattaacggtttgtggacggcgcagaacgtgacgggcgatgccataggcgcggcgctgctgggtggtttgggcgcgatgatgacaccggttgcttccgcaagcgcgagcggttttggtttgttgattatcggcgtgttgttattgctggtgctggtggagttgcgacgttttcgccagacgccgccgcaggtgacagcgtccgacagttaa

SEQ ID NO: 473193 - DNA, 1005 bp, Shigella flexneri
atgtctggttctgttgccgtgacacgcgccattgccgtgcccggattgctgttattactgattatcgcgacggcattaagcctgctcattggggcaaaatcactccccgcttccgtagtgctggaggccttctccggcacctgccagagcgccgactgcaccatcgtgctcgacgcgcggctgccgcgtacccttgccggtttactggcaggcggcgcgcttggccttgccggggcgttaatgcaaaccctcacccgaaacccacttgccgaccccggcttgcttggcgtgaacgccggagccagctttgccattgtgctgggtgcggcgctgtttggttactcatccgcacaggaacaactggcgatggccttcgccggggcgctggtggcctcattgattgttgcctttaccggcagtcagggtggagggcagttaagtccggtgcgtttaaccctggcgggcgtggcgctggcggcggtgctggaaggactgaccagcggcatcgccctgcttaatcctgacgtctacgatcaactgcgtttctggcaagccggttcgctggatattcgcaatctacataccttaaaagtggtgctgatcccggttctgatcgccggagcaactgcgctattactgagtcgcgcgctgaacagtttgagcctcggcagtgacaccgcgacggcgctgggcagtcgcgtggcgcgcacacagttgattggtctgctggcgattaccgtgctttgtggtagtgcgacggcggtagttggcccgattgcctttatcggcctgatgatgccgcacatggcgcgctggctggtaggtgccgatcatcgctggtcgctgcccgtcacgctacttgctacccctgccctgctgctgtttgccgatatcatcgggcgggtgattgtgcccggcgaactgcgcgtttctgtggtcagtgcgtttattggtgcaccggtgctgatcttcctcgtgcgacgtaaaacgcgaggtggtgcatga

SEQ ID NO: 473194 - DNA, 993 bp, Shigella flexneri
atgatttacgtctctcgccgattactcatcacctgtttgctgctgatttccgcctgtgtggttgcaggtatctggggattacgcagcggtgccgtcacgctggaaatctcgcaggtattcgccgcgttgatgggcgatgcgccgcgcagtatgacgatggtggtcaccgaatggcgtttaccacgcgtgctgatggcgctgttgattggcgcggcgctgggcgtcagcggcgcgatttttcagtcgctgatgcgtaacccgctcggcagccctgacgtaatgggctttaacaccggggcgtggagcggcgtgctggtggcgatggtgctgtttggtcaggatctgacggctatcgcgctggcagcaatggtgggcggcattatcacttcgctgttggtctggctgctcgcctggcgtaacggtatcgacacctttcggttgattattatcggtatcggcgttcgcgccatgctggtggcctttaatacctggctgttgctgaaagcgtctttagaaacggcgctaacagcaggtttgtggaatgccggatcgctcaacggcctgacgtgggcaaaaacctcgccttccgcacccatcattatattgatgctcattgccgccaccttgctggtgcggcgaatgtgcttgctggagatgggcgatgataccgcctgcgcgctgggcgtcagcgtcgagcgttcgcgtctgttaatgatgctggttgcagtggtgcttaccgctgcggcaacggcgcttgccgggccgatttcctttattgctttagtcgcgccgcacattgcccgacgcattagcggcaccgctcgctgggggctgacccaggcggcgctgtgcggagcgctgttactgctggcggccgatctctgcgcccaacaactgtttatgccgtatcaacttccggttggcgtcgttaccgtcagcctcggcggtatttaccttatcgtcttgttaattcaggagtctcgcaaaaaatga

SEQ ID NO: 473195 - DNA, 816 bp, Shigella flexneri
atgaccgaatcagtagcccgtttgcgcggcgaacagttaaccctgggatatggcaaatataccgttgcggaaaatctgactgtagaaattcctgatggtcacttcacggcaattatcggaccaaatggctgtggtaaatccacgttactgcgtaccttaagccgcctgatgacgcctgctcacgggcatgtctggctggatggcgagcacattcaacattacgccagtaaagaagttgcacgccggattggtctgttggcgcaaaatgctaccacgccgggcgatatcaccgtgcaggagctggtggcgcgtggacgttatccgcatcaaccgctgtttacccgctggcgcaaagaggatgaagaagcggtaacgaaagcgatgcaggccacgggaataactcatctggcagatcaaagcgtggataccctttctggcggacaacgccagcgagcgtggatcgcgatggtgctggcccaggaaacggcaattatgctgctcgacgaacccacgacctggctggatatcagtcatcagattgatctactggaactgttaagcgaactgaaccgcgagaaaggctataccctggcggcggtgctgcacgatcttaatcaggcctgtcgttacgccagccatttgattgcattgcgggaagggaaaattgttgctcagggagcgccgaaggagattgtcactgctgaactgattgagcgcatttatggtctgcgatgcatgatcattgacgatccggtagccggaatgccgcttgtggtgccgctcggacgaacggcaccttcaaccgcaaatagttaa

SEQ ID NO: 473196 - DNA, 681 bp, Shigella flexneri
atgaaagcggttgatgacaatgctagtaagaaaaaagatgaaccgtcactgtatacctcctggacgctaagttttaccgcgccaaccagtaaagaggcgcagaccgttttgagcgggtatatcgattatatctctgcgttggtggtgaaagagtcgatagaaaacgtccgtaataaactggagatcaaaacccagtttgaaaaagaaaaactggctcaggatcgcattaaaacgaaaaatcaacttgatgcaaacattcagcgcctcaattattcactcgacattgccaacgcggcaggaattaaaaagcccgtatacagtaatggtcaggccgttaaagatgaccccgatttctctatttctctcggcgcagacggtattgaacgcaaactggaaattgaaaaagcggttactgacgttgcggaactgaacggtgaattacgtaatcggcagtatcttgtcgagcaattaacaaaagcaaatgtcaacgatgtgaattttacgccgtttaaatatcagttaagcccgtcattgccagtgaaaaaagacggtccgggtaaggcgattattgtgatcctttccgcgctgatcggcgggatggtggcttgtggtagcgtgttattgcgctatgcgatggcatccagaaaacaggatgccatgatggcagaccacttagtttaa

SEQ ID NO: 473197 - DNA, 390 bp, Shigella flexneri
atgtcatcattgaatattaaacagggaagtgacgctcatttttctgagtatcctctggcgtcgcccagtaataatgaaattgatttacttaatctaatcgaagttttatggcgggccaaaaaaacggtcatggcggtcgtttttgcatttgcctgcgcaggtttactgatctctttcatcctgccgcaaaaatggaccagctcagccgttattactcccgccgaagccattcagtggcaggacctggagaaaacctttaccaaactccgcgttcttgatctcgatgttaatatcgaccgtggcggtgcatttaacctgtttatcaagaagtttcagtctgttagcttgctggaagagtacctgcgttcatcaccttatgtgatggactaa

SEQ ID NO: 473198 - DNA, 504 bp, Shigella flexneri
atgatatttaaccgcctgaaacttgcggtagaccgcgtcattgccgcgttttctgtcgccgtaatgcttgctctggttgtatgcgtagtctggcaagtatttagccgctacgtacttaaccagccaagtacattaaccgatgagctggcacgctttttgatgatctgggtaggattattaggtgctgcatataccgtcggcgcgcagcgacatctctctattgatttatttgctctcgccctgaataagcgcaaacaattacttcttagtatagtcattaacgttctcattttaggttttgccggttcggtcattgtgactggtggcctgaaattaattgataaaacactggcaacatcacaggtatctgccgctatgcaaataccgatgggatacgtatatatcattctgccattaagtggagtggtaatgatgttttatgccttgtgttttattaatcaaagcattcaacaactgaaacaacctgcgcaggaggccagttaa

SEQ ID NO: 473199 - DNA, 594 bp, Shigella flexneri
atggactcaacaaaagacaaaggcttttttgctttatcagcttatgtagcgggtactcgcagtttctatgcgaaaaaaccgattacaaagccagaagatcttaaaggactgaaaattcgtgttcagccaagtccgaccaccatcaaaatgattgaactgatgggtggttcacccactccaatttcatttggcgaagtttatactgcgatgcagcaaggtgtagtagatggcgcagaaaataacgtgccttcctggatgcagactcgacatattgaaattgccaaagttttttctgaagatgaacacgcctcaattcctgactttttggttatctccaccaaaacatggaataaattaaccccagaacagcaacaaatcctcgaaacagcggcgaagaaatccgaagcttatcaacaaaaattgtgggaaaaaattgacgctgacacacgtgctcaggcgaaagctatggggggtgaaattgtaaaagtggataaagcgccattccgtaaagccgtgcaacctctgtttgacgacttcaaaaaagatccaaaacaagctgctttgttagagaaattcgacaacgctgctcaataa

SEQ ID NO: 473200 - DNA, 354 bp, Shigella flexneri
atgaaaatgaggtcatttacccgctcattagtctgcgcatccttgctggctctggttagcactggcgtaaacgccgcagaaaaagtggcgttaaagttagcacacaacctggaaagaagtcatgttgtacatcagagttttgaagagctggcgaaagaggtaaaacagctgtcaaaaggtaatatggtgatccgtatttatcccagcagccagatgggtaatgcgcgagaaactatggaattgttgcaaaatggcgcactggatatgaccaaaggttccgccagtgatctggagtcttttgataatatttatgctatctataatttgccgttcttattaagttgtttttggtga

SEQ ID NO: 473201 - DNA, 1137 bp, Shigella flexneri
atggttaaattaccgccgctgagtctctacattcacatcccgtggtgcgtgcagaaatgcccgtactgcgatttcaactctcacgcgttgaaaggagaagtgccgcacgacgattatgttcagcatctgctttgcgatctggacaatgatgtggcttacgctcagggccgtgaagtaaagacaatctttattggcggtggtacgccgagcctgctttccggcccggcgatgcaaacgctgctagacggcgtgcgtgcgcgtttgccgctggcagcggatgcagaaattactatggaagcgaacccaggcacggtagaagcggatcgctttgtcgattatcagcgtgctggtgtaaaccgcatctctattggtgtgcagagttttagcgaagaaaagctgaaacgacttgggcgtattcatggcccgcaagaagcgaaacgagcggcaaagctggcgagcggtttagggttacgtagctttaaccttgatttgatgcatggactaccggatcaatcactggaagaggcgcttggcgatctacgccaggccattgaactgaatccgccgcatctttcctggtatcaactgactatcgaacctaatacgctgtttggctcgcgaccgccggtgctgccggacgatgacgcgctgtgggatattttcgaacaggggcatcagttattaaccgcagcgggttatcagcaatatgaaacttccgcttacgccaaacccggttatcagtgccagcacaatctcaactactggcgctttggtgactacatcggtattggctgcggcgcgcacggcaaagtgaccttcccggatgggcgcattctgcgtaccactaaaacgcgtcatcctcgtggttttatgcaaggaaggtatctggaaagccagcgtgatgtcgaagccgcagataagccgtttgagttctttatgaatcgcttccgtctgctggaggccgcgccgcgcgtggagtttattgcgtataccgggctttgcgaagatgtgattcgcccacagttagacgaggcgattgcccagggttatctcaccgaatgtgcggattactggcagataacggaacatggtaaattattcttaaactcacttcttgaattattcctcgctgagtaa

SEQ ID NO: 473202 - DNA, 594 bp, Shigella flexneri
atgcaaaaagttgtcctcgcaaccggcaatgccggtaaagtacgtgagctggcgtcgctgcttagcgactttggtcttgatatcgtggcccaaacagacctcggcgttgattccgctgaagaaaccggcctaacctttatcgaaaacgcgattctgaaagcgcgccatgcggcaaaagtgaccggtttaccggcaattgccgacgactctggtctggcggtagatgcgctgggtggcgcgccgggtatttactccgcgcgttattccggtgaagacgcgaccgatcaaaagaatctgcaaaaactgttggaaacactgaaagacgtaccggacgaccaacgtcaggcgcgtttccactgcgtgctggtatatctgcgtcacgcggaagatccgactccgctggtatgccacggcagctggccgggcgtgattactcgcgaaccagcgggcactggtggctttggttatgatccaatcttcttcgtaccttccgaagggaaaaccgccgccgaactgacccgcgaagaaaagagcgccatttcccaccgtggtcaggcgttgaaactgctgctggacgctttacgtaatggttaa

SEQ ID NO: 473203 - DNA, 291 bp, Shigella flexneri
atgagtgccgtaacagttaatgatgacggtctggttttacggctctatattcagccgaaagccagccgtgattctattgtcggtttacatggcgacgaagttaaagtcgccattaccgcgccgccggttgacggccaggccaacagtcatctggtgaagtttctcggtaagcaattccgggttgccaaaagccaggtggtgattgaaaaaggcgaacttggccgccacaaacaaattaaaatcattaatccgcaacaaatcccgccagaaatcgcggcgttaattaattag

SEQ ID NO: 473204 - DNA, 567 bp, Shigella flexneri
atgaatacgttgactttcctgctttcaacggtcattgagctgtatacaatggtgctgttattacgcatctggatgcagtgggctcattgtgatttttacaaccccttctcacagtttgtagtgaaggtagcgcagccaattatcgggccactgcgccgcgttattccggcaatgggtcccattgacagcgcctcgctgctggttgcctatattctcagttttatcaaagccattgtgctgtttgaagtggtgaccttcctgccaatcatctggattgccggtttactgattctgctgaaaaccatcggcttgctgattttctgggtcctgctggtgatggcgattatgagctgggtaagccagggtcgtagcccgattgaatacgtgctgattcagctggccgatccgctgctgcgcccgattcgccgcttgctaccggcaatgggtgggattgatttctcgccgatgatcctcgttctgctgctgtatgccatcaatatgggtgtcgcagaagtattacaggcaaccggaaacatgctgctgccggggctgtggatggcgttatga

SEQ ID NO: 473205 - DNA, 705 bp, Shigella flexneri
atgaacgatattgcgcataacctggcacaggtccggaacaaaatctcagcggctgcaacgcgttgcggccgttctccagaagaaattacgctgcttgcagtcagtaaaacaaaacctgcgagcgccatcgcagaagccattgatgccgggcagcgtcaatttggtgaaaactacgttcaggaaggggtagataaaattcgccactttcaggaactgggcgtaacaggattagaatggcattttattggcccgttgcagtctaataaaagccgcctagtggcagagcatttcgactggtgtcataccatcgaccgtttgcgcattgctacccgcctcaacgagcagcgcctggcagaacttccccctcttaacgtactgattcaaattaatattagtgatgaaaacagtaagtccgggattcaactggcagaactggacgagctggcagcggcggtcgctgaactaccgcgtttacgtctgcgcgggctgatggcaatccctgcgcctgagtcagaatatgtaaggcagtttgaagttgcacgccaaatggctgtagcatttgccggactgaaaacgcgctacccgcatatcgacacgctctctctgggaatgtcggacgatatggaagccgccattgcggcaggtagcacgatggttcgtatcggcactgcaatttttggtgcgcgtgattactctaaaaaataa

SEQ ID NO: 473206 - DNA, 981 bp, Shigella flexneri
atgaatatggaagaaattgtggcccttagtgtaaagcataacgtctcggatctacacctgtgcagcgcctggcccgcacgatggcgcattcgtggcagaatggaagctgcgccgtttgatgcgccggacgtcgaagagctactgcgggagtggctggatgacgatcagcgggcaatattgctggaaaatggccagctggattttgccgtgtcgctggcggaaaaccagcggttgcgtggcagtgcgttcgcgcaacggcaaggtatttctctggcattacggttgttaccttcgcactgtccacagctcgaacagcttggtgcaccaccggtattgccggaattactcaagagcgagaatggcctgattctggtgacgggggctacggggagtggcaaatctaccacgctggcggcgatggttggctatcttaatcaacatgccgatgcgcatattctgacgctggaagatcctgtggaatatctctatgccagccagcgatgtttgatccagcagcgggaaattggtttgcactgtatgacgttcgcatcggggttgcgggctgcattgcgggaagatcctgatgtgattttgctcggagagctacgtgacagtgagacaatccgtctggcgctgacggcggcagaaaccgggcatctggtgctggcaaccttacatacacgtggtgccgcgcaggcagttgagcgactggtggattcatttccggcgcaggaaaaagatcccgtacgtaatcaacttgcgggtagtttacgggcagtgctgtcacaaaagctggaagtggataaaccggaaggacgcgtggcgctgtttgaattactgattaacactcccgcggtggggaatttgattcgcgaagggaaaacccaccagttaccgcatgttattcaaaccgggcagcaggtggggatgttaacgtttcagcagagttatcagcagcgggtgggggaagggcgtttgtga

SEQ ID NO: 473207 - DNA, 417 bp, Shigella flexneri
atgagtggaaccttactcgccttcgacttcggcaccaaaagcattggcgtagcggtcggccaacgcattaccggcaccgctcgccctttgcctgcaattaaagcgcaggacggtacgccggactggaacctcatcgaacgtttactgaaagagtggcagcctgacgaaatcatcgtcggtttgccgctgaatatggacggcaccgaacagccgttaaccgccagagcgcgcaaatttgccaaccgtattcatggtcgtttcggtgttgaagtaaagctccatgacgagcgtcttagcactgtggaagcccgttccggtctttttgaacagggcggctatcgggcgctcaacaaaggcaaagttgactctgcctctgcggttattattctcgaaagctatttcgagcagggatattaa

SEQ ID NO: 473208 - DNA, 636 bp, Shigella flexneri
gtgacagcgcccttctttccacgcatactgggcgctgttgcttttttgaaccaggaaacagaacctctgacaatgaatttacagcatcactttcttattgccatgcctgctctccaggatccgattttccgtcgttccgtggtctacatttgcgaacataataccaatggtgcaatggggatcatcgtcaacaagccgctggaaaatctcaaaattgaagggattctggaaaagctgaagatcacgccggagccgcgtgatgaatcaatccgtctggataaaccggttatgctcggcggcccactggctgaagatcgcgggtttattttgcatactccgccctccaattttgcttccagcattcgcatttcagacaacacggtgatgaccacttcccgcgatgtgctggaaacgctcggcaccgataaacaaccgtctgacgtattggtggctctgggctatgcctcctgggaaaaaggtcaactggaacaagaaattctcgataacgcgtggctaacggccccggcggatctgaatattctgttcaaaacgccgattgccgaccgctggcgcgaggcggcaaaactgattggtgtggatattctcaccatgcctggtgtggcaggacacgcctga

SEQ ID NO: 473209 - DNA, 951 bp, Shigella flexneri
atgatcaagctcggcatcgtgatggaccccatcgcaaacatcaacatcaagaaagattccagtttcgctatgttgctggaagcacagcgtcgtggttacgaacttcactatatggagatgggcgatctgtatctgatcaatggcgaagcccgcgcccatacccgcacgctgaacgtgaagcagaactacgaagagtggttttcgttcgtcggtgaacaggatctgccgctggccgatctcgatgtgatcctgatgcgtaaagacccgccgtttgataccgagtttatctacgcgacctatattctggaacgtgccgaagagaaagggacgctgatcgttaacaagccgcagagcctgcgcgactgtaacgagaaactgtttaccgcctggttctctgacttaacgccagaaacgctggttacgcgcaataaagcgcagctaaaagcgttctgggagaaacacagcgacatcattcttaagccgctggacggtatgggcggcgcgtcgattttccgcgtgaaagaaggcgatccaaacctcggcgtgattgccgaaaccctgactgagcatggcacttgctactgcatggcgcaaaattacctgccagccattaaagatggcgacaaacgcgtgctggtggtggatggcgagccggtaccgtactgcctggcgcgtattccgcaggggggcgaaacccgtggcaatctggctgccggtggtcgcggtgaacctcgtccgctgacggaaagtgactggaaaatcgcccgtcagatcgggccgacgctgaaagaaaaagggctgatttttgttggtctggatatcatcggcgaccgtctgactgaaattaacgtcaccagcccaacctgtattcgtgagattgaagcagagtttccggtgtcgatcaccggaatgttaatggatgccatcgaagcacgtttacagcagcagtaa

SEQ ID NO: 473210 - DNA, 732 bp, Shigella flexneri
atgcgtatcccccgcatttatcatcctgaaccactgaccagccattctcacatcgcgctttgcgaagatgccgccaaccatatcgggcgcgtactgcgcatggggccggggcaggcgttgcaattgtttgacggtagcaaccaggtctttgacgccgaaattaccagcgccagcaaaaaaagcgtggaagtgaaggtgctggaaggccagatcgacgatcgcgaatctccgctgcatattcacctcggtcaggtgatgtcgcgtggtgaaaaaatggaatttactatccagaaatcgatcgaactcggtgtaagcctcattacgccacttttttctgagcgctgcggcgttaaactggatagtgaacgtctgaacaagaagcttcagcagtggcagaagattgcaattgctgcctgtgagcagtgtggtcgtaaccgggtgccggaaatccgtccagcgatggatctggaagcctggtgtgcagagcaggatgaaggactgaaactgaatcttcacccgcgcgccagtaacagcatcaatacgttgcctttaccggttgaacgcgtccgcctgctgattggcccggaaggcggtttatcggcagatgaaattgccatgactgcccgctatcaatttactgatatcctgttgggacctcgcgttttgcgtacagagacaactgcgctcaccgccattaccgcgctacaagtacgatttggcgatttgggctaa

SEQ ID NO: 473211 - DNA, 708 bp, Shigella flexneri
atgtaccgttatttgtctattgctgcggtggtactgagcgcagcattttccggcccgacgttggccgaaggtatcaatagtttttctcaggcgaaagccgcggcggtaaaagtccacgctgatgcgcccggtacgttttattgcggatgtaaaattaactggcagggcaaaaaaggcgttgttgatctgcaatcgtgcggctatcaggtgcgcaaaaatgaaaaccgcgccagccgcgtagagtgggaacacgtcgttcccgcctggcaattcggtcaccagcgccagtgctggcaggacggtggacgtaaaaactgcgctaaagatccggtctatcgcaagatggaaagcgatatgcataacctgcagccgtcagtcggcgaggtgaatggcgatcgcggcaattttatgtacagccagtggaatggcggcgaaggccagtacggtcaatgcgccatgaaggtcgatttcaaagaaaaagctgccgaaccaccagcgcgtgcacgcggtgccattgcgcgcacctacttctatatgcgcgaccaatacaacctgacactctctcgccagcaaacgcagctgttcaacgcatggaacaagatgtatccggttaccgactgggagtgcgagcgcgatgaacgcatcgcgaaggtgcagggcaatcataacccgtatgtgcaacgcgcttgccaggcgcgaaagagctaa

SEQ ID NO: 473212 - DNA, 456 bp, Shigella flexneri
atgcgccgcctgcgggaaaaactcgcccaggccaacctgaagctagggcgtaactacccggagccaaaactctcttacacccagcgcggaacctccgccggaacagcctggctggaaagctatgaaatccgcctcaatcccgttttgctgttggaaaacagtgaagcttttattgaagaagtggtaccgcacgaactggcacatttgctggtatggaaacatttcggccgcgtagcgccacatggcaaagagtggaagtggatgatggaaagcgtgctgggcgttcccgcccgtcgtacgcatcagttcgaactgcaatccgtgcgtcgcaacaccttcccctaccgctgtaagtgccaggaacatcagcttaccgtacgccgccataatcgcgtagttcgtggcgaggccatctatcgctgtgttcactgcggtgaacagctggttgcgaaataa

SEQ ID NO: 473213 - DNA, 1395 bp, Shigella flexneri
atgcctgacgctaaaaaacaggggcggtcaaacaaggcaatgacgtttttcgtctgcttccttgccgctctggcgggattactctttggcctggatatcggtgtaattgctggcgcactgccgtttattgcagatgaattccagataacttcgcacacgcaagaatgggtcgtaagctccatgatgttcggtgcggcagtcggtgcggtgggcatcggctggctctcctttaaactcgggcgcaaaaagagcctgatgatcggcgcaatcctgtttgttgccggttcactgttctctgcggctgcgccaaacgttgaagtactgattctttcgcgcgttctgctggggctggcggtgggtgtggcctcttataccgcaccactgtacctgtcagaaattgcgccggaaaaaattcgcggcagtatgatctcgatgtatcagttgatgatcactatcgggatcctcggtgcttatctttctgataccgccttcagctacaccggtgcatggcgctggatgctgggtgtgattatcatcccggcaattttgctgctgattggtgtcttcttcctgccagacagcccacgttggtttgccgccaaacgccgttttgttgatgccgaacgcgtgctgctacgcctgcgtgacaccagcgcggaagcgaaacgcgaactggatgaaatccgtgaaagtttgcaggttaaacagagtggctgggcgctgtttaaagagaatagcaacttccgccgcgcggtgttccttggcgtactgttacaggtaatgcagcaattcaccgggatgaacgtcatcatgtattacgcgccgaaaatcttcgaactggcgggttataccaacaccaccgagcaaatgtgggggacagtgattgtcggcctgaccaacgtacttgccacctttatcgcaatcggccttgttgaccgctggggacgtaaaccaacgctaacgctgggcttcctggtgatggctgctggcatgggcgtactcggtacaatgatgcatatcggtatccactctccgtcggcgcagtatttcgccatcgccatgctgctgatgtttattgtcggttttgccatgagtgccggtccgctgatttgggtactgtgctccgaaattcagccgctgaaaggccgcgattttggcatcacctgctccaccgccaccaactggattgccaacatgatcgttggcgcaacgttcctgaccatgctcaacacgctgggtaacgccaacaccttctgggtgtatgcggctctgaacgtactgtttatcctgctgacattgtggctggtaccggaaaccaaacacgtttcgctggaacatattgaacgtaatctgatgaaaggtcgtaaactgcgcgaaatcggcgctcacgattaa

SEQ ID NO: 473214 - DNA, 1155 bp, Shigella flexneri
atggcaaaacacctttttacgtccgagtccgtctctgaagggcatcctgacaaaattgctgaccaaatctctgatgccgttttagacgcgatcctcgaacaggatccgaaagcacgcgttgcttgcgaaacctacgtaaaaaccggcatggttttagttggcggcgaaatcaccaccagcgcctgggtagacatcgaagagatcacccgtaacaccgttcgcgaaattggctatgtgcattccgacatgggctttgacgctaactcctgtgcggttctgagcgctatcggcaaacagtctcctgacatcaaccagggcgttgaccgtgccgatccgctggaacagggcgcgggtgaccagggtctgatgtttggctacgcaactaatgaaaccgacgtgctgatgccagcacctatcacctatgcacaccgtctggtacagcgtcaggctgaagtgcgtaaaaacggcactctgccgtggctgcgcccggacgcgaaaagccaggtgactttccagtatgacgacggcaaaatcgttggtattgatgctgtcgtgctttccactcagcactctgaagagatcgaccagaaatcgctgcaagaagcggtaatggaagagatcatcaagccaattctgcccgctgaatggctgacttctgccaccaaattcttcatcaacccgaccggtcgtttcgttatcggtggcccaatgggtgactgcggtctgactggccgtaaaattatcgttgatacctacggcggcatggcgcgtcacggtggcggtgcattctctggtaaagatccatcaaaagtggaccgttccgcagcctacgcagcacgttatgtcgcgaaaaacatcgttgctgctggcctggccgatcgttgtgaaattcaggtttcctacgcaatcggcgtggctgaaccgacctccatcatggtagaaactttcggtactgagaaagtgccttctgaacaactgactctgctggtacgtgagttcttcgacctgcgcccatacggactgattcagatgctggatctgctgcacccgatctacaaagaaaccgcagcatacggtcactttggtcgtgaacatttcccgtgggaaaaaaccgacaaagcgcagctgctgcgcgatgctgccggtctgaagtaa

SEQ ID NO: 473215 - DNA, 252 bp, Shigella flexneri
gtggtagcggatcctaccacgactctgcaggttaaaaacactggcagtctgagtgttaatcggtatggatggattaacatctggatggctattttaggtcaattcttcacccgatttccacttttttttgaatcgtgtctcattctgttaaaaacgtggctggaaatttttcctgacaatgccggcattctgcgtatttatcttttgcaattttctgccattgtggggtataaaacgcggcgcgcggcttaa

SEQ ID NO: 473216 - DNA, 1977 bp, Shigella flexneri
atgtctgacgacatgtctatgggtttgccttcgtcagcgggcgaacacggtgtactacgctccatgcaggaggttgcaatgagctcccaggaagccagcaagatgctgcgtacttacaatattgcctggtggggcaataactactatgacgttaacgagctgggccacatcagcgtgtgcccggacccggacgtcccggaagctcgcgtcgatctcgcgcagttagtgaaaactcgtgaagcacagggtcagcgtctgcctgcactgttctgtttcccacagatcctgcagcaccgtttgcgttccattaacgccgcgttcaaacgtgcgagggaatcctacggctataacggcgattacttccttgtttatccgatcaaagttaaccagcaccgccgcgtgatcgagtccctgattcattcgggtgaaccgctgggtctggaagccggttccaaagccgagttgatggcagtgctggcacatgctggcatgactcgtagcgtcatcgtctgcaacggttataaagaccgcgaatatatccgcctggcattaattggcgagaagatggggcacaaggtctatctggtcattgagaagatgtcagaaatcgccattgtgctggatgaagcagaacgtctgaatgtcgttcctcgtctgggcgtgcgtgcacgtctggcttcgcagggctcgggtaaatggcagtcctccggcggggaaaaatcgaagttcggcctggctgcgactcaggtactgcaactggttgaaaccctgcgtgaagccgggcgtctcgacagcctgcaactactgcacttccacctcggttcgcagatggcgaatattcgcgatatcgcgacaggcgttcgtgaatccgcgcgtttctatgtggaactgcacaagctgggcgtcaatattcagtgcttcgacgtcggcggcggtctgggcgtggattatgaaggcacccgttcgcagtctgactgctccgtaaactatggcctcaatgaatacgccaacaacatcatctgggcgattggcgatgcgtgtgaagaaaatggtctgccgcatccgacggtaatcaccgaatcgggccgtgcggtgactgcgcaccataccgtgctggtgtcgaatatcatcggcgtggaacgtaacgaatatacggtgccgaccgcgcccgtagaagatgcgccgcgtgcgctgcaaagcatgtgggaaacctggcaggaaatgcacgaaccgggaactcgccgttctttgcgtgaatggttacacgacagccagatggatctgcacgacattcatatcggctactcttccggcacctttagcctgcaagaacgtgcatgggcagaacaactctatctgagcatgtgccatgaagtgcagaagcaactggatccgcaaaaccgtgcgcatcgtccgataatcgacgaactgcaggaacgtatggcggacaaaatgtacgtcaatttctcgctgttccagtcaatgccggacgcatgggggatcgaccagttgttcccggttctaccgctggaagggctggatcaagtgccggaacgtcgcgctgtgctgctggatattacctgtgactctgacggtgctatcgaccactatattgatggtgatggtattgccacgacaatgccaatgccggagtacgatccagagaatccgccgatgctcggtttctttatggtcggtgcatatcaggagatccttggcaatatgcacaacctgttcggtgataccgaagcagttgacgtgttcgtgttccctgacggtagcgtagaagtagaactgtctgacgaaggcgataccgtggcggacatgctgcaatatgtacagctcgatccgaaaacgctgttaacccagttccgcgatcaagtgaagaaaaccgatcttgatgctgaactgcaacaacagttccttgaagagttcgaggcaggtttgtacggttatacttatcttgaagatgaataa

SEQ ID NO: 473217 - DNA, 231 bp, Shigella flexneri; identical to SEQ ID NO: 129443

SEQ ID NO: 473218 - DNA, 903 bp, Shigella flexneri
atggccaatctctacgacttgaaaaagttcgacttaaatcttcttgtcatatttgagtgtatttaccagcatttaagcattagcaaagctgctgaatcactatatatcaccccatcagccgtgagccagtcgttacaacgcttacgtgcgcaatttaatgaccctttattcattcgctcaggaaaaggtatcgcgccgacgacaacagggttgaatctgcatcaccatcttgagaaaaacctcaaaggccttgaacaaacaattaatatagtcaataagtccgaactaaagaaaaactttattatctacggccctcagctcatttcttgctctaataatagtatgctgatccgctgcctacggcaagatgcctctgtcgagattgagtgccatgatatcctcatgtcagcagagaatgctgaagaactgttggttcaccgcaaagccgatctggtgatcacccaaatgccagtgatcagccgttccgtcatttgcatgccattgcatacaattcgcaatactctaatttgtagtaataagcatccgcgaattactgacaatagcacttatgaacaaattatggcagaagagttcacccaattaatagccaaatcagcaggagttgatgatattcaaatggaaatagacgagaagtttatgaatcgcaaaatttcatttcgtggttcctctttgctgacaataattaatagcattgcagttacagatttactgggaatagtcccctatgaactttataactaccaccgtgactttcttaatttaaaagagataaaactagaatatccgttaccttcaataaagctttacatttcctataataaatcttctttaaataatttggtgttctcccgatttattgaccgtctaaatgagagtttttga

SEQ ID NO: 473219 - DNA, 807 bp, Shigella flexneri
atgacagtgataggttatgccttttactcgacttttgcactgactgaaaagaacaaattaatgttaaaaaagatacttttactggctctgcttcctgcaatcgccttcgcagaggaacttccttccccagtaaaagcgattgaaaaacagggcattacaatcatcaaaacgttcgatgcccccggaggaatgaaaggttatctcggaaagtatcaggatatgggcgtcaccatctacctgactcccgatggtaagcacgctatctctggttacatgtacaacgagaaaggtgaaaacctgagtaacacacttatcgaaaaagaaatttacgcaccagccggacgcgaaatgtggcaacggatggaacaatcccactggctcctcgacggtaaaaaagatgcgccggtcattgtctacgtcttctccgatccgttctgcccatattgtaaacagttctggcagcaggcgcgcccgtgggtagattctggcaaagtgcaattaagaacattgttggttggggttatcaagccagaaagcccggcgacagcagcggcaattcttgcctccaaagatcccgcaaaaacctggcaacaatatgaagcctctggttgcaagcttaagctaaacgtgcctgcaaacgtaagtacagagcaaatgaaagtgttaagtgacaatgagaaactgatggacgatctgggggcaaatgtcacgccggctatctattacatgagtaaggaaaatacgctgcaacaggccgtggggttgcccgatcagaaaacgcttaatatcattatgggaaataaataa

SEQ ID NO: 473220 - DNA, 564 bp, Shigella flexneri
atgtccttgattaacaccaaaattaaaccttttaaaaaccaggcattcaaaaacggcgaattcatcgaaatcaccgaaaaagataccgaaggccgctggagcgtcttcttcttctacccggctgactttactttcgtatgcccgaccgaactgggtgacgttgctgaccactacgaagaactgcagaaactgggcgtagacgtatacgcagtatctaccgatactcacttcacccacaaagcatggcacagcagctctgaaaccatcgctaaaatcaaatatgcgatgatcggcgacccgactggcgccctgacccgtaacttcgacaacatgcgtgaagatgaaggtctggctgaccgtgcgaccttcgttgttgacccgcagggtatcatccaggcaatcgaagttaccgctgaaggcattggccgtgacgcgtctgatctgctgcgtaaaatcaaagcagctcagtacgtagcttctcacccaggtgaagtttgcccggctaaatggaaagaaggtgaagcaactctggctccgtctctggacctggttggtaaaatctaa

SEQ ID NO: 473221 - DNA, 1596 bp, Shigella flexneri
atgatgatgtttaaagcccaggagataaacatgctcgacacaaatatgaaaactcaactcaaggcttaccttgagaaattgaccaagcctgttgagttaattgccacgctggatgacagcgctaaatcggcagaaatcaaggaactgttggctgaaatcgcagaactgtcagacaaagtcacctttaaagaagataacagcttgccagtgcgtaagccgtctttcctgatcaccaacccaggttccaaccagggaccacgttttgcaggctccccgctgggccacgagttcacctcgctggtactggcgttgctgtggaccggtggtcatccgtcgaaagaagcgcagtctctgctggagcagattcgccatattgacggtgattttgaattcgaaacctattactcgctctcttgccataactgcccggacgtggtgcaggcgctgaacctgatgagcgtattgaacccgcgcatcaagcacactgcaattgacggcggcaccttccagaacgaaatcaccgatcgcaacgtgatgggcgttccggcagtgttcgtaaacgggaaagagtttggtcagggccgcatgacgttgactgaaatcgttgccaaaattgatactggcgcggaaaaacgtgcggcagaagagctgaacaagcgtgatgcttatgacgtattaatcgttggttccggcccggcgggtgcagcggcagcaatttactccgcacgtaaaggcatccgtaccggtctgatgggcgaacgttttggtggtcagatcctcgataccgttgatatcgaaaactacatttctgtaccgaagactgaagggcagaagttggcaggcgcactgaaagttcacgttgatgaatacgacgttgatgtgatcgacagccagagcgccagcaaactgatcccggcagcggttgaaggtggtctacaccagattgaaacagcttctggcgcggtactgaaagcacgcagcattatcgtggcgacgggtgcaaaatggcgcaacatgaacgttccgggcgaagatcagtatcgcactaaaggcgtgacctactgcccgcactgcgacggcccgctgtttaaaggcaaacgcgtagcggttatcggcggcggtaactccggcgtggaagcggcaatcgacctggcgggtatcgttgagcacgtaacactgctggaatttgcgccagaaatgaaagccgaccaggttctgcaggacaaactgcgcagcctgaaaaacgtcgacattattctgaatgcgcaaaccacggaagtgaaaggcgacggcagcaaagtcgttggtctggaatatcgagatcgtgtcagcggcaatattcacaacatcgaactggccggtatttttgtccagattggtctgctgccgaacaccaactggctggaaggcgcagtcgaacgtaaccgcatgggcgagattatcattgatgcgaaatgtgaaaccaacgtcaaaggcgtgttcgcagcgggtgactgtacgacggttccgtacaagcagatcatcatcgccactggcgaaggtgccaaagcctctctgagtgcttttgactacctgattcgcaccaaaactgcataa

SEQ ID NO: 473222 - DNA, 429 bp, Shigella flexneri
atgtataaggcaatcattatgccagttgatgtatttgaaatggaattgagcgacaaagctgttcgccacgctgaattcctcgcccaggatgacggagttattcatctacttcacgtactacccgggtcagccagcctgagcctgcaccgttttgccgctgatgtgcgtcgttttgaagagcatctgcaacatgaagcagaagaacgtctgcaaacgatggtcagccacttcaccatcgatccttcccgcattaaacaacatgtccgttttggtagcgtgcgggatgaagtcaatgagttggcagaagaactgggggctgatgttgtagttatcggttctcgcaacccatcgatttcgacccatctgttaggttctaacgcctcgagcgtgatccgccacgccaatctgcctgtactggtcgttcgctaa

SEQ ID NO: 473223 - DNA, 1239 bp, Shigella flexneri
atgaaagcattgacttatcacggcccacatcacgttcaggtagaaaatgttcccgatccgggcattgaacaggcagatgatattattctgcgtattacggtaacggcgatctgtggctctgacctccatctttatcgaggcaaaataccccaggttaaacatggcgatatttttggtcatgaatttatgggggaagtcgttgaaaccgggaaggacgtaaaaaatttgcaaaaaggcgaccgggtggtaattccgttcgtcattgcttgtggcgactgttttttctgtcgattacagcaatatgccgcctgcgaaaataccaatgcgggtaaaggcgctgcgctcaataaaaaacagatacctgctcccgcggcattgtttggttatagtcacctgtatggtggcgttcctggcgggcaggcggaatatgtccgcgtcccgaaagggaatgtggggccgtttaaagtaccgcctttgctttcagatgataaagcccttttcctttctgatattctgccaacggcatggcaggcagcaaaaaatgtgcagatccaacaaggttcaagcgttgcagtctatggtgctggtcctgtgggattgttgacaatcgcctgtgcacggttgctcggtgcggaacagatttttgttgttgatcatcatccctaccgcttgcgtttcgccgctgaccgctacggcgcgatcccgattaatttcgatgaagatagcgatccggcacagtcaattattgaacaaacggcaggtcaccggggcgtggatgcagtaatagacgccgtcggttttgaagcgaaaggcagcaccacggaaacggtgctgactaacctgaaactggagggcagcagcggtaaagcgttgcgccagtgtattgcggcggtcaggcgtggcggcattgttagcgtaccgggcgtctacgctggatttattcacggtttcctgtttggcgacgcctttgataaaggggtgacgtttaaaatgggacagacccacgttcacgcatggctgggagaattattaccgttaattgagaaaggattactgaaaccagaagaaattgttacccactatatgccgtttgaagaggccgcccggggatatgagattttcgaaaaacgtgaagaggagtgccgtaaggtgattctggtacccggtgcacaaagcgcagaggcggcgcagaaggcggtttcaggtctggtgaatgcgatgccggggggaacaatatga

SEQ ID NO: 473224 - DNA, 411 bp, Shigella flexneri; identical to SEQ ID NO: 263334

SEQ ID NO: 473225 - DNA, 807 bp, Shigella flexneri
atgaaagcattctgccgtaacgccgcgttgctcgcggtttctctgcttcccttatcttctgccaacgccgtagcgttgcaggcaaaacagtatggcgattttgatcgctatgtcctggccctctcctggcaaaccggattttgccagagtcaacacgatcgaaatcgtaacgaacgagatgaatgtcgcctgcaaaccgaaacgaccaacaaaactgattttctgaccgtacatggtctgtggccaggattgcctaaatcggttgctgcccgtggtgttgatgaacgccgctggatgcgcttcggttgcgctactcgcccaatcccgaatctaccagaagcacgcgccagccgaatgtgttcatcgccggaaaccgggttatcactggaaacggccgctaaactaagtgaagtcatgccaggagctggcggacgttcctgcctggaacgctacgaatatgccaaacacggtgcctgctttggttttgatccggacgcatacttcggtacgatggtacgcctgaatcaagaaattaaagagagcgaagccggaaaattccttgcggataattacggtaaaacagtgagccgccgtgactttgacgccgcctttgccaaaagctggggaaaagagaacgtgaaagcagttaagctaacgtgccagggtaaccctgcgtatttgactgaaattcagatctcgatcaaagctgacgccatcaacgctccgctttctgcaaactcattcttgccacaacctcacccaggtaactgtggcaaaacctttgtgattgataaagcgggttattaa

SEQ ID NO: 473226 - DNA, 660 bp, Shigella flexneri
gtggcaacctgggcgggtgatgaactaaaaaccatgggtgcgctgacacgcagagagtggacgctgattggccttgtattgctcagcttaggtttgtgggtatttggcagtgaagtcattaatgctactgcggttggtctgctggcagtttcgctaatgctggctctgcacgttgtgccgtggaaagacattacccgctataacagcgcatggaacacgctggtcaacctggcaactctggttgtgatggctaacggcctgactcgttctggttttattgactggttcgccggtaccatgagtacgcacctggaaggattctcaccaaacgcaacggtgattgtactggttctggtgttctactttgcacactacctgtttgccagcctgtctgcgcacaccgcaaccatgctgccggttattctggccgtcggtaaaggtattccgggcgtaccaatggaacaactgtgtatcctgctggtgctgtctatcggtatcatgggctgtctgacgccgtatgcaaccggtcctggggtgattatttacggctgtggctatgtgaaatcaaaagattactggcgtcttggcgcaatcttcggggtgatttacatctctatgttgctgttggttggctggccgattctcgccatgtggaactaa

SEQ ID NO: 473227 - DNA, 831 bp, Shigella flexneri
atgtctttagcaaaagataatatatggaaactattggccccactggtggtgatgggtgtcatgtttcttatccctgtccccgacggtatgccgccgcaggcatggcattacttcgctgtgtttgtggcaatgattgtcggcatgatcctcgagccaattccggcaacagcgatcagttttattgcggttactatttgcgttattggcagtaattacctgctctttgatgccaaagaattagctgacccagcgtttaatgcgcaaaaacaggcgctgaaatggggcctggctggtttttccagcaccacggtatggctggtatttggcgcatttatttttgcattagggtatgaagtttccgggttaggtcgtcgcattgcccttttcctggtgaaattcatggacaaacgcacgctgacgttgggttatgcgattgtcattatcgacattctgctggcaccgtttacaccgtccaacaccgcgcgtaccgggggtacggtttttccggtcattaaaaacctgccgccgttgtttaaatcattcccgaacgatccgtccgcgcgtcgtattggcggctatttgatgtggatgatggtcattagtaccagtctgagttcgtccatgtttgtcaccggtgcggaccaaacgtgctgggtctggagttcgtcagcaaaattgccggtatccagattagctggttgcagtggttcctctgcttcctgccggttggggttatcttgcttatcattgcgccgtggctttcctacgtgctgtacaaaccggaaatcacacacagtgaagaagtggcaacctgggcgggtgatgaactaa

SEQ ID NO: 473228 - DNA, 879 bp, Shigella flexneri
atgtcgatgcctgcaacgtcaactaaaaccacaaagcttgcgacgtcattaatcgatgagtacgccctgctgggctggcgcgccatgctgactgaagtcaatctgtcaccgaaaccaggcctcgtggatcgcattaactgcggtgcgcacaaagatatggcgctggaagatttccaccgcagcgcgctggcgattcagggctggttaccccgtttcattgaatttggtgcctgtagtgcagaaatggcaccggaagcggtactccacggattacgcccaattggtatggcttgcgaaggtgatatgttccgcgccactgcgggcgtaaacacgcataaaggcagcattttttctttagggctgctatgtgcggcaattggccgtttgcttcagctcaaccagccggttacgccaacaaccgtttgttctacggcggcaagtttctgccgtggcctgaccgatcgcgaactgcgtaccaataattcacgactgacggcaggtcaacggttgtaccagcagcttggccttaccggcgcacgcggtgaagccgaagcaggttatccactggtgatcaaccacgccttgccgcattacctcactctgctggatcaggggttagatcctgaactggcattgctcgataccttgctcctactgatggctaccaacggcgataccaacgttgcatcgcgcggtggcgaggggggcctgcgctggctacagcgcgaggcgcaaacattattgcaaaaagggggcattcgaacccccaccgatctcgattatctccggcagttcgacagggagtgtatcgaacgaaatctcagtccaggcggcagtgccgacctgctgatccttacctggtttttagcacagatttaa

SEQ ID NO: 473229 - DNA, 552 bp, Shigella flexneri
atgcacctgcttcctgaactcgccagccaccatgcggtgtcaattcccgagctgctcgtcagccgggatgaaaggcaagcacggcaacacgcctggctcaagcaccatcctgttccactggtctcctttaccgtggttgcgcctgggccgattaaagacagcgaggtcacacgccgaatttttaatcatcgcgtgacagccttgcgtgccttagccacaaagcagggctggcaaattcaggagcaggctgcactggtttccgccagcgggccggagggcatgttgagcattgccgccccggctcgcgacctcaagctcgccaccattgagcttgaacatagtcatcctctcgggcggttatgggatatcgatgtcctgacgcccgaaggcgaaattctctcccgccgcgactattcactgccgcctcgccgctgcctgttgtgcgagcaaagcgcagccgtctgcgcgcgtggaaaaacccatcaactgaccgatttactcaaccgcatggaggcactgctgaacgatgtcgatgcctgcaacgtcaactaa

SEQ ID NO: 473230 - DNA, 1533 bp, Shigella flexneri
atgacgcagaaaattgaacaatctcaacgacaagaacgggtagcggcctggaatcgtcgcactgaatgcgatcttgccgctttccagaactcaccaaagcaaacctaccaggctgaaaaagcgcgcgatcgcaaactgtgcgccaacctggaagaagcgattcgtcgctcaggtttacaggacggcatgacggtttccttccatcacgctttccgtggcggtgacctgaccgtcaatatggtgatgaacgtcatcgcgaagatgggctttaaaaacctgaccctggcgtccagctccctgagtgattgccatgcgccgctggtagaacacattcgccagggcgtggttacccgcatttatacctctggcctacgcggtccactggcggaagagatctcccgtggtctgctggcggaaccggtgcagatccactctcacggcggtcgtgtgcatctggtacagagcggcgaactgaatatcgacgtggctttcctcggcgtcccgtcctgtgatgaattcggtaatgccaacggctacaccggtaaagcctgctgcggctccctcggctatgcaatggttgatgccgacaacgcaaaacaggtcgtgatgcttaccgaagaactgctgccttatccgcataatccggcaagcattgagcaagatcaggttgatttgatcgtcaaagttaatcgcgttggcgatgctgcaaaaatcggcgctggtactacccgtatgaccactaacccgcgcgaactgcttattgcccgtagcgctgcggatgtgattgtcaactctggctacttcaaagaaggtttctccatgcaaaccggcaccggcggcgcttcgctggcggtaacccgtttcctggaagacaaaatgcgtagccgcgatattcgcgccgacttcgccctcggcggtattaccgcgacgatggttgatctgcacgaaaaaggtctgatccgcaaactgctggatgtgcagagctttgacagccatgctgcgcaatcgctggcccgtaaccccaatcacatcgaaatcagcgccaaccagtacgctaactggggttcgaaaggcgcatcggttgatcgtctcgacgtggtggtactgagcgcgctggaaattgacaggcagttcaacgttaacgtgctgaccggttctgacggcgtactgcgtggcgcttccggtggtcactgcgataccgcgattgcctctgcgctttccatcatcgtcgcgccactggtacgcggtcgtattccgactctggtggataacgtgctgacctgcatcaccccgggctccagtgtcgatattctggtcacagaccacggtatcgcagttaacccggcacgtccggaactagcagaacgtctgcaggaagcgggcattaaagtggtttccattgagtggctgcgcgaacgtgcgcgtctgctgaccggtgaaccacagccgattgaattcaccgaccgcgtcgttgccgttgtgcgttaccgcgatggctcggtgatcgatgttgtgcatcaggtgaaggaataa

SEQ ID NO: 473231 - DNA, 909 bp, Shigella flexneri
atgatttccgcttcgctgcaacaacgtaaaactcgcacccgccgcagcatgttgtttgtgcctggtgccaatgccgcgatggtcagcaactccttcatctacccggctgatgccctgatgtttgacctcgaagactccgtggcattacgtgaaaaagacaccgcccgccgcatggtttatcacgcgctgcaacatccgctgtatcgcgatattgaaaccattgtgcgtgtcaacgcgctggattccgaatggggtgttaacgacctggaagccgtcgttcgcggtggtgcggacgttgtgcgtctgccgaaaaccgataccgctcaggatgttctggatattgaaaaagagatcctgcgtatagaaaaagcctgtggtcgtgaacccggcagcaccggcctgctggcggcgattgaatctccgctgggcattacccgcgcagtggaaatcgctcacgcttccgagcgtttgatcggtatcgccctcggtgcagaagactatgtgcgcaacctgcgtacagaacgctccccggaaggaactgaactgctgttcgcacgctgttccattttgcaggccgcgcgctctgcgggtattcaggcgttcgataccgtctattccgacgctaacaacgaagccggattcctgcaagaagccgcccacatcaaacagctgggctttgacggcaaatcgctgatcaacccgcgtcagattgatctgctgcacaacctctacgcaccgacccagaaagaagtggatcacgcccaccgcgtcgtagaagccgctgaagccgccgctcgcgaaggcctcggcgtggtttccctgaacggcaagatggtggacggtccggttatcgatcgcgcccgtctggtgctctcccgtgcagaactttccggcatccgcgaagaataa

SEQ ID NO: 473232 - DNA, 297 bp, Shigella flexneri
atgaaaataaaccagcccgccgttgcaggcacccttgagtctggggatgtgatgatacgcatcgccccactcgatacgcaggatatcgacctgcaaatcaatagcagcgttgagaaacagtttggcgatgcaattcgcaccaccattctggacgttctcgcccgctacaacgtgcgcggcgtacagctgaatgtcgatgacaaaggcgcactggactgcattttacatgcacgactggaagccctgctggcacgcgccagcggtatcccggctctgccatgggaggattgccaatga

SEQ ID NO: 473233 - DNA, 1059 bp, Shigella flexneri
atgttcggcaatgatattttcacccgcgtaaaacgttcagaaaataaaaaaatggcggaaatcgcccaattcctgcatgaaaatgatttgagcgttgacaccacagtcgaagtatttattaccgtaacccgcgatgaaaagcttatcgcgtgcggtggaattgccggaaatattattaaatgcgttgctatcagtgaatccgttcgcggtgaaggactggcgctgacattagccactgaactgataaacctcgcctatgagcggcacagcacgcatctgtttatttataccaaaaccgaatacgaggcgctgttccgccagtgcggtttttccacgctgacctgcgtacccggcgtgatggtgctgatggaaaacagcgccacgcgactgaaacgctatgccgaatcgctgaaaaaatttcgtcatccagggaacaagattggctgcattgtgatgaacgccaatccctttacgaatggtcaccgttatctgattcaacaagctgcggcacagtgcgactggttgcatctgtttttagtcaaagaagattcttcacgcttcccctatgaagaccggctggatctggtgttaaaaggcaccgccgatattccacgcctgactgtgcatcgcggctcagaatacatcatctcccgcgctacgttcccttgctacttcattaaagaacagagcgtcattaaccattgttacaccgaaattgatctgaagattttccgtcagtacctcgctcccgcgcttggtgtaactcaccgctttgtcggtactgaacccttttgtcgcgttaccgcccagtacaaccaggatatgcgctactggctggaaacgccgactatctccgcagcgcccatcgaactggttgaaattgagcggctgcgttaccaggagatgccgatatccgcttcccgggtacgtcaactgctggcgaaaaacgatctcacggctatcgcgccgctggtccctgcagtcacgctgcattatttgcagaacctgcttgagcactcccgccaggacgcggcagctcgtcaaaagacccccgcatga

SEQ ID NO: 473234 - DNA, 153 bp, Shigella flexneri
atgttgcagcttaacgagaataaacagtttgcatttttccaaagactggcatttccgctgcgtatctttttgggtaatgactccaacttactgatagtgttttatgttcagataatgcccgatgaccttgtcatgcagctccaccgattttga

SEQ ID NO: 473235 - DNA, 462 bp, Shigella flexneri
atgctggactcctttattttccttgggggcagtggtgcgactttaggcctgatcctggctatctttatcgcctctcgccgtgctgattatcgtcaggtggcaaaactggcgctgccgtccggcatcttccagattaacgaaccgattctgtttggtctgccaattatcatgaacccggtgatgtttatcccgtttgtactggtacaaccgattctggcggcaatcaccctcgcagcgtactacatgggcatcattcctccggtgaccaatattgcaccgtggaccatgccaaccggtctgggagccttctttaacaccaacggtagcgtcgccgcattgctggtcgcactcttcaaccttggcatcgcaacgttaatttatctgccctttgttgtggtggctaacaaagcacaaaatgcgattgataaagaagagagcgaagaagatatcgctaacccctga

SEQ ID NO: 473236 - DNA, 351 bp, Shigella flexneri
atgatggatctcgataatattcctgatacgcaaacagaagctgaagagctggaagaagtggtgatggggcttatcatcaactctggacaagcgcgtagcctggcgtatgccgcattgaaacaggcgaagcagggcgattttgccgcagcgaaagccatgatggatcagtcacggatggcattgaatgaagcgcatctggtacagacgaaactgattgaaggcgatgcgggcgaaggtaagatgaaagtgagtctggtgctggtccacgctcaggatcatttaatgacgtccatgcttgcgcgtgaactgattactgaattaattgagcttcatgaaaaactgaaggcataa

SEQ ID NO: 473237 - DNA, 168 bp, Shigella flexneri
atgcagccagtgattaacgcgccggaaattgccactgcccgagaacagcagttgtttaatggcaaaaacttccatgtgtttatctataacaaaactgagagtatcagcggactgcatcagcacgactattatgaatttactctagtattaaccgggcgttatttctag

SEQ ID NO: 473238 - DNA, 327 bp, Shigella flexneri
gtgttactggaacggggcgattttgtttttattccgttaggttcgcaccatcaaagtttttatgagtttggtgccacgcgcatattgaacgttgggatcagtaaacgcttttttgagcagcattacctgccgttgttgccttattgctttgttgcttcgcaggtataccggaccaataacgcttttctcacctatgtggaaacagtgatttcttcattaaatttccgcgaaacagggctggaagagtttgttgagatggttactttttatgtcattaaccgtttacgtcattaccgcgaagaacaggtgattgatgatgtaccgtag

SEQ ID NO: 473239 - DNA, 303 bp, Shigella flexneri
atgcatgataaagagcagtttagtgaatcggcgctggagaatatggtgacgttgtcagccaaatcacaggaatatttgacgcgagcgactcaacgatattatggcaaaacaccaatgcagattattaatgagatccgtattaattttgcaaaaaaacaactggaaatgaccaactattccgtgacggatattgcgtttgaggccggttatagtagcccgagtttgtttattaaaacgtttaagaaattaacgtcctttacgcctaagagatatcgtaagaaattgactgaatttaatcagtaa

SEQ ID NO: 473240 - DNA, 1353 bp, Shigella flexneri
atgagccagaaattaaaagtcgtcactattggtggcgggagcagctataccccggagttactggaaggatttattaagcgttatcacgaattgccggtcagcgaattatggctggtggatgtcgagggtggcaaagctaaactggatattattttcgatctctgccaacggatgattgataacgctggcgtcccgatgaagctttataaaacgctggattgccgcgaagcattgaaagatgctgatttcgttactacccaactgcgcgttggccaattaccggcgcgtgaactggatgaacgtattccattaagtcatggttatcttggtcaggaaaccaacggcgcgggcggtttgtttaaaggtctgcgtaccattccggtgatttttgacatcgtaaaagatgtcgaagaactttgtccgaatgcatgggtgattaacttcactaacccggcgggaatggttactgaggccgtttatcgtcataccggatttaaacgttttatcggcgtgtgtaatattccgatcggcatgaagatgtttattcacgatgttctgatgctgaaagacagcgatgatttatctatcgatttgtttggcctcaaccatatggtgttcattaaggatgtgctggtaaatggcaagtcgcgctttgccgaattgcttgatggtgtggcatccgggcagttaaaagtatctggcgttaaaaatattttcgatctgccatttagcgaaggcttaattcgttctctgaatctgttgccgtgttcttatttgctttattacttcaagcaaaaagagatgctggctattgaaatgggcgaatactacaaaggcggcgcacgagcgcaggtagtacagaaagtcgagaaacaactttttgagctgtataaaaaaccggagttgaaagttaagccgaaagaactggaacagcgcggtggggcttattactctgatgcagcgtgcgaagtgatcaacgctatctacaacgacaagcaagctgaacattacgttaatatcccgcatcatgggcatattgataatattccggcagactgggcggtagaaatgacctgtaagctggggcgcgatggcgcgacgccacatccgcgcattacgcatttcgatgataaagtgatggggctgattcacaccattaaaggcttcgagattgctgccagcaacgccgcacttagcggagaatttaacgatgtgttactggcgctaaaccttagtccgttggtgcattccgatcgcgatgctgagctgctggcacgcgagatgattctggcgcacgagaaatggctgccaaattttgccgactgcatcgcagagcttaaaaaagcacattaa

SEQ ID NO: 473241 - DNA, 759 bp, Shigella flexneri
atggaacgcttactgattgttaatgccgatgattttggcttaagcaaaggtcagaactacggcattatcgaggcctgtcgcaatgggattgtcacatcgacgacggcgctggtgaatgggcaggctattgaccatgcggtgcagttgagtcgtgatgaaccgagtctggccatagggatgcactttgtccttactatgggcaagccactgacagctatgccggggttaacccgcgatggtgtgctgggaaaatggatctggcagttggcagaagaagatgctttaccgctggaagaaattactcaggagcttgccagtcagtatttgcgtttcattgagctatttggacgcaaacctacgcatcttgatagccatcatcatgtgcatatgttcccgcagattttcccgattgttgccaggtttgcggctgaagaggggattgcgttgcgcatcgaccgtcagccgctatctaacgctggtgatttaccggctaatctgcgcagttcgcagggattcagtagcgcgttttatggtgaagagattagcgaggcactgttcctgcaagtgctggatgacgcaagccatcggggtgatccttcgctggaggtgatgtgtcatccggcgtttatcgataatactatccgtcagagtgcttactgtttcccacggttaacggagctggaagtgctgacatcagcgtcgttgaaatatgcaattgctgagcgtggttatcggttgggtagttatcttgatgtgtaa

SEQ ID NO: 473242 - DNA, 2262 bp, Shigella flexneri
atgtcgcaacataacgaaaagaacccacatcagcaccagtcaccactacacgattccagcgaagcgaaaccggggatggactcactggcacctgaggacggatctcatcgtccagcggctgaaccaacaccgccaggtgcacaacctaccgcccctgggagcctgaaagcccctgatacacgtaacgaaaaacttaattctctggaagacgtacgcaaaggcagtgaaaattatgcgctgaccactaatcagggcgtgcgcatcgccgatgatcaaaactcactgcgtgccggtaaccgtggtccaacgctgctggaagattttattctgcgcgagaaaatcacccactttgaccatgagcgcatcccggaacgtattgttcatgcacgcggctcagcagctcacggttatttccagccatataaaagcttaagcgatatcaccaaagcggatttcctctcagatccgaacaaaatcaccccagtatttgttaggttctctaccgttcagggtggcgctggctctgccgataccgtgcgtgatatccgtggttttgccaccaagttctatactgaagagggtatttttgacctcgttggcaataacacgccaatcttctttatccaggatgcgcataaattccccgattttgttcatgcggtaaaaccagaaccgcactgggcaattccacaagggcaaagtgcccacgatactttctgggattatgtttctctgcaacctgaaactctgcacaacgtgatgtgggcgatgtcggatcgcggcatcccccgcagttaccgcaccatggaaggcttcggtattcacaccttccgcctgattaatgccgaagggaaggcaacgtttgtacgtttccactggaaaccactggcaggtaaagcctcactcgtttgggatgaagcacaaaaactcaccggacgtgacccggacttccaccgccgcgagttgtgggaagccattgaagcaggcgattttccggaatacgaactgggcttccagttgattcctgaagaagatgaattcaagttcgacttcgatcttctcgatccaaccaaactgatcccggaagaactggtgcccgttcagcgtgtcggcaaaatggtgctcaatcgcaatccggataacttctttgccgaaaacgaacaagcagcattccatccaggtcatattgttcctggtctggacttcaccaacgatcccctgttgcagggacgtttgttctcctataccgatacacaaatcagtcgtcttggtgggccgaatttccatgagattccgattaaccgcccgacctgcccttaccataatttccagcgtgacggcatgcatcgtatggggatcgacactaacccggcgaattatgaaccgaactcgatcaacgataactggccgcgcgaaacaccaccggggccgaaacgcggcggttttgaatcataccaagagcgcgtggaaggcaataaagttcgcgagcgcagcccatcgtttggcgaatattattcccatccgcgtctgttctggctaagtcagacgccattcgagcagcgccatattgtcgatggtttcagttttgagttaagcaaagtcgttcgtccgtatattcgtgagcgcgttgttgaccagctggcgcatattgatctcactctggcccaggcggtggcgaaaaatctcggtatcgaactgactgacgaccagctgaatatcaccccacctccggacgtcaacggtctgaaaaaggatccatccttaagtttgtacgccattcctgacggtgatgtgaaaggtcgcgtggtagcgattttacttaatgatgaagtgagatcggcagaccttctggccattctcaaggccatgaaggccaaaggcgttcatgccaaactgctctactcccgaatgggtgaagtgactgcggatgacggtacggtgttgcctatagccgctacctttgccggtgcaccttcgctgacggtcgatgcggtcattgtcccttgcggcaatatcgcggatatcgctgacaacggcgatgccaactactatctgatggaagcctacaaacaccttaaaccgattgcgctggcgggagacgcgcgcaagtttaaagcaacaatcaaggtagctgaccagggtgaagaagggattgtggaagctgacagcaccgacggtagttttatggatgaactgttaacgctgatggcagaacaccgcgtgtggtcacgcattcctaagattgacaaaattccggcgtaa

SEQ ID NO: 473243 - DNA, 264 bp, Shigella flexneri
atgcgtttagtgaagccagtaatgaagaaaccgctccgccagcaaaaccgccagattattagctatgtcccacgcacggaacccgcgccgccagaacatgcgataaagatggattcgtttcgtgatgtctggatgctgcgtggcaaatatgttgcgtttgtactgatgggagagtcatttctgcgctcaccggcgtttactgtgcctgaatctgcccaacgttgggcaaatcagatccgccaggaaggggaagtgactgagtaa

SEQ ID NO: 473244 - DNA, 486 bp, Shigella flexneri
atgttttctacaaacttaatacagagtaattatggtgatttaaatattaaaagcctggctttcgactcttttaaagaaaggcttgagtctaccatggcggcactcactttctttatatcaacgggtcaatgtgactgcgatgaaatagcagagtcgaacttcaatcgtatgattgcctatatgtctaacattaactatgatgcctcaaagctaggagcgccagcacttagttttgatacgtatctgcaggacaatgttaaatatagagtgataattaataatctttatggcagtgagtttcggataagagatattaatgagaattttgttgggatggattttacctgtgaattccgacccgaaaaaatgacgaatttgatcaatataaaaaataggttggttattcattatttaaggactatatactatgaaaaaaattatatacatcctgccgggagcatttttgctgcgattcaaaaaaaatga

SEQ ID NO: 473245 - DNA, 378 bp, Shigella flexneri
atgaaaaaaattatatacatcctgccgggagcatttttgctgcgattcaaaaaaaatgagagtctcctaaagtttccttcgataatatcaatgcttaatatcaatcttctttttaatccactaaatcttccgggaatgggaagtggtgtgcttgaagatattatgagtattccagatagttcacttagaaaacgtctcgggtatgaggttttaagcttctcactacaggcacattcattgagccaggaatgtattgataagttggacatttttttcgctgacgatctgtttaaatatgagtcagtatgcatcgccgcgatggaacatttaaaaagtaaagcaacggcccctatacaaaacggaccgttgccagcataa

SEQ ID NO: 473246 - DNA, 324 bp, Shigella flexneri
atggttgcgcctacggttggcattaacccgctggacccgatgtggattgcgacgctggtcggtattgttaccgttagttccgcaggcgttgccggtgtcggtggtggtgcaactttcgccgcactgattgtgctgcctgcgatgggcctgccagtaaccctggtggcgctgttaatctccgttgaaccgcttatcgacatgggccgtacggcgctaaacgttagtggctcgatgacagctggcacgctgaccagccagtggctgaagcaaaccgataaaaccattctggatagcgaagacgacgccgaactggcacaccgttaa

SEQ ID NO: 473247 - DNA, 1068 bp, Shigella flexneri
atgaactttccattaattgcgaacatcgtggtgttcgttgtactgctgtttgcgctggctcagacccgccataaacagtggagtctggcgaaaaaagtgctggtgggtctggtgatgggtgtggtttttggccttgccctgcataccatttatggttctgacagccaggtacttaaagattctgtacagtggtttaacatcgttggtaacggctatgttcaactgctgcaaatgatcgttatgccgttagtcttcgcctctattctgagcgcggttgcccgtctgcataacgcatctcagttaggcaaaatcagttttctgaccatcggtacgcttttgtttaccacgctgattgcggcgctggtcggtgtgctggtcaccaacctgtttggtttgacggctgaaggtctggttcagggtggtgcagaaactgcacgtctgaacgccattgaaagtaactatgttggtaaagtctctgatcagagcgttccgcagctggtcttgtcctttatcccgaaaaacccgtttgccgatcttaccggagccaatccgacgtcaattatcagcgtggtaatttttgccgcattcctcggcgtagctgcattgaaactgctgaaggatgatgcgccgaaaggggaacgcgtcttaaccgctatcgataccctacaaagctgggtgatgaaactggttcgccttgtcatgcagttgaccccttacggcgttctggctctaatgaccaaagtggttgcaggttctaacttgcaagacatcatcaaactgggaagtttcgttgtcgcgtcctacctcggtctgctgattatgtttgctgtgcatggcattctgctgggcattaatggcgtgagtccgctgaagtacttccgtaaggtatggcctgtgctgacgtttgcctttaccagccgttccagtgctgcgtctatcccactgaatgtggaagcacaaacgcgtcgtctgggcgttcctgaatccatcgccagtttcgccgcctctttcggtgcaaccattggtcagaacggctgcgccggtttgtatccggcaatgctgcggtga

SEQ ID NO: 473248 - DNA, 591 bp, Shigella flexneri
atgacggcggaaggtcaccttctcttttctattgcttgtgcggtatttgccaaaaatgccgagctgacgcccgtgctggcacagggtgactggtggcatattgtcccttccgcaatcctgacgtgtttgttaccggacatcgatcacccaaagtcgtttcttgggcagcgattaaaatggatatcaaaaccgatcgcccgcgcttttgggcatcgtggttttacccacagtctgctggcggtatttgcgctgctggcaaccttttaccttaaggttccggaaggctggttcattccggctgatgcgctacaaggaatggtgctgggttatttgagccacatacttgccgatatgctgacacccgccggtgttcccctgctctggccatgccgctggcgtttccgcttgcctatcctggttccccaaaagggcaaccaactggaacgttttatctgcatggcattatttgtctggtcggtatggatgccccattcattacccgagaacagcgctgttcgttggtcatcgcaaatgatcaataccttgcagatccagtttcatcggcttattaagcatcaggttgaatactaa

SEQ ID NO: 473249 - DNA, 669 bp, Shigella flexneri
atgtcaaccccgcgtcagattcttgctgcaatttttgatatggatggattacttatcgactcagaacctttatgggatcgagccgaactggatgtgatggcaagcctgggggtagatatctcccgtcgtaacgagctgccggacaccttaggtttacgcatcgatatggtggtcgatctttggtacgcccggcaaccgtggaatgggccaagccgtcaggaagtagtagaacgggttattgcccgtgccatttcactggttgaagagacacgtccattattaccaggcgtgcgcgaagctgttgcgttatgcaaagaacaaggtttattggtgggactggcctccgcgtcaccactacatatgctggaaaaagtgttgaccatgtttgacttacgcgacagtttcgatgccctcgcctcggctgaaaaactgccttacagcaagccgcatccgcaagtatatctcgactgcgcagcaaaactgggcgttgacccactgacctgcgtggcgctggaagactcggtaaatggcatgatcgcttctaaagcagcccgcatgcgttccatcgtcgttcctgcgccagaagcgcaaaatgatccacgttttgtattagcaaacgtcaaactctcatcgctgacagaactcaccgcaaaagaccttctcggttaa

SEQ ID NO: 473250 - DNA, 537 bp, Shigella flexneri
atgacgtatcaacaagctggacgcattgctgttttgaaaaggattttgggttgggtgatttttatacctgcattgatctctacattgatttctttgctgaaatttatgaatacccggcaggaaaaccaggaaggcattaatgcggtcatgctcgactttgctcatgtcatgatcgatatgatgcaggcgaatacgccttttttgaatctgttctggtataactccccgacccctaattttaatggtggtgtgaacgttatgttctgggtgattttcatcctgatttttgtcggactggcgttgcaggattccggtgcccggatgagtcgccaggcgcgcttcttgcgggaaggtgttgaagatcaactcattctggaaaaagccaaaggggaagaggggctaacgcgtgaacaaattgagtcccgtattgttgttccgcaccatactattttcctgcagtttttctcactatatatcctgccggttatttgtattgctgcaggttatgtgttcttttctctgcttgggtttatttaa

SEQ ID NO: 473251 - DNA, 861 bp, Shigella flexneri
atgtggcaggcaatcagtcgtcttttgagcgagcagttaggtgaaggcgaaatcgaactgcgtaatgaactgcctggcggagaagtccatgccgcatggcatttgcgctatgcaggacatgactttttcgtcaaatgtgatgaaagggaactgcttcccggttttaccgccgaagccgaccaactggagttactgtcgcgtagtaaaaccgtcaccgtgcctaaggtttgggcagtaggcgctgaccgtgactacagttttctggtgatggattatctcccacctcgtccgctggatgcgcatagcgcatttattcttggtcagcaaattgcgcgtttacatcaatggagtgaccaaccacaatttggcctcgattttgataactcgctctccacaactccacagcccaacacctggcaacgtcgctggtcaacgttttttgctgaacaacggattggctggcagttggaactggcagcagagaaagggatcgctttcggcaatatcgacgccatcgtcgagcatattcagcagcgtctggcctcgcatcaaccgcagccttctctgttgcacggcgatttatggtccggcaactgtgcgctgggtccggatggcccgtacattttcgaccctgcctgcgactggggtgaccgagagtgcgacctagcgatgttaccgctgcatactgaacagccgccacaaatctatgacggctatcagtcagtatccccgctacctgccgatttccttgaacgtcaaccggtttaccaactctacacgctgttaaatcgtgcaagattatttggcggtcagcatttggttattgctcagcagtcattggatagattattagcagcatga

SEQ ID NO: 473252 - DNA, 291 bp, Shigella flexneri; identical to SEQ ID NO: 460811

SEQ ID NO: 473253 - DNA, 930 bp, Shigella flexneri
atggtacgtatctatacgttgacacttgcgccctctctcgatagcgcaacaattaccccgcaaatttatcccgaaggaaaactgcgctgtaccgcaccggtgttcgaacccgggggcggcggcatcaacgtcgcccgcgccattgcccatcttggaggcagtgccacagcgatcttcccggcgggtggcgcgaccggcgaacacctggtttcactgttggcggatgaaaatgtccccgtcgctactgtagaagccaaagactggacccggcagaatttacacgtacatgtggaagcaagcggtgaacagtatcgttttgttatgccaggcgcggcattaaatgaagatgagtttcgccagcttgaagagcaagttctggaaattgaatccggggccatcctggtcataagcggaagcctgccgccaggtgtgaagctggaaaaattaacccaactgatttccgctgcgcaaaaccaagggatccgctgcatcatcgacagttctggcgaagcgttaagtgcagcactggcgattggtaacatcgagttggttaagcctaaccaaaaagaactcagtgcgctggtgaatcgcgaactcacccagccagacgatgtccgcaaagccgcgcaggaaatcgttaatagcggcaaggccaaacgggttgtcgtttcccttggtccacaaggagcgctgggtgtcgatagtgaaaactgcattcaggtggtgccaccaccggtgaaaagccagagtaccgttggcgctggtgacagcatggtcggcgcgatgacactgaaactggcagaaaatgcctctcttgaagagatggtccgttttggcgtagctgcggggagtgcagccacactcaatcagggaacacgtctgtgctcccatgacgatacgcaaaaaatttacgcttacctttcccgctaa

SEQ ID NO: 473254 - DNA, 759 bp, Shigella flexneri
atgaagcttttgaagacagttcctgccatcgttatgttggcggggggcatgtttgcgtcactgaatgcagctgccgatgattccgtttttactgtcatggacgatcctgccagcgctaaaaaacctttcgaaggtaatctgaacgcaggatatcttgcacaatcaggcaatacgaaaagctcctcacttacggctgacaccaccatgacctggtatggacaaaccactgcctggtcgctgtgggggaacgccagtaatacttcttctaatgatgagcgttcttcagaaaaatatgcggcgggcgggcgtagccgctttaatttaactgattatgactatttatttggtcaggcaagctggctgacagaccgttataacggctatcgagagcgcgatgtgttgaccgcgggttatggtcgtcagtttttgaatggcccggtacacagtttccgctttgaattcggtccaggtgtgcgttacgacaaatataccgacaatgccagtgaaacccagccgctgggctatgcctccggggcttatgcatggcagttgactgacaacgctaaatttacgcagggtgtttcggtctttggcgcggaagacacaacgctgaactccgaaagcgcattaaatgttgctattaatgaacattttggactgaaggtggcttacaacgtcacatggaactctgaacctccagagtctgcaccggaacataccgaccgtcggacaaccttatcgctgggctacagcatgtaa

SEQ ID NO: 473255 - DNA, 432 bp, Shigella flexneri
atgaaaatacatgatggtgagccaggattatacgccgcaatggaaaataatcaccctttgtgtgtcacacggttcctctctaaaattaatggcatcgcctttaaatacaagttgagcaaagctaacatcatggatttattaaaaggagctacagcacagggaacccctgcattatacatcgccatgagcaagggtaatgaagacgtcgtgttatcttatatatcgacgctgggtgcttttgcaaaaaaacattcttttagtcaacatcagttatttacactattggccgctaaaaatcatgacaacatgtcagctgttcatatagccattcatcataagcattataaaactgtagaaacatattatgctgctataaatgtcatcagccaaagcctgagttttagtgctgatgaaataaagacgtatttataa

SEQ ID NO: 473256 - DNA, 390 bp, Shigella flexneri
atggctacaggccagactcaacagcttattacattattcaaacagttgcccatactccctgaaaaagaaatcattgaaataataactgcgcagaatagcgttggtacacctgctttatttttggctatgatgaacggacatactgacaacgtgaaaatatttatgcaagaaattcagtcactggtagataatcacatcattcatgaagataatctggttaaattactgcaaactaaaagtgctaacgaaacacctggactttatatctccatgttgtatggattcgatgaaataatcgatatctttctgaatacattaaccactccaatagcactaagagcttttaaacaaaaaactggtgatgagtattttagccatgaaaatacatga

SEQ ID NO: 473257 - DNA, 891 bp, Shigella flexneri
atgagtaatgttattgcatcgcttgaaaaggtactcctcccttttgcagttaaaataggaaagcagccacacgttaatgcaatcaaaaatggctttattcgcttaatgccgttaacccttgcgggggccatgtttgtattaattaacaacgtttttctaagctttggggaggggtcgtttttttattccttaggtattcgcctcgacgcctcaaccattgaaacacttaatggtctgaaaggtattggcggcaacgtatataacggaacattaggaataatgtctttaatggcaccgttctttattggcatggcgctggcagaagagcgtaaagtcgatgcgctggcggctgggttgttatccgttgcagcatttatgaccgtcaccccatatagtgtcggtgaggcctatgcggttggcgcaaactggttaggtggggcgaatatcatctccgggattattattggcctggtggtggcagaaatgtttacctttattgtccgccgcaattgggtcattaaactgcccgacagcgtacctgcttcagtatcgcgttctttctcggcattaattcccggctttattattctttccgtgatggggattattgcctgggcgttgaatacctggggcaccaacttccatcagatcattatggataccatctcaaccccactggcatcgttgggtagcgtggtgggctgggcctatgtgatctttgttccactgctctggttcttcggtattcatggcgcgctggcgctgaccgcactggacaacggcattatgacgccgtgggcgctggaaaatatcgcgacctatcagcaatatggttccgtcgaagcggcgctggcagccggtaagaccttccatatctgggccaagccctga

SEQ ID NO: 473258 - DNA, 321 bp, Shigella flexneri
atggaaaagaaacacatttatctgttttgttctgcgggcatgtctatctctttactggtatcaaaaatgcgcgcacaggcagaaaaatatgaagttccggtcattattgaagcatttccggaaacactggctggtgaaaaaggtcagaatgccgatgtcgtgttattagggccgcagattgcttatatgttgcccgaaatccagcgtttgttacccaacaaaccggttgaagtaattgactcgctgctttatggcaaagtcgatggtttaggcgtgcttaaggctgcggttgcagcgattaaaaaagccgcagcaaattaa

SEQ ID NO: 473259 - DNA, 339 bp, Shigella flexneri
atgaacaagaatatggcaggaattctgagtgcagcggcggtattaaccatgctggcgggttgtacagcttatgatcgtaccaaagaccagtttgtacagcctgtggtgaaagacgtcaaaaaaggcatgagccgggcgcaggttgcacaaattgcgggtaaaccttcgtctgaagtgagcatgatccatgctcgcggtacttgccagacctacatcctgggtcaacgtgatggtaaagcagaaacctactttgtcgcgttagatgataccggacatgtcatcaactccggttatcagacctgtgctgaatacgacactgatccacaggctgcgaagtaa

SEQ ID NO: 473260 - DNA, 828 bp, Shigella flexneri
atgacattgcaacaacaaataataaaggcgctgggcgcaaaaccgcagattaatgctgaagaggaaattcgtcgtagtgtcgattttctgaaaagctacctgcaaacttatccgttcattaaatcactggtgctcgggatcagcggcggtcaggactccacgcttgccggaaagctgtgccagatggcgattaatgagctgcgccaggaaactcgcaacgaatcactgcaatttattgccgtacgcctgccctatggtgttcaggctgacgaacaagattgccaggatgccattgcctttattcaaccggatcgcgtattaaccgttaatatcaagggcgcggtattggctagcgagcaggcattgcgggaagcaggcattgaactgagcgattttgtccgtggcaatgaaaaagcgcgtgagcggatgaaagcacaatatagcattgcgggtatgaccagcggtgtcgtggtgggcaccgatcatgcagcagaagccattaccggattcttcactaaatatggtgacggcggtacggatattaatccgctgtatcgtctcaacaaacgccagggtaaacagttactgacggcattaggttgcccggaacacctttataagaaagccccaactgccgatcttgaagatgatcgcccttctctgccagatgaagtggcactcggcgtgacctatgacaatatcgacgactatctggaagggaaaaacctacctgaacaggtcgccagaacaatagagaactggtatctgaaaaccgaacataaacgccgtccgccaattaacgttttcgatgatttctggaaaaagtaa

SEQ ID NO: 473261 - DNA, 888 bp, Shigella flexneri
gtggtacggcgtttaacttctccgcggctcgaatttgaagctgcggcaatttatgaatatcccgaacatttacattcattccttaatgacttacccacccgaccaggggtgtatctgtttcatggcgaaagtgacaccatgccgctctatatcggcaaaagcgttaatatccgcagtcgggtgctttctcatttacgcaccccggatgaagccgccatgctacggcaatcccggcgaattagctggatctgcaccgcaggcgaaatcggcgctctgctccttgaagcgcgattaatcaaagaacaacagccgctgtttaataaacggttgcgccgcaatcgccagctctgtgccctgcaattaaatgaaaagcgcgtcgatgtggtgtatgccaaagaggtggatttttcacgagcccccaacctgtttggcctgtttgccaataggcgcgcagctttgcaagcattgcagagcatcgctgatgaacaaaaactttgttatggcctgttgggactggaaccgttaagtcgcggtcgtgcatgttttcgttcagcgctaaaacgttgcgccggagcatgctgcggtaaagagagccatgaggaacatgcgctacgcttgcgccagtctctggagcgtttgcgagtggtgtgttggccttggcaaggtgcggtggcactgaaagaacagcacccggaaatgactcaatatcatattattcaaaactggctgtggctgggggcggttaattcgctggaagaagcgacaacgttaattcggacacccgccgggtttgatcacgacggttataaaattctttgtaagccgctgctttccggtaactatgaaattactgaacttgatccggcgaatgaccagcgagccagttga

SEQ ID NO: 473262 - DNA, 576 bp, Shigella flexneri
atggaatactttgatatgcgtaaaatgtcggtgaatctgtggcgaaacgctgccggtgaaacgcgcgaaatttgcactttcccaccggcaaaacgtgatttttactggcgtgccagcattgcatccatcgcggcgaatggggagttttctttgtttcccggcatggaaaggatagtgacgttgctggaaggcggcgagatgctccttgaaagcgcagaccgctttaaccataccttaaaaccgttacagccttttgcctttacggcggaccaggtggtaaaagcgaaactgacggcagggcagatgtcgatggatttcaatattatgacgcgcctggatgtctgtaaggcgaaagtcagaattgccgaacgtacgtttactacctttggctcacgcggcggggtggtgtttgtgattaacggggcgtggcaactgggcgacaaactgctcactaccgaccagggcgcgtgctggttcgatggcaggcacaccctgcggcttttacaaccgcaaggtaaactgttgttcagtgaaatcaactggctcgctggtcattcgccggatcaagttcagtaa

SEQ ID NO: 473263 - DNA, 486 bp, Shigella flexneri
atgcgtaaattaactgcactgtttgttgcctctaccctggctcttggcgcggctaacctggcccatgccgcagacaccactaccgcagcaccggctgacgcgaagccgatgatgcaccacaaaggcaagttcggtccgcatcaggacatgatgttcaaagacctgaacctgaccgacgcgcagaaacagcagatccacgaaatcatgaaaggccagcgtgaccagatgaaacgtccgccgctggaagaacgccgcgcaatgcatgacatcattgccagcgataccttcgataaagcaaaagctgaagcgcagatcgcaaaaatggaagaacagcgcaaagctaacatgctggcgcacatggaaacccagaacaaaatttacaacatcctgacgccggaacagaaaaagcaatttaatgctaattttgagaagcgtctgacagaacgtccagcggcaaaaggtaaaatgcctgcaactgctgaataa

SEQ ID NO: 473264 - DNA, 969 bp, Shigella flexneri
atggataattttcttgctctgaccttaacgggtaaaaaaccggttatcaccgagcgagaaatcaacggcgttcgctggcgctggctgggcgatggtgtgctggaactgacgccattaacgccaccgcaaggcgcgctggtgatttctgcggggatccacggtaatgagacggcacctgtggaaatgctggacgcgttgcttggcgcgatatctcacggcgagatcccgttacgttggcggttgctggtgatcctcgggaatcctcctgcgctgaagcaagggaaacgttattgccatagcgatatgaaccgaatgtttggcggtcgttggcagctatttgctgaaagcggagaaacctgtcgggcgcgcgaactggaacagtgcctggaagatttttatgaccagggcaaagaatctgtgcgttggcaccttgatctacataccgcaattcgtggctccttgcatccgcagttcggtgtattaccgcaacgcgacattccctgggacgagaaatttctgacgtggctgggtgcggcggggctggaggcgctggtgttccatcaggagcctggtggtacgtttacccatttcagcgtcagacattttggcgcgctggcctgtacgttggaacttggcaaagcgttgccctttgggcaaaacgatcttcgccagtttgcagtaactgccagcgcaattgctgcgctgctatctggtgagagtgtcggtatcgtgagaacaccgccgctccgttatcgggtggtttcgcaaattactcgccactcgccgtccttcgaaatgcatatggcaagtgacacgctgaattttatgccgtttgagaaaggaacattgctggcgcaggacggagaggaacgttttaccgtaacccatgatgtagagtatgtgttattccctaatccgttggtagcgttgggattacgcgcgggattaatgctcgaaaaaataagctaa

SEQ ID NO: 473265 - DNA, 504 bp, Shigella flexneri
gtgaacggttttatggcgatagaagttccggcaactcaggtttccgtgtcggatgcggtgtctacctatctgtttaacagccaactgttgagccgcgatgatggttccatgatgttggtgctgcctcaggagtgtcgggaacacgccggagtatggggttatctcaatgaactccttgccgctgacaacccgattagcgaactaaaagtctttgacttacgtgaaagcatggcgaatggcggcggcccggcgtgcctgcggttgcgggtggtattgacagaagaagaacgccgggcggtgaatccggcggtgatgatgaacgataccttgtttaatgcgctcaatgactgggtggatcgttactaccgcgatcgtcttactgctgccgatctggccgacccgcaattgctgcgcgaagggcgggaaggactggatgtattgagccaattactgaatctcggttcggtttatccgttccagcgcgagggagggggcaatggataa

SEQ ID NO: 473266 - DNA, 834 bp, Shigella flexneri
atgaacgcctgggaagttaatttcgacgggctggtagggctgacgcatcattacgcgggcctgtcgtttggtaatgaagcctctacccgtcaccgttttcaggtgtctaacccgcgactggcggcaaaacagggcttactgaaaatgaaagcccttgccgatgcgggattcccccaggccgtgatcccgccgcacgagcgtccgtttattccggtgctgcgtcagttgggattcagtggtagcgatgagcaggtactggaaaaagttgcacgccaggcaccgcactggctttccagcgtcagttccgcttcgccaatgtgggtagccaatgcggcaacgatcgcgccatctgccgatacgctggatggcaaagtgcatctcaccgttgccaacctgaacaataaatttcaccgttcgctggaagcgcccgtcactgaatcgctgttaaaagcgatttttaaggacgaagagaaatttagcgtccattcggcgttgccgcaggtagcgttgctcggtgatgagggggcggcaaaccacaatcgtctcggcggtcattacggtgaaccgggtatgctactttttgtctacgggcgagaagaaggcaatgatacccggccttcccgttatccggcgcgacagactcgcgaagccagcgaggtggtggcaaggcttaatcaggtgaatccccaacaggtgattttcgcccagcaaaacccggacgttatcgaccagagcgtttttcataatgacgtgattgccgtgagtaaccgccaggtgctgttttgccaccaacaggcgttcgctcgccagtcacagttactggcacgcgggtga

SEQ ID NO: 473267 - DNA, 1479 bp, Shigella flexneri
atgactttatggattaacggtgactggataacgggccagggcgcatcgcgtgtgaagcgtaatccggtatcgggcgaggtgttatggcaaggcaatgatgccgatgccgctcaggtcgaacaggcttgtcgggcagcccgtgcggcgtttccgcgctgggcgcggctctcattggctgaacgtcaggtcgttgtcgaacgctttgccggattgctggaaagcaataaagccgaattaaccgcgattattgccagagaaacgggtaagccgcgctgggaagcggcaaccgaagtgacggcgatgatcaataaaatcgcgatatcaattaaggcgtatcacgttcgtaccggcgaacagcgtagtgaaatgccggacggtgcggcgagcctgcgacatcgcccgcacggcgtgctggcggtgtttgggccgtataatttccctggtcatttgccgaacggacatatcgttccggcattgctggcaggtaacaccattatctttaaacccagcgaactgacaccgtggagtggcgaagcggtaatgcgtttatggcagcaggctggcttgccgccgggcgtgctgaacctggtgcagggcgggcgtgaaacgggtcaggcgctgagtgcgctggaggatctcgacggtttgctgtttaccggtagcgccaataccggctaccagctgcatcgccagctctccggtcagccggagaaaattctcgcccttgagatgggcggtaataatccgctaattatcgatgaggtggcggatatcgacgcggctgtccatctgaccattcagtcggcgtttgtcacagccgggcaacgctgcacctgcgcccgccgtttattgctcaaaagcggagcgcagggcgatgcgtttcttgctagtctggttgccgtcagccagcgattaacgccgggcaactgggatgacgaaccgcagccgtttattggcgggctgatttctgaacaggccgcacagcaggtggttactgcctggcagcaactggaagcgatgggcggacgaaccctgcttgcgccgcgcttattacaagcagggacatcgttgctgacaccagggatcattgaaatgacgggcgttggcggtgtgccggatgaagaggtgttcgggccgcttttgcgcgtctggcgttatgatacttttgatgaggcgattcggatggcgaacaacactcgcttcggactcttttgcggtctggtttcccccgagcgggaaaaattcgatcaactgttgctggaggcgcgggcggggattgttaactggaacaaaccgcttactggtgctgccagtaccgccccattcggcggcattggtgtttccggtaaccatcgccccagcgcctggtatgccgcagattactgcgcatggcctatggcgagcctggagtcggactcgttaacattgcccgccacgcttaaccccgggctggatttttccgatgaggtggtgcgatga

SEQ ID NO: 473268 - DNA, 627 bp, Shigella flexneri
gtgccagccagcaacgcgtttttacaaggtctgcgtgaattgtgtgaccgccacaatgccttgctgatttttgatgaggtacaaaccggcgtcgggcgcactggtgagctgtatgcctatatgcactacggcgtgacgcccgatctgttaaccaccgccaaagcgctgggcggcggtttcccggtcggtgcgttgttggcaaccgaagagtgcgcccgcgtgatgaccgttggcactcatggcaccacctatggcggtaatccgctggcctcggcggtagcaggcaaagtgctggagctcatcaacacaccagagatgcttaatggcgttaaacagcgtcacgactggtttgttgagcgtcttaatactattaatcaccgctatggtttgttcagtgaagttcgcggcttaggtttgttgattggctgtgtactgaatgccgattacgccgggcaagcgaaacagatctctctggaagcggcgaaagcaggcgtgatggtactgattgcgggtggcaacgtggtgcgttttgcgcctgcgctcaatgtcagcgaagaagaggtgacgaccggactggatcgctttgcagctgcttgcgaacactttgttagccgaggttcatcatga

SEQ ID NO: 473269 - DNA, 579 bp, Shigella flexneri
atgtctcagccaattacgcgtgaaaactttgatgaatggatgatacctgtttacgctccggcaccctttataccggtacgtggcgaaggttcgcgcttgtgggatcagcaggggaaagagtatatcgacttcgcgggtggcattgcggtgaacgcgctgggccatgcgcatccggaactgcgtgaagcgctgaacgaacaggcgagtaagttctggcataccggcaacggttacaccaacgagccggtactgcgactggcgaaaaaattgatcgacgccacgtttgccgatcgcgtcttcttttgtaactccggtgcggaagccaacgaagcggcgctaaaactggcgcgtaaattcgctcacgaccgctacggcagccataagagtggcatcgtggcgttcaaaaatgcgtttcatggtcgcacgctgtttactgtcagtgcgggtgggcagccagcctattcacaggattttgcgccactgccggcggatattcgtcatgctgcatataacgatattaactctgccagcgcgctgattgacgacgccacctgtgcggtgattgtcgagcccatctag

SEQ ID NO: 473270 - DNA, 807 bp, Shigella flexneri
atgaaatttgtctcttttaatatcaacggcctgcgcgccagacctcaccagcttgaagccatcgtcgaaaagcaccaaccggatgtgattggcctgcaggagacaaaagttcatgacgatatgtttccgctcgaagaggtggcgaagctcggctacaacgtgttttatcacgggcagaaaggccattatggcgtggcgctgctgaccaaagagacgccgattgccgtgcgtcgcggctttcccggtgacgacgaagaggcgcagcggcggattattatggcggaaatcccctcactgctgggtaatgtcaccgtgatcaacggttacttcccgcagggtgaaagccgcgaccatccgataaaattcccggcaaaagcgcagttttatcagaatctgcaaaactacctggaaaccgaactcaaacgtgataatccggtactgattatgggcgatatgaatatcagccctacagatctggatatcggcattggcgaagaaaaccgtaagcgctggctgcgtaccggtaaatgctctttcctgccggaagagcgcgaatggatggacaggctgatgagctggggggtggtcgataccttccgccatgctaatccgcaaacagcagatcgtttctcatggtttgattaccgctcaaaaggttttgacgataaccgtggtctgcgcatcgacctgctgctcgccagccaaccgctggcagaatgttgcgtagaaaccggcatcgactatgaaattcgcagcatggaaaaaccgtccgatcacgcccccgtctgggcgaccttccgccgctaa

SEQ ID NO: 473271 - DNA, 207 bp, Shigella flexneri
atgaacgctgagcgtaactttctgtttgcctgtcttatttttgcgctggtcatttacgctatccacgctttcggtttattcgatctgctcaccgatttaccccacttacagacactcattcgccagagcggattgttcggttatagcctctatattctgttattcatcaatgccccctctttctgttaccaggaagcatactggtga

SEQ ID NO: 473272 - DNA, 678 bp, Shigella flexneri
atgtcgcaacattattcagtgtcatggaaaaaaggactggctgcactctgcttactggctgttgccgggcttagcggctgcgatcaaaaagagaatgcggcggcaaaagtggaatacgacggactttcgaacagccaaccgctgcgcgtcgatgccaataaccatacggtaaccatgctggtgcaaattaatggtcgtttcctcaccgacgacactcgtcacggtattgtgtttaaagatggctccaacggacataaatcgctgtttatggcttatgcgcccccgaaagcattttatgaagccctgaaagaggcaggtggtacgccgggcgaaaacatgacgatggataataaagaaacgactcatgtcacaggcagcaaactggatatttcggtcaactggcaaggggcggcaaaagcgtattccttcgatgaagtgattgttgacagtaatggcaagaaactggacatgcgctttggcggtaatttaacggcagcagaagagaagaaaacgggttgcctggtgtgtctggatagctgcccggtcggcatcgtcagcaatgcaacatacacttatggtgcggtggaaaaacacggcgaagtgaaattcaaaggcaatgcctcagttctcccggcggataacacgctggcaacggttacctttaaaatcaccgaataa

SEQ ID NO: 473273 - DNA, 708 bp, Shigella flexneri
atgatgaagatacaatcgcgtaaaatctggtactaccgtataaccctcatcatcctgttgttcgctatgctgctcgcatgggcgctgcttcccggcgtccatgagtttatcaatcgcagcgttgcggcgtttgccgccgtggaccaacagggtatagaacgctttattcagtcttacggcgcactggcggcagttgtctcgttcttgttgatgattttacaggccattgctgcaccgctacctgcgtttttgatcacctttgccaatgcgtcgctgtttggcgcgttctggggcggcttgctgtcgtggaccagttcgatggccggcgcggcgctgtgcttttttatcgccagagtgatgggccgcgaagtggtggaaaaattaaccggcaaaaccgtgcttgacagtatggacggctttttcactcgctacggcaaacacaccatcctggtctgtcggttattgccttttgtccctttcgatccaatcagctatgctgccggtctgacttcaatacgttttcgctcgttttttatcgccaccgggcttggtcaattaccggcgactattgtttattcctgggcaggcagcatgttaacaggcggtactttctggtttgtcaccgaactgtttattctgtttgccctgaccgtggtgatttttatggcgaagaaaatatggcttgagcgccagaagaggaatgactga

SEQ ID NO: 473274 - DNA, 549 bp, Shigella flexneri
atgggtttaccgccgcttagcaaaattcctttcattttacgtccgcaggcgtggctgcatcgtcgccattacggcgaggtgctaagcccgattcgctggtgggggcggatcccgtttatcttttatttggtgtcaatgtttgttgggtggctggagcgcaaacgctcaccgctcgatccggtagtgcgatcgcttgtcagcgcgcgcattgcgcaaatgtgcctgtgtgagttttgcgtggatatcaccagtatgaaagtcgccgagcgtaccggcagcaccgataaactgctggcagtggctgactggcggcaaagcccgctctttagcgatgaagaacggctggcgctggagtacgccgaagccgcaagcgtcacaccgccaacagtcgatgatgccctgcgtacccgactggctgcgcattttgacgctcaggcgctcaccgaactgacggcattgatcggcctgcaaaacctgtcggctcgttttaattctgccatggacattcccgctcaggggctgtgccgtattccggaaaaacgttcttaa

SEQ ID NO: 473275 - DNA, 330 bp, Shigella flexneri
atgcgccattgtgggtggttgctgggattgttatcgctgttttctttggcaacacatgccagtgactggcaggaaattaaaaatgaggccaaagggcaaaccgtctggtttaacgcctggggcggcgataccgcaattaaccgctatctcgactgggttagcggcgagatgaaaacccattacgctataaacctgaagattgttcgtctcgcggatgccgcagacgcggtgaagcgcattcagaccgaagctgctgccggtcgtaaaacgggcggctcggtggatctgctctgggtgaacggcgaaaacttccgcaccttaaaagagtaa

SEQ ID NO: 473276 - DNA, 1098 bp, Shigella flexneri
atgaattactggcaaccggagcggttatctggtcgggacaaaaaaaagctgggtgaagatgacggcctggtggcactgcatctacagaaatatgccgcagaatcgttcactcccgccgaagcggatcaggcgaatcgttcggcgctgcagcaagcgataatcgctgttctggctgacggaggagcctggtttgcacaacaaatcagccaacggatacgcgataaaatcgtcgaatcggttgattcctcggcactgcaagaggcgttatgggcgctggtctggcaaggcgtcattaccagcgatatttgggcaccgttacgcgccctcacccgcagcagttccaacgcacgcacctcaactcgccgcagtcaccgggctcgtcgtgggcgtcctgtctatgcacaacccgtctcgccgcgggtatcttacaacacaccaaatctggctggacgctggtcgttattgcaggtggagccactaaacgataccgaaaggatgctggcgctggcggaaaatatgctcgaccgctacggcatcatcagtcgtcaggcggtgatagccgaaaatatccctggcgggtttccatcgatgcaaacactttgtcgaagtatggaagactccgggcgaattatgcgaggtcgttttgtagaaggtctgggtggcgcgcaattcgctgaacgtctgactattgaccgattgcgcgatctggcgacacaagccacgcaaacacgccactatacaccagtggcgctctccgccaacgatccggctaatgtgtggggaaatcttctgccctggcctgcacatccggcaacgctggtaccaacgcgtcgggcgggtgcgctggtggtcgtttctggcggcaaattgttactctatctggcgcaaggcggcaaaaaaatgctggtctggcaggaaaaggaggaattactcgccccagagattttccaggcgctgaccaccgcactgcgtcgcgaaccaaggctgcgctttacgctaacagaagtgaatgatcttccggtccggcaaacgccgatgtttacgctgctgcgtgaggcgggattttcaagttcgccacaagggctggattggggatag

SEQ ID NO: 473277 - DNA, 3417 bp, Shigella flexneri
atggcagataatccagacccttcatcgctcctgccggacgtgttttcaccggcgacccgcgactggtttcttcgcgcctttaaacagccgaccgctgtccagtcgcaaacctggcatgtggcggcgcgaggcgaacatgcgctggtgattgcaccgactggctccgggaaaacgctggcagcatttctctacgccctcgatcggctcttccgcgaaggcggcgaagatacccgcgaggcgcataagcgtaaaacctcacgcatcctctatatttcaccgataaaagccctgggcaccgacgttcagcgcaacttgcagatcccgttgaagggtattgccgatgaacggcggcggcgcggcgaaacggtaattattgatgaagtccacgcggtagcgggcagtaaacgtggtgcgcatctggcgttaagtctggagcggctcgatgcgctgctccacacctcagcacagcgaattggcctttctgccactgtgcgctcagccagcgatgtggcagcatttcttggtggcgatcgcccggttacggtagtcaacccgcccgcaatgcgccatccgcagatacgaattgtcgtaccggtcgccaatatggatgatgtctcatcggtcgccagcggcaccggcgaagacagccatgccggccgggaaggctccatctggccatatattgaaacgggtatccttgatgaagtgttgcgccatcgctcgaccattgtctttactaattcacgcgggctggcggaaaaactgacagcacgattaaatgagctttacgccgcacgcttacagcgttccccgtctatcgccgttgatgcggcccatttcgagtcgacctccggcgcaacctctaaccgtgtacaaagtagcgacgtttttattgcccgctcacaccacggctccgtctctaaagaacaacgagcaatcaccgaacaggcgctgaaatcgggtgaattacgctgcgtggtcgcaacctccagtcttgaactggggattgatatgggcgcggtggatctggtgattcaggtggcaacgccgctttctgttgccagtgggttacaacgcattggtcgcgccggacatcaggttggcggtgtatctaaagggctgtttttcccccgtacccggcgtgatttagtcgattccgcagtcattgtagagtgtatgttcgcaggcaggctggaaaacctgacaccaccgcataatcctctcgacgtccttgcgcagcaaaccgttgccgccgcggcgatggatgcattacaggtagacgaatggtactcccgcgtacgccgtaccgcaccgtggaaagatctgccaagacgtgtttttgacgccacgctggatatgctttccgggcgctatccctctggcgatttttctgcttttcgccccaaactggtctggaacagggagaccgggatattgaccgcccgacctggtgctcaattgttggcggttaccagcggcggcaccattccggatcgtggcatgtatagcgtgttattacccgaaggtgaagaaaaggccggttcgcggcgggtgggtgaactggatgaggagatggtatatgagtcgcgggtgaacgacattatcactctcggcgctacctcatggcggatccagcaaatcacccgcgatcaggtgattgtgactcctgctccgggtcgttctgcccagctccccttctggcgtggtgaaggtaacggacgtccggctgaattaggcgagatgatcggcgattttcttcatttactggcggatggcgcgttcttttccgggactattcccccgtggctggcagaagaaaatacgaacgccaatattcaggggttgattgacgagcaacgcaacgcgacgggcatcgttccggggagtcgccatctggtcctcgaacggtgccgtgatgaaattggcgactggcgtattattttgcactctccctatggaagacgggtgcatgaaccctgggcgctggcgattgccgggcgaatacatgccctatggggcgctgacgcgtctgtggtcgccagtgatgacggcattgttgcgcgcattcctgacactgatggtaaattgcccgacgccgcgatttttttgtttgaaccagaaaagttgctgcaaattgtccgcgaggcggtaggcagctcggcacttttcgccgcccgttttcgcgaatgcgccgcgcgggcattattaatgccgggccgcacgccgggccatcgcaccccgctttggcaacaacggctgcgcgccagtcagttgctggaaatcgctcagggatatccggattttccggtcattctcgaaaccctacgcgaatgtctgcaagatgtttatgatcttcccgcactggaacgtttgatgcgtcgcctgaacggtggcgaaattcaaatatccgatgtaacgaccactacgccctcgcctttcgccacaagtttattgttcggctatgtcgcggaatttatgtaccagagcgacgccccgctggcagagcgccgggcatccgtactgtcgctggacagcgagttactgcgcaatctactcggacaggtcgatccgggggaattactcgacccgcaggtcattcgccaggtggaagaagagttgcaacgactggctcctggtagaagagcgaaaggtgaagaaggattgttcgacctgctgcgcgaactggggccaatgaccgttgaagacctggcgcaacggcatacaggcagcagtgaagaggttgcgtcgtatctggaaaatcttcttgcagtaaaacgaatcttcccagcgatgattagcggacaggagcgtcttgcctgtatggatgatgccgccaggctgcgtgatgccctcggcgtacggctaccagagtcattgccagagatttatttacatagagtcagttacccgcttcgcgacctctttctgcgctatctccgggctcatgctctggtcacggctgaacaactggctcatgagtttagtctcggtattgccattgtcgaagagcagcttcagcaactgcgtgaacagggtctggtgatgaatctgcaacaagacatctgggtgagcgatgaagtatttcgtcgtctgcgtttgcgctcgctgcaagccgccagagaagcgacgcgtcccgttgcagccacgacctatgcgcgattgctgctggaacgtcagggcgtattacccgccaccgatggtagcccggcgctctttgcctcaacatctccaggcgtttatgagggcgtagatggcgtgatgcgggtgatcgaacagcttgccggagtcggtttacccgcctcactctgggaaagccagatcctgcctgcccgcgtacgcgactattcgccagaaatgctcgatgaattactggcaaccggagcggttatctggtcgggacaaaaaaaagctgggtga

SEQ ID NO: 473278 - DNA, 648 bp, Shigella flexneri
atgtccgataacgctcaacttaccggtctgtgcgaccgttttcgtggtttttatcctgttgtgatcgatgttgaaacagccggatttaacgccaaaaccgatgcgctgcttgagattgccgccatcaccctgaaaatggatgaacaaggctggctgatgccggacaccacattacatttccacgtcgaaccatttgtcggcgcaaatttgcaaccagaagccctcgccttcaacggcattgacccgaacgatcccgatcgcggcgcggtcagcgaatacgaggcgctgcacgaaatttttaaagttgtacgtaaaggtattaaagcgagcggctgtaaccgcgccattatggtggcgcacaacgccaattttgatcacagctttatgatggccgccgcagaacgcgcctcgctgaaacgtaacccgttccaccctttcgccacttttgacactgctgcactggccgggctggcactcggacaaaccgtattgtcaaaggcttgccagaccgctggcatggacttcgacagcacccaggcgcactccgcgctgtacgacaccgaacgcactgctgtgctgttttgtgaaatcgtcaaccgctggaaacgtctgggaggctggccgctacctgccgccgaagaggtgtaa

SEQ ID NO: 473279 - DNA, 408 bp, Shigella flexneri
atgcgtcttcttcataccatgctgcgcgttggcgatttgcaacgctccatcgatttttataccaaagtgctgggcatgaaactgctgcgtaccagcgaaaacccggaatacaaatactcactggcgtttgttggctacggcccggaaaccgaagaagcggtgattgaactgacctacaactggggcgtggataaatacgaactcggcactgcttatggtcacatcgcgcttagcgtagataacgccgctgaagcgtgcgaaaaaatccgtcaaaacgggggtaacgtgacccgtgaagcgggtccggtaaaaggcggtactacggttatcgcgtttgtggaagatccggacggttacaaaattgagttaatcgaagagaaagacgccggtcgcggtctgggcaactaa

SEQ ID NO: 473280 - DNA, 1098 bp, Shigella flexneri
atgtcatctgaaaaactgtattccccactgaaagtgggcgcgatcacggcggcaaaccgtatttttatggcaccgctgacgcgtctgcgcagtattgaaccgggtgacattcctaccccgttgatggcggaatactatcgccaacgtgccagtgccggtttgattattagtgaagccacgcaaatttctgcccaggcaaaaggatatgcaggtgcgcctggcatccatagtccggagcaaattgccgcatggaaaaaaatcaccgctggcgttcatgctgaaaatggtcatatggccttgcagctgtggcacaccggacgcatttctcacgccagcctgcaacctggcggtcaggcaccggtagcgccttcagcacttagcgcgggaacacgtacttctctgcgcgatgaaaatggtcaggcgatccgcgttgaaacatccatgccgcgtgcgcttgaactggaagagattccgggtatcgtcaatgatttccgtcaggccattgctaacgcgcgtgaagccgcttttgatctggtagagctccactctgctcacggttatttgctgcatcagttcctttccccttcttcaaaccatcgtaccgatcagtacggcggcagcgtggaaaatcgcgcacgtttggtactggaagtggtcgatgccgggattgaagaatggggtgccgatcgcattggcattcgcgtttcgccaatcggtactttccagaacacagataacggcccgaatgaagaagccgatgcactgtatctgattgaacaactgggtaaacgcggcattgcttatctgcatatgtcagaaccagattgggcggggggtgaaccgtatactgatgcgttccgcgaaaaagtacgcgcccgtttccacggtccgattatcggcgcaggtgcatacacagtagaaaaagctgaaacgctgatcggcaaagggttaattgatgcggtggcatttggtcgtgactggattgcgaacccggatctggtcgcccgcttgcagctcaaagctgagcttaacccacagcgtgccgaaagtttctacggtggcggcgcggaaggctataccgattacccgacgttgtaa

SEQ ID NO: 473281 - DNA, 600 bp, Shigella flexneri
atgaacaaacacaccgaacatgatactcgcgaacatctcttggcgacgggcgagcaactttgcctgcaacgtggattcaccgggatggggctaagcgaattactaaaaaccgctgaagtgccgaaagggtccttctatcactactttcgctctaaagaagcgtttggcgttgccatgcttgagcgtcattacgccgcatatcaccagcgactggctgagttgctgcaatccggcgaaggtaactaccgcgaccgcatactggcttattaccagcaaacactgaaccagttttgccaacatggaaccatcagtggttgcctgacagtaaaactctctgccgaagtgtgcgatctgtcagaagatatgcgcagcgcgatggataaaggtgctcgcggcgtgatcgccctgctctcgcaggctctggaaaatggccgtgagaaccattgtttaaccttttgtggcgaaccgctacaacaggcacaagtgctttacgcactatggcttggcgcgaatctgcaggccaaaatttcgcgcagtttcgagccactggaaaacgcgctggcccatgtaaaaaacattattgcgacgcctgccgtttag

SEQ ID NO: 473282 - DNA, 240 bp, Shigella flexneri
gtggcggagcaattagagttctttcccgtccagagcccgtgccggggaatttgccagtctgacgaacgcgggttttgtcgcggctgttttcgtagtcgggatgagcgttttaactggaataaaatgagcgatggcgaaaaacaagaggtgctgcgcctttgtcggcagcgattaatgcgcaaattacgcgcaaataagccagcgtcatcagacgaaccggagcaaccatcactcttttga

SEQ ID NO: 473283 - DNA, 897 bp, Shigella flexneri
atggttcagcgtattactattgcgccggaaggcccggagttttcccgttttgtgatgggctactggcgattgatggactggaatatgtccgcccgccagctggtcagttttattgaagagcatctggatctcggcgtgaccaccgtggaccatgctgatatttatggtggctatcagtgcgaagcggcgtttggcgaggcactgaaactggcacctcacctgcgtgaacggatggaaatcgtcagtaaatgcggtatcgcgacgaccgcgcgtgaagaaaacgtcattggtcattacatcactgaccgcaatcacatcattaagagcgccgaacagtcgctaattaatctcgcgaccgatcatctggatctgctgttaatccaccgaccagacccgttaatggatgccgatgaagtggcggacgcgttcaaacatctgcatcagagcggcaaagtgcgtcattttggcgtatcgaactttacgcctgcgcaatttgccctgttgcaatcacgtctgccgtttacccttgccactaatcaggtggaaatatccccggtgcatcagccgttactgctggatggcacgctcgaccaactacaacaactgcgtgttcgtccgatggcgtggtcctgccttggtggtggtcgtctgtttaatgatgattatttccagccgctgcgtgatgaactggctgtggtggcggaggagttaaacgcgggctcgattgaacaggtggtttacgcctgggtattacgtttaccgtcgcagccgctgccaattatcggctcaggtaaaattgagcgcgtacgggcagctgtcgaagcagaaacactgaaaatgacccgtcaacaatggtttcgtatccgtaaagctgcactggggtacgacgtaccgtaa

SEQ ID NO: 473284 - DNA, 522 bp, Shigella flexneri
atgaaacgttttagtctggccattctggcgctggttgttgcgaccggcgcacaagctgccagtgaaaaagtcgagatgaacctcgtcacgtcgcaaggggttgggcagtcaattggtagcgtcaccattactgaaaccgataaaggtctggagttttcacccgatctgaaagcattaccccccggtgaacatggcttccatattcatgccaaaggaagctgccagccagccaccaaagatggcaaagccagcgccgcggaatccgcaggcgggcatcttgatccacaaaataccggtaaacatgaagggccagaaggtaccgggcatttaggcgatctgcctgcactggtcgtcaataatgacggcaaagctaccgatgccgtcatcgcgcctcgtctgaaatcactggatgaaatcaaagacaaggcgctgatggtccacgttggcggcgataatatgtccgatcaacctaaaccgctgggcggtggcggtgaacgctatgcctgtggtgtaattaagtaa

SEQ ID NO: 473285 - DNA, 1608 bp, Shigella flexneri
atggttaatattactgaggccagccagctgtgggatatcgctcaggcgcgcgtttgcgaggtgatagtcggtattttgtgcggcggcatgatgatgatgatcctgcctagcagttccgatgctactgcccttttaactgcattgaaaaacatgcacgcccgattactggaacatgccagtttactctggcagcctgaaacaaacgatgccattcgtgcagcacatgagggggtgattgggcagatactgaccatgaatttgctgcgtatccaggctttctggagccactatcgttttcgccagcaaaacgcgcgccttaatgcgctactccaccagcaattacgtatgaccagtgtcatctccagcctgcgacgtatgttgctcaactggccctcaccgccaggtgccacgcgagaaattctcgaacaattgctgacggcgctcgccagttcgcaaacagatgcttacaccgtcgcacgtattatcgccccgctacgcccgaccaacgtcgccgactaccggcacgtcgccttctggcagcgactacgttatttttgccgcctttatctgcaaagtagtcaggaattacatcgtctgcaaagcggtgtagatgatcatgccagactcgcacggacatccgctctggctcgtcataccgacaacgccgaagctatgtggagcgggctgcgtacattttgtacgttgatgatgattggcgcatggagtattgcatcgcaatgggatgccggtgccaatgcattaacgctggcagcaattagctgcgtactctactccgccgtcgcagcaccgtttaagtcgttgtcactgctgatgcgcacgctggtgttactttcgctattcagctttgtggtcaaatttggcctgatggtccagattagcgatctgtggcaatttttactgtttctctttccactgctggcgacaatgcagcttcttaaattgcagatgcccaaatttgccgcactgtgggggcaactgattgtttttatgggttcgtttatcgctgtcactaatcccccggtgtatgattttgctgattttcttaactataatctggcaaaaatcgttggcgttgcgctggcttggctagcgttcgccattctgcgtccaggatcggatgctcgtaaaagccgccgccatattcgcgcgctgcgccgggattttgtcgatcagctaagccgccatccaacactgagtgaaagcgaatttgaatcgctcacttatcatcacgtcagtcagttgagtaacagccaggatgcgctggctcgccgttggttattacgctggggtgtagtgctgctgaactgttctcatgttgtctggcaattgcgcgactgggaatcgcgttccgatccgttatcgcgagtacgggataactgtatttcactgttgcggggagtgatgagtgagcgtggcgttcagcaaaaatcactggcggccacacttgaagaattacagcggatttgcgacagccttgcccgtcatcatcaacctgccgcccgtgagctggcggcaattgtctggcggctgtactgctcgctttcgcaacttgagcaagcaccaccgcaaggtacgctggcctcgtaa

SEQ ID NO: 473286 - DNA, 327 bp, Shigella flexneri
atgaacgcatcgtcatggtccttgcgcaatttgccctggttcagggccacgctggcgcaatggcgttatgcgttacgcaataccattgccatgtgtctggcgctgacggttgcctattatttgaatctggatgaaccctattgggcgatgacctcggctgcagtggttagctttcccaccgttggcggtgtcatcagcaaaagcctcggacgcatggctggcagtttactgggagccattgcggcactgcttcttgccggacatacgctcaatgagccgtggttttttctattgagcatgtcggcgtggcttggcttttgtacctag

SEQ ID NO: 473287 - DNA, 858 bp, Shigella flexneri
atgtcaattaaaacaattaagtatttctcaacaatcattgtagcgatagttgcggttcttgccggatggtggctgtggaattattacatgcaatctccgtggacacgcgacgggaaaatacgcgcagaacaggtttctatcaccccacaggtgtcgggacgtattgttgagctgaatataaaagacaaccaactggttaacgcgggggaacttctgctcacgatcgataaaacgccctttcagatcgccgagctgaacgcacaggctcagctggcgaaagcgcaatctgacctcgcaaaagccaataacgaagcgaatcgtcgtcgtcatctctcacaaaattttatttttgccgaagaactcgataccgctaacctcaatgttaaagcgatgcaggccagtgttaatgccgcacaggcgacgctgaaacagacacaatggcaactggcgcaaacggaaattcgcgccccggtgagtggatgggtgactaacctcactacccgcatcggcgattacgctgacaccgggaaaccgctgtttgcccttgtcgacagccactcgttttacgtcattggttattttgaagaaaccaagttgcgccatatccgcgaaggtgcaccagcacaaattaccctctatagtgataacaaaacgttacagggtcacgtttccagtatcggtcgggcgatttatgatcagagcgttgaaagtgactcaagccttattccggatgtgaaacctaacgtcccctgggttcgtctcgcccaactcgttcccgtccgctttgcgctggataaagttccaggcgatgtcacgctggtgtcgggcaccacctgtagcattgccgtaggtcaataa

SEQ ID NO: 473288 - DNA, 237 bp, Shigella flexneri
gtgaagtttatgctcaatgcaacaggattgcccttacaagatctggtgttcggtgcgtccgtctattttcctccgtttttcaaagcattcgcgtttggattcgtcatctggcttgtcgtacaccgcctgcttcgtggctggatctacgccggcgatatctggcatcccttgttaatggatttatcgctgtttgcgatttgcgtttgccttgctctggcaatactgattgcgtggtaa

SEQ ID NO: 473289 - DNA, 435 bp, Shigella flexneri; identical to SEQ ID NO: 459416

SEQ ID NO: 473290 - DNA, 468 bp, Shigella flexneri
atgattaaacgcgtattggttgtttcaatggtaggtctgtctcttgtcggttgtgttaataacgacaccctgtcaggggatgtttataccgcttctgaagcgaaacaagtacagaatgtcagctatggcaccatcgttaacgtacgtccggtacagattcagggcggtgatgattccaacgttatcggtgcaattggcggtgctgttcttggtggtttcctggggaatactgttggtggcggaaccgggcgttctctggctactgcagcaggcgctgttgcaggtggcgtagctggtcagggcgtacagagtgcaatgaacaaaacgcagggtgtcgagctggaaattcgtaaagacgatggtaataccatcatggtggtacagaaacaaggcaacactcgtttctctccgggccaacgtgtcgtactggccagcaatggcagtcaggtgaccgtttctccgcgctaa

SEQ ID NO: 473291 - DNA, 1110 bp, Shigella flexneri
atgaaatcgggccgctttattggcgttatgtcaggcaccagccttgatggtgttgatgttgtgttggcgacaattgatgaacaccgggtcgcacagctggcaagcttgagctggccgatcccggtgtctctgaaacaggctgtactggatatttgccagggccagcagcttacactttcgcagtttggacagcttgatactcaactcgggcgactttttgctgatgcggtcaatgccttgcttaaggaacaaaacctgcaggcgagagatatagttgcgatcggctgtcacggtcaaaccgtctggcatgaaccgacgggcgtggcaccacacactttgcagattggcgataacaatcaaattgtggcacgcaccggaattacggttgtcggtgattttcgccgtcgcgatattgccttgggaggacaaggcgcaccgctggtacctgcgttccatcatgccttgctggctcacccaaccgagcgacgaatggtgctcaatattggcggcatcgccaatctgtcactgctcattcctgggcagccggttggcggctacgataccggtcctggtaacatgctgatggatgcctggatctggcgtcaggcaggtaaaccttacgataaagatgccgagtgggcacgggcgggtaaagttattctcccactgctgcaaaatatgctcagcgacccgtatttctcgcaacctgcaccgaaaagcaccggacgcgaatactttaactacggctggctggagcgccatttacgccattttccgggtgttgatccccgtgatgttcaggccacactggcagaactcaccgccgtgaccatttctgaacaagttttgttgagcggtggctgcgaacgattgatggtatgtggtggaggtagtcgtaatccgctactcatggcgcgtctggcggtattactgctaggcacagaagtcaccaccaccgatgccgttggcattagtggcgatgacatggaagcattggctttcgcctggcttgcctggcggacgctggcgggattaccaggaaatctgccttccgtcactggcgcaagccaggagacggtactgggggctattttccccgccaactcgtga

SEQ ID NO: 473292 - DNA, 384 bp, Shigella flexneri; identical to SEQ ID NO: 458821

SEQ ID NO: 473293 - DNA, 990 bp, Shigella flexneri
atgcagggttctgtgacagagtttctaaaaccgcgcctggttgatatcgagcaagtgagttcgacgcacgccaaggtgacccttgagcctttagagcgtggctttggccatactctgggtaacgcactgcgccgtattctgctctcatcgatgccgggttgcgcggtgaccgaggttgagattgatggtgtactacatgagtacagcaccaaagaaggcgttcaggaagatatcctggaaatcctgctcaacctgaaagggctggcggtgagagttcagggcaaagatgaagttattcttaccttgaataaatctggcattggccctgtgactgcagccgatatcacccacgacggtgatgtcgaaatcgtcaagccgcagcacgtgatctgccacctgaccgatgagaacgcgtctattagcatgcgtatcaaagttcagcgcggtcgtggttatgtgccggcttctacccgaattcattcggaagaagatgagcgcccaatcggccgtctgctggtcgacgcatgctacagccctgtggagcgtattgcctacaatgttgaagcagcgcgtgtagaacagcgtaccgacctggacaagctggtcatcgaaatggaaaccaacggcacaatcgatcctgaagaggcgattcgtcgtgcggcaaccattctggctgaacaactggaagctttcgttgacttacgtgatgtacgtcagcctgaagtgaaagaagagaaaccagagttcgatccgatcctgctgcgccctgttgacgatctggaattgactgtccgctctgctaactgccttaaagcagaagctatccactatatcggtgatctggtacagcgtaccgaggttgagctccttaaaacgcctaaccttggtaaaaaatctcttactgagattaaagacgtgcttgcttcccgtggactgtctctgggcatgcgcttggaaaactggccaccggcaagcatcgctgacgagtaa

SEQ ID NO: 473294 - DNA, 621 bp, Shigella flexneri; identical to SEQ ID NO: 458819

SEQ ID NO: 473295 - DNA, 390 bp, Shigella flexneri; identical to SEQ ID NO: 458818

SEQ ID NO: 473296 - DNA, 357 bp, Shigella flexneri; identical to SEQ ID NO: 4238

SEQ ID NO: 473297 - DNA, 1332 bp, Shigella flexneri
atggctaaacaaccgggattagattttcaaagtgccaaaggtggcttaggcgagctgaaacgcagactgctgtttgttatcggtgcgctgattgtgttccgtattggctcttttattccgatccctggtattgatgccgctgtacttgccaaactgcttgagcaacagcgaggcaccatcattgagatgtttaacatgttctctggtggtgctctcagccgtgcttctatctttgctctggggatcatgccgtatatttcggcgtcgatcattatccagctgctgacggtggttcacccaacgttggcagaaattaagaaagaaggggagtctggtcgtcgtaagatcagccagtacacccgttacggtactctggtgctggcaatattccagtcgatcggtattgctaccggtctgccgaatatgcctggtatgcaaggcctggtgattaacccgggctttgcattctacttcaccgctgttgtaagtctggtcacaggaacgatgttcctgatgtggttgggcgaacagatcactgaacgaggtatcggcaacggtatttcaatcattatcttcgccggtattgtcgcgggactcccgccagccattgcccatactatcgagcaagcgcgtcaaggcgacctgcacttcctcgtgttgctgttggttgcagtattagtatttgcagtgacgttctttgttgtgtttgttgagcgtggtcaacgccgcattgtggtaaactacgcgaaacgtcagcaaggtcgtcgtgtctatgctgcacagagcacacatttaccgctgaaagtgaatatggcgggggtaatcccggcaatcttcgcttccagtattattctgttcccggcgaccatcgcgtcatggttcgggggcggtactggttggaactggctgacaacaatttcgctgtatttgcagcctgggcaaccgctttatgtgttactctatgcgtctgcaatcatcttcttctgtttcttctacacggcgttggttttcaacccgcgtgaaacagcagataacctgaagaagtccggtgcatttgtaccaggaattcgtccgggagagcaaacggcgaagtatatcgataaagtaatgacccgcctgaccttggttggtgcgctgtatattacctttatctgcctgatcccggagttcatgcgtgatgcaatgaaagtaccgttctacttcggtgggacctcactgcttatcgttgttgtcgtgattatggactttatggctcaagtgcaaactctgatgatgtccagtcagtatgagtctgcattgaagaaggcgaacctgaaaggctacggccgataa

SEQ ID NO: 473298 - DNA, 435 bp, Shigella flexneri
atgcgtttaaatactctgtctccggccgaaggctccaaaaaggcgggtaaacgcctgggtcgtggtatcggttctggcctcggtaaaaccggtggtcgtggtcacaaaggtcagaagtctcgttctggcggtggcgtacgtcgcggtttcgagggtggtcagatgcctctgtaccgtcgtctgccgaaattcggcttcacttctcgtaaagcagcgattacagccgaagttcgtctatctgacctggctaaagtagaaggcggtgttgtagacctgaacacgctgaaagcggctaacattatcggtatccagatcgagttcgcgaaagtgatcctggctggcgaagtaacgactccggtaactgttcgtggcctgcgtgttactaaaggcgctcgtgctgctatcgaagctgctggcggtaaaatcgaggaataa

SEQ ID NO: 473299 - DNA, 180 bp, Shigella flexneri
atggcaaagactattaaaattactcaaacccgcagtgcaatcggtcgtctgccgaaacacaaggcaacgctgcttggcttgggtctgcgtcgtattggtcacaccgtagagcgcgaggatactcctgctattcgcggtatgatcaacgcggtttccttcatggttaaagttgaggagtaa

SEQ ID NO: 473300 - DNA, 504 bp, Shigella flexneri
atggctcacatcgaaaaacaagctggcgaactgcaggaaaagctgatcgcggtaaaccgcgtatctaaaaccgttaaaggtggtcgtattttctccttcacagctctgactgtagttggcgatggtaacggtcgcgttggttttggttacggtaaagcgcgtgaagttccagcagcgatccagaaagcgatggaaaaagcccgtcgcaatatgattaacgtcgcgctgaataacggcactctacaacaccctgttaaaggtgttcacacgggttctcgcgtattcatgcagccggcttccgaaggtaccggtatcatcgccggtggtgcaatgcgcgccgttctggaagtcgctggggttcataacgttctggctaaagcatatggttccaccaacccgatcaacgtggttcgtgcaactattgatggcctggaaaatatgaattctccagaaatggtcgctgccaagcgtggtaaatccgttgaagaaattctggggaaataa

SEQ ID NO: 473301 - DNA, 354 bp, Shigella flexneri; identical to SEQ ID NO: 4243

SEQ ID NO: 473302 - DNA, 534 bp, Shigella flexneri; identical to SEQ ID NO: 4244

SEQ ID NO: 473303 - DNA, 393 bp, Shigella flexneri; identical to SEQ ID NO: 4245

SEQ ID NO: 473304 - DNA, 306 bp, Shigella flexneri; identical to SEQ ID NO: 4246

SEQ ID NO: 473305 - DNA, 540 bp, Shigella flexneri
atggcgaaactgcatgattactacaaagacgaagtagttaaaaaactcatgactgagtttaactacaattctgtcatgcaagtccctcgggtcgagaagatcaccctgaacatgggtgttggtgaagcgatcgctgacaaaaaactgctggataacgcagcagcagacctagcagcaatctccggtcaaaaaccgctgatcaccaaagcacgcaaatctgttgcaggcttcaaaatccgtcagggctatccgatcggctgtaaagtaactctgcgtggcgaacgcatgtgggagttctttgagcgcctgatcactattgctgtacctcgtatccgtgacttccgtggcctgtccgctaagtctttcgacggtcgtggtaactacagcatgggtgtccgtgagcagatcatcttcccagaaatcgactacgataaagtcgaccgcgttcgtggtttggatattaccattaccactactgcgaaatctgacgaagaaggccgcgctctgctggctgcctttgacttcccgttccgcaagtaa

SEQ ID NO: 473306 - DNA, 315 bp, Shigella flexneri; identical to SEQ ID NO: 458807

SEQ ID NO: 473307 - DNA, 372 bp, Shigella flexneri; identical to SEQ ID NO: 4249

SEQ ID NO: 473308 - DNA, 255 bp, Shigella flexneri; identical to SEQ ID NO: 4250

SEQ ID NO: 473309 - DNA, 192 bp, Shigella flexneri
atgaaagcaaaagagctgcgtgagaagagcattgaagagctgaacaccgagctgctgaacctgctgcgtgagcagttcaacctgcgtatgcaggctgcaagtggccagctgcaacagtctcacctgttgaagcaagtgcgtcgcgatgtcgcacgcgttaagactttactgaacgagaaggcgggtgcgtaa

SEQ ID NO: 473310 - DNA, 411 bp, Shigella flexneri; identical to SEQ ID NO: 458803

SEQ ID NO: 473311 - DNA, 702 bp, Shigella flexneri
atgggtcagaaagtacatcctaatggtattcgcttgggtattgtaaaaccatggaactctacttggtttgcgaacaccaaagaattcgctgacaacctggacagcgattttaaagtacgtcagtacctgactaaggaactggctaaagcgtccgtatctcgtatcgttatcgagcgtccggctaagagcatccgtgtaaccattcacactgctcgcccgggtatcgttatcggtaaaaaaggtgaagacgtagaaaaactgcgtaaggtcgtagcggacatcgctggcgttcctgcacagatcaacatcgccgaagttcgtaagcctgaactggacgcaaaactggttgctgacagcatcacttctcagctggaacgtcgcgttatgttccgtcgtgctatgaagcgtgctgtacagaacgcaatgcgtctgggcgctaaaggtattaaagttgaagttagcggccgtctgggcggcgcggaaatcgcacgtaccgaatggtaccgcgaaggtcgcgtaccgctgcacactctgcgtgctgacatcgactacaacacctctgaagcgcacaccacttacggtgtaatcggcgttaaagtgtggatcttcaaaggcgagatcctgggtggtatggctgctgttgaacaaccggaaaaaccggctgctcagcctaaaaagcagcagcgtaaaggccgtaaataa

SEQ ID NO: 473312 - DNA, 333 bp, Shigella flexneri
atggaaactattgctaaacatcgccatgctcgttcttctgctcagaaggttcgccttgttgctgacctgattcgcggtaagaaagtgtcgcaggctctggatattttgacctacaccaacaagaaagcggctgtacaggtcaagaaagttctggaatctgccattgctaacgctgaacacaacgatggcgctgacattgacgatctgaaagttacgaaaattttcgtagacgaaggcccgagcatgaagcgcattatgccgcgtgcaaaaggtcgtgcagatcgcatcctgaagcgcaccagccacatcactgtggttgtgtccgatcgctga

SEQ ID NO: 473313 - DNA, 279 bp, Shigella flexneri; identical to SEQ ID NO: 4255

SEQ ID NO: 473314 - DNA, 822 bp, Shigella flexneri; identical to SEQ ID NO: 4256

SEQ ID NO: 473315 - DNA, 303 bp, Shigella flexneri; identical to SEQ ID NO: 4257

SEQ ID NO: 473316 - DNA, 606 bp, Shigella flexneri
atggaattagtattgaaagacgcgcagagcgcgctgactgtttccgaaactaccttcggtcgtgatttcaacgaagcgctggttcaccaggttgttgttgcttatgcagctggtgctcgtcagggtactcgtgctcagaagactcgtgctgaagtaactggttccggtaaaaaaccgtggcgccagaaaggcaccggccgtgcgcgttctggttctatcaagagcccgatctggcgttctggtggcgtgacctttgctgctcgtccgcaggaccacagtcaaaaagttaacaagaagatgtaccgcggcgcgctgaaaagcatcctgtccgaactggtacgtcaggatcgtctgatcgttgtcgagaagttctctgtagaagcgccgaaaactaagctgctggcacagaaactgaaagacatggctctggaagatgtgctgatcatcaccggtgagctggacgaaaacctgttcctggctgcgcgcaacctgcagaaggttgacgtacgcgatgcaactggtatcgacccggttagcctgatcgccttcgacaaagtcgtaatgactgctgatgctgttaagcaagttgaggagatgctggcatga

SEQ ID NO: 473317 - DNA, 630 bp, Shigella flexneri; identical to SEQ ID NO: 458796

SEQ ID NO: 473318 - DNA, 312 bp, Shigella flexneri; identical to SEQ ID NO: 458795

SEQ ID NO: 473319 - DNA, 468 bp, Shigella flexneri
atggacactacccttccctttctaattttgtacgcttgtttatcagccctactttttttctgggatgcaaagcatggcttgttacctgacagatttacgtgcccgttactctggtcaggtcttttgttctatcaagtttgtcatcctgatggtttagccgatgcgttatggggggcaattgttggttacggcacattcgctgtcatttactgggggtatcgcatactgcgacataaagaaggattaggctatggtgatgtgaagtttctcgccgcccttggcgcctggcattcatgggccttcttaccacgactggttttccttgctgcctcattcgcttgcggagccgtagttattggtctgctcatgagaggaaaagaatcattaaaaaacccgctgccttttgggccatttctggcggctgcgggtttcgttataggctgggatagtttgctgataggccgttaa

SEQ ID NO: 473320 - DNA, 477 bp, Shigella flexneri
atgaaaggtgatgttaaaatcataaattatctcaataaactattgggaaatgagcttgtcgcaatcaatcagtattttctccatgcccggatgtttaaaaactggggcctgatgcgtctcaatgacgtcgaataccatgaatccatcgatgagatgaaacacgctgataaatatatcgagcgtattttgtttttagaaggaatccccaacttacaggatttaggcaaactggggattggtgaagatgtcgaggagatgctgcaatctgacctgcgattagaactggaaggcgcgaaggatctgcgtgaggctatcgcatatgccgacagcgttcatgactatgttagccgcgatatgatgatcgagatccttgctgatgaagaaggtcatatcgactggctcgaaactgaactggatctcatcggtaaaatcggcctacaaaattacctgcaatcacaaattaaagttaaagattaa

SEQ ID NO: 473321 - DNA, 195 bp, Shigella flexneri; identical to SEQ ID NO: 263930

SEQ ID NO: 473322 - DNA, 831 bp, Shigella flexneri
atgtctatgccattaagcaatgccgctaataaccaattcaatacaaataatcacttccttcatcatccaaaagtcgacagtgagttaacacgtcgatatgaatatgcacgcctggatacggaaaatatctatcttctgcctcttgctcgtggcaataaccataattacgatggaaaaagcgttgtcgaaattagaaaacttaatattggcaaacagtcctggccatttaattatgtgacagatacatgcagagaattcaatggtattacaacaacaggacgtatgctctatcgaaacttgaaaatcacctcagctttagacgaaatatatggtggtatatgtaaaaaggcgcatgctgctacagagttagcagaaggtttacggctaaatttatttatgaagagccctttcgatcctgttgaggactatacagttcatgaaataacattaggccctggttgcaatgttcctggttatgccggaaccacgataggatatatttcaacccttccagcttctcaggcaaaaagatggaccaatgagcagccaagaattgatatctatattgatcagataataactgtctcaggggtagcaaattcttccggattcgcccttgccgcattacttaatgctaatattgagatgggaaatgacccaatcattggtatagaagcctatcctggtaccgcggagatccattcaaaaatgggatataacgttatccccggtgatgaagatgcgccactcaaacgcatgactctgcaaccgtcatctcttccagaactgtttgaattaaaaaatggtgaatggaattatattggtaaatag

SEQ ID NO: 473323 - DNA, 726 bp, Shigella flexneri
atgatccgcgatctgatcataaagacgccgtacaatcctggcgaacggctgccgccggagcgtgaaattgcagaaatgcttgatgtcacgcggacggtggtacgtgaagcgctgatcatgctggagatcaaagggctggtggaagtgcgccggggtgccggtatctatgtgcttgatagctcaggcagccacaacacagacagtccggatgccaacgtctgcaatgatgcgggtccttttgagctgttacaggcgcgtcagttactggaaagtaacatcgccgagtttgccgcactgcaggctacccgcgaagatatcgtcaaaatgcgtcaggcattgcaactggaagagcgtgaactggcttccagcgcgccgggtagcagcgaaagcggtgacatgcagttccatctcgccattgctgaagcaacgcataacagcatgctggtggagttattccgtcagtcctggcagtggcgggaaaacaatccaatgtggatccagttgcacagccatctggatgacagcctgtatcgcaaagagtggttgggcgatcacaaacagatcctcgccgcgttaatcaaaaaagatgcccgagcggcgaagctggcaatgtggcagcatctggaaaacgttaagcaacgtctgctggaattctcgaacgttgacgatatttattttgacggctatctctttgattcatggccgctggataaagtcgacgcctga

SEQ ID NO: 473324 - DNA, 195 bp, Shigella flexneri; identical to SEQ ID NO: 460477

SEQ ID NO: 473325 - DNA, 1461 bp, Shigella flexneri
atgactactattgttgacagcaatctgccggttgcccgcccgtcatgggatcattctcgtctggaatcacgcattgtgcatctcggttgcggggcgtttcaccgcgcgcaccaggcgctgtatacccatcatctgctggaaagcaccgacagcgactggggcatctgcgaagttaacctgatgccaggcaacgaccgcatgctgatcgaaaacctgaaaaaacagcaactgctgtacaccgtagcggaaaaaggcgcagaaagcaccgagctgaaaattatcggttcgatgaaagaagcgctgcatccggaaatcgacggctgcgaaggtattctcaacgcgatggcgcgtccgcaaacggcgattgtctctctaacggtcacggaaaaaggctactgcgctgatgcggcaagcggtcaactggatctcaataacccgctgatcaagcacgatctggaaaacccgactgcgccgaagtccgcgattggttacatcgtcgaagccttgcgtctgcgtcgtgaaaaagggctgaaagcatttacggtgatgtcctgcgataacgtgcgtgaaaacggccatgtggcgaaggtcgcggtactggggctggctcaggcgcgtgacccgcagctagcggcatggattgaagagaacgtcaccttcccgtgcaccatggttgaccgcatcgttccggcggcgacgccagaaaccttacaggaaattgctgaccagctgggtgtttacgacccgtgcgccattgcctgcgaaccgttccgtcagtgggtgattgaagataacttcgttaatggtcgcccggactgggataaagtgggcacacagttcgttgcagacgttgtgccgttcgaaatgatgaagctgcgtatgctgaacggcagccactctttcctggcgtacctcggttacctcggcggctatgaaaccattgccgacaccatgactaacccggattatcgcaaagcggcctttgccctgatgatgcaggaacaagcgccaacgctgtcgatgccggaaggtacggacctgaacgcctatgcgacgctgctgatcgagcgtttcagcaacccgtctctgcgtcaccgtacctggcagattgcgatggacggcagccagaagttaccgcagcgtctactggacccggtgcgtctgcacctgcaaaacggcggcagctggcgtcacctggcgctgggcgtggctggctggatgggttacacccagggcgtggatgagcagggtaatgccattgacgtggtcgacccgatgctggccgagttccagaagattaacgcgcagtatcagggcgcagaccgcgtgaaagcgctgctgggcctgagcggtatttttgccgatgatctgccgcagaatgccgactttgttggcgcggtgacggcggcatatcagcagctgtgcgaacgcggtgcgcgcgagtgtgtggctgcgctgtaa

SEQ ID NO: 473326 - DNA, 1185 bp, Shigella flexneri
atggaacagacctggcgctggtacggcccaaacgatccggtttctttagctgatgtccgtcaggcgggcgcaactggcgtggttaccgcgctgcaccatatcccgaacggcgaagtatggtccgtagaagagatcctcaaacgcaaggcgatcgttgaagacgcaggcctggtgtggtctgtcgtagaaagcgtaccaattcacgaagatatcaaaacccacactggcaactatgagcagtggatcgctaactatcagcagactctgcgcaacctggcgcagtgtggcattcgcaccgtgtgctacaacttcatgccggtgctcgactggacccgtactgacctcgaatacgtgctgccagacggctccaaagctctgcgcttcgaccagatcgaattcgctgcattcgaaatgcatatcctgaaacgtccaggcgcggaagcggattacaccgaagaagaaattgctcaggcagctgaacgcttcgccactatgagcgacgaagacaaagcgcgtctgacgcgtaacatcattgccggtctgccgggcgcggaagaagggtataccctcgaccagttccgtaagcacctggagctgtacaaagatatcgacaaagccaaactgcgcgaaaactttgccgtcttcctgaaagcgattattccagttgctgaagaagttggcgtgcgtatggcggttcacccggacgatccgccgcgcccgatcctcggcttgccgcgcattgtttccaccattgaagatatgcagtggatggttgataccgtaaacagcatggcgaacggtttcaccatgtgcaccggttcctacggcgtgcgtgctgacaacgatctggttgatatgatcaagcagttcggtccgcgtatttacttcacccatctgcgctccaccatgcgtgaagataacccgaaaaccttccacgaagcggcgcacctgaacggtgacgttgatatgtacgaagtggtgaaagcgattgttgaagaagaacaccgtcgtaaagcggaaggcaaagaagacctgatcccgatgcgtccggaccacggtcatcagatgctggacgacctgaagaagaaaaccaaccctggttactccgcaattggtcgtctgaaaggcctggccgaagttcgcggtgtcgaactggcgatccagcgcgctttctttagccgttaa

SEQ ID NO: 473327 - DNA, 1344 bp, Shigella flexneri
atgcatgtgcttaacattctctgggtggtattcggcattggcctgatgctgatactgaatttgaagttcaaaatcaattcaatggtggctttgttggtggcggcgctgtccgtcgggatgctggcaggcatggatttgatgtcgctgctgcacaccatgaaagcgggcttcggcaacacgctgggagaactggctatcatcgtggtgttcggtgcggtcatcggtaaattgatggtcgactccggcgcggctcaccagatagcacatacgctgctggcgcgtctcggtctgcgctatgtacagctgtcggtgattatcatcggccttattttcggtctggcgatgttctatgaagtggcctttatcatgttagcgccgctggttattgttattgccgccgaagctaaaattccgttcctgaaactggcgatcccggcagtagcagctgccactaccgcacattcactgttcccaccgcagccgggtccggtggcgctggtgaatgcttatggcgcggatatggggatggtttatatctatggcgtactggtgacgatcccaagtgtaatctgcgcaggtctgatcctgccgaagttcctcggcaatcttgagcgcccaacgccatcattcctgaaagcagatcaaccggtagatatgaataatctgccctctttcggcgtttcgattctggtgccgctgatcccggcgatcattatgatctctaccaccatcgccaatatctggctggtaaaagatacccctgcctgggaagtggttaactttattggttcctcgccgattgcgatgtttattgcgatggtggttgcattcgtactctttggcaccgcgcgtggtcatgacatgcagtgggtgatgaacgcttttgaaagcgcggtgaagagtattgcaatggtgattctgatcatcggtgcgggtggcgtgctgaagcagaccatcatcgacaccggcattggcgacaccatcggcatgttgatgtcccacggcaatatctcgccctacattatggcatggctgatcactgtgctaattcgtctggcgacgggtcagggtgtcgtttcggcgatgaccgccgccgggattatcagtgctgcaatccttgatccagcaaccggtcagctggttggcgtgaatccggcgctgctggtactggcgacggctgcgggttccaacaccctcacccacattaatgatgcatctttctggttgttcaaaggttactttgacctgtcagtaaaagacacgttgaaaacctggggtctgctggagctggtcaactccgtggttgggctgattattgtgctgattattagcatggtagcgtaa

SEQ ID NO: 473328 - DNA, 903 bp, Shigella flexneri
atgaaacgagctattaccctgtttgctgtactgctgatgggctggtcggtaaatgcctggtcattcgcctgtaaaaccgctaatggtaccgctatccctattggcggtggcagcgctaatgtttatgtaaaccttgcgcctgtcgtgaatgtggggcaaaacctggtcgtagatctttcgacgcaaatcttttgccataacgattatccggaaaccattacagactatgtcacactgcaacgaggctcggcttacggcggcgtgttatctaatttttccgggaccgtaaaatatagtggcagtagctatccatttccgaccaccagcgaaacgccgcgggttgtttataattcgagaacggataagccgtggccggtggcgctttatttgacacctgtgagcagtgcgggcggggtggcgattaaagctggttcattaattgccgtgcttattttgcgacagaccaacaactataacagcgatgattttcagtttgtgtggaatatttacgccaataatgatgtggtggtgcccactggcggttgtgatgtttctgctcgtgatgtcaccgttactctgccggactaccctggttcagtgccaattcctcttaccgtttattgtgcgaaaagccaaaacctggggtattacctctccggcacaaccgcagatgcgggcaactcgattttcaccaataccgcgtcgttttcaccagcgcagggcgtcggcgtacagttgacgcgcaacggtacgattattccagcgaataacacggtatcgttaggagcagtaggaacttcggcggtaagtctgggattaacggcaaattacgcacgtaccggagggcaggtgactgcagggaatgtgcaatcgattattggcgtgacttttgtttatcaataa

SEQ ID NO: 473329 - DNA, 504 bp, Shigella flexneri
atgaaatggtgcaaacgtgggtatgtattggcggcaatgttggcgctcgcaagtgcgacgatacaggcagccgatgtcaccatcacggtgaacggtaaggtcgtcgccaaaccgtgtacggtttccaccaccaatgccacggtagatctcggcgatctttattctttcagtcttatgtctgccggggcggcatcggcctggcatgatgttgcgcttgagttgactaattgtccggtgggaacgtcgagggtcactgccagcttcagcggggcagccgacagcaccggatattataaaaaccaggggaccgcgcaaaacatccagttagagctacaggatgacagtggcaacacattgaatactggcgcaaccaaaacagttcaggtggatgattcctcacaatcagcgcacttcccgttacaggtcagagcattgacggtaaatggcggagccactcagggaaccattcaggcagtgattagcatcacctatacctacagctga

SEQ ID NO: 473330 - DNA, 531 bp, Shigella flexneri
atgagaaacaaacctttttatcttctgtgcgcttttttgtggctggcggtaagtcgcgttttggctgcggatagcacgattactatccgcggctatgtcagagataacggctgtagtgtggccgctgaatcaaccaattttactgttgatctgatggaaaacgcggcgaagcaatttaacaacattggcgcgacgactcctgtcgttccatttcgtattttgctgtcaccctgtggtaatgccgtttctgccgtaaaagttgggtttaccggcgttgcagatagccacaatgccaacctgcttgcacttgaaaatacggtgtcagcggctgcgggactgggaatacagcttctgaatgagcagcaaaatcaaataccccttaatgctccatcgtctgcgatttcgtggacgaccctgacgccgggtaaaccaaatacgctgaatttttacgcccggctaatggcgacacaggtgcctgtcactgcggggcatatcaatgctacggctaccttcactcttgaatatcagtaa

SEQ ID NO: 473331 - DNA, 2637 bp, Shigella flexneri
atgtcatatctgaatttaagactttaccagcgaaacacacaatgcttgcatattcgtaagcatcgtttggctggtttttttgtccgactcgttgtcgcctgtgcttttgccgcacaggcacctttgtcatctgccgacctctattttaatctgcgctttttagcggatgatccccaggctgtggccgatttatcgcgttttgaaaatgggcaagaattaccgccagggacgtatcgcgtcgatatctatttgaataatggttatatggcaacgcgtgatgtcacatttaatacgggcgacagtgaacaagggattgttccctgcctgacacgcgcgcaactcgccagtatggggctgaatacggcttctgtcgccggtatgaatctgctggcggatgatgcctgtgtgccattaaccacaatggtccaggacgctactgcgcatctggatgttggtcagcagcgactgaacctgacgatccctcaggcatttatgagtaatcgcgcgcgtggttatattcctcctgagttatgggatcccggtattaatgccggattgctcaattataatttcagcggaaatagtgtacagaatcggattgggggtaacagccattatgcatatttaaacctacagagtgggttaaatattggtgcgtggcgtttacgcgacaataccacctggagttataacagtagcgacagttcatcaggtagcaaaaataaatggcagcatatcattacctggattgagcgagacataattcctttacgttcccggctgacgttgggtgatggttatacccagggcgatattttcgatggtattaactttcgcggcgcacaattggcctcagatgacaatatgttacccgatagccaaagaggatttgccccggtgatccacggtattgctcgtggtactgcacaggtcactattaaacaaaatggatatggcatttataatagtacggtgccaccggggccttttaccatcaacgatatctatgccgcaggtaatagtggtgacttgcaggtaacgatcaaagaggctgacggcagcacgcagatttttaccgtaccctattcgtcagtcccgcttttgcaacgtgaagggcatactcgttattccattacggcaggagaataccgtagtggaaatgcgcagcaggaaaaaccccgctttttccagagtacattactccacggccttccggctggctggacaatatatggtggaacgcaactggcggatcgttatcgtgcttttaatttcggtatcgggaaaaacatggaggcactgggcgctctgtctgtggatatgacgcaggctaattccacacttcccgatgacagtcagcatgacggacaatcggtgcgttttctctataacaaatcgctcaatgaatcaggcacgaatattcagttagtgggttaccgttattcgaccagcggatattttaatttcgctgatacaacatacagtcgaatgaatggctacaacatcgaaacacaggatggagttattcaggttaagccgaaattcaccgactattacaacctcgcttataacaaacgcgggaaattacagctcaccgttactcagcaactcgggcgcacatcaacactgtatttgagtggtagccatcaaacttattggggaacgagtaatgtcgatgagcaattccaggctggattaaatactgcgttcgaagatatcaactggacgctcagctatagcctgacgaaaaacgcctggcaaaaaggacgggatcagatgttagcgcttaacgtcaatattcctttcagccactggctgcgttctgacagtaaatctcagtggcgacatgccagtgccagctacagcatgtcacacgatctcaacggtcggatgaccaatctggctggtgtatacggtacgttgctggaagacaacaacctcagttatagcgtgcaaaccggctatgccgggggaggcgatggtaatagcggaagtacaggctacgccacgctgaattatcgcggtggttacggcaatgccaatatcggttacagccatagcgatgatattaagcagctctattacggagtcagcggtggggtattggctcatgccaatggcgtaacgctggggcagccgttaaacgatacggtggtgcttgttaaagcgcctggcgcaaaagatgcaaaagtcgaaaaccagacgggggtgcgtaccgactggcgtggttatgccgtgctgccttatgccactgaatatcgggaaaatagagtggcgctggataccaataccttggctgataacgtcgatttagataacgcggtcgctaacgttgttcccactcgtggggcgatcgtgcgagcagagtttaaagcgcgcgttgggataaaactgctcatgacgctaactcacaataataagccgctgccgtttggggcgatggtgacatcagagagtagccagagtagcggcattgttgcggataatggtcaggtttacctcagcggaatgcctttagcgggaaaagttcaggtgaaatggggagaagaggaaaatgctcactgtgtcgccaattatcaactgccaccagagagtcagcagcagttattaacccagctatcagctgaatgtcgttaa

SEQ ID NO: 473332 - DNA, 726 bp, Shigella flexneri
gtgagtaataaaaacgtcaatgtaaggaaatcgcaggaaataacattctgcttgctggcaggtatcctgatgttcatggcaatgatggttgccggacgcgctgaagcaggagtggccttaggtgcgactcgcgtaatttatccggcagggcaaaaacaagtgcaacttgccgtgacaaataatgatgaaaatagtacctatttaattcaatcatgggtggaaaatgccgatggtgtaaaggatggtcgttttatcgtgacgcctcctctgtttgcgatgaagggaaaaaaagagaataccttacgtattcttgatgcaacaaataaccaattgccacaggaccgggaaagtttattctggatgaacgttaaagcgattccgtcaatggataaatcaaaattgactgagaatatgctacagctcgcaattatcagccgcattaaactgtactatcgcccggctaaattagcgttgccacccgatcaggccgcagaaaaattaagatttcgtcgtagcgcgaattctctgacgctgattaacccgacaccctattacctgacggtaacagagttgaatgccggaacccgggttcttgaaaatgcattggtgcctccaatgggcgaaagcacggttaaattgccttctgatgcaggaagcaatattacttaccgaacaataaatgattatggcgcacttacccccaaaatgacgggcgtaatggaataa

SEQ ID NO: 473333 - DNA, 498 bp, Shigella flexneri
atgtttgctctggccggaaataaatggaataccacgctgcccggcggaaatatgcaatttcagggcgtcattattgcggaaacttgccggattgaagccggtgataaacaaatgacggtcaatatggggcaaatcagcagtaaccggtttcatgcggcaggggaagatagcgcaccggtgccttttgttattcatttacgggaatgtagcacggtggtgagtgaacgtgtgggtgtggcgtttcacggtgtcgcggatggtaaaaatccggatgtgctctccgtgggagaggggccagggatagcctccaatattggtgtagcgttgtttgatgatgaaggaaacctcgtaccgattaatcgtcctccagcaaactggaaacggctttactcaggctctacttcgctacatttcatcgccaaatatcgtgctaccgggcgtcgggttactggcggcatcgccaatgcccaggcctggttctctttaacctatcagtaa

SEQ ID NO: 473334 - DNA, 549 bp, Shigella flexneri
atgaaaattaaaactctggcaatcgttgttctgtcggctctgtccctcagttccgcagcggctctggccgatactacgacggtaaatggtgggaccattcactttaaaggggaagttgttaacgccgcttgcgcagttgatgcaggctctgttgatcaaaccgttcagttgggacaggttcgtaccgctagcctgaagcaggctggagcaaccagctctgccgttggttttaacattcagctgaatgattgcgataccactgttgccacaaaagccgctgttgccttcttaggtacggcaattgatgctacgcgtactgatgtactggctctgcagagttctgctgcaggtagtgcaacaaacgttggcgtgcagatcctggacagaacaggcaatgctctgacgctggacggtgcgacatttagtgcacaaacaaccctgaataacggtaccaacaccattccgttccaggcgcgttattatgcaatcggcgaggcaaccccgggtgcagctaatgcggatgcaaccttcaaggttcagtatcaataa

SEQ ID NO: 473335 - DNA, 597 bp, Shigella flexneri
gtgagtaaacgtcgttatcttaccggtaaagaagttcaggccatgatgcaggcggtttgttacggggcaacgggagccagagattattgtcttattctgttggcatatcggcatgggatgcgtattagtgaactgcttgatctgcattatcaggaccttgaccttaatgaaggtcgaataaatattcgccgactgaagaacggattttctaccgttcacccgttacgttttgatgagcgtgaagccgtggaacgctggacccaggaacgtgctaactggaaaggcgctgaccggaccgacgctatatttatttctcgccgcgggagtcggctttctcgccagcaggcctatcgcattattcgcgatgccggtattgaagctggaaccgtaacgcagactcatcctcatatgttaaggcatgcttgcggttatgaactggcggagcgtggtgcagatacccgtttaattcaggattatctcgggcatcgaaatattcgccatactgtgcgttataccgccagtaatgctgctcgttttgccggattatgggaaagaaataatctcataaacgaaaaattaaaaagagaagaggtttga

SEQ ID NO: 473336 - DNA, 279 bp, Shigella flexneri; identical to SEQ ID NO: 127146

SEQ ID NO: 473337 - DNA, 558 bp, Shigella flexneri
atgaatggtgataattcttttggatggaaccatgaagctacattagataatattcacgcccagaaatacaataaagcttacgcgggtgcgaggttaaccgcagaactgaaatatttattgcaagatgtcgaatccttcgaacccaacagtaaatacacaatacacgaggttgttttgggacctggttatagtactccagactataccggccaaacgataggatacgttgtaacccttcctgcccaaatgcctaattgctggtcatctgaactaccaacaatcgatctttatatcgaccaacttcacactgttacaggcgtttctaatgccctcggattcatcattgctgcattgctaaacgcgtattctgatttaccccatgatttgaaaattggtctacgttccttatcaaattcagccgcaatctactcgggtttaggtttcgagcgagtgccgcaggaccgagacataaggagtgatcgtatgcatctaacgccagcaaaccatcctgacttatggacacaagagaatggtgaatggatctacttgcgaaattaa

SEQ ID NO: 473338 - DNA, 450 bp, Shigella flexneri
atgcaagttattctgcttgataaagtagcaaacctgggtagcctgggtgatcaggtaaacgttaaagcgggctatgctcgtaacttcctggtaccgcagggtaaagctgttccagctaccaagaaaaacattgaattcttcgaagcacgtcgcgctgaactggaagctaaactggctgaagttctggcagctgctaatgctcgcgctgagaaaatcaatgcactggaaactgttaccatcgcgtctaaagctggcgacgaaggtaaactgttcggttccatcggtactcgcgacatcgctgacgctgtaactgcagctggcgttgaagtggctaagagcgaagttcgtctgccgaacggcgttctgcgtaccactggcgaacacgaagtgagcttccaggttcacagcgaagtattcgcgaaagtgatcgtaaacgtagtagctgaataa

SEQ ID NO: 473339 - DNA, 228 bp, Shigella flexneri; identical to SEQ ID NO: 1904

SEQ ID NO: 473340 - DNA, 315 bp, Shigella flexneri
atgaccaaccgtctggtgttgtccggcaccgtgtgcaggactccccttcgaaaggtcagtccatcaggaattcctcactgccagttcgtgcttgagcatcgttctgtgcaggaggaagccggctttcaccggcaggcatggtgtcaaatgcccgttattgttagcggacacgaaaaccaggccattactcacagtataacggtcggcagtcgcataaccgttcaggggttcatttcatgccacaaggcaaagaacggactgagcaaaatggttttgcatgccgagcagattgaattgatagattctggagactag

SEQ ID NO: 473341 - DNA, 396 bp, Shigella flexneri; identical to SEQ ID NO: 461344

SEQ ID NO: 473342 - DNA, 276 bp, Shigella flexneri
atgttcagtcgagttttagcccttctggctgtgcttttgctaagtgcaaatacatgggcagccattgaaattaataaccaccaggccagaaatatggacgatgtgcaaagcttaggcgtgatttatatcaatcataatttcgccactgaaagcgaagcacgtcaggcattaaatgaagaaacagatgcgcaaggcgcaacgtactaccacgtaattctgatgcgggaaccggggagtaacggcaatatgcacgccagcgcggatatttatcgctag

SEQ ID NO: 473343 - DNA, 687 bp, Shigella flexneri
atgcaaaagctaaaacagcaggtgtttgaagccaacatggatctgccgcgctatgggctggtgacctttacttggggcaacgtcagcgctatcgaccgcgaacgcgggctggtggtgatcaagcccagcggcgttgcctacgaaaccatgaaagcagacgatatggtggtggtcgatatgagcggcaaggtggtggaaggggagtatcgcccatcttccgacactgcgacgcatctcgaactctaccgtcgttacccgtcgcttggcggcattgtccatacccactccactcatgccaccgcatgggcgcaggcggggctggcgatcccggcattaggcaccacgcacgctgactacttctttggtgatatcccgtgtacgcgtggattaagcgaagaagaggtgcagggtgagtatgaactgaacactggcaaagtgattatcgaaacgctgggcaacgccgagccgctgcatacgccgggaattgtggtgtatcagcacggaccgttcgcctgggggaaagatgcccacgacgcggtgcataacgcggtagtgatggaagaagtggcgaaaatggcgtggattgcgcgcagtattaatccacaactcaatcatatcgacagctacctgatgaataaacacttcatgcgtaagcacggtcctaacgcttattacgggcagaagtaa

SEQ ID NO: 473344 - DNA, 855 bp, Shigella flexneri
atgttgtccaaacaaatcccgcttggcatctatgaaaaagcgctccccgccggggagtgctggctggaacgcctgcgactggcaaaaacgttgggcttcgattttgtcgagatgtcggtagatgaaactaacgagcgcctgtcgcgcctcgactggagccgcgaacagcgtctggcgctggtgaatgctattgttgaaaccggcgtgcgtgtgccgtccatgtgcctttctgcccatcgtcgtttcccgttgggcagcgaagatgacgcggtgcgggcgcaggggctggagattatgcgtaaagccatccagttcgcccaggacgttggcattcgcgtgatccagctggcgggctatgacgtttactatcaggaagccaataacgaaacgcgtcgtcgtttccgtgacggcctgaaagagagcgttgagatggcgagccgcgcgcaggtgacgctggcgatggagatcatggattatccgttgatgaactccatcagcaaggcgctgggttacgcgcactatctcaacaacccgtggttccagctctacccggatatcggcaacctgtcggcgtgggacaacgatgtgcagatggagttgcaggccggaatcgggcatatcgtcgcggtgcatgtgaaagacaccaaaccgggcgtcttcaaaaacgtgccatttggcgaaggtgtggtggatttcgaacgttgcttcgaaacgctcaaacagagtggctattgcgggccgtacctgattgagatgtggagcgaaacggcggaagacccggcggcagaagtggtgaaagcgcgtgattgggtgaaagcgcgcatggccaaagcaggcatggtggaggcggcataa

SEQ ID NO: 473345 - DNA, 651 bp, Shigella flexneri
atgtcattaccgatgttgcaagtcgcgctggacaaccagactatggatagcgcctacgaaaccactcgcctgattgccgaagaagtcgacattatcgaagtgggtaccattctgtgcgtgggcgaaggcgtgcgtgcggttcgcgatctgaaagcgctctacccgcacaaaatcgtgctggcagacgccaaaattgccgatgcgggcaaaattctttctcgtatgtgcttcgaagccaacgctgactgggtgaccgtgatttgttgtgcggatatcaacaccgccaaaggtgcgctggacgtagcaaaagagtttaacggcgacgtgcagatcgaactgaccggttactggacctgggaacaggcgcaacagtggcgcgacgcaggtattcagcaggtggtttatcaccgcagccgtgacgcgcaggccgctggcgtggcgtggggtgaagccgatatcactgcgatcaaacgtctttccgatatgggcttcaaagtcaccgtcaccggtggcctggcgctggaagatctgccgctgttcaaaggcattccaattcatgtgtttatcgccggtcgcagcatccgtgatgccgcttctccggttgaagccgcgcgtcagttcaaacgttccatcgccgaactgtggggctaa

SEQ ID NO: 473346 - DNA, 465 bp, Shigella flexneri
atgaaattacatgattcgctggcggagaataaatccatccgcctgcaggctgaagctgagacatggcaggacgcagtaaaaatcggcgttgacctgctggtggcggcggatgttgtcgagccgcgttactaccaggcgattctggatgcggttgaacagcacggtccgtactttgtgctcgcaccaggcctggcaatgccgcacggtcgcccggaagagggcgttaagaaaaccggttttgcgctggtgacgctgaaaaagccgctggagttcaaccacgaagataacgacccggtggatatcctcatcaccatggcggcggtcgatgccaacacgcaccaggaagtgggcatcatgcagatcgtcaacctgtttgaagatgaagaaaatttcgaccgtttacgtgcctgccgtaccgagcaggaagtactggatctcattgaccgcaccaacgcggcagcttaa

SEQ ID NO: 473347 - DNA, 306 bp, Shigella flexneri; identical to SEQ ID NO: 460085

SEQ ID NO: 473348 - DNA, 1398 bp, Shigella flexneri
atggagatcctctacaacatctttaccgtgttttttaaccaggtcatgaccaatgccccgttgttgctgggtattgtgacctgtctgggctacatcctactgcgcaaaagtgtcagcgttattattaaaggcacgattaaaaccataattggtttcatgttgttgcaggcagggtccggcatcctcaccagcaccttcaaaccggtggtggcgaaaatgtccgaagtctacggcattaacggcgcaatttccgatacttacgcgtcgatgatggcaaccatcgaccgcatgggcgatgcctatagctgggtaggttacgcggtgttgttagcgctggcgctgaacatctgttacgtgctgctgcgtcgcattaccggtattcgtaccatcatgctgactggtcatatcatgttccagcaggcggggctgattgccgttacgttgtttattttcggctactccatgtggacaaccattatctgcacggcgattctggtttcgctctactggggcattacctccaacatgatgtacaagccgactcaggaagtgacggacggctgcggtttctccatcggtcaccagcaacagtttgcatcattaattgcctataaagttgcgccgttcctcggcaaaaaagaggaaagcgttgaagacctcaaactgccaggctggctgaatattttccacgacaacatcgtctccacggcgattgtcatgaccatcttctttggtgccattctgctctccttcggtatcgacaccgtgcaggcgatggcaggcaaagtgcactggacggtctatatcctgcaaaccggtttttccttcgcggtggcgatcttcatcatcactcagggtgtgcgcatgtttgtggcggaactctctgaagcgtttaacggtatctcccagcgcctgatccctggtgcggttctggcgattgactgtgcggctatttatagcttcgctccgaacgccgtggtctggggctttatgtggggcaccatcggtcagctgattgcggttggcatcctggtcgcctgcggttcctcgatcctgattatcccaggctttatcccgatgttcttctccaacgccaccatcggcgtgttcgctaaccacttcggcggctggcgtgcggcgctgaagatttgtctggtgatggggatgatcgaaatctttggttgcgtctgggtggtgaaacttaccggtatgagtgcctggatggggatggcggactggtcgattctggcaccgccgatgatgcagggcttcttctccatcggtatcgcctttatggccgtcatcattgtaattgcactggcttatatgttcttcgctggccgcgcactgcgcgcagaagaagatgcagaaaaacaattggcagaacagtctgcttaa

SEQ ID NO: 473349 - DNA, 1065 bp, Shigella flexneri
atgagtaaagtgaaaagtatcacccgagaatcctggatcctgagcactttcccggagtggggtagctggctgaatgaagaaattgaacaagagcaggtcgcccctggcacatttgcgatgtggtggctaggctgcaccgggatctggttgaaatcagaaggtggcaccaacgtttgcgttgatttctggtgcggcactggcaaacaaagtcacggtaacccgttaatgaaacagggtcaccagatgcagcgcatggctggcgtgaaaaaactgcagccaaacctacgcaccaccccgtttgttcttgatccgtttgcgattcgccagatcgacgcggtactggcgactcacgatcacaacgatcatatcgacgttaacgtcgctgctgccgtgatgcagaactgtgctgatgacgtaccattcattggaccgaaaacctgcgttgatttgtggattggctggggcgtaccgaaagagcgttgcatcgtggtcaaaccgggcgatgttgtaaaagtgaaagacattgaaattcatgcgcttgacgctttcgaccgtactgcactgatcaccctgcctgccgatcaaaaagcggctggcgtactgccagatggcatggacgatcgcgcagtaaactacctgttcaaaactcctggcggttccctatatcacagtggcgattcccactactctaactattatgcgaagcacggtaacgaacatcagatcgatgtggcgttaggatcgtatggtgagaacccgcgcggtattaccgacaaaatgaccagcgccgatatgctgcgtatgggtgaagccctgaatgcgaaagtggttatcccgttccaccacgacatctggtcaaacttccaggccgatccgcaagagatccgcgtgctgtgggagatcaaaaaagatcgtctgaagtatggcttcaagccgtttatctggcaggttggcggcaaatttacctggccgctggataaagacaacttcgagtaccactatccgcgcggtttcgatgattgcttcactattgaaccggatctgccgttcaagtcattcctgtaa

SEQ ID NO: 473350 - DNA, 756 bp, Shigella flexneri
atgactgaagcacaaagacatcaaatcctcctggaaatgctcgcacaattgggctttgtgaccgttgagaaagtcgttgagcgtctgggaatttcgcctgccactgcgcgacgcgatatcaataaacttggcgaaagcggcaaactgaaaaaggtgcgcaatggcgcagaagctattacccaacagcgcccgcgctggacgccgatgaatctgcatcaggcgcagaatcacgatgaaaaagtacgtattgctaaagcggcctcgcagctggttaatccgggcgaaagcgtagtcatcaactgcggctccaccgcgtttctgcttgggcgggaaatgtgtggcaagccagtgcaaatcatcactaattatctaccgctggcaaattacctgatcgatcaagaacatgacagcgtgatcattatgggtggacagtacaacaaaagtcagtccatcactttaagcccgcagggcagcgaaaacagtctctatgccgggcactggatgtttaccagcggaaaagggctgaccgcagaagggttgtataaaaccgatatgctgacagcaatggcagagcagaagatgctgagcgtggtagggaaactggtggtactggttgatagcagtaagattggcgaacgcgcgggaatgctttttagccgtgccgatcaaatcgatatgctgatcaccggcaaaaatgctaacccggaaatcctgcaacaactggaagcgcaaggggtcagcattctgcgtgtttaa

SEQ ID NO: 473351 - DNA, 750 bp, Shigella flexneri
atgattgaaatagaatcacgcgagctggcagatattcccgttcttcatgcttatcctgtcgggcaaaaagataccccgttaccgtgcgtaattttttatcacggctttacttcatccagcctggtgtatagctattttgccgttgcgctggcgcaggctggtttgcgggtgatcatgccggatgcgcccgatcacggtagccgttttagtggcgacgaagcgcggcggttaaatcaattctggcaaatcttgctacaaagtatgcaggaattcactactttacgtgcggcaatagccgaagaaaactggctgcttgatgaccgtctggcagtcggtggcgcgtcgatgggcgcgatgacggcactgggaattaccgctcgccaccccacggtgaaatgtaccgccagcatgatgggatcgggctattttacatcgctcgcccgttcactgtttccaccgctgatacctgaaacggcagcacagcagaatgaattcaataaaattgtcgcgccgctggcagagtgggaagcgacaaaccacctggaacaacttggggacagacctctactgctgtggcatggcctcgacgatgacgttgtgcctgccgacgaatcactacgtttgcagcaggccttaagcgagacgggacgggataaactgctaacctgttcatggcagccaggcgtgcgtcaccgtattacgcctgaggcgttagatgctgccgtgacatttttccgccagcatctttaa

SEQ ID NO: 473352 - DNA, 330 bp, Shigella flexneri
atggttagcaggaaacgtaatagcgttatttaccggtttgccagtttattattggtgttgatgttaagtgcctgtagcgcactgcaaggtacgccacagccagcaccgccagtaacggaccatccgcaagagattcgccgcgaccagacgcaagggttacagcgaataggtagcgtaagcacgatggttcggggttctccggatgacgcattagcagaaatcagagcaaaagctgtcgctgcaaaagctgattattacgttgtcgtcatggtggacgaaaccatcgtgacaggacagtggtattcacaagccattttgtaccgtaaataa

SEQ ID NO: 473353 - DNA, 276 bp, Shigella flexneri
atgaaacaattacttgcctcaccctcgctgcaattagtgacttatcctgcgagcgccacggcacagtctgcagaattcgccagtgctgactgcgtgacgggcctgaatgaaataggtcagatctcagttagcaatatttcaggggatccgcaggacgtggaacgtatcgtggcgttaaaggccgatgaacaaggtgcgtcatggtaccgcattattaccatgtacgaagaccagcagcctgataactggcgcgtacaggcgatactgtatgcatga

SEQ ID NO: 473354 - DNA, 1626 bp, Shigella flexneri
gtgcactggcaaactcacaccatttttaatcaacctataccattaaataacagcaacttatacctgtctgatggcgcgctttgcgaagcggtaacgcgtgaaggtgctggctgggatagcgattttctagccagtattggtcagcagttaggaacggctgaatcccttgaactggggcggctggcgaatgtaaacccgcctgaactgttgcgctacgatgcccaggggcggcgtctggacgatgttcgtttccatcccgcatggcacctgctgatgcaggcgttatgtaccaatcgggtgcacaatcttgcctgggaagaagacgctcgctccggcgcatttgtggcgcgcgcggcgcgttttatgttacatgcgcaggttgaggctgggtcgttatgtccaataacgatgacctttgccgccacgccattgttgttacagatgttacccacgccgtttcaggactggaccacgccgctgctgagcgatcgctacgattctcacttattgccaggtgggcaaaaacgcggtttgttgattggcatgggaatgacggaaaagcagggcggttccgatgtcatgagcaacaccacccgtgcagagcgtttggaagatggctcttatcggctggtggggcataaatggtttttctcggtgccgcaaagcgatgcgcatctggtgctggcgcagaccgcgggcggtctgtcctgcttttttgtgccgcgctttttgcctgacgggcaacgcaacgcgattcgcctcgagcggctgaaagataagctgggtaatcgctctaacgccagttgcgaagtggagtttcaggatgccattggctggttattggggcaggaaggggaaggaattcgtctgatcctgaaaatgggggggatgacgcgttttgattgcgccctgggtagccatgccatgatgcgccgtgcattttcgctggcgatttatcatgcacatcaacgccatgtttttggtaatccattgatccaacagccccttatgcgtcatgtcttaagtcgcatggcacttcagcttgaagggcaaacggcgttgctgtttcgtcttgcgcgagcgtgggaccggcgtgccgatgccaaagaagccctgtgggcgcgtttatttacgcctgcggcaaaatttgtgatctgcaaacgaggtatgccgtttgtggccgaagcgatggaggtgctgggcggcattggttattgcgaggagagcgagctgccgcggctttaccgggagatgccggtaaacagtatttgggaaggttccggcaatattatgtgcctggatgtgttgcgcgttctcaataagcaagcgggcgtatacgacttattgtcggaagcatttgtggaagtgaaagggcaggatcgctattttgatcgcgcggttcgtcgtttacagcagcagctgcgtaagccagctgaagaactggggcgagagattactcatcagctattcctgctgggctgcggtgcgcaaatgttgaaatatgcttctccgccaatggcgcaggcgtggtgtcaggtgatgttagatacgcgcggcggcgtacggttgtcagagcagatccagaatgatttattgctgcgggcgacggggggagtgtgtgtgtaa

SEQ ID NO: 473355 - DNA, 1164 bp, Shigella flexneri
atgctgagacacaacgttcctgtgcggcgggatctggaccagatcgccgctaacaacggtttcgactttcatatcatcgacaatgaaatctattgggacgagagtcgggcttaccgttttactctgcgccagattgaagagcagatcgaaaaaccgactgcggaactgcatcagatgtgccttgaggtggtggatcgcgcggttaaagacgaagagatcctgacgcaactggcgatcccgccgttgtactgggatgtgatcgccgaaagctggcgcgcacgcgatccttcgctgtatggccggatggattttgcctggtgtggcaatgcgccggtgaagctgctggagtacaacgccgatacgccgacctcgttgtatgagtcggcttatttccagtggttgtggctggaggatgcccggcgcagcggcattattccgcgtgatgccgatcagtacaacgccattcaggaacgcctgatttcgcgctttagtgagctttacagtcgggaaccgttttatttttgctgctgtcaggacaccgatgaagacaggagtaccgtgctgtacttgcaggactgcgcccagcaggcagggcaggagtcgcggtttatctacattgaagatctcggtttgggcgtcggcggcgtactgaccgatcttgatgataatgtcatccagcgtgcatttaagctgtatccgctggagtggatgatgcgtgacgataacggtccgctgctgcgcaagcgtcgcgagcaatgggtggagccgttatggaaaagtatcttgagtaataaagggctaatgccgctgctttggcgcttcttccctggtcatcctaaccttcttgcatcctggtttgagggtgaaaaatcgcagattgccgctggcgaaagctatgtgcgtaaaccgatctactcgcgcgaaggcggaaacgtcaccattttcgacggtcagaataacgtcgttgaccacgctgatggtgattacgccgatgaaccgatgatctaccaggcgtttcaacctctgccgcgatttggcgatagctacacactcatcggtagctggattgtcgatgatgaagcgtgcggaatggggatccgtgaagataacacactgatcaccaaagacacctcacgtttcgttccgcattacattgctggataa

SEQ ID NO: 473356 - DNA, 639 bp, Shigella flexneri
atggccagaaaacgcaaatcaagaaataacagtaaaattggtcacggagcgatcagtcgcattggtagaccgaataatccttttgaaccgcgtcgcaatcgctacgcacaaaaatacttaacgttggcgctaatgggcggtgccgcttttttcgtattgaaaggttgtagcgatagtagcgatgtcgataacgacggcgacggaacattttacgcgacagtgcaggattgtattgatgacggtaataatgccgacatttgcgcgcgtggctggaacaacgccaaagcggcattttatgccgatgttccaaagaatatgactcagcagaactgtcagtctaagtacgaaaattgctactacgacaatgttgaacagagttggatcccggtcgtttctggatttttgttaagccgggttattcgtaaagatcgcgatgagccgttcgtctataacagcggcggatcctcatttgcttcccgccccgtctggcgcaacacttccggtgattactcctggcgcttcggttctggcaaaaaagagtcttactcttcaggcggctttaccaccagaaaagcgtcgaccgtttcgcgcggcggctatggtcgttcttccagcgcccgtgggcattggggaggctaa

SEQ ID NO: 473357 - DNA, 237 bp, Shigella flexneri
ttgttaggttacgttatcccattatccagtgcggcaatcaatgcggtgagtattccagactatttcgcctggggcgggattgcactggtgattcagttactcgtttttgctggtgtcagactttatatgcccgcattaagcgaaaaaattattaatcacaataccgcagcaggaatgtttatgggaaccgccgcgctggctggcggtatttttaacgcagcttgtatgacatggtaa

SEQ ID NO: 473358 - DNA, 267 bp, Shigella flexneri
atgcgagcagcgttttgggtagggtgtgccgctttattgttgtcggcgtgtagtagtgagcctgttcagcaggcgactgcggcgcacgtagcgccaagtttaaaagcgtcgatgtccagtagtggagaagcaaattgtgcaatgatcggcggttcgctttctgttgcccgtcaactggatggtacggcgattgggatgtgtgcattacccaacggcaaacgctgtagcgaacagtcacttgccgccgggagctgtggcagctattaa

SEQ ID NO: 473359 - DNA, 3525 bp, Shigella flexneri
atgattactattgacggtaatggcgcggttgcttcggtgacgtttcgcatcagtgaagttatcgccatctaccctattacccccagttccacgatggcagaacaggctgatgcctgggccggaaacggcttgaagaacgtttggggagacacaccacgcgtggttgaaatgcagtcggaagcgggtgctatcgctaccgtgcatggcgctttgcagacgggtgccctttcaacatcgtttacgtcatcgcagggtttgctgctgatgatcccgacgctgtacaaactggcaggcgaactgacgccatttgtcctgcatgtagcggcacgtaccgttgccacacatgcactttctatttttggcgatcattccgacgttatggcggtgcgccagacgggttgcgcgatgttgtgtgcggctaacgtccaggaagcgcaagactttgctctcatttcgcacatcgcaacgctgaagagccgcgtgccatttattcatttctttgatggttttcgcacgtcccacgaaatcaataaaattgtcccgctggccgatgacactattcttgatctcatgccgcaggccgaaattgatgctcatcgcgcccgggcgctcaacccggaacatccggtgatccgcggtacgtccgccaatcctgacacttatttccagtctcgcgaagccaccaatccctggtacaacgcggtctatgaccatgttgaacaggcgatgaatgatttcgctgccgcgacaggtcgtcagtatcagccgtttgagtattacgggcatccgcaagcggaacgggtgattatcctgatgggctctgccattggcacctgtgaagaagtggttgatgaattgctaacccgtggcgaaaaagttggcgtgctgaaagttcgtctgtaccgtcccttctccgccaaacacttgctgcaagctctgccgggatccgtacgcagcgtggcggtactggacagaaccaaagaacccggtgcccaggcagaaccgctctatctggatgtgatgaccgcactggcagaagcctttaataatggtgagcgcgaaaccctgccccgtgtcattggtgggcgctatggtctttcatccaaagaatttggcccggactgtgtactggcggtatttgccgagctcaacgcggctaaacctaaagcacgctttacggttggtatttacgatgatgtgaccaatctgtcactgccgttgccggaaaacactctgccaaactcggcgaaacttgaagccttgttttatggccttggtagtgatggcagcgtttccgcaaccaaaaacaatatcaagattatcggtaattccacgccgtggtacgcacagggctattttgtttacgactccaaaaaagcgggcggcctgacggtttctcaccttcgcgtgagcgaacagccgattcgttccgcttatctcatttcccaggctgattttgttggctgccaccagttgcagtttatcgataaatatcagatggctgagcgtttaaaacctagcggcattttcctgcttaatacgccgtacagcgcagatgaagtgtggtcgcgcttgccgcaggaagttcaggccgtgttaaaccagaaaaaagcgcgcttctatgtgattaacgcggcgaaaatcgcccgcgaatgtggcctggcggcccgtattaataccgtcatgcagatggcttttttccatctgacgcaaattctgcctggcgatagcgccctcgcagaattgcagggtgcgattgccaaaagttacagtagcaaaggtcaggatctggtggagcgcaactggcaggctctggcgctggcgcgtgaatccgtagaagaagttccgttgcaaccggtaaatccgcacagcgccaatcgaccgccagtggtttccgatgccgcccctgatttcgtgaaaaccgtaaccgcggcgatgctcgccgggcttggtgatgccctccccgtttcggcgctgccgccagacggcacctggccgatgggcaccactcgctgggaaaaacgcaatatcgccgaagagatccccatctggaaagaggaactctgtacccaatgtaaccactgcgtcgccgcttgcccacactcagctattcgcgcaaaagtggtaccgcctgaagcgatggaaaacgcccctgccagcctgcattcgctagatgtgaaatcgcgtgatatgcgcgggcagaaatatgtcttgcaggtggcaccggaagattgcaccggttgtaacctgtgcgtcgaagtttgcccggcgaaagaccgtcagaatccagagattaaagccatcaatatgatgtctcgccaggaacatgtcgaagaagagaaaatcaattacgatttcttcctcaacctgccagaaatcgaccgtagcaaactggaacgtattgatattcgtacatcgcagctgattacaccgctgtttgaatattcaggtgcttgccccggttgtggcgagacgccgtatattaaattgctgactcagctctatggtgaccggatgttgatcgctaacgccaccggctgttcttcaatttatggcggtaacctgccctctacaccgtataccaccgatgccaacggtcgtgggccggcatgggcgaactctctatttgaagataatgccgaatttggccttggtttccgcctgacggtcgatcaacaccgtgtccgcgtgctgcgtctgctggatcaatttgccgataaaatcccggcggaattactgacggcgttgaaatcagacgctacgccagaggttcgtcgagaacaggtcgcagctttacgccagcaactcaacgatgttgccgaagcacatgaactgctgcgtgacgcagatgcactggtggaaaaatcaatctggctgattggtggcgacggctgggcttacgatatcggctttggcggtctggatcatgtattgagtttgacggaaaacgtcaacattctggtgctggatacgcaatgctattccaacaccggtggtcaggcgtcgaaagcgacaccgctgggtgcagtaactaagttcggcgagcacggcaaacgtaaagcgcgtaaagatcttggcgtcagtatgatgatgtacggtcatgtttatgtggcgcagatttctctcggcgcgcagctgaaccagacggtgaaagcgattcaggaagcggaagcgtatccgggaccatcgctgatcattgcttatagcccgtgtgaagagcatggttacgatctggctctcagccacgaccagatgcgccaactcactgctaccggcttctggccgctatatcgctttgatccgcgtcgtgccgatgaaggcaaactgccgctggcgctggattcacgcccaccgtcagaagcactggaagaaacgttacttcacgagcagcgtttccgtcgtctgaattcgcagcagccagaagtggcagaacagttatggaaagatgctgcagctaatttgcaaaaacgctatgacttcctagcacaaatggccggaaaagcggaaaaaagcaacaccgattaa

SEQ ID NO: 473360 - DNA, 897 bp, Shigella flexneri
atgaaaagaaaagtactggcacttttaattcctgccctgctcgccgcaggtgctgcacatgcagccgaagtttataataaagacggcaacaaattagatctgtatggcaaagttgatggcctgcattatttttctgataattcagcgaaagatggcgaccagagctatgcgcgtctgggttttaaaggcgaaacccaaattaacgatcaacttactggctacggtcaatgggaatacaatattcaggcaaacaacactgaatcttcaaaaaaccagtcatggacccgtctggcatttgccggactgaaatttgcagattacggttctttcgattacggacgtaattatggcgtaatgtacgacatcgaaggctggaccgatatgctgcctgaatttggcggtgactcttataccaatgcagacaactttatgactggtcgagccaatggcgtcgcgacttatcgtaatactgatttcttcggtctggtaaatggtctgaacttcgcggtgcagtatcaaggtaacaacgaaggagccagtaatggtcaggaaggcaccaataacgaacgcgatgttcgtcatgaaaacggtgacggctggggtctttccacaacatatgatttaggcatgggctttagcgctggtgcggcatacacctcttctgaccgcaccaatgaccaggttaaccatactgcggcgggtggtgataaagcagacgcgtggactgctgggctaaaatacgatgctaacaatatttacctagcaaccatgtattcagaaacgcgtaatatgaccccgtttggcgacagcgattatgcagttgcgaacaaaacccagaactttgaagttactagtaccagtttgattttggtctgcgtccggcagtctctttcctga

SEQ ID NO: 473361 - DNA, 234 bp, Shigella flexneri
atgtctaaaggccgtgaccttcacgctgctggtggtgcagacaacccggcaggtgttgatgataaagatctggttaaatacgccgatgttggcgcgacttactatttcaataaaaacatgtccacctatgttgactataaaatcaacctgttggatgaagatgacagtttctacgctgccaacggcatctctaccgatgatattgtcgctttaggtctggtttatcagttctaa

SEQ ID NO: 473362 - DNA, 435 bp, Shigella flexneri
atgaacagaacgattcttgtccctatcgatatttcagattcagaattaactcaacgcgtgattagccacgttgaggcagaggcaaagattgatgatgcagaggttcatttcctgacggtaataccttcactgccctactatgcctctctgggtttagcgtattccgcagaattaccggcaatggatgacctgaaagcggaagccaaatcgcaactggaagagatcattaaaaaatttaaactgccaaccgacagagtgcatgtccatgttgaggaaggctcgcccaaagaccgcattctggaattggcgaagaagatccccgctcatatgatcatcattgcttcccatcgaccggatatcaccacttatctgctcggttccaacgccgcagctgtagtgcgtcacgcagagtgctccgtgctggttgtgcgctga

SEQ ID NO: 473363 - DNA, 936 bp, Shigella flexneri
atgtcgcaaaatcaagaaattagtaagaaagaacaatacaacctgaacaaattacaaaaacgtctgcgtcgtaacgtgggcgaagccattgctgacttcaatatgattgaagaaggcgatcgcatcatggtttgcctctccgggggtaaagacagctataccatgctggagattctgcgcaatttgcagcaaagcgcgccaatcaatttttcgctggtggctgttaacctcgatcaaaagcaaccgggcttcccggaacacgttctgcccgagtatcttgaaaagctgggcgttgagtacaagattgttgaagagaacacttacggtatcgtgaaagagaagattccagagggcaaaaccacttgctcactgtgttctcggctacgtcgcggtatcctttatcgcaccgcaacggaactggggacgacgaagatcgcgttgggtcaccatcgtgacgatatcctgcaaacgttgttcttaaatatgttctacggcggcaagatgaaaggtatgcctccgaaactgatgagcgatgatggcaaacatatcgttattcgtccactggcctactgccgcgagaaagatattcagcgatttgccgatgcaaaagcgttcccgattattccgtgcaacctgtgcggttcacagcctaacctgcaacgtcaggtgattgctgacatgttgcgtgactgggataaacgttatccagggcgtatcgagacgatgttcagcgcgatgcagaatgtggtgccgtcgcatctgtgcgataccaacctgttcgatttcaaaggcattacccacggttctgaagtggttaacgggggtgatctggcgtttgatcgcgaagagatcccactacaaccggcgggctggcagccagaagaagatgaaaatcagttggatgagttacggctgaatgtggttgaagtgaaataa

SEQ ID NO: 473364 - DNA, 1368 bp, Shigella flexneri
gtgaccgctttttctaccctgaatgttttgcctcccgcccaactcacgaaccttaatgagttgggttatttaaccatgacgccggtgcaggccgccgcgcttccggcgatccttgccggaaaagatgttcgcgtgcaggcgaaaaccggcagcggcaaaacggcggcttttggcctcggcttgttacagcaaattgatgcgtcgctatttcaaacccaggctttagtgctgtgtcctacgcgtgaactggcggatcaggtggcaggtgaattgcgtcggctggcgcgttttctgccaaataccaaaattttgacgttgtgcggtggtcaaccgttcggtatgcagcgtgattcgctgcaacatgcgccgcatattatcgtggcaacgccgggtcgtttgctggatcacttgcaaaaaggcacggtatcactggatgcgctgaatactttggtgatggatgaggccgaccgcatgctggatatgggatttagcgatgccattgatgatgtcatccgttttgcgcctgcatctcgacagacgcttctgttttcggcaacctggccggaagccatcgccgcaatcagcggacgagtgcaacgcgatcctttggcgattgaaattgactcaacagatgctttgccacccattgaacaacaattttatgagacatccagtaaaggcaaaattcctctgttgcaacggttattaagcttgcatcagccatcctcttgtgtggtgttttgcaataccaaaaaagattgccaggctgtctgcgacgcgctgaatgaagtagagcaaagtgcattgtcgttacacggcgatctggagcaacgcgatcagaccctggtacgttttgctaacggtagcgcccgtgtactggttgcgactgatgttgctgcgcgtggtctggatattaaatcgcttgagctggtggtgaactttgagctggcgtgggaccctgaagttcatgtacatcgcatcggtcgtacagctcgtgcaggaaatagcggtctggcgatcagtttctgtgctccggaagaagcacagcgggccaatatcatttctgacatgttgcagataaaacttaactggcaaacgccgccagctaatagttccattgtgacgctggaagcagaaatggcaacgttgtgtatcgatggcgggaaaaaagccaaaatgcgcccgggtgatgtattaggtgcactgacaggagatatcgggcttgatggcgcagatattggcaaaatcgccgtgcatccggcgcatgtctatgtcgcggtccgtcaggctgttgctcataaagcatggaaacagttacagggcgggaagattaaaggaaaaacgtgccgggtgcggttattaaaataa

SEQ ID NO: 473365 - DNA, 174 bp, Shigella flexneri; identical to SEQ ID NO: 461099

SEQ ID NO: 473366 - DNA, 984 bp, Shigella flexneri
gtggaagcgattaagggatcggacgttaatgtcccggatgcagtatttgcctggatgctggatggtagaggcggcgttaaaccgctggaaaatacagatgtgattgatgaagcgcatccctgctggctccaccttaattatgtacaccatgatagcgcccaatggctggcgacaacaccgctgcttcccaataacgtacgtgatgcgctggcgggcgagagcacacggccccgagtcagccgtttcggtgaaggcacgctgattacattgcgctgtataaacggcagcaccgatgaacgccccgatcaactggtcgccatgcgtgtatatatggacgggcggttaattgtttcgacccgacaacgcaaagtgctggcgctggacgatgtggtgagcgatctggaagagggcacgggtccgaccgattgcgggggatggctggtggatgtgtgcgatgcgttgaccgatcattccagtgaatttatcgagcagctgcacgataaaattatcgaccttgaagataatctccttgatcagcaaattccaccgcgtggattcctggctctgctgcgcaaacaattaattgtgatgcgtcgctatatggcaccgcaacgtgatgtttatgctcgtcttgccagtgaacgtttgccgtggatgagcgatgaccaacgccgtcggatgcaggatattgccgatcgccttgggcgcggccttgacgaaatcgacgcctgtatagcacggactggcgtgatggcggatgaaatcgctcaggtgatgcaggaaaatttagctcgtcgtacctatacaatgtcgttgatggcaatggtctttttacccagtacctttctgaccgggttatttggcgtcaaccttggtgggatccctggcggcgggtggcaattcggattttcaattttttgtattctgttagttgttcttattggtggtgttgctttatggttgcaccgtagtaaatggttgtaa

SEQ ID NO: 473367 - DNA, 531 bp, Shigella flexneri
atgattacgcacaacttcaataccctggacttactcaccagtcctgtctggattgtttcgccctttgaggaacagttaatttatgccaatagcgcggcgcgactgttgatgcaagacctcacgtttagtcagctacgaaccggaccctattccgtctcctcacaaaaagaactgccgaaatacctctccgatctgcaaaaccaacacgatattatcgaaatcctcactgttcagcgtaaagaagaggaaacagcattaagctgtcggcttgttttgcgagagctgacagaaacagaaccggtgattattttcgaaggtatcgaagcgccggcaacgctgggtttaaaagccagtcgctcggcaaattatcagcgcaaaaaacaaggtttttatgcgcgcttttttctgactaactctgcaccaatgttgttgattgacccgtcacgagatggacaaatcgtcgatgctaacctcgccgcgctcaatttctatggttataaccatgaaacgatgtgccagaaacatacctag

SEQ ID NO: 473368 - DNA, 693 bp, Shigella flexneri
atgcttgggcgtcgcgtcatgcctatcatgcatgaaatttcgcatttacccggcggtcataaccctttgaattttgttcataaactggcggatggatctactcgtcatgtgcagacctatgccggaccgattgaaatttatggcgacaagctcatgttatgtattgtgcatgatattactgagcaaaaacggctggaggagcagctggaacatgctgctcaccatgacgcgatgaccggattactgaatcggcgacagttttatcacattacggaaccaggccaaatgcagcatctcgccatcgctcaggattacagcttgttgctcatcgacaccgatcgttttaaacacattaacgatctctatgggcattctaaaggtgatgaggtgttatgcgccctcgcccgccccctcgaaagttgcgctcgcaaaggcgatttggtgtttcgttggggaggcgaagagtttgtcttattgctaccaagaaccccactggataccgcgctttcgctggctgaaactatccgcgtaagcgtggcaaaagtgagtatttcgggcttaccacgctttaccgtcagcattggtgtggcgcatcacgaaggaaatgaaagcatcgatgaactgtttaaacgcgttgatgatgctttgtatcgggcgaaaaatgatggacgcaaccgcgtgctggcggcataa

SEQ ID NO: 473369 - DNA, 564 bp, Shigella flexneri
atgaaccttgacgacaaatcgctgtttcttgacgccatggaagatgtccagccgctgaaacgtgctacagatgtccactggcatccaacgcgtaaccaacgtgcgccgcagcgtatcgacacgctgcagcttgataatttcctcactaccggatttctcgacatcatcccgctaagtcagccgctggagtttcggcaggaagggttgcagcatggggtgctggataagctgcgcagtggtaaatatccgcaacaggcgagcctgaatcttttgcgccagccggtggaagagtgccgcaaaatggtgttcagtttcattcaacaagccctggcggatggtttgcgtaatgtgctgattattcatggtaaagggcgggaagataaatcacatgccaatattgtccgcagctatgtggcgcgctggctgaccgaatttgatgatgttcaggcatattgcaccgcgctaccgcatcatggcggcagcggggcgtgttacgtcgcactacgtaaaacggcgcaggcgaagcaagaaaactgggagcgccacgctaagcgcagtcgttga

SEQ ID NO: 473370 - DNA, 1452 bp, Shigella flexneri
atgtctatgcgtaaacatattgctttcgccagtatgtgtatgggattatttattgctcagcttgatattcaaattgtatcgtcatccctaaatgaaataggtggtggtctgtccgcaggtaaagacgaaatggcctggcttcagaccagctatttaattgctgagattattgttattccgctctctgggtggctgtcacgggtattttccactcgttggctttttactctatccgcgggaatatttactttaatgagtatcgcgtgtggacttgcatggaatattcagatcatgattttgtttcgtgctttacagggagctgctggcgcatccatgatccctttagttttcacgatggcgtttatttattaccagggtaaagagttggggttggctgctgcggtagtcagtgcgctggcctcactgtcaccgacgctagggccaactctggggggctggctcactgataacctcgactggcgatggctattttatatcaatatattacctggcatatatttagttttgagtattccttttctggttaattttgataaacctgatctctctttactgaaagttgctgattatccgagtattatcctgttggccatgactctgggatgtctggaatatacccttgaagaaggagcgcgctggggatggctggatgataatactattttgctgacatcagttctggcattggtgagttttattttatttgctgcgcgtacacttacaatatccaatccgataatggatcttcatgcttttaaggataaaaatttcactctgggatattttttttctttttctggaggggttgggatattctctactgtatatttaatacctgtgtttttggggcagattcgcggattaaatgccgaagagataggttttgccgtttgcacaacaggtattttccagttattttctgttcccttttacttctggttaagtaaaaaaataaatctgcgatggctgttgatggcggggctgggcggatttgtgttttcaatgtatctttttacccctataacccacgaatggggatggcaggaattactgtttccacaggcaattagagggatttcgcagcagtttgcgatggcccccatcgtaacattaacgctggggggaattccaaaagaacggctgaagttagcctctggtgtatttaatttaacacgtaatcttgggggcgcgattggtattgccctgtgtggctctattctcaataatcgaactaattttcatttttcgagaatgggtgaaaaaatggtttctgttccccatacggtgaatgacttcatttccagaagtgctttattttttaatcgcagtagaagtgaccagacatcggaaatactggcttcaaccaaattattgagtcaattgatgctgagggaggcgcaaactatggcattttcggtacctttctgctaa

SEQ ID NO: 473371 - DNA, 396 bp, Shigella flexneri
gtggttcgtgcgccgattgatggcattgtcgcaaaccgcagcgcccatacaggcagttgggtggaaggcggcacatcgttagtttcactagtaccagtcagtgagttgtgggttgatgcaaattataaagaaaaccaaatagcgggaatgaagccaggaatgaaggctgagatccgtgctgatattctcaaaggggaagtgtttcacggtcacattgaaagcctttccccagcgacaggagccagtttcagcttgattccgatagaaaatgccactggcaatttcaccaaaattgttcagcgtgtcccggtacggattgcatttgacgacgcaaaggaattaaagcaacttcttcgcccgggactgtccgtcaccgtcagtgttgatgagagatga

SEQ ID NO: 473372 - DNA, 189 bp, Shigella flexneri; identical to SEQ ID NO: 469030

SEQ ID NO: 473373 - DNA, 1059 bp, Shigella flexneri
gtggataagccatttcgaagaattttgctcattaagatgcgttttcatggggatatgttattaactactcccgtcattagttctctgaaaaaaaattaccctgacgcaaaaatcgatgtgctgctttatcaggacaccatcccgatcctgtctgaaaatccagagattaacgcgctctacggcataaaaaataaaaaagcaaaagcctcagaaaaaattgccaacttttttcatctcatcaaggtattacgtgccaataagtatgaccttatcgtcaatcttaccgatcaatggatggttgctatactggttcgcttattaaatgctcgtgtgaaaatttcccaggattatcatcatcggcagtctgctttttggcgtaaaagtttcacccatttggtgccgttgcagggtggaaatgtggtggaaagtaacttatccgtgctgacaccattgggacttgattcgttggtgaagcagacaaccatgagttacccgcctgcaagctggaaacgtatgcgtcgcgaacttgatcacgctggtgttggacaaaattatgtggttatccaacctacggcgcggcaaatcttcaaatgctgggacaacgccaagttttccgctgtgattgatgccttacatgctcgtggttatgaagtcgttctgacgtccggcccagataaagacgatctggcctgcgtcaatgaaattgcgcagggatgccagacgccaccagtaacggcgctggctggaaaggtgaccttcccggaacttggtgcgttaatcgatcatgcgcagctgtttattggcgttgattccgcaccggcgcatattgccgctgcagttaatacgccgctgatatcgctgtttggcgcaacagatcatattttctggcgtccctggtcaaataacatgattcaattctgggcgggagattaccgggaaatgccaacgcgcgatcagcgtgaccgaaatgagatgtatctttcggttattccggcggcagatgtcattgctgctgtcgataaattactgccctcctccacgacaggtacgtcgttatga

SEQ ID NO: 473374 - DNA, 1125 bp, Shigella flexneri
atgatcgttgctttttgtttatataaatattttccctttggcggtttgcagcgcgattttatgcgtattgctcagacagtcgccgcccgaggtcatcatgttcgggtttatacccagtcgtgggaaggcgaatgccctgatgtatttgaagtgatcaaagtgccggttaaatcgcataccaatcacgggcgcaatgcggagtattttgcctgggtgcaaaaacatttacgcgaacatcccgtcgataaagtcgttggattcaacaaaatgccggggctggacgtttattatgccgctgatgtttgttatgccgagaaagtagcgcaggaaaaaggctttttctatcgcctgacgtcacgttatcgccattatgccgcctttgagcgggcaaccttcgaacagggcaagccgacacagctgctgatgctgacagataagcaaatcgccgatttccagaaacattatcagactgaagcggagcgttttcatattctgccaccggggatttatcctgatcgtaaatatagccagcagccagccaatagccgtgaaatcttccgtaagaagaatggaataaccgaacaacaatatttattgttgcaggtcggttcagacttcacgcgtaaaggtgccgatcgttccattgaagcacttgcttcgttaccggattcgctgcgccacaacacattgctatatgttgttgggcaggataaaccgcgaaaatttgaggcactggcagaaaaacgcggcgtgcgcagtaatgttcacttcttctcggggcgcaacgatgtctcggaattaatggcggcggcggatttattactgcatcctgcctaccaggaagcggcgggaattgtgctgctggaagcgattactgcaggattaccggtactaacaactgccgtttgtggctatgcgcattatattgtcgacgctaattgcggcgaggctattgctgagccattccgccaggaaacattgaatgagattttacgcaaagcgttaacgcaatcttcattgcgccaggcttgggcggaaaatgcgcgacattatgctgatacacaagatttatacagtctgccagagaaagcggcggatatcataacgggtggtctggatggttga

SEQ ID NO: 473375 - DNA, 798 bp, Shigella flexneri
atggttgaacttaaagagccgtttgccacgttatggcgcggcaaagatccttttgaggaagttaaaaccttgcagggtgaggtatttcgtgaactggaaactcgccgtactctgcgctttgaaatggcgggaaaaagctattttctcaaatggcatcgcggcacgaccctgaaagagataatcaaaaatttactctcattgcggatgccagtattaggcgcagaccgcgaatggaatgcgattcatcgactgcgggatgtcggcgttgatactatgtatggggtggcattcggcgaaaaaggcatgaatccgctgaccagaacctcgtttattattaccgaagatctgacaccaaccatcagtctggaagattactgtgctgactgggcgaccaacccaccagatgttcgcgtaaagcgtatgcttattaagcgtgtcgcgacgatggtgcgcgatatgcatgctgcgggcattaaccatcgtgactgttatatctgtcatttcctgctgcacttgcctttttccggtaaggaagaggagttaaaaatttcggtaattgacctacaccgggcgcagcttcgcacgcgcgttccaggtcgttggcgcgataaagatcttatagggctttatttttcttcaatgaatattggcctgactcagcgggatatctggcgctttatgaaggtgtattttgccgccccgcttaaagacattctcaagcaggaacaaggactgctgtcgcaagcagaagcaaaagccacaaaaatcagggaaagaacgattcgaaaatcgttgtaa

SEQ ID NO: 473376 - DNA, 1008 bp, Shigella flexneri
atgtctcaactcaatgatagtgacatcatcctttttgagtataattttcattatcaaaatataagatctaaaaatactcttgatatagcatttggtattgacagaaattttctttttggatgtggtgtagccatcgcatctattctattaaacaatagagaaatctcttgtgaatttcatgttttcacagattatatcagtgataaagacaaattatatttttctgatttagcaaaacaatataattcaagaattaatatttatgttatcaattgtgataagctgaagtcattaccaagcacgaaaaactggacttacgcaacatattttcgatttataattgcagattatttctatcataaacatgaaaaaatactatatcttgatgcagatattgcttgcaagggtagtattaaagaactcttagattatcaattttctactaatgaaattgccgcagttgtagctgaaagagatattgaatggtggcaaaatcgagcctcggtattaactacaccacagttagcttctggatatttcaatgctggttttttactgataaatattgatgagtggaatctaaataacatttcgtcaaaagctattgaaatgttgcgtgacccagattgggtaagtaaaatcacccaccttgatcaagatgtactgaatgtattattgaatggtaaagtgaagtttatttcggagaaatataatacccgatatagtattaactatgaattaaaagacaaagttgataatccagtcaatgatgacaccgtgtttatacactatgtgggacctacaaaaccctggcatgagtgggctgattatccggtttcacgtagttttttgatcgccaaagcagcttctccgtggagtaaagaagatttacttaaacctgtaaatagcaatcagtatcggtattgtgcaaaacataaatttaaacaaaagcattatatggcaggcatttttaattatttaaagtattataaagaaaaatgcttctaa

SEQ ID NO: 473377 - DNA, 564 bp, Shigella flexneri
  misc_feature (530)..(539): n is a, c, g, or t
atgatatataataaaacgataaatgggttgaaagttttcataaaagataatgatcccttttatgagcaagttctaaatgactttttaacttgcagggttaaaacattaaaagtttttcgttctattgatgatactaaagtcattcttattgacactgctcgtggacctcttgtacttaaagtttatgcgccaaagcataaaatgaccgaacgtttcttaaaatcttgcataaaaaaagattattatgaaaatttaatttatcaaaccgatcgggtacgtggtgaaggcatccaatcaattaatgactattttttgctagctgaacgtaaaacattaaatttcgctcattattatattatgctcattgagtatattgaaggtgtcgggttaaatgagtatttggaaatttctgaagatctgaaggatcaattatcagaatcgataaaagagttgcatcagcatggaatggtgtctggcgatcctcataaaggaaattttatagtatccgaaaaaggtttaagactaattgnnnnnnnnnngatcttgaacggcactataatataa

SEQ ID NO: 473378 - DNA, 1212 bp, Shigella flexneri
ttggattttaaacatcttactcaatttaaagatataattgaactggacaagcgccccgttaaacttgatgaacgggaaacgtttaatgtctcatggggtattgatgagaactaccaggttggggctgcgatttcaattgcttcaattcttgaaaagaataaacaaaacaaatttacctttcacataatcgctgattacttagacaaagagtatattgaattattatcacaattagcaacgaagtatcaaacagtaattaaattatatcatattgattctgagccattgaaggcgctacctcaatcaaatatctggccagtatctatttattatcgtttgctttcatttgattatttttctgcgcgattggattcattattatatcttgatgctgatatcgtctgtaagggttcattgaacgagttaatagcattagagtttaaagatgaatatggggcagtggtaattgatgtagatgctatgcaaagtaaaagcgctgagcgtttgtgtaatgaggattttaacggtagctattttaactctggtgtaatgtatattaatttacgggaatggttaaaacaaagactaacggaaaaattctttgatctattatcagatgagtcaattataaaaaaattaaagtacccggatcaagatattttaaacttaatgtttctacatcatgctaaaatattaccgagaaaatataattgtatttatactataaagtcagaatttgaagaaaaaaatagtgaatattacacccggtttattaatgatgacactgtcttcatacattatactggtataactaagccatggcatgattgggcgaactacgcctctgcagattattttcgtaatatttataatatatcaccatggagaaatataccttataaaaaagctgttaaaaaacatgagcacaaagaaaaatataaacacttgctttaccagaaaaaatttctcgatctcctattttttcaattcctcctcgcggagcggctgctgttgaaacgtggatgtatcaggttgctcagcgtaccaattttccaaatcgtattgtttgtatcaaaaatccaggatactcaaattacacctttgttaatgataattgtagtattcatagggttggattcagtcgcatatataagcggttatttcaaaaatggacaagacttgatcctcttccatattcacagagaatattga

SEQ ID NO: 473379 - DNA, 819 bp, Shigella flexneri
atgaagctatacactcaaattcgtaagctagctcctcaggcaagagtggttatacatatgcataatgcatttgaaccaaaattgcttgagcaaaatgttaaaatgatagtccctagtttatacttgaaaaagtattaccaatcttatttagcaaatgcagatattgagattgtaccaaatggaattgatttagaaacctatcaatctaattttcagccgatcactagaagcgaacttaatatctctcctgaagagaaaattattttttatgctgggcgtatcgtccctgacaaaggcatattgctgttgatgcaatcattcgaaaaattggccgctgctcacaaaaatttaaaattagttgtgattggtgattatacagaaatgagtaaaagtgacaaaggtgcatatcaacgcaatgtcagggaaattgcaaaacgtttgaaggatcgttgcattatgttaggaagcataccgcctgaaaagatgtattgttattacccactggcagatttagtcgtcattccttcccagttccaggaaccattttgcatggtggcaattgaagctatgggtgctggtaagcctgttttagtgagtacgcgtggggggatgacggaatttgtcaaagaaaatactacgggattccatttaaaagaacctatgactgcagactccataagcagcgatattttaaaaacgttagcgaatcctgaattaacagcagttgcaaagcaaggtcaggactttgtgtttgatcactacagttgggatggcgtaactcaaagattcgaagaggttattcataattggtttgaataa

SEQ ID NO: 473380 - DNA, 1209 bp, Shigella flexneri
atgacctcaacattatttttctctctcgagaaaaaaaactggatagcgtactggaacagagctctcgtattcttattcattaccacctattttttgggtgggattacaaggtataaacatcttattgttattcttatgacaataacgacaatcgtctatctctgcaaacggccaaaacactatctctcactatttaaaacatttctttttggtagtgttgccatattaactattgctgcattgctgtcacttcttcaatcccctgatgcaggtgctagcatgaaggaagttttcaaagctattattgagaatactttactatgcacaatagcaataccggtcatattgagagacgagaaaagagaagatgtcgaaaaaatcgttttcttctcatttattagtgcgttgggcttacgctgtttttctgaattgattacctattataaggactatcaacaagggataatgccattcgcagattatagacaccgtagcatttctgactcgatggtctttttattccctgcattgttaaatctctggcttatcaaatcagcaaaataccgcatttcttttgtggttctaagcgttatttttatttttctgatattaggaactttatccagaggggcctggctttccgtgttagtcattggattaatatggattctgatgtttaaacaatggaagttactattagtaggagtaatggtttccatcattgcattgtcggttattttcacacataaggagatgaccgcaaagctaacgtataaacttcaacaaactaatagttcttatcgctatgcaaatggtactcaaggcagcgcactcgatctaatattagaaaatcctgttattggttatggttacggtaacgttgcatataaagatgtctataataaacgtgtaattgattatccagaatggacctttagacaatcaatagggccacataattttgcgctattcatctggtttggcactggtttattagggctggtaagtcttatgatgctatactgtgcaatattgaaagagtgtataaaaaatggcgtcaagaataaatatcgctcaccatataatgcatattatataatcttactatcttttataggttattttgttatccgtggaaacgtagaacaaattgaaccaaatttattaggcgtttacgccggcttattattagcgatgaaaaacaagtaa

SEQ ID NO: 473381 - DNA, 993 bp, Shigella flexneri
atgcgggttttgatcgttaaaacatcgtcgatgggcgatgttctccatacgttgcccgcactcactgatgcccagcaggcaatcccagggattaagtttgactgggtggtggaagaagggttcgcacagattccttcctggcacgctgccgttgagcgagttattcctgtggcaatacgtcgctggcgtaaagcctggttctcggcccccataaaagctgaacgcaaagcgtttcgtgaagcgctacaagcagagaactatgacgcagttatcgacgctcaggggctggtaaaaagcgcggcactggtgacacgtctggcgcatggcgtaaagcatggattggactggcaaaccgctcgcgaacctttagccagcctgttttacaattgtaagcatcatattgcaaaacagcagcacgccgtagaacgcacccgcgaactgtttgccaaaagtttgggctatagcaaaccgcaaacccagggcgattatactatcgcacagcattttctgacgaacctgcctacagatgctggcgaatatgccgtatttcttcatgcgacgacccgtgatgataaacactggccggaagaacactggcgagaattgattggtttactggctgattcaggaatacggattaaacttccgtggggcgcgccgcatgaggaagaacgggcgaaacgactggcggaaggatttgcttatgttgaagtattgccgaagatgagtctggaaggcgttgcccgcgtgctggccggggctaaatttgtagtgtcggtggatacggggttaagccatttaacggcggcactggatagacccaatatcacggtttatggaccaaccgatccgggattaattggtgggtatgggaagaatcaagtagagtgtcgttctacaagtatgtctcttgcagatttgccagctcaaaccgtttttcaaaatttaaatcttgaaataataaccaataagttgacatcggagataagatga

SEQ ID NO: 473382 - DNA, 1047 bp, Shigella flexneri
atgaaaatactggtgatcggcccgtcttgggttggcgacatgatgatgtcgcaaagtctctatcgcacgctccaggcgcgctatccccaggcgataatcgatgtgatggcaccggcatggtgccgtccattattatcgcggatgccggaagttaacgaagctatccctatgcctctcggtcacggagcgctggaaatcggcgaacgccgcaaactgggtcatagcctgcgtgaaaagcgctacgaccgcgcctacgtcttaccaaactccttcaaatctgcattagtgcctttcttcgcgggtattcctcatcgcaccggctggcgcggcgagatgcgctacggtttactcaacgatgtacgcgtgctcgataaagaagcctggccgctaatggtggaacgctatgtcgcgctggcctatgacaaaggcattatgcgtaccgcacaagatctgccgcagccattgttatggccgcagttgcaggtgagcgaaggtgaaaaatcatatacctgtaatcaattttcgctttcatcagaacgtccgatgattggcttttgcccgggtgcggagtttggtccggcaaaacgctggccacactaccactatgcggaactggcaaagcagctgattgatgaaggttatcaggtggttctgtttggctctgcgaaagatcatgaagcgggcaatgagattcttgccgctttgaataccgagcagcaggcatggtgtcggaacctggcgggggaaacacagcttgatcaagcggttatcttgattgcagcctgtaaagccattgtcactaacgattctggcctgatgcacgttgcggcggcgctcaatcgtccgctggttgccctgtatggtccaagtagcccggacttcacaccgccgctatcccataaagcgcgcgtgatccgtctgattaccggctatcacaaagtgcgtaaaggtgacgctgcggagggttatcaccagagcttgatcgacattactccccagcgcgtactggaagaactcaacgcgctattgttacaagaggaagcctga

SEQ ID NO: 473383 - DNA, 933 bp, Shigella flexneri
atgatcatcgttaccggcggcgcgggctttatcggcagcaacatcgttaaggccctgaatgataaaggcatcaccgatattctggtggtggacaacctgaaagacggcaccaagtttgtgaacctggtggatctggatatcgcggactatatggataaggaagacttcctgatccagattatggctggcgaagagttcggtgatgtcgaagcgattttccacgaaggcgcatgctcttccaccaccgagtgggatggcaagtatatgatggataacaactatcaatactccaaagagctgctgcactactgtctggagcgcgaaatcccgttcctgtatgcctcttccgcagccacctacggcggacgcacctccgactttattgaatcccgcgagtacgaaaaaccgttgaatgtctacggttactcaaaattcctgtttgatgaatatgttcgtcaaatcctgccagaagcgaactcgcagattgttggcttccgctatttcaacgtttatggaccgcgtgaaggccataaaggcagcatggcgagcgtcgctttccatctcaacacccagcttaataacggtgaatcaccgaagctgttcgaaggtagcgagaacttcaaacgtgacttcgtctatgtgggcgacgtggcagatgtaaacctgtggttcctggaaaatggcgtttccggtatcttcaacctcggcaccggtcgtgcagaatccttccaggcagtagcagatgctacgctggcttatcacaagaaaggccagatcgaatacattccgttcccggataagctgaaaggccgctaccaggcgttcactcaggcagatctgacaaatctgcgcgcggcgggttacgacaaaccgttcaaaaccgttgctgaaggtgtaacggaatacatggcctggctgaatcgcgacgcataa

SEQ ID NO: 473384 - DNA, 873 bp, Shigella flexneri
atggtcttattagtaatgaaatcatccaccacaattatcactgcatattttgacattggtagaggggattggactgctaataaagggttccgtgaaaaactagctcgttcagttgatgtttattttagttactttgagcgtctggccgcacttgaaaatgagatgattattttcacttctcccgatttgaaaccaaggattgaagcgattcgcaacggaaaaccaacaacggttatcgttatcgatataaaaaagaaatttagatatatcagaagtcgtatcgaaaaaattcaaaaagatgagtcatttacaaatagacttgagcctcgacaattaaaaaacccagagtactggtcaccagagtatgttttggtatgtaaccttaaggcctattttgtaaataaagctatcaacatgggtttagtgaaaacgcctcttgttgcgtggatagattttggctattgccgtaagccaaatgtaactcgaggattgaaaatttgggatttcccatttgatgaaaataagatgcatcttttcactataaaaaaagggcttactgttacatctcaacaacaggcttttgatttcatgattggcaatcatgtatatattattgggggcgcaattgttggttcacagcataaatggaaagaattctataaattagttctggaaagtcaaaaaataacactaaacaataacattgtggacgatgaccagggcatttttgtcatgtgctattacaaacgttccgatctcttcaacctaaactatctggggagaggaaaatggttcgatttgtttcgctgcttcaggagtaacactttaggggcaaaaatgcaggcgctgagaattttcctttcaagaaaatag

SEQ ID NO: 473385 - DNA, 1197 bp, Shigella flexneri
atgcgtggagaattttatcagcagttaaccaacgatctggaaaccgcacgggcggaagggttgtttaaagaagagcgcattattacgtctgcgcagcaagcagatatcaccgtggctgatggaagccacgtcattaacttttgtgccaacaactatctcgggctggcgaatcatccggatctgattgcggcagcaaaggcgggaatggattctcacggtttcggcatggcttcggtgcgttttatttgcggcactcaggacagccataaagagcttgaacaaaaactggcggcattcctggggatggaagatgcgattctctactcttcctgctttgatgctaacggtggcctgtttgaaacgctgctgggcgcggaagacgccattatctccgacgcactgaaccacgcgtctattattgatggtgtgcgtctgtgtaaagctaaacgctatcgctatgccaacaacgatatgcaggagcttgaagctcgtctgaaagaagcgcgtgaagccggtgcgcgtcatgtgctgattgccaccgatggtgtgttctcgatggacggcgtgattgccaatctgaagggcgtttgcgatctggcagataaatacgatgccctggtgatggtagacgactcccacgcggtcggttttgtcggtgaaaatggtcgtggttcccatgaatactgcgatgtgatggggcgtgtcgacatcatcaccggcacgctcggtaaagcgctgggcggggcttctggtggttataccgcggcgcgcaaagaagtggttgagtggctgcggcagcgttctcgtccgtacctgttctccaactcgctggcaccagcaattgtcgccgcttccatcaaagtgctggagatggttgaagcgggtagcgagttgcgtgaccgtctgtgggcgaacgcgcgtcagttccgtgagcaaatgtcggcggcgggctttaccctggcgggagccgatcacgccattattccggtcatgcttggtgatgcggtagtggcgcagaaatttgcccgagagctgcaaaaagagggcatttacgtcaccggtttcttctatccggtcgttccgaaaggtcaggcgcgtattcgtacccagatgtctgcggcgcatacccctgagcaaattacgcgtgcagtagaagcattcacgcgtattggtaaacaactgggcgttatcgcctga

SEQ ID NO: 473386 - DNA, 1026 bp, Shigella flexneri
atgaaagcgttatccaaactgaaagcggaagagggcatctggatgaccgacgtccctgtaccggaactcgggcataacgatctgctgattaaaatccgtaaaacagccatctgcgggactgacgttcacatctataactgggatgagtggtcgcaaaaaaccatcccggtgccgatggtcgtgggccatgaatatgtcggtgaagtggtaggtattggtcaggaagtgaaaggcttcaaaatcggcgatcgcgtttctggcgaaggccatatcacctgcggtcactgtcgcaactgtcgtggcggtcgtacccatctgtgccgcaacaccattggtgtcggtgttaaccgtccgggctgcttcgccgaatatctggtgattccggcgttcaacgctttcaaaatccccgacaatatctccgacgacctggcttccatttttgatcccttcggtaacgccgtgcataccgcgctgtcgttcgatctggtgggcgaagatgtgctggtttctggtgcaggtccgataggtattatggctgcggcggtggcgaaacacgttggtgcacgcaatgtggtgatcaccgatgttaacgaataccgccttgagctggcgcgcaaaatgggtatcacccgtgcggttaacgtcgcgaaagaaaaccttaatgatgtgatggctgaactgggcatgaccgaaggctttgatgtcggtctggaaatgtccggcgcgccgccagcgtttcgtaccatgctcgataccatgaaccacggcggtcgtattgcgatgctgggtattccaccgtctgatatgtctatcgactggaccaaagtgatctttaaaggcttgttcattaaaggcatttacggtcgtgagatgtttgaaacctggtacaagatggcggcgctgattcagtctggcctcgatctctcgccgatcattacccatcgtttctctatcgatgatttccagaagggctttgacgctatgcgttcgggccagtccgggaaagttattctgagctgggattaa

SEQ ID NO: 473387 - DNA, 942 bp, Shigella flexneri
atgtatcaccttcaggttccacaaacagaagaagagttagagcgttactatcagtttcgctgggaaatgttgcgtaagcccctgcatcaaccaaaaggttcggaacgcgacgcgtgggatgcgatggcgcatcaccagatggtcgtcgacgagcagggtaatctggtggcggtaggccgattgtatattaatgccgacaatgaagcgtccattcgctttatggtcgttcacccggacgtgcaggacaaagggttaggaacgctgatggcgatgaccctggagtcggtggcgcgtcaggaaggcgttaagcgcgtgacctgtagcgcccgtgaagacgcggtggagtttttcgccaagctggggtttgttaatcagggagaaatcaccacgccaaccaccacgccgattcgccattttttgatgattaagcccgtcgccactctggatgatattttgcatcgcggcgactggtgcgcgcagctgcaacaggcgtggtacgaacatatcccgcttagtgaaaaaatgggcgtgcgtattcaacaatataccgggcaaaaatttatcaccaccatgccggaaaccggcaatcagaatccgcaccatacgctgtttgccgggagtttattctcgctggcgacgctcaccggttgggggcttatctggctgatgctgcgtgaacgccacctcggcggaacgattattctggcggatgcgcatatccgctacagcaaaccgattagcggtaaaccccatgcggtagccgaccttggtgccttaagcggcgatctcgaccgtctggcgcgcggacgaaaagcacgggtgcagatgcaggtcgaaatctttggcgacgagacgccgggtgcagtgtttgaaggcacgtatatcgttctgcccgcgaagccatttggcccgtatgaagagggcgggaacgaagaagagtag

SEQ ID NO: 473388 - DNA, 438 bp, Shigella flexneri; identical to SEQ ID NO: 461086

SEQ ID NO: 473389 - DNA, 873 bp, Shigella flexneri
atgctaaaaaccattcaggacaaagccaggcaccgtacccgtccactatgggcctggctaaaactactctggcaacgtattgatgaggacaacatgacaaccctggcaggtaaccttgcctatgtgtcgttgctctcattagtgccgctggttgccgttgtttttgcgcttttcgccgcttttcccatgttttccgacgtcagcattcagttacgtcactttatttttgccaactttctgcctgctactggcgatgttattcagcggtatatcgaacaatttgttgctaattccaacaagatgaccgccgttggggcgtgcgggctgatcgtcaccgcgttattgttgatgtactccatcgatagcgcgttgaataccatctggcgcagtaaacgagcgcgaccaaaaatttactcgttcgccgtgtactggatgattttaacgctggggccgctgctggcaggggccagtctggcgatcagttcctatttgctctccctgcgctgggcgagcgatctcaatactgtcatcgacaacgtgctgcgtatttttccgttgctgttgtcgtggatctccttctggttgctgtacagcattgttcctaccatccgcgtacctaaccgcgacgcgattgtcggcgcgtttgtcgccgcactcctgttcgaagcaggaaagaaaggtttcgcgctttatatcaccatgttcccgtcatatcagctcatttacggtgtgctggcggtgatccccattctctttgtttgggtctactggacatggtgtatcgtcttgcttggcgcggaaattactgtcactctcggggaataccgcaaactaaaacaagcagctgaacaagaagaagacgacgaaccatga

SEQ ID NO: 473390 - DNA, 600 bp, Shigella flexneri
atgctctatatctttgatttaggtaatgtgattgtcgatatcgactttaaccgtgtgctgggagcctggagcgatttaacgcgtattccgctggcatcgcttaagaagagttttcatatgggggaggcgtttcatcagcatgagcgtggggaaattagcgacgaagcgttcgcagaggcgctgtgtcatgagatggctctaccgctaagctacgagcagttctctcacggctggcaggcggtgtttgttgcgctgcgcccggaagtgatcgccatcatgcataaactgcgtgagcaggggcatcgcgtggtggtgctttccaataccaaccgcctgcataccaccttctggccggaagaatacccggaaattcgtgatgctgctgaccatatctatctgtcgcaagatctggggatgcgcaaacctgaagcacgaatttaccagcatgttttgcaggcggaaggtttttcacccagcgatacggtctttttcgacgataacgccgataatatagaaggagctaatcagctaggcattaccagtattctggtgaaagataaaaccaccatcccggactatttcgcgaaggtgttatgctaa

SEQ ID NO: 473391 - DNA, 786 bp, Shigella flexneri
atgagccttaccgaactaaccggtaacccgcggcacgaccaactcctcatgctgatcgccgagcgtgggtatatgaatattgatgagctggcaaatctgctggatgtctccacgcagacggtccgccgggatattcgtaaattaagcgagcaaggcctgattacgcgccatcacggtggcgcgggtcgggcttccagcgtcgttaatacggcgttcgagcagcgtgaggtttcgcaaaccgagaaaaaaaaagcgattgccgaagcggtggcagactatattcctgatggttcaacaatatttatcaccattggtacgactgttgagcatgttgcccgggcgttacttaaccataatcatttgcggataatcaccaacagcctgcgtgtggcgcatattctttaccacaacccgcgctttgaagtgatggtgcccggcggtacgttgcgctctcataatagcgggatcattggcccttcagcggcgtcctttgtggctgattttcgtgctgattatctggtaacaagcgttggggcgattgagagcgatggcgcgttgatggagtttgatgtaaacgaagctaacgtggtgaaaacgatgatggcgcacgcgagaaatattctgctggtcgccgatcacactaagtatcatgcttcggcggcggttgaaattggtaacgtggcacaggtcactgcgctctttaccgacgagctgccgcccgctgcgctaaaatcacgcttacaagacagccaaattgaaatcattcttccccaggaagacgcgtag

SEQ ID NO: 473392 - DNA, 897 bp, Shigella flexneri
atgattcgtgttgcttgtgtaggtataaccgtgatggatcgcatctattacgtggaagggttaccgacggagagcggtaaatacgtggcgagaaattatacggaagttggtggcgggccagcggcgacggcagcggttgcggcggcaaggctgggggcgcaggtcgattttattggtcgcgtaggtgatgacgacgcgggcaacagcctgctggcagagctggaatcctggggcgttaacacccgttacaccaaacggtataaccaggcgaaatcttcgcaatccgccatcatggtggataccaaaggcgagcggataatcattaactaccccagcccggatctgctgcctgacgcagagtggttggaggaaattgatttctctcagtgggatgttgtgctggcagatgtacgctggcacgacggcgctaaaaaagccttcaccctggcccgtcaggcgggtgtgatgaccgttctggacggggacattacgccgcaggatatcagtgagctggtggcattaagcgatcacgcggccttttcagaaccgggtctggcgcgcttaacgggcgtgaaagagatggccagtgcgctaaaacaggcacaaacgctcacaaatggtcatgtctatgtgacccagggtagcgcaggctgcgactggctggaaaatggtgggcgtcagcatcaaccggccttcaaagttgatgtggtagataccacaggtgcgggtgatgtttttcacggcgctttggcggtggcgctggcaacaagtggggatttagcggagtcagtccgcttcgccagcggtgtagcggcgttaaaatgcacacgtcccggtggacgagccgggatccctgactgtgatcaaacccgatcttttttgtcactttttgtataa

SEQ ID NO: 473393 - DNA, 378 bp, Shigella flexneri
atggcagcaatcgcgtttatcggtttaggacaaatgggttcgccaatggcgagcaatttattgcagcaagggcatcaacttcgcgtctttgatgtgaacgccgaagctgtgcggcatctggtagacaaaggtgcgactcccgccgccaacccggcgcaggccgctaaagatgccgaatttatcattaccatgttgccgaatggcgatctggtgcgcaacgtgttgttcggtgaaaacggcgtttgcgaaggcttatctaccgatgcgctggtcattgatatgtccaccatccatccgctgcaaatgccattaccggtactctgttactgctggctggcggcaccgctgaacaagttgaacgtgccacaccgatcctga

SEQ ID NO: 473394 - DNA, 444 bp, Shigella flexneri
atggcgatgggcagtgagttgatcaacgctggcggtccgggcatggggatccgcgttaagctcatcaacaactacatgagcatcgcgctcaatgcgctttcggcagaagccgccgttttgtgcgaagccctgaatcttcccttcgatgttgccgtcaaagtgatgagcggtaccgccgccggtaaaggtcacttcaccacttcctggccaaacaaagtcctcagcggagatctttctcccgccttcatgatcgatcttgcccataaggatcttggcatcgcccttgatgtcgccaaccagctgcatgtgccaatgccgctgggggccgcctcacgggaggtttatagccaggcgcgcgcagcgggtcacggtcgccaggactggtccgccattctggaacaggtccgtgtcagtgccgggatgactgccaaagtaaaaatgtaa

SEQ ID NO: 473395 - DNA, 453 bp, Shigella flexneri
atgaataagtacaccatcaacgacattacgcgcgcatcgggcggttttgccatgctggcggtcgatcagcgcgaagccatgcgcatgatgtttgccgcggctggggcacccgctccggtagccgatagcgttttaactgatttcaaagttaacgctgcaaaggccctctcgccttatgcctcggcgattctggtagatcaacaattctgctaccgccaggtggttgagcaaaacgcgattgccaaaagttgcgccatgattgtcgccgccgatgagttcattcctggcaacggtattccggtcgatagcgtggttattgaccgcaaaatcaatccgctacagatcaaacaagacggtggcaaagccttaaaactgctggtgctgtggcgtagtgatgaagatgcgcagcaacgtctggatatggcgaactgtgccactcacacggtctggtaa

SEQ ID NO: 473396 - DNA, 294 bp, Shigella flexneri
atgccgctttatggcaaaggtccgcaacaagagcttctctgtgcttcacaacgtctgaatgaccatatcaatatgccatgggtgatcctctcttccagtgtcgacgaaaaactgttcccgcgtgccgtacgcgtggcaatgacggcgggcgcatcgggattcctggcaggccgtgcagtctgggcatcggtcgtcggtttaccagacaacgagctgatgctccgtgacgtttgcgcaccgaaattacaacaacttggcgatatcgtcgacgaaatgatggctaaacgccgctaa

SEQ ID NO: 473397 - DNA, 1242 bp, Shigella flexneri
atgaaatggtttaacaccctaagccacaaccgttggctggaacaggaaaccgaccgcatctttgattttggtaaaaattccgtagtgccgactggttttggctggttaggcaataaagggcaaatcaaagaagagatgggcacccatctgtggatcacagctcgtatgttgcacgtttattccgttgctgcggcgatgggtcgacctggcgcttacgcgttggttgatcacggtattaaagccatgaacggcgcactgcgtgataaaaaatatggcggctggtatgcctgcgtgaatgacgagggcgtggtggatgcctccaaacagggctatcaacacttctttgctctgctgggtgccgccagcgccgtcacaacgggtcacccggaagcgcgcaagctgctcgattacaccattgagattatcgagaaatatttctggagcgaagaagagcagatgtgcctggagtcctgggacgaagccttcagcaaaaccgaagagtaccgcggcggcaatgccaatatgcacgcggtggaagctttcttgattgtttatgacgtcactcacgacaaaaaatggctggatcgcgcgattcgcgtggcttccgtgattatccacgacgtcgccagaaataatcattatcgcgttaacgaacacttcgatacccagtggaatccgctgccggattacaacaaagataacccggcgcatcgcttccgcgcgttcggaggtacaccaggccactggatcgaatggggccgtttaatgctgcacatccatgctgccctggaagcccgttgcgaacaaccaccagcatggctgctagaagatgccaaaggtctgtttaacgccaccgtgcgcgatgcctgggcacccgatggagcggacgggattgtttataccgttgactgggaaggaaaaccggtggtccgcgaacgtgtacgttggcctatcgtcgaagcaatgggtacggcctacgcgctctacaccgtcactggcgatcgccagtatgaaacctggtatcaaacatggtgggagtactgcattaagtacctgatggactatgaaaatggttcctggtggcaggagctggatgcggacaataaggtcatcaccaaagtctgggacggcaaacaggatatttatcacctgctgcattgcctggtgatcccgcgtatcccgttagcgcccggcatggctccagcggttgcagcgggtctgctggatattaatgcgaaataa

SEQ ID NO: 473398 - DNA, 927 bp, Shigella flexneri
atgtcgttaattaaggtgccttgtatgcaaatcaccaatatgcattgcagtggacagaccgtttcacttgccgcgggggattatcacgcgaccattgtgaccgtcggtgctggtctggctgaattaacctttcagggttgtcatttagtcatcccgcacaaacccgaagagatgccgctggcgcatctgggtaaagtgcttattccgtggccgaaccggatcgccaacggctgttaccgttatcaggggcaggaatatcagttacccattaatgaacatagttcaaaagccgctattcacgggctgcttgcctggcgagactggcaaattagtgaattaaccaccaccagcgttaccctgacagcttttctgccgcccagttacggctatccgtttatgctggcttcacaagttgtttattcgctcaacgcacacacgggtctttccgttgagatcgcaagccagaatatcggcactgtcgcagcgccttatggcgtgggtattcatccttatttaacctgcaacttaacatctgttgatgaatatctgttccagcttccggcaaaccaggtttatgccgtcgatgaacacgtaaatccgacaacgcttcaccacgttgatgagctggatttaaatttcacgcaggcgaaaaaaatagccgcgacaaaaatcgaccacacctttaaaaccgctaatgatttgtgggaaatgaccattacccatccacagcaggcgctttcggtaagcctttgttccgatcaaccctgggtgcaggtttatagcggtgaaaaattacagcgtcagggactggcagttgaacctatgagttgcccgcctaacgcctttaattcaggtatcgacttattattactggaaccaggaaaaccgcaccgcctgttttttaatatttacggacagagaaaataa

SEQ ID NO: 473399 - DNA, 2037 bp, Shigella flexneri
atggatacgccacgtccacagttattagattttcaatttcatcagaataacgacagttttaccctacattttcaacaacgtcttattttaacccataacaaagataatccttgtttatggattggctcaggtatagcggatatcgatatgttccgcggtaatttcagcattaaagataaactacaggagaaaattgcgcttaccgacgccatcgtcagccagtcaccggatggttggttaattcatttcagccgtggttctgacattagcgccacgctgaatatctctgccgacgatcagggccgtttattgctggaactacaaaacgacaaccttaaccacaaccgtatctggctgcgccttgccgctcaaccagaggaccatatctacggctgcggcgaacagttttcctacttcgatctgcgcggcaaaccgttcccgctatggaccagtgaacaaggcgttggtcgcaacaaacaaacctatgtcacctggcaggccgactgcaaagaaaatgcgggcggcgactattactggactttcttcccacagcctacgtttgtcagcacgcagaagtattactgccatgttgataacagttgctacatgaacttcgactttagcgccccggaataccatgaactggcgctgtgggaagacaaagctacgctacgttttgaatgtgctgacacatacatctccctgctggaaaaattaactgccctgctgggacgccagccagaactgcccgactggatttatgacggggtaacgctcggcattcagggcgggacggaagtgtgccagaagaaactggacaccatgcgtaacgcgggcgtgaaggttaacggcatctgggcgcaggactggtctgggatccgtataacctcttttggcaagcgcgtgatgtggaactggaagtggaacagcgaaaactacccgcaactggattcacgcattaagcagtggtatcaggagggcgtgcagttcctggcctatatcaacccgtatgttgccagcgataaagatctctgcgaagaagcggcacaacacggctatctagcaaaagatgcctctggcggtgactatctggtggagtttggcgagttttacggcggcgttgtcgatctcactaatccagaagcctacgcctggttcaaggaagtgatcaaaaagaacatgattgaactcggctgcggcggctggatggctgacttcggcgagtatctgcccaccgacacgtacctgcataacggcgtcagtgccgaaattatgcataacgcctggcctgcgctgtgggcgaagtgtaactacgaagcccttgaagaaacgggcaagctcggcgagatcctcttctttatgcgcgccggttctaccggtagccagaaatactccaccatgatgtgggcgggcgaccagaacgtggactggagtctcgacgatggcctggcgtccgtagtcccggcggcgctgtcgctggcaatgaccggacatggtctgcatcacagcgacattggcggttacaccaccctgtttgagatgaagcgcagcaaagagctgctgctgcgctggtgcgatttcagcgccttcacgccgatgatgcgcacccacgaaggtaaccgtcctggcgacaactggcagtttgacggcgatgcggaaactatcgcccattttgcccgtatgactaccgttttcaccaccctgaaaccttatctgaaagaggccgtcgcgctgaatgcgaagtccggtctgccggtcatgcgcccgctgttcctgcattacgaagacgatgcacatacctattccctgaaatatcagtacctgttaggccgcgacattctggtcgctccggtacacgaagaaggtcgcagcgactggacgctctatctgccggaggataactgggtacatgcctggacgggtgaagcgttccggggcggggaagttaccgttaatgcgcccatcggcaagccgccggtcttttatcgcgccgatagcgaatgggcggcactgttcgcgtcgttaaacagcatctaa

SEQ ID NO: 473400 - DNA, 1221 bp, Shigella flexneri
atgagtcacatcacaacggaagatccagcaactttacgcctgccctttaaagagaaactctcttacggtattggcgacctggcctctaacatcctgctggatatcggtacgctttatcttttgaagttttataccgacgttctggggctgccaggcacctatggcggcattatctttttgatttcaaaattctttactgcgtttaccgatatgggtaccggcattatgttggattcccgacgcaagatcggtccaaaaggtaagttccgtccttttattctgtatgcgtcattcccggtcaccttactggcgatcgccaactttgtcggcacaccgtttgatgtcaccggtaaaacggtgatggccactattctgtttatgctttacggactgtttttcagcatgatgaactgctcctacggcgcaatggtcccggcaatcaccaaaaaccccaacgaacgcgcctcactggcggcatggcgtcagggcggcgctacgctgggcctgctgctgtgcacggtgggattcgtgccagttatgaatcttatcgaaggtaatcagaaacttggctatatcttcgccgccacgctgttttcactgttcggcctgctgtttatgtggatctgctactcaggcgtgaaagagcgttatgtcgaaacccaaccaaccaatccggcgcaaaagcctggcctgttgcaatctttccgcgcaattgccggtaaccgcccactgttcattctgtgtattgccaacctctgcaccttaggggcgtttaacgtcaagctcgccattcaggtctattacacccagtacgtacttaacgatcccatcctgttgtcgtatatgggatttttcagcatgggctgtattttcatcggcgtgttcctgatgcctggcgcagtcagacgttttggtaagaagaaggtctatatcggcggcctgctgatttgggtgctgggcgatctgctcaactatttcttcggcggcggctcggtcagctttgtggcgttctcctgcctggcgttcttcggctcagcgcctgaactgggcgctggtttccgacaccgtcgagtacggcgagtggcgcaccggcgtgcgttcggaaggcacggtctacaccggcttcaccttctttcgcaaagtgtctcaggcgctggctggtttcttccccggctggatgctgacgcaaattggctatgtgccgaacgtcgcacaggctga

SEQ ID NO: 473401 - DNA, 1404 bp, Shigella flexneri
atgtctgaccataatccactgacattaaaactgaatctgcgggaaaaaatcgcctatggtatgggcgacgtcggttcgaatttaatgctctgcatcggtactctgtatctcctcaaactttataccgatgaattagggatgcctgcttactatggcgggattatctttctggtcgcgaagttttttaccgcgtttaccgatatgctcaccggatttttactcgactcgcggaaaaatattgggcctaaaggcaaatttcgtccctttattttatatgcagcagttccggcggcgttaattgcaacgctccagtttatcgccaccaccttttgtttgccggttaaaacgacgattgccaccacgctgtttatgatgtttggactttcatacagtctgatgaactgctcgtatggtgcgatgatcccggcaattaccaaaaacccgaatgagcgcgcgcagctcgcggcttaccgccagggtggtgcaaccatagggctattgatttgtaccgtggcgtttattccgttgcagtcgcttttttctgactcaaccgtcggttatgcctgtgcggcacttatgttctccattggcggctttatttttatgatgctgtgctacagaggcgtcaaagagcattatgtggacacagcgccaaccggacataaagccagtattctcaaatctttttgcgcgatatttcgtaatccaccattgctggttttatgcattgctaacctgtgtactctggcggcatttaatatcaaactggcgattcaggtctattacacccagtatgtgctgaatgatattaatttattgtcgtggatgggattcttcagtatgggatgcatcctcgtcggcgtattactggtgccagtaactgtaaaatgttttggtaaaaaacaggtttatttagctggcatggtgctatgggcggtgggtgatatactgaattatttctggggaagtaactctttcactttcgtcatgttctcttgtgtcgccttttttggcacggcctttgtaaacagcctgaactgggcactggtaccagataccgtagattacggtgaatggaaaaccggtattcgtgccgaaggttctgtttataccggttataccttctttcgtaaaatttctgccgcacttgctggcttcttgccaggcattatgctgacgcaaattggttatgttcccaacatcgcgcaaagcgatgcgacattacagggtttgcgtcagctcatttttatctggccttgtgcactggcaattattgctgcattgacgatgggattcttttacacactcaatgaaaaacggtttgcattgattattgaggaaatcaaccaacgcaaaaataaagagatggcgacagaaaaaaaaacggcttccgtaacgttataa

SEQ ID NO: 473402 - DNA, 273 bp, Shigella flexneri
atgcgtacaattagctacagcgaagcgcgtcagaatttgtcggcaacaatgatgaaagccgttgaagatcatgccccgatcctcattactcgtcagaatggagaggcttgtgttctgatgtcactcgaagaatacaattcgctggaagagacggcttatctactgcgttcccccgctaacgcccggagattgatggactcaatcgatagcctgaaatcaggcaaaggaacggaaaaggacattattgagtgggtaatgctgccaacttactga

SEQ ID NO: 473403 - DNA, 900 bp, Shigella flexneri
atgacagacaacactcgtttacgcatagctatgcagaaatccggccgtttaagtgatgactcacgcgaattactggcgcgctgtggcattaaaatcaatcttcacacccagcgcctgatcgcgatggcagaaaacatgccgattgatattctgcgcgtgcgtgacgatgacattccctgtctggtaatggacggcgtggtagaccttgggattatcggcgaaaacgtgctggaagaagagctgcttaaccgccgcgcccagggtgaagatccgcgctactttaccctgcgtcgtctggatttcggcggctgccgcctttcgctggcaacgccggttgatgaagcctgggacggtccgctctccttaaacggtaaacgtatcgccacctcttatcctcacctgctcaagcgttatctcgaccagaaaggtatctcttttaaatcctgcttactgaacggttctgtcgaagttgcgccgcgtgccgggctggcggatgcgatttgcgatctggtttccaccggtgccacgctggaagctaacggcctgcgcgaagtcgaagttatctaccgctcgaaagcctgcctgatccagcgcgatggcgaaatggaagaatctaaacagcaactgatcgacaagctactgacccgtattcagggtgtgatccaggcgcgcgaatcaaaatacatcatgatgcacgcaccgaccgagcgcctggatgaagtcatcgccctgctgccaggtgccgaacgcccaaccattctgccgctggcgggtgatcaacagcgcgtagcgatgcacatggtgagtagcgaaaccctgttctgggaaacgatggaaaaactgaaagcactgggtgccagttcaatcctggtcctgccgattgagaagatgatggagtga

SEQ ID NO: 473404 - DNA, 1305 bp, Shigella flexneri
atgagctttaacacaatcattgactggaatagctgtactgcggagcaacaacgccagctgttaatgcgcccggcgatctccgcttctgaaagcattacccgcaccgttaacgatattctcgataacgtgaaaacgcgtggcgatgaggccctgcgtgaatacagcgcgaagtttgataaaaccacggttaccgcgctgaaggtgtctgctgatgagatcgccgccgccagcgaacgcctgagcgacgagctaaaacaggcgatggcggtggcagtaaagagtattgaaaccttccacactgcgcaaaaactgccgccggtagatgtagaaacgcagctaggcgtgcgttgccagcaggtcacgcgcccggtggcttcagtgggtttgtatattccgggcggctccgccccgctcttctcaacggtattaatgctggcaactccggcgcgtattgcgggctgtaaaaaagtggtgctgtgctcaccgccgccgattgccgatgaaattctttatgcggcgcagctgtgcgatgtgcaggacgtgtttaacgtcggcggcgcacaggccattgccgcgctggcgtttggtacggaatctgtgccgaaagtggacaaaatcttcgggccgggtaacgcctttgtcaccgaagcaaaacgccaggtaagccagcgtctggacggtgcggcgatcgatatgcccgcaggcccgtcggaagtgctggtgattgctgacagcggcgctacgccggattttgtggcttctgatttgctttctcaggctgaacacggccctgactcacaggtaattttactgacccccgatgctgatatggcgcgtcgcgttgccgaggccgtcgaacgccaactggcagaactgccgcgtgccgaaaccacccgccaggcactgaacgccagccgcctgatcgtgactaaagatttagcgcagtgcgtggagatctccaaccagtacggcccggagcacctgatcattcagacccgcaacgcccgcgaactggtcgatggcatcaccagcgccggttcggtatttcttggtgactggtcaccggaatcggcaggcgactacgcctccggcaccaaccacgtgctgccgacttacggttacaccgccacctgttccagcctcgggctggcagatttccagaaacgcatgaccgtacaggaactgtcgaaagaaggtttctccgcgctggcttcgaccattgaaacactggccgccgccgagcgcctgaccgcccacaaaaatgccgttactttgcgtgttaacgtccttaaggagcaagcatga

SEQ ID NO: 473405 - DNA, 1071 bp, Shigella flexneri
atgagcaccgtgactattactgatttagcgcgtgaaaacgtccgcaacctgacaccgtatcagtcggcgcgtcgtctgggcggtaacggcgacgtctggctgaacgccaacgaatatcccacagccgtggagtttaagcttactcagcaaacgctcaaccgctacccggaatgccagccaaaagcggtgattgaaaattacgcgcaatatgcaggcgtaaaaccggaacaggtgctggtcagccgtggcgcggacgaaggtattgaactgctgatccgcgctttttgcgaaccgggtaaagacgccatcctctactgcccgccaacgtacggcatgtacagcgtcagcgctgaaaccattggtgtcgaatgccgcacagtgccgacgctggaaaactggcaactggacttacagggcatttccgacaagctggacggcgtaaaagtggtctatgtttgcagccccaacaaccccaccgggcaactgatcaatccgcaggattttcgcaccctgctggagctaacccgcggtaaggcgattgtggttgccgatgaagcttatatcgagttttgcccgcaggcatcgttagctggctggctggcggaatatccgcacctggcgattttgcgtaccctttcgaaagccttcgcgttggcggggcttcgttgcggatttacgctggcaaacgaagaagtcatcaacctgctgatgaaagtgatccccccctacccgctctcgacgccggttgccgacattgccgcacaggcgttaagcccgcagggaatcgtcgccatgagcgaacgggtggcgcaaattattacagaacgcgaatacctgattgccgcactgaaagagatcccctgcgtggagcaggttttcgactctgaaaccaactacattctggcgcgctttaaagcctccagtgcagtgtttaaatctttgtgggatcagggcattatcttacgtgatcagaataaacaaccctctttaagcggctgcctgcgaattaccgtcggaacccgtgaagaaagccagcgcgtcattgacgccttacatgcggagcaagtttga

SEQ ID NO: 473406 - DNA, 1068 bp, Shigella flexneri
atgagtcagaagtatctttttatcgatcgcgatggaaccctgattagcgaaccgccgagtgattttcaggtggaccgttttgacaaactcgcctttgaaccgggcgtgatcccggaattgctgaagctgcaaaaagcgggctacaagctggtgatgatcactaatcaggatggtctgggaacacaaagtttcccgcaagcggattttgatggcccgcacaacctgatgatgcagatcttcacctcgcaaggcgtgcagtttgatgaagtgctgatttgtccgcacctgcccgccgatgagtgcgactgccgtaagccgaaagtaaaactggtggagggttatctggctgagcaagcgatggatcgtgccaacagttatgtaattggcgatcgcgcgaccgacattcaactggcggaaaacatgggcattaatggtttacgctacgaccgcgaaaccctgaactggccaatgattggcgagcaactcactaaacgagaccgttacgcccatgtagtgcgcaacaccaaagagacgcagattgacgtccaggtgtggctggatcgcgaaggtggcagcaagattaacaccggcgttggcttctttgatcacatgctggatcagatcgccacccacggcggtttccgcatggaaatcaatgtcaaaggcgacctctatatcgacgatcaccacaccgtcgaagataccggcctggcgctgggcgaagcgttaaaaattgccctcggcgacaaacgcggtatttgccgctttggttttgtgctgccgatggacgaatgccttgcccgctgcgcactggatatctctggtcgcccgcacctggaatataaagccgagtttacctaccagcgtgtgggcgatctcagcactgaaatgatcgaacacttcttccgttcgctctcttacaccatgggcgtgacactacacctgaaaaccaaaggtaaaaacgatcatcaccgtgtagaaagcctgttcaaagcctttggtcgtaccctgcgccaggccatccgcgtcgaaggcgacaccctgccctcgtcgaaaggagtgctgtaa

SEQ ID NO: 473407 - DNA, 591 bp, Shigella flexneri
atgaacgtggtgatccttgatactggctgcgccaacctgaactctgtgaagtctgccattgcgcgccacggttatgaacccaaagtcagccgtgacccggacattgtgttgctggccgataaactgtttttacccggcgtcggcaccgcacaagcagcgatggatcaggtgcgtgagcgcgagctgtttgatctcatcaaagcctgtacccaaccggtgctgggcatctgcttagggatgcaactcctgggacgacgcagcgaagagagcaatggcgtcgacttgctgggcatcatcgacgaagacgtgccgaaaatgaccgactttggtctgccactgccacatatgggctggaaccgcgtttatccgcaggcaggcaaccgcctgtttcaggggattgaagacggcgcgtacttttactttgttcacagctacgcaatgccagtcaatccgtggaccatcgcccagtgtaattacggcgaaccgttcaccgcggcggtacaaaaagataacttctacggcgtgcagttccacccggagcgttctggtgccgctggcgctaagttgctgaaaaacttcctggagatgtga

SEQ ID NO: 473408 - DNA, 738 bp, Shigella flexneri
atgattattccggcattagatttaatcgacggcaccgtggtgcgtctccatcagggcgattacggcaaacaacgcgattacggtaacgacccgctgccgcgcttacaggattacgctgcgcaaggtgccgaagtgttgcacctggtggatctgaccggggcaaaagatccggctaagcgtcaaatcccgctgattaaaaccctggtcgcgggcgttaacgtcccggtgcaggttggcggcggtgttcgtagtgaagaagacgtggcggcgttactggaagctggcgttgcgcgcgtggtggtcggttccaccgcagtgaaatcaccggacgtagtgaaaggctggtttgaacgtttcggtgccgatgcgctggtgctggcactggatgtccgtattgacgagcaaggcaacaagcaagtggcagtcagcggctggcaagagaactcgggcgtttcactggaacaactggtggaaacctatctgcccgtcggcctgaaacatgtgttgtgtaccgatatctcgcgcgacggcacgctggcgggatctaacgtctctttatatgaagaagtgtgtgccagatatccgcaagtggcgtttcagtcctccggcggcattggcgacattaacgatgttgctgccctacgtggcactggcgtgcgcggcgtaatagttggtcgtgcattactggaaggtaaattcaccgtgaaggaggccatcgcatgctggcaaaacgcataa

SEQ ID NO: 473409 - DNA, 777 bp, Shigella flexneri
atgctggcaaaacgcataatcccgtgtctcgacgttcgtgatggtcaggtggtgaaaggcgtacagtttcgcaaccatgaaatcattggcgatatcgtgccactggcaaaacgctacgccgaagaaggtgcagatgaactggtgttctacgatatcaccgcttccagcgatggccgtgtggtagataaaagctgggtatctcgcgtggcggaagtgatcgacattccgttttgtgtggcgggtgggattaagtctctggaagatgccgcgaaaattctttcctttggcgcggataaaatttccatcaactcccctgcgctggcagacccaacattaattactcgcctggccgatcgctttggcgtgcagtgtattgtggttggtattgatacctggtacgacgccgaaaccggtaaatatcatgtaaatcaatataccggcgatgaaagccgcacccgcgtcactcaatgggaaacgctcgactgggtagaggaggtgcaaaaacgcggcgccggagaaatcgtcctcaacatgatgaatcaggacggcgtgtgtaacggttacgacctcaagcagctgaaaaaagtgcgtgaagtttgccacgtcccgctgattgcctccggtggcgcgggcaccatggaacacttcctggaagccttccgcgatgccgacgttgacggtgcgctggcagcttccgtattccacaaacaaataatcaatattggcgaattaaaagcgtacctggcaacacagggcgtggagatcaggatatgttaa

SEQ ID NO: 473410 - DNA, 612 bp, Shigella flexneri
atgttaacagaacaacaacgtcgcgaactggactgggaaaaaaccgacggtctgatgccggtgattgtgcaacacgcggtatctggcgaagtgttaatgctgggctacatgaacccggaagccttagacaaaaccatcgaaagcggtaaagtcaccttcttctcgcgcactaaacagcgactgtggaccaaaggcgaaacctcgggcaattttctcaatgtggtaagtattgccccggactgcgacaacgacacattactggtgctggcgaatcccatcgggccaacctgccacaaaggcaccagtagctgcttcggcaacaccgctcaccagtggctgttcctgtatcaactggaacaactgctcgccgaacgtaaatatgccgacccggaaacctcctacaccgccaaactgtatgccagcggcactaaacgcattgcgcagaaagtgggcgaagaaggcgtggaaaccgcactggcagcaacagtacatgatcgctttgagctgaccaacgaggcatctgacttgatgtatcacctgctggtgctgttgcaggatcaggatctggatttaacgacagtaattgagaacctgcataaacggcatcagtga

SEQ ID NO: 473411 - DNA, 978 bp, Shigella flexneri
atgagagtagaaaataataatgtttctgggcaaaaccatgacccggaacagattgatttgattgatttactagtgcagttgtggcgtggcaagatgacaattatcatttccgtcattgtggctattgccctggctattggttatttggcagtagcgaaggagaaatggacgtcaacagcaattatcactcagcccgacgtggggcaaattgctggctataacaatgccatgaatgttatctatggtcaggctgcaccgaaagtatcggatttgcaggagacgttaattggtcgcttcagttctgccttctctgcattagcagaaacgctggataatcaggaagagccagaaaaacttaccatcgaaccttctgttaagaaccagcaattaccattgactgtttcttatgttgggcaaactgcagagggcgcacaaatgaagttggcccaatacattcagcaagttgatgataaagtgaatcaagagctagaaaaggatctcaaggacaacattgctctgggacggaaaaacttgcaggactctttaagaacccaggaagtggtcgcgcaggagcagaaagatctgcgtatccgtcagattcaggaagcgttgcagtatgcgaatcaggcgcaggtgacaaagccacaggttcagcagactgaagatgtgacgcaagatacgttgttccttctagggagcgaagcgctggagtcgatgattaagcatgaagcgactcgtccgttggtgttctcaccaaactactatcagacacgtcaaaacctgttggatattgaaaaattaaagtttgatgatcttgatattcatgcttaccgctatgtgatgaaaccgacgttacctattcgtcgcgatagtccgaaaaaggcaatcaccttgattctggcagtgcttctgggcggcatggttggcgcggggattgtgttggggcgtaacgctctgcgtaattacaacgcgaagtaa

SEQ ID NO: 473412 - DNA, 276 bp, Shigella flexneri
gtggtgggtatttatcgtctgattatgaagagcgggtcagataacttccgtgcgtcttctattcaggggattatgaagcgtatcaaggcgaaaggcgttgaagtgatcatctacgagccggtgatgaaagaagactcattcttcaactctcgcctggaacgtgatctcgccaccttcaaacaacaagccgacgtcattatctccaaccgtatggcagaagagcttaaggatgtggcagataaggtctacacccgcgatctctttggcagcgactaa

SEQ ID NO: 473413 - DNA, 1407 bp, Shigella flexneri
atgtcaaagcaacagatcggcgtagtcggtatggcagtgatggggcgcaaccttgcgctcaacatcgaaagtcgtggttataccgtctctattttcaaccgctcccgcgaaaagacggaagaagtgattgctgaaaatccaggcaagaaactggctccttactatacggtgaaagagtttgttgaatctctggaaacgcctcgtcgcatcctgttaatggtgaaagcaggtgcaggcacggatgctgcgattgattccctgaaaccatacctcgataaaggtgacatcatcattgatggtggtaataccttcttccaggacaccattcgtcgtaatcgtgagctttcagcagagggctttaacttcatcggtaccggtgtttccggcggtgaagagggcgcgctgaaaggtccttctattatgcctggcgggcagaaagaggcttatgagctggttgcgcctatcctgactaaaatcgctgccgtggcagaagacggcgagccatgcgttacttatattggtgccgacggcgcaggccattatgtgaagatggttcacaatggtattgaatacggagatatgcagctcattgctgaagcgtattctctgctcaaaggtggcctgaatctatctaatgaagaactggcccagactttcaccgagtggaataacggtgaacttagcagctacctgatcgacatcactaaagatatcttcaccaaaaaagatgaagacggtaactacctggttgatgtgattctggatgaagcagcaaacaaaggcaccggtaaatggaccagccagagcgcgctggatctcggcgaaccgctgtcgctgattaccgagtctgtgtttgcacgttatatctcttctctgaaagatcagcgcgttgccgcatctaaagttctctctggtccgcaagctcagtcagcaggcgacaaggctgagttcatcgaaaaagttcgcagtgcgctgtatctgggcaaaatcgtttcttacgctcagggcttctctcagctgcgtgctgcgtctgaagaatacaattgggatctgaactacggcgaaatcgcgaagattttccgtgctggctgcatcatccgtgcgcagttcctgcagaaaatcaccgatgcttatgccgaaaatccgcagatcgctaacctgctgctggccccgtacttcaagcaaattgccgatgactaccagcaggcgctgcgcgatgtcgtcgcttatgcagtacagaacggtatcccggttccgaccttcgccgctgcggttgcctattacgatagctaccgtgccgcggttctgcctgcgaacctgatccaggcacagcgtgactatttcggggcgcatacttataagcgcattgataaagaaggtgtgttccatactgaatggctggattaa

SEQ ID NO: 473414 - DNA, 423 bp, Shigella flexneri
gtgtattattttttttcggggcgatcgttgtattttgaattcaaatatttttattctgaatacttgagttttaattcacgcttagaaagtcgctatagctatgaactgatgaagaaagcaagtgaatatagtgagttatatggagataatcttatccaattaggcttggaggatggtatttacttctataaagggatggcaattggtgacgtctttggattagcaagatatagtgattggactattagtaatcccgagtgtgaggtaatcccacaggatgatttaatagagaagatgaaatcttttaatagttcgtttattgttatatctaaacgaagctatgctaattttaatccagaaaagtatccaaaattcaaagttcttatggatacacccaatggcatacttatcgctataaagtaa

SEQ ID NO: 473415 - DNA, 600 bp, Shigella flexneri
atgtctttaaatattttgataatttactttctgggcatggtcgggcaatttaataagattgctatctttttaatttttacggtgtgttgggttttaagcattattaaacgtcagcaatttagatggctggcaataaataatattgagttcagtacgctgtttgttattttatttcttgttttgatttttgtggttacattgttatcgtccctgcgagctcccggtgattgggatgatactatgtatcacttacctttggctcgttcattagttgagcaccatgcaattgttgttgaacaatatttgcgttttcctctgttcccgcaaaatgcagatcttttaatggctttaggtttacagttaggagatgtaaggttagctcagtttttagcaaatatctgtttttttgtaatagcctgtggacttgttggctgttcatgggaaattacgaaaacttattatccaggcattattgctacaatcctactatttactatcaatccacttaaagatcatcttggttatgcatatattgatttaacgctatctttgttttgctgcagccagtattcttatatatattcgctcagaaaacaataa

SEQ ID NO: 473416 - DNA, 390 bp, Shigella flexneri
atgtatcactcttttaatatcgctgtaattattccttgttataatgagcagaaggcaatagcaaaagtcataaatgatttcaaaacgaatattccaactgcttctatatatgtatttgataataattcgactgacagtacagcacaagtggcagaggatgctggagcaacagttcactctgttcctctgaaaggcaaggggaatgtcgtaagacgtatgttctcagatgtagatgcggatatttatctaatggttgatggagatgacacttatgatgcaagttctgctccagaaatgattaaccatctcataaaaaatcaattggatatggttgtaggatgtcgtcaagagaatggagatcaaaatacatacagaaaagggcatcgctga

SEQ ID NO: 473417 - DNA, 1254 bp, Shigella flexneri
gtgagtcactgggctacattcaaacaaacagcaacaaatttatgggtgaccctacggcacgacattctcgcgctggccgtctttttaaatggattgcttatttttaaaacaatctatggtatgtcggtcaatttgcttgatattttccatatcaaagcattttcagagttggatctctccttgctggcaaacgccccactatttatgctcggcgtctttcttgtcctgaactccattggcttactgttccgggcaaagctcgcatgggcaatcagtatcattttgttgttgatagcgctaatttacaccctgcatttttatccctggctgaaatttagtattggattttgcatttttacgctggtgtttttgctgatactgcgcaaagacttctcccacagtagcgccgcagccgggacaatttttgcatttattagtttcacgacattactgttttactcaacctacggtgcgctttatttaagcgaaggttttaatccgcgaatagaaagtttgatgaccgcgttctatttttcgatagaaaccatgtcaaccgtcggctatggagatattgtccctgtttctgaatcagcacgattgttcactatttcggtcattatttccggcattaccgtttttgccacatctatgacctcaatttttggtccgcttatccgcgggggattcaacaaacttttaaaaggaaacaatcatacaatgcatcgtaaagatcattttattgtttgcggacattcgattctcgccatcaatacgatcctgcaactgaatcaacgcggacaaaacgtaacggttatcagcaacttgcctgaagatgatatcaagcaacttgagcaacgcttaggcgataacgctgatgttatccccggtgacagtaatgacagttcagtattaaagaaagcgggaatcgatcgttgccgggccattctggcgctgagtgataacgatgcagataacgcgtttgttgtactctcggcaaaagatatgagcagtgatgtcaaaacagttctcgccgtcagtgatagcaaaaacctgaataagattaagatggtacatccggatatcattctctcaccgcaactgtttggcagcgaaattctggcgcgagttttaaatggtgaagagattaataatgatatgctcgtttcaatgttgttgaactcaggtcatggtattttcagcgataacgatgaacaagaaacgaaagctgacagtaaagaatcggcgcaaaaatag

SEQ ID NO: 473418 - DNA, 1461 bp, Shigella flexneri
atgacaaccgtttatacgttggtgagttggttggccattctgggatactggttgctcattgcaggcgtaactttacgcattctaatgaaacgacgcgcagttccctccgcgatggcctggctgttgattatttacattctgccgttagtcggaattattgcctatcttgccgttggcgagctccatttaggcaaacgccgcgctgagcgcgccagagcgatgtggccttccaccgcaaaatggcttaacgaccttaaagcctgtaagcatatcttcgccgaagaaaatagcagtgtcgctgcgccattattcaagctttgcgagcgtcgtcaggggatcgctggggtcaaagggaatcagctacagctgatgaccgagtcagatgatgtgatgcaggcgttaatccgcgacatccagctcgcgcgccataatattgagatggtgttttatatctggcagcccggcggcatggcggaccaggtggctgaatcattaatggcggctgcacggcgtggtattcattgccgattgatgctcgactccgccgggagtgtggcttttttccgcagcccgtggcccgagctaatgcgtaatgccggtattgaagtggtcgaagccttaaaggtcaatctgatgcgtgtgtttttacgccgtatggacctgcgccaacatcgcaagatgatcatgatcgataattacatcgcgtacaccggcagcatgaatatggtcgatcctcgctacttcaaacaagatgcgggcgtagggcaatggattgatctgatggcgcgtatggaaggccccatcgccaccgcgatggggattatttattcctgcgactgggagattgaaaccggaaaacgtattctgccgccaccaccagatgtcaatattatgccgtttgaacaggccagcggtcacaccattcacacaattgcttctggccccggctttccggaagatctcattcaccaagcattattgactgcggcttattcggcgcatgaatatttgatcatgaccacgccctactttgtgccaagcgatgatttacttcatgcgatttgcacggcggcgcagcgcggggtggatgtcagtattatccttccgcgaaaaaatgactcgatgctggtcggctgggccagtcgcgcattctttacggaactgcttgctgctggggttaaaatttatcagtttgaaggcgggttactgcataccaagagcgtgctggtcgatggcgaactaagtctggttggcaccgttaaccttgatatgcgtagtctgtggctgaatttcgagattaccttggcaatcgacgataaaggttttggtgcagaccttgccgccgttcaggacgattatatttcgcgttcacgtctgctcgatgcccgtttatggctaaaacgtccattatggcaacgtgtcgccgagcgactgttttacttcttcagcccgttgctgtaa

SEQ ID NO: 473419 - DNA, 330 bp, Shigella flexneri
atggatatggatctaaacaatcgcctgactgaagatgaaacgcttgagcaggcctacgatatttttctcgaactggctgccgacaatctcgatccagctgatgttctgctgttcaatcttcagtttgaagagcgcggcggcgcggagttattcgatccggcggaagactggcaggaacatgttgatttcgatttgaacccggacttttttgccgaagtggtgattggtctggcggacagtgaagatggtgaaatcaacgatgttttcgcccgcattctgttatgccgcgaaaaagatcacaaactttgccatatcatctggcgggaataa

SEQ ID NO: 473420 - DNA, 1005 bp, Shigella flexneri
atgaatgctgtaactgaaggaagaaaagtcctccttgaaatcgccgatcttaaagtgcactttgaaatcaaagatggcaaacagtggttctggcaaccgccgaaaacgctcaaagccgtcgatggtgtcactcttcgcctgtatgaaggggaaacattaggtgtggtaggggaatcgggatgcggtaagtccacctttgctcgcgccatcatcggtttggtcaaggcgaccgacggtcatgttgcctggttaggtaaagagttgctgggcatgaagcccgatgaatggcgtgccgttcgcagtgatattcagatgattttccaggatccgttggcatcgctaaacccgcgtatgaccatcggcgagatcatcgctgaaccactgcgtacttatcatccgaaaatgtcacgccaggaagttcgcgagcgcgtgaaggcgatgatgctgaaagtcgggttattgcctaacctgattaaccgctatccgcatgagttctccggtgggcagtgccagcgtatcgggattgctcgtgctcttattcttgaaccgaagctgattatctgcgatgagccggtttcggcgctggacgtgtcaattcaggcgcaggtggttaacctgctccagcagctgcaacgtgagatgggattgtcattaatttttattgctcatgacctggccgtggtaaaacacatttccgatcgtgtgttggtgatgtatctcggccatgcagtagaactggggacctatgatgaggtctaccacaatccactacatccttacaccagggcattgatgtcggcagtccccatacctgatccggatctggagaagaacaaaaccatccagttactggaaggggaattaccgtcgccgatcaacccgccttccggttgtgttttccgtacccgttgcccgattgccggtccggagtgcgccaaaacacgtcctgttctggaggggagtttcagacacgccgtttcttgcctgaaagtcgatccgctttaa

SEQ ID NO: 473421 - DNA, 1014 bp, Shigella flexneri
atgagcgtaattgaaactgcaactgtgccgctcgcacaacaacaggctgacgcactgctgaacgtgaaagatttgcgtgtcacctttagtaccccggacggcgacgtcacggcggtcaatgatttaaatttttccctacgtgccggagaaacgctgggcattgtaggtgagtctggttcgggtaaatcgcaaactgcatttgcgttgatgggcctgttggctgccaacggacgcattggcggatcggcaaccttcaatgggcgtgaaatcctcaatttgccagagcgtgaactcaataaactgcgcgctgaacaaatctcaatgatttttcaggacccaatgacttcgttgaatccctatatgcgcgtcggtgagcagttgatggaagtgctgatgctgcataagaacatgagcaaagctgaggcgtttgaagagtcggtgcggatgctcgatgcggtaaaaatgccggaagcacgtaaacgcatgaaaatgtacccgcacgaattttctggcggcatgcgtcagcgagtcatgattgcgatggcattgctatgtcgacctaagttgctgattgcggatgaacccactacagcgctggacgtcaccgtacaggcgcagatcatgacgctattgaatgaactgaagcgggaatttaatactgccatcattatgatcacccacgatcttggcgtggtggcggggatctgtgacaaagtgctggtaatgtacgccgggcgcacgatggaatatggcaatgctcgcgatgtcttttatcaacccgttcatccttattctatcggtttgctcaacgcggtgccgcgtcttgatgcggaaggtgaaacaatgttgaccatcccgggtaatccgccaaacttgctgcgattaccgaaaggttgcccgttccagccacgttgtccacatgcgatggaaatttgtagtagcgcaccgccgctgggagagtttacgcctggccgtctgcgtgcttgctttaaaccggtggaggaactgttatga

SEQ ID NO: 473422 - DNA, 909 bp, Shigella flexneri
atgatgttaagtaagaaaaacagcgagacgctggaaaatttcagtgaaaagctggaggtcgaagggcgcagcttgtggcaggacgcacgtcgacgttttatgcataaccgtgcggcggttgccagtctgatagtgctggtgctgatcgcgttatttgtaatcctggcaccgatgctttcccagtttgcctatgacgatactgactgggcgatgatgtccagcgccccggatatggagtccggtcactactttggtactgactcatccggtcgcgacctgcttgtgcgcgttgcgattggcgggcgtatctcactcatggtcggtgttgctgcggcactggtggcagtggtcgtggggacactttatggttcgctttccggttatctgggcggtaaagtggattcggtaatgatgcgtctgctggaaatcctcaactccttcccattcatgttcttcgtcattttgctggtgacctttttcggccaaaacatcctgctgattttcgtggcgattggcatggtttcctggctggatatggctcgtattgtgcgtgggcaaaccctgagtctgaagcgcaaagagtttattgaggcggcacaagttggcggtgtatcgacgccgggcattgttattcgccacattgtgccgaacgtactcggtgtggtggtggtctacgcatcgctactggtgcccagcatgatcctctttgaatctttccttagcttcctggggttgggtacgcaagagccgttaagcagctggggggcattgctgagtgatggcgcgaactcgatggaagtctctccatggttactgttgttcccagcgggattccttgtggtgacactgttttgtttcaactttatcggcgatggcttgcgtgatgccctcgacccgaaagatcgttaa

SEQ ID NO: 473423 - DNA, 921 bp, Shigella flexneri
atgttaaaatttattctacgtcgttgtctggaagcgattccgacgctatttattcttattactatttcgttctttatgatgcgcctcgcgccgggaagcccttttaccggcgaacgtactttaccgccagaagtgatggccaatatcgaagcgaaatatcatcttaatgatccgatcatgacacagtatttcagctacctgaaacaactggcgcatggcgatttcggtccatcgtttaaatataaagattattcggtcaatgacctggtggcatccagttttcccgtttctgccaaactgggagccgccgcatttttccttgcggtaatactgggtgttagtgctggcgttattgccgcattaaaacaaaacaccaaatgggactataccgtgatggggctggcaatgaccggggttgttatccccagttttgtggttgcgccattattagtcatgatatttgcgatcattttgcattggctgccgggcggtggctggaatggtggggcgcttaaattcatgatattgccgatggtggcgttgtcactcgcctatatcgccagtattgcgcgtattacccgtggctctatgattgaagtattacactccaactttattcgtactgcccgggcgaaagggttacctatgcggcggatcattttacgccacgcattaaaacctgctctgttacccgtgctctcctatatgggccccgcatttgtcggcattattaccggttctatggtcatcgaaaccatttatggtttgccggggattgggcaactgttcgttaatggcgcattgaaccgtgactattccttagtgttaagcctgaccatcctggttggtgcgttaaccattttgtttaatgccattgtcgatgtgctatatgcggttatcgacccgaaaatccgttactga

SEQ ID NO: 473424 - DNA, 1677 bp, Shigella flexneri
atgctggttaataccagtaattataatgagggagtccaaaaaacaatgaccaacatcaccaagagaagtttagtagcagctggcgttctggctgcgctaatggcagggaatgtcgcgctggcagctgatgtacccgcaggcgtcacactggcggaaaaacaaacactggtacgtaacaatggttcagaagttcagtcattagatccgcacaaaattgaaggtgttccggagtctaatatcagccgagacctgtttgaaggcttactggtcagcgatcttgacggtcatccagcacctggcgtcgctgaatcctgggataataaagacgcgaaagtctggaccttccatttgcgtaaagatgcgaaatggtctgatggcacgccagtcacagcacaagactttgtgtatagctggcaacgttctgttgatccgaacactgcttctccgtatgccagttatctgcaatatgggcatatcgccggtattgatgaaattcttgaagggaaaaaaccgattaccgatctcggcgtgaaagctattgatgatcacacattagaagtcaccttaagtgaacccgttccgtacttctataaattacttgttcacccatcaacttcaccggtgccaaaagccgctatcgagaaattcggcgaaaaatggacccagcctggtaatatcgtcaccaacggtgcctataccttaaaagattgggtcgtaaacgaacgaatcgttcttgaacgcagcccgacctactggaacaacgcgaaaaccgttattaaccaggtaacctatttgcctattgcttctgaagttaccgatgtcaaccgctaccgtagtggtgaaatcgacatgacgtataacaacatgccgatcgaattgttccagaagctgaaaaaagagatcccggacgaagttcacgttgatccatacctgtgcacttactattacgaaattaacaaccagaaaccgccattcaacgatgtgcgtgtgcgtaccgcactgaaactaggtatggaccgcgatatcattgttaataaagtgaaagcgcagggcgacatgcccgcctatggttatactccaccgtatactgatggcgcaaaattgactcagccagaatggtttggctggagccaggaaaaacgtaacgaagaagcgaaaaaactgctggctgaagcgggttataccgcagacaaaccgttgaccatcaacctgcggtataacacctccgatctgcataaaaagctggcgattgctgcctcttcattgtggaagaaaaacattggtgtaaacgtcaaactggttaaccaggagtggaaaacgttcctcgacacccgtcaccagggcacttttgatgtggcccgtgcaggctggtgtgcagactacaacgaaccaacttccttcctgaacaccatgctgtcgaacagctcgatgaataccgcgcattataagagcccggcctttgacagcattatggcggaaacgctgaaagtgactgacgaggcgcagcgcacagctctgtacactaaagcagaacaacagctggataaggattcggccattgttcctgtttattactacgtgaatgcgcgtctggtgaaaccgtgggttggtggctataccggcaaagatccgctggataatacctatacccggaatatgtacattgtgaagcactaa

SEQ ID NO: 473425 - DNA, 162 bp, Shigella flexneri
atgtctatcttttctgattacagttccagtagtgaaatgcacaataatttaacaattgattattatttagcactttcctctaccaaaggcagtggaattactaatatcatttcaattattcttcagcaagcccaggattatgatgtggcgaaaataacatga

SEQ ID NO: 473426 - DNA, 156 bp, Shigella flexneri
atgctccgtttacttcgtcattatttttactttgttcccgcgcagttatcaaaagcaaaaggaataggtaaaaatattcttctcaaattacagttagttataaggatttccttaactgcttctcctcaccatcatgttattttcgccacatcataa

SEQ ID NO: 473427 - DNA, 648 bp, Shigella flexneri
gtgattcagaccctttttgattttcccgtttacttcaaatttttcatcgggttatttgcgctggtcaacccggtagggattattcccgtctttatcagcatgaccagttatcaggcagcggcagcgcgaaacaaaactaaccttacagccaacctgtctgtggccattatcttgtggatctcgctttttctcggcgacacgattctacaactttttggtatatcaattgattcgttccgtatcgccgggggcatcctggtggtgacgatagcgatgtcgatgatcagcggcaagcttggcgaggataaacagaacaagcaagaaaaatcagaaaccgcggtacgtgaaagtattggtgtggtgccattggcgttgccgttgatggcggggccaggggcgatcagttctaccatcgtctggggtacgcgttatcacagcattagctatctgtttggtttctttgtggctattgcattgttcgctttatgttgctggggattgttccgcatggcaccgtggctggtacgggttttacgccagaccggcatcaacgtgattacgcgtattatggggctattgctgatggcattggggattgaatttatcgttactggtattaaggggattttccccggcctgcttaattaa

SEQ ID NO: 473428 - DNA, 2676 bp, Shigella flexneri
atggctgttactaatgtcgctgaacttaacgcactcgtagagcgtgtaaaaaaagcccagcgtgaatatgccagtttcactcaagagcaagtagacaaaatcttccgcgccgccgctctggctgctgcagatgctcgaatcccactcgcgaaaatggccgttgccgaatccggcatgggtatcgtcgaagataaagtgatcaaaaaccactttgcttctgaatatatctacaacgcctataaagatgaaaaaacctgtggtgttctgtctgaagacgacacttttggtaccatcactatcgctgaaccaatcggtattatttgcggtatcgttccgaccactaacccgacttcaactgctatcttcaaatcgctgatcagcctgaagacccgtaacgccattatcttctccccgcacccgcgtgcaaaagatgcaaccaacaaagcggctgatatcgttctgcaggctgctatcgctgccggtgctccgaaagatctgatcggctggatcgatcaaccttctgttgaactgtctaacgcactgatgcaccacccagacatcaacctgatcctcgcgactggtggtccgggcatggttaaagccgcatacagctccggtaaaccagctatcggtgtaggcgcgggtaacactccagttgttattgatgaaactgctgatatcaaacgtgcagttgcatctgtactgatgtccaaaaccttcgacaacggcgtaatctgtgcttctgaacagtctgttgttgttgttgactctgtttatgacgcagtacgtgaacgtttcgcaacccacggcggctatctgttgcagggtaaagagctgaaagctgttcaggatgttatcctgaaaaatggtgcgctgaacgcggctatcgttggtcagccagcctataaaattgctgaactggcaggcttctctgtaccagaaaacaccaagattctgatcggtgaagtgaccgttgttgatgaaagcgaaccgttcgcacatgaaaaactgtccccgactctggcaatgtaccgcgctaaagatttcgaagacgcggtagaaaaagcagagaaactggttgctatgggcggtatcggtcatacctcttgcctgtacactgaccaggataaccaaccggctcgcgtttcttacttcggtcagaaaatgaaaacagctcgtatcctgattaacaccccggcttctcagggtggtatcggtgacctgtataacttcaaactcgcaccttccctgactctgggttgtggttcctggggtggtaactccatctctgaaaacgttggtccgaaacacctgatcaacaagaaaaccgttgctaagcgagctgaaaacatgttgtggcacaaacttccgaaatctatctacttccgccgtggctccctgccaatcgcgctggatgaagtgattactgatggccacaaacgtgcgctcatcgtgactgaccgcttcctgttcaacaatggttatgctgatcagatcacttccgtactgaaagcagcaggcgttgaaactgaagtcttcttcgaagtagaagcggacccgaccctgagcatcgttcgtaaaggtgcagaactggcaaactccttcaaaccagacgtgattatcgcgctgggtggtggttccccgatggacgccgcgaagatcatgtgggttatgtacgaacatccggaaactcacttcgaagagctggcgctgcgctttatggatatccgtaaacgtatctacaagttcccgaaaatgggcgtgaaagcgaaaatgatcgctgtcaccaccacttctggtacaggttctgaagtcactccgtttgcggttgtaactgacgacgctactggtcagaaatacccgctggcggactatgcgctgaccccggatatggcgattgtcgacgccaacctggttatggacatgccgaagtccctgtgtgctttcggtggtctggacgcagtaactcacgccatggaagcttatgtttctgtactggcatctgagttctctgatggtcaggctctgcaggcactgaaactgctgaaagaatatctgccagcgtcctaccacgaagggtctaaaaatccggtagcgcgtgaacgtgttcacagtgcagcaactatcgcgggtatcgcatttgcgaacgccttcctgggtgtatgtcactcaatggcgcacaaactgggttcccagttccatattccgcacggtctggcaaacgccctgctgatttgtaacgttattcgctacaatgcgaacgacaacccgaccaagcagactgcattcagccagtatgaccgtccgcaggctcgccgtcgttatgctgaaattgccgaccacctgggtctgagcgcaccgggcgaccgtactgctgctaagatcgagaaactgctggcatggctggaaacgctgaaagctgaactgggtattccgaaatctatccgtgaagctggcgttcaggaagcagacttcctggcgaacgtggataaactgtctgaagatgcattcgatgaccagtgcaccggcgctaacccgcgttacccgctgatctccgagctgaaacagattctgctggatacctactacggtcgtgattatgtagaaggtgaaactgcagcgaaaaaagaagccgctccggctaaagctgagaaaaaagcgaaaaaatccgcttaa

SEQ ID NO: 473429 - DNA, 1290 bp, Shigella flexneri
atggatagttatatcgcgattacactgtttggctgtttttttgtgctggtctttattggtgtgcccatttcgttctcaatcggtattgccactgtagcttcaatgcttttgatgtttccctgggatatcgcggcaatcactgtttcgcaacgactggctaatggactggataactttgccctgttggcaatcccctttttcatctttgccggaacactgatgaacagcggcggtattgcgatacgtttgattaacctcgcccaggtaatggttggccgcgttcctggttcgcttggtcatgtgaacgtcctggcgaatatgatgtttggttccatttctggttcagccgttgcggcagctgctgccgttggtggcacactgaatcccattcagaccaaagaaggttatgatccggcattttctaccgctgtaaacgtctcatcttgtattactggattactgataccgccctcaaacgtgttaattgtgttttccctgacagctggcggcgtttctgtagcatcgctgtttatggcgggatatttgccagggatcttaatgggtcttgcggtaatgatagtctgcggcattattgctaaacgccgtggctacccgctttcagaaagagcaacctttgctcaggcctgtaaagcgtttctggatgccttaccaagtttgcttctggtgttcattgtgatgggcggcatttttaccgcaactgaagcgtcagcaattgccgttgtctacacatttattctctcggtgctgatttaccgggaagtaaaatggcgccatttacccaaactgattctggagtcggttgttaccacttcgattgtattactgttgatcggtttttccgtgggcatgtcctgggcaatgactaatgctgatattccttatatgatcagcgacgcattgatggggatttctgataacccactgatcatattgctgctgattaatatcgtcttattaattgtcggcatctttatggacatgacaccggctgtactaatctttacaccgatcttcttgccgattgcacaagagctgggaatggacccagtacatttcggtattatgatggtggccaacctttgtattgggctgttaacaccgccggtgggtagtgcgctatttgttggttgttctatctcgggtgtgaagattcaacatttaatcaaaccattgctgctattttatgctgcattgctagtagcgttgatgatgatcacttacattccgcaaatatccttgttcattccacagctactagggctaatgtaa

SEQ ID NO: 473430 - DNA, 963 bp, Shigella flexneri
gtgaaaaagcaatggattgttggcacggcgctgcttatgttgatgactggtaatgcctgggcagatggcgaaccgccaactgaaaatatcttaaaagatcaattcaaaaagcagtatcacggcattctcaagcttgatgccatcagcttaaaaaatcttgatgctaagggtaatcaggccacctggtcagcggaaggcgatgtctcttccagtgacgatctctatacctgggtcggtcagttggcagattacgaactgctcgaacagacctggacgaaagataaaccggtaaaattctcggcgatgttaaccagtaaaggaacgcccgcgtctggctggtcggtgaacttttactcttttcaggcggcagccagcgatcgtgggcgggtggtcgacgatatcaaaacgaataataaatatctgatcgtgaatagcgaagatttcaattatcgctttagtcagcttgaatctgcgttgaatacccagaagaactcgattcctgcgctggaaaaggaagtgaaagcgcttgataagcaaatggtggcggcgaagaaagcagcggatgcatattggggaaaagatgcaaacggtaagcaaatgacccgcgaagaagcctttaaaaaaattcaccaacagcgtgatgagtttaataaacagaacgatagcgaggcgttcgcggttaaatatgacaaagaggtttatcaaccggcgattgcggcatgtcataaacagagtgaagagtgttatgaagtgccgattcagcagaaacgagatttcgatatcaacgaacaacggcgacagacttttctgcaatcacaaaaactcagccgtaaattgcaggatgactgggtaacgctcgaaaaagggcaatatccgttaacgatgaaagtttcagaaataaacagtaaaaaagtcgcgattttgatgaaaattgacgatatcaaccaagctaatgaacgctag

SEQ ID NO: 473431 - DNA, 1047 bp, Shigella flexneri
atggagtttttcaaaaagacggcacttgccgcactggttatgggttttagtggtgcagcattggcattacccaatatcaccattttagcaaccggcgggaccattgccggtggtggtgactccgcaaccaaatctaactacacagcgggtaaagttggcgtagaaaatctggttaatgcggtgccgcaactaaaagacattgcgaacgttaaaggcgagcaggtagtgaatatcggctcccaggacatgaacgataatgtctggctgacactggcgaaaaaaattaacgccgactgcgataaaaccgacggcttcgtcattacccacggtaccgacacgatggaagaaactgcttacttcctcgacctgacggtgaaatgcgacaaaccggtggtgatggtcggcgcaatgcgcccgtccacgtccatgagcgcagacggtccattcaacctgtataacgcggtagtgaccgcagctgataaagcctccgctaatcgtggcgtgctggtggtgatgaacgacaccgtactggacggtcgcgatgtcaccaaaaccaacaccaccgacgtagcgaccttcaagtctgttaactacggtcctctgggatacattcacaacggtaagattgattaccaacgtaccccggcacgtaagcacaccagcgatacgccattcgatgtctctaagctgaatgagctgccgaaagtcggcatcgtttataactacgctaacgcatccgatcttccggctaaagcactggtagatgcgggctatgatggcatcgttagcgctggtgtgggtaatggtaacctgtataaatccgtgttcgacaccctggcaaccgccgcgaaaaacggcactgcagtagtgcgttcttcccgcgtaccgacgggtgctaccactcaggatgctgaagtggatgatgcgaaatacggcttcgtcgcctctggcacgctgaacccgcaaaaagcgcgcgtcctgctgcagctggctctgacgcaaaccaaagatccgcagcagatccagcagattttcaatcagtactaa

SEQ ID NO: 473432 - DNA, 720 bp, Shigella flexneri
atgatgcgcaaaatgctgctggcggcagcactttcagtgacggcaatgaccgctcacgccgactaccagtgcagcgtcacgccgcgtgacgatgtgattgtcagcccgcaaaccgtgcaggtgaagggcgaaaacggcaatctggtgatcacgccagacggcaacgtgatgtataacggtaagcaatattccctgaatgccgcccggcgcgagcaggcgaaggattatcaggctgaactacgtagcacgctgccgtggattgatgaaggcgcgaaaagccgcgtcgagaaagcccgtattgcgctggataaaattatcgttcaggagatgggcgacagcagcaaaatgcgcagccgtctgaccaaacttgatgcgcagcttaaagagcagatgaatcgcattatcgaaacgcgcagcgatggcctgacgttccactataaagccattgatcaggttcgcgccgaaggccagcaactagtgaatcaggcaatgggcggaattttacaggacagcattaatgaaatgggcgcgaaagcggtgctgaaaagcggcggtaacccattacagaatgtgctgggaagcttgggcggtctgcaatcctcaatccaaaccgagtggaaaaagcaggaaaaagatttccagcagtttggcaaagatgtttgtagccgcgttgtgactctggaagatagccgcaaagccctggtcgggaatttaaaataa

SEQ ID NO: 473433 - DNA, 327 bp, Shigella flexneri
atggcaaagaaccgtagccgtcgtctgcgtaaaaaaatgcacatcgacgaattccaggaattaggattttcggtggcatggcgattcccggaaggtacatcggaagaacagattgataaaatcgttgatgactttattaacgaggttatcgaaccgaacaaactggcctttgacggcagcggttatctggcctgggaaggtctgatctgcatgcaggaaatcggcaaatgcaccgaagaacatcaggcgattgtgcgtaagtggctggaagagtgcaaactggatgaggtacgcaccagcgaacttttcgacgtttggtgggactaa

SEQ ID NO: 473434 - DNA, 720 bp, Shigella flexneri
atgaaaaacgacgtcatttcaccggaatttgatgaaaacggccgcccactgcgccgtatccgtagttttgtgcgccgccaggggcgactgaccaaaggccaggaacatgcgctggaaaactactggccggtgatgggcgttgagttcagtgaagatatgctggatttccccgcgctttttggccgtgaagcgccggtgacgcttgagattggttttggcatgggggcgtcgctggtggcaatggctaaagatcgccccgagcaggacttcctcggcattgaagtgcattcaccgggcgttggtgcgtgcctggcttctgcgcatgaagaaggtttaagcaacctgcgcgtgatgtgtcacgatgcggttgaagtgctgcataaaatgattcctgacaattcattgcgcatggtgcagctctttttccctgacccgtggcacaaagcgcgccataataaacgccgtatcgttcaggtgccgtttgccgaactggtaaaaagcaaactgcagctggggggcgtattccatatggcgaccgactgggaaccttatgcggaacatatgcttgaagtgatgtcttctattgacggttataaaaacctgtcagagagcaatgattacgtaccgcgtccggcatcacgtccggtgacgaaatttgaacaacgtggtcatcgtcttggtcacggagtatgggacttaatgttcgagagggtgaaataa

SEQ ID NO: 473435 - DNA, 1053 bp, Shigella flexneri
atgcaagcgtcgcaattttcagcccaggttctggactggtacgataaatacgggcggaaaacgctgccctggcaaattgacaagacgccctacaaagtatggctctcagaagtgatgttgcaacaaactcaggttgcgaccgttatcccctattttgaacgctttatggcgcacttcccgacggtgaccgatctcgccaatgcgccgctcgacgaagttctccacttgtggaccgggcttggctattacgcccgcgcgcgcaacctgcataaagcggcacaacaagtggcgaccttacacggtggtaaattcccggaaacctttgaagaagtcgcggcgttaccgggcgtcgggcgttccaccgcaggcgcgattctctcgctttctctgggtaagcactttccgattctcgacggtaacgtcaaacgcgtgctggcgcgctgctatgctgtaagcggctggcctgggaaaaaagaggtcgagaataaactatggagtttgagcgagcaggtgacgcccgcggtcggcgtggaacggtttaatcaggcgatgatggatttgggcgcgatgatttgcacgcgttcgaagccgaaatgttcgctctgtccgctacaaaacggatgtattgccgccaccaacaatagctggtcgctttatccgggcaaaaaaccgaaacagacgctgccggagcgcaccggctactttctcctgttacagcacgaagatgaagtattgctggcgcagcgtccgccgagcggattgtggggcggtttatactgtttcccgcagtttgccgacgaagaaagtttgcggcattggctggcacaacggcagattgctgccgataacctgacgcaactgaccgcgtttcgccataccttcagccatttccacttagatattgtgcctatgtggcttcccgtgtcgtcattcaccggctgcatggatgaaggcaatgcgctctggtataacttagcgcaaccgccgtcagttggcctggcggctcccgtggagcgtttgttacagcagttacgcactggcgcgccggtttag

SEQ ID NO: 473436 - DNA, 276 bp, Shigella flexneri
atgagcagaacgattttttgtactttcctgcaacgtgaagcagaaggtcaggattttcagctgtaccccggcgagctgggaaaacgcatctataacgagatctccaaagaagcctgggcgcagtggcagcacaaacaaaccatgctgattaatgaaaagaaactcaacatgatgaatgccgagcaccgcaagctgctggagcaggagatggtcaacttcctgttcgagggtaaagaggtgcatatcgagggctatacgccggaagataaaaaataa

SEQ ID NO: 473437 - DNA, 1080 bp, Shigella flexneri
atgaaaaaatatctcgcgctggctttgattgcgccgttgctcatctcctgttcgacgaccaaaaaaggcgatacctataacgaagcctgggtcaaagataccaacggttttgatattctgatggggcaatttgcccacaatattgagaacatctggggcttcaaagaggtggtgatcgccggtcctaaggactacgtgaaatacaccgatcaatatcagacccgcagccacatcaacttcgatgacggtacgattactatcgaaaccatcgccgggacagaacctgccgcgcatttgcgccgggcaattatcaaaacgttgctgatgggtgacgatccgagttcggtcgatctctattccgacgttgatgatattacaatttcgaaagaacctttcctttacggtcaggtggtggacaacaccgggcagccgattcgctgggaaggtcgcgcaagcaacttcgcggattatctgctgaaaaaccgtctgaaaagccgcagcaacgggctacgtatcatctacagcgtcaccattaacatggtgccgaaccaccttgataaacgtgcgcacaaatatctcggtatggtccgccaggcgtcacggaaatatggcgttgatgagtcgctgattctggcaattatgcagactgaatcttcctttaacccgtatgcggtcagccgttccgatgcgctgggattaatgcaggtggtacaaaatactgccgggaaagatgtgttccgctcgcaggggaaatccggcacgccgagccgcagtttcttgtttgatcctgccagcaatattgataccggcaccgcgtatctggcgatgctgaacaatgtttatctcggcggaattgataacccaacatcgcggcgttatgccgtcatcaccgcctataacggcggcgcaggcagcgtgctgcgagtcttttcgaatgataagattcaggctgccaatattattaacaccatgacgccgggcgatgtttatcagacgctgacgacccgccatccctctgcggaatctcgccgttatctttataaagtgaataccgcgcaaaaatcctaccgccgccgataa

SEQ ID NO: 473438 - DNA, 1257 bp, Shigella flexneri
atgaatcttaagctgcagctgaaaatcctctcttttctgcagttctgtctgtggggaagttggctgacgaccctcggctcctatatgtttgttaccctgaagtttgacggtgcttctattggcgcagtttatagctcactgggtatcgccgcggtatttatgcctgcgctgctggggattgtggccgacaaatggttaagtgcgaaatgggtatatgccatttgccacaccattggcgctatcacgctgttcatggcggcacaggtcacgacgccggaagcgatgttccttgtgatattgattaactcgtttgcttatatgccaacgcttgggttaatcaacaccatctcttactatcgcctgcaaaatgccgggatggatatcgttactgacttcccgccaatccgtatctggggcaccatcggctttatcatggcaatgtgggtggtgagcctgtctggcttcgaattaagccacatgcagctgtatattggcgcagcactttccgccattctggttctgtttaccctgactctgccgcatattccggttgctaaacagcaagcgaatcagagctggacaaccctgctgggcctcgatgcattcgcgctgtttaaaaacaagcgtatggcaatcttcttcatcttctcaatgctgctgggcgcggaactgcagattaccaacatgttcggtaataccttcctgcacagcttcgacaaagatccgatgtttgccagcagcttcatcgtgcagcatgcgtcaatcatcatgtcgatttcgcagatctctgaaaccctgttcattctgaccatcccgttcttcttaagccgctacggtattaagaacgtaatgatgatcagtattgtggcgtggatcctgcgttttgcgctgtttgcttacggcgacccgactccgttcggtactgtactgctggtactgtcgatgatcgtttacggttgcgcattcgacttcttcaacatctctggttcggtgtttgtcgaaaaagaagttagcccggcaattcgcgccagtgcacaagggatgttcctgatgatgactaacggcttcggctgtatcctcggcggcatcgtgagcggtaaagttgttgagatgtacacccaaaacggcattaccgactggcagaccgtatggttgattttcgctggttattccgtggttctggccttcgcgttcatggcgatgttcaaatataaacacgttcgtgtcccgacaggcacacagacggttagccactaa

SEQ ID NO: 473439 - DNA, 2136 bp, Shigella flexneri
atgaaatcaatgaatattgccgccagtagtgaactggtatcccgactttcttctcatcgccgcgtggtggcgttgggagatactgattttacggacgtcgcggcagtcgtcattaccgctgcggatagtcgcagtggcattcttgcgttgcttaagcgcaccggttttcatctaccggtgtttttgtattccgaacatgctgttgaattacctgcgggcgttacggcggtaatcaacggcaacgagcagcagtggctggagctggaatccgcagcctgtcagtatgaagagaatttgctgccaccgttttatgacacgctgacgcagtacgttgagatgggcaacagcacctttgcttgccctggacatcaacatggtgcgttctttaaaaagcatcctgccggacgccatttttacgatttctttggtgagaacgtctttcgcgccgatatgtgtaacgctgacgtaaaattgggcgatctgcttattcatgaaggatcggcgaaagatgcgcagaaattcgcagccaaagtctttcatgccgataaaacctattttgtgctgaacggcacatcggcagcgaataaagtggtgacgaatgcgctgttaacgcgtggcgatctggtgctcttcgaccgtaacaaccataagtcgaatcatcacggcgcgctgattcaggcggggacgacgccggtctatctggaagcttcacgtaacccgtttggtttcattggcggtattgatgcgcactgttttaatgaagagtatctgcgccagcaaattcgcgacgttgcgccagaaaaagccgacctgccgcgcccgtttcgcctgacgattattcagctgggaacctatgacggcactgtctataacgcccgtcaggtgatcgataccattgggcatctgtgtgattacattctgtttgattccgcgtgggtcggttacgaacagtttatcccgatgatggcggatagctcgccgctgctgttagaacttaacgaaaacgatccggggatttttgtgacccagttggtgcacaaacagcaggctggattctcacagacgtcgcagatccataaaaaagataaccatatccgcggacaggcgcgtttttgcccgcataagcggttgaataacgcctttatgctccatgcttctaccagccctttctatccgctgtttgctgcactggatgttaacgccaaaattcatgaaggggagagtgggcgtcggctgtgggctgagtgcgttgagttgggtattgagtcgcgcaaggctattcttgcgcgctgtaagctgttccgcccgtttatcccgcccgttgttgatggcaaattgtggcaggattatccgacatcagtgttagccagcgaccgccgttttttcagttttgagccgggggcgaagtggcacggctttgaaggatatgccgcggatcagtattttgttgatccgtgcaagctgttactcactacaccaggtatcaatgccgaaaccggcgaatatagcgactttggcgttccggcgacgattctggcgcactatctgcgtgagaacggcattgtgccggagaagtgcgatctcaactccattctgttcttattaactccggcggaaagccacgagaagctggcacaactggtggcgatgctggcgcaatttgaacagcatattgaggatgactcgtcgctggctgaggtgttgccgagcgtttataacaaatatccggtgcgctatcgcgactacaccctgcgccagttgtgtcaggagatgcacgatctgtatgtcagtttcgacgtcaaagacctacaaaaagcgatgttccgccagcagagtttcccgtcagtggtgatgaacccccaggatgcgcatagcgcttatattcgcggtgaagtggagttggtgcggattcgtgatgccgaagggcgaattgcggcagaaggggcgttgccttatccacctggcgtgctttgcgtggtacccggggaagtctggggtggggcggttcaacgttatttccttgcgctggaagaaggcgtgaatttgttgccgggattttcgccggagttgcaaggtgtctatagcgaaaccgatgcggatggcatgaaacgattgtacggttatgtgttgaagtaa

SEQ ID NO: 473440 - DNA, 708 bp, Shigella flexneri
gtggtcatcggcccttttatcaacgctagtgcagtcttactgggtggcgttctcggcgcactgctcagccaacgcttaccggaacgtatccgcgtctccatgacatctatttttggtctggcatcgctggggattggtattttactggttgtgaaatgcgccaaccttccagcgatggttttagctacgctacttggcgctctaattggcgaaatttgtttgctggagaaaggtgtcaatacagcagtcgccaaagcacaaaatctgtttcgtcactcacgtaagaagccagcgcatgaatcttttattcagaattatgtcgcgattattgtcctgttttgcgccagcggcaccgggatcttcggggcgatgaacgaagggatgaccggcgatccgagtattttaatcgccaagtcatttcttgatttctttacggcgatgatcttcgcctgctcgctgggtattgcggtgtcggtaattagtatcccattactgatcatccagttaacgctggcgtgggctgccgcgctgatattaccgctgatcacaccgtcgatgatggcagacttcagcgccgtaggcggtttattgctgctggcaaccggattacgcatctgtggcattaaaatgttcccggtggtcaacatgcttccagcactccttctggcaatgccgctttccgccgcctggaccgcctggtttgcctga

SEQ ID NO: 473441 - DNA, 246 bp, Shigella flexneri
atgaagtacaaagaagtcgcctgcggtaagcagcggatgcactggctggcgctgcagttcgtggatgagaacaacaacccagtttccggtctcaacgtgcagctggagtatcatccacgggcaatggcggcagagctggctctgtgggccagaggcagacacactcagtttgaccccacaccgccgcccccacctgtcggtgtcactgacagtcagggtctggtacggtttgatgacttgtactga

SEQ ID NO: 473442 - DNA, 1191 bp, Shigella flexneri
ttggagcaatattccagatttgaattacgcctacgtaaacatttatcactggcggaagagtctctctggcaaaaatgtgcacaaaaacttattgccgcaattccacatattccagaatggcggcaaccattaattgctttgttattacccgaaaaaccagaaattgcacatgaaattgcccagcgtctactggggcaaaaaaaattaccctcgcttgagtggttaaaaatagtggcgactgatgagcacattcttgcctcattagaaaaatatcacgagccatatgccatttttgatgattactattgtggtgcgatatggtcagccaccgtattacaggagcaaggtgttgcagccctgccccgatttgctccctatgccgcaagtgactactgcgccgatgtgttgcgtcatatcaatcatccgttcgcattaacactgcttatacgtgtagccgggcatactaaacgctgtcacgatcgaatgacgaaagcctgcgctgcgttcccacacgcagcactggcagcactggcggaacttctagtgcaaaaagaagagaatagttggcgcattatgctaatgacgatgtttatctcgcaaccagcactggcagaacaggtcattccctggctttcgacacccgcagttgcagtgctgaaatcatgccagcaccaactgacacagccctcaaaccatgccagcgccgatctactgccagccatagtagtctccccaccatggatttcgaaaaagaaaaaatcgccgattccggtgctggatttagcgccattaggcatcgagccaatctgttatctgacagaagaaatcagtaatcaacttttggcgaaatatatctggtattcaaaacacatcacggttagccatgaagaaagtactaccaacctgttggcaaggatgggttttcaacgacggatcgctggtacatatattaaagctcccgaagcggtagttgaggcatggctaaatgaagattattcaaccttactaagtgaatttaaggtgtttcattcacctaccgggcattattggcagttggggattttgacaacattgccgctggaggctggagaaagcagtaaaagcatggaatgcccttactctatctccacataccgataccgaatacgccatgttacattttggactcaaaggtttacttggtttagttaa

SEQ ID NO: 473443 - DNA, 1845 bp, Shigella flexneri
atgttacattttggactcaaaggtttacttggtttagttaactcaattacacgctatccacaggaagccttgcccatcacgaattacttcgcagcgagtgagctggctcctgccgtcgcccgtgccttcaacaaactcaaaacgctacgcgaaaacgcccgcacctggctgttgaaatacccggaacatgcccttaccggcctgctgcctgcggcgctcggcaaagccggtgaagcacaggataacgcccgcgctgccttgcgtatgcttaccgaaaacggtcatcagccattactgcaagaaatcgcccggcgttataaccagtcggaagtaacagacgcggtgaacgctctgcttgcgctcgatcccttagataatcacccgacaaaaatccccactcttccgaccttttatcagccatcgatctggacgcgcccggtattaaaagcaaacgcccaatcactgccagataacgccctcctccacctcggcgaaatgctccgcttccctcaggaagaggctctgtatccgggattattgcaggtgaaagacgcctgtaccgctgactctctggctgaatttgcctgggatctgtttaccgcctggcagaccgctggcgcgccgtcgaaagagagttgggcgttcactgcgttaggcgttctcggtaacgatgacaccgcccgcaaactgacgccattaatacgcgcctggcctggtgaatcccagcataaacgcgccaccgttgggttggatattctcgccgctatcggtagtgatatcgccctgatgcagcttaacggcattgctcagaaactgaaattcaaagcattacaggagcgggcaaaagaaaagattgccgacattgccgagagccgcgaactcacggtagcggagcttgaagatcggttagcaccggatctcggtctggatgataacggttcgttgctgctggattttggcccacgccagttcaccgtcagctttgatgaaaccttaaaaccgtttgtgcgtgatgtttccggcagccgcctgaaagacctgccaaaaccaaacaaaagcgatgatgagtcacaggcgaacgatgctgttaaccgctacaaattgctgaaaaaagatgcgcgtaccgtcgccgcccagcaggtagcaaggcttgaatccgccatgtgcctgcgtcgccgctggtcgccggaaaacttccaactcttcctggttgtgcatccgctggttcgccacttaacccgccgtctgatttggggcgtttatagcgccgacaaccagctactggcctgtttccgggtagcggaagataacagctacagcaccgctgacgatgatcttttcaccctgccggaaggcgatatctctatcggcattcctcacgttctggaaatatcaccgacggatgctgtcgcctttggtcagctttttgccgactacgaactgctaccaccgttccgtcagcttgaccgtaacagttacgccctgacagaagccgagcgcaacgccagcgaactgacccgctgggcaggcagaaaatgcccgagcggccgggtcatggggctggcaaataaaggctggataaagggcgaaccacaggatggaggctggatgatcaaacctctcggtcgctggtcgttaatcatggaaatcgacgaaggttttgcggtgggtatatcaccagccgaacttagcgctgagcagctcttaagcaagctgtggctatgggaaggcaaagcggaaagctatggctgggggagtaattcaacacaggaagcgcagttctccgtactcgatgccatcaccgccagcgagctaattaacgatattgaagccctgtttgaataa

SEQ ID NO: 473444 - DNA, 3216 bp, Shigella flexneri
atggacaaggaattaccgtggctggcggataacgcccaactggaactgaaatataaaaaaggcaaaacaccactcagtcatcgcaattggccgggcgaaccagtgcctgttatcactgaaagcatcattcagacactgggtgatgaattgctacaaaaagctgagaagaaaaaaaacattgtctggcgttatgaaaatttttcaccggagtggcagtccgccattacgcaggccatcaacttgatcggcgaacacaaaccctcagtcccggcccgcacaatggcggcactagcctttatcgcgcaaaatgacaaccaacagttgctcgacgaaatcgtccaacaagaggggctggaatatgcgactgaggtggtgattgcacgccagtttattgcacggtgttatgagagtgatcctctggtagtcacattgcagtatcagaacgaggactatggctatggttatcgctcagaaacctataacgaattcgatctccgactgcgtaaacacctctctctggcagaggaaagctgctggcagcgttgcgccgacaaactcattgccgcactgccaggaataaccaaagttcgccgcccttttattgcgctgatcctccccgaaaaaccagaaatcgccaatgagttggtaagccttgaatgcccgcggactcattttcattctaaggagtggttaaaagttgttgctactgaccccaaagcggtgagaaaactcgaacgctactggagccaggatatatttagcgatcgagaagccagctacatgtcgcatgaaaaccacttcggctacgcggcctgcgctgcccttttgcgcgaacaaggactggcagtcgttccgcgcctcgcgatatatgcccataaagaagattgcggcagtctgctggtacaaattaaccatccgcaagtcatccgcaccttgctgttagttgctgataaaaacaaacccagcctgcaacgtgtggctaaatacagtaaaaacttcccccatgcgacactcgccgcactggcagaactgctggcgttaaaagaaccaccagcccgcccaggttatccaatcatcgaagacaaaaagctgcctgcacagcaaaaagctcgagatgaatactggcgtacgctgttacaaacgctgatggcatcgcagccacaactggcagcagaagtgatgccgtggttaagtactcaagcccgggcagtgctgaatagttatttatcggcaccgcccaaaccagttattgatagcaccgataacagccaaatgcctgaaatcctcgtttcaccaccatggcgtgggagaaagaaaaagacttccatacgtcacttttcgctgcctgatcttacgcttgcaccgcaaacgtacaggtcgccgaataaacactggacgccggaacagcaaactgcaattgaccattttagcgccatgtcttttgacgaacgtcttgctacgagaggagcgtatatcttcttgcgggaattaggttttgacgttcatagcctggaatttaataagcgtcttcttaatggacagttggatgcctttgatgctcagcaactgcaagaatacacatcaataggactattgcgtacttatcacgcgcatcaggccaaatctaaacagtaccgggaagacgccaccaatgcattactggcacaagatagcattgcgttgatgggagggtggcgaacttttcagcacggattttactatggtaatgaacagcgttgggggatttggaatctgtaccttatcgcgcagatgccgcgcgaaatggcggtatcgtgctggcaacaaattgtcgaggctgattttcattacaccggggtggaatatttgttaagtgtgctgggtaccgatgctttgcctggattaaacaccgcctttgcccgacatccaaaagagatatttccgctgctgattcatttcggcgcaacagaactggccctgcccattgcccgcgtctggcacctttttgcgggccagcgtaatctggctcgccagtggattttacaatggccggaacatacggctactgcacttatccctcttgtcttcaccaaatctagcgataaaagcgaagctgcattacttgccctgcgtttactttacgaacatgggcatggcgaatggctacaaactgtagccaatcgttggcagcgtacagatctatggcctgccctggaacaattacttaaacagagtccaatagagatttacccggcacgcattccaaaagcccctgatttctggcatccgcaaatgtggtccaggccgcgccttatcactaataatcaacctgttaccgatgacgctctggaaattatcggcgaaatgctgcgctttacccaggggggacgtttttatagcgggctggaacaactgaaaacgttctgccagccacaaacgctggcagcttttgcctgggatctcttcactgcgtggcaacaagctggtgcccccgcaaaagacaactgggcatttctggcgttaagtctctttggtgacgaaagcacggcacgggatctaacgacacatatcctcgcctggccacaagaaggcaaatctgcccgtgcggtcagtggcatgaacatccttaccctgatgaataatgatatggcgctgatgcagctgcatcatatatcgcaacgggcgaaatcccgccccttacgtgataacgcggcggaatttcttcaggtagtcgcagaaaatcgcgggctaagccaggaagagttagcggacagattagtcccaacactgggccttaatgatccgcaggcgttgagttttgattttggtccccggcagtttaccgttcgcttcgatgaaaacctcaacccggttatctttgatcagcaaaacgttcgccagaaaagtgttccccggttgcgcgccgatgacgatcaactgaaagcgcccgaggcactggcccgactaaaagggttaaaaaaagatgctactcaggtgagcaaaaacctgctcccgcgtcttgaagctgccctacgtaccacccgacgctggtcgctggcagattttcattctctgtttgttaatcatccctttacccgtctggttacccagcgattaatatggggggttatccggcaaatgaaccgcgtcgtttactcaacgcctttcgtgtggccgcagagggggagttctgcaatgcgcaagatgagccaattgacctgcctgcggacgctctga

SEQ ID NO: 473445 - DNA, 408 bp, Shigella flexneri
atgacagcagaaatgcgcagtgaatttgcacagctttttgccgattacgaaattatgccgccttttcgccagttgtcgcgccgcacggtgctgctcacacctgacgagtcaaccagtaacagcctgactcgctgggaaggtaaatccgctaccgttgggcaacttatgggaatgcgatacaaaggctgggagtcaggttatgaggacgcatttgtctatgacctgggtgagtaccggctggtccttaagttttcacccggttttaaccactacaatgttgatagcaaagcgctaatgagcttccgttctcttcgagtgtaccgtgacaataaatccgtcacttttgccgaacttgatgtgtttgatttgagtgaggcgttaagcgcacctgacgtcattttccattaa

SEQ ID NO: 473446 - DNA, 408 bp, Shigella flexneri
atgatcgtgcaaaaagagctggttgctatttacgattatgaggtccctgtacctgaagatccgttttccttcagacttgagatccataaatgctctgaattatttacaggttccgtctaccgactggaacggttccggctacgtccaacatttcatcaacgtgatcgagaggatgttgacccgctaataaatgatgcgttgatttatataagagatgagtttattgatgagcaaaaattacgaggcgaatcacctgaacctgtaatagtaatttttaattgtaaactacagaatatattcaaccaacaaatagaattatatactctagataattcaagtcgcagcacatgcaacttgaagtatgacgagtatagctttattaaaggggggaacggtattcccccttag

SEQ ID NO: 473447 - DNA, 1089 bp, Shigella flexneri
atgtcaccgcagaataatcatctgcagcgtccgcctgctgctgtgttatacgccgatgaactggcaaaattaaaacaaaatgataacgcaccttgcccgcccggttggcagttaagtttgcctgcggcccgtgcttttatccttggcgatagcgcgcaaaatattagccgtaaagtggtgattagtccctccgctgtcgaacgtatgttagtcactcttgccaccggacgcggtttgatgttggtgggggaacctggcaccgcaaaatctctcctgtctgaattactggcaacctctattagcggcgatgccgggttaaccatccagggcggcgcatctactaccgaagatcaaatcaagtacggctggaactacgccctgcttatcaatcatggtccatcaacggaagcgctggtccctgccccgctttaccagggaatgcgcgacggcaaaatcgtccgttttgaagagataacgcgtacaccgctggaagtgcaagactgtctgttaggtatgctttctgacagggtgatgacggtgccggaactcactggtgaagccagtcagctctatgcgcgagaaggctttaatattattgccactgccaatacccgcgatcgcggcgtcaatgaaatgagtgctgcgctaaagcgtcgcttcgattttgaaactgtctttccgattatggatttcgcccaggagctggagcttgtcgccagtgcttcggcgcgtttgctggcccatagcggtattccgcataaagtgcctgacgcggtactggagttactggtccgcaccttccgcgatctgcgtgccaacggcgaaaagaaaacgtcaatggatacactaacagcgattatgtccaccgctgaagccgtgaacgtggcccacgccgtaggcgtccgcgcctggtttttagcgaatcgcgcaggtgagccagccgacctggtggactgcattgccggaaccatcgtcaaagataacgaagaagatcgcgctcgtctgcgccgttacttcgaacagcgtgtcgccacacataaagaagctcactggcaggcttattatcaagcccgccaccgcctgccgtga

SEQ ID NO: 473448 - DNA, 2280 bp, Shigella flexneri
atgagcgagccgttaattgtcggcatccggcatcatagtccggcctgcgcccggctggtgaaatcgttaatcgaaagccagcggccacgatacgtgttgattgaaggccctgctgattttaatgaccgggtagacgaactgtttttagcccaccagcttccggtagctatttacagttattgccagtatcaggacggtgcagcccccgggcgtggtgcctggacgccatttgctgaattttcgccggagtggcaggcgctacaagccgatcgtcgtattcaggcacaaacttacttcatcgatttgccttgctgggcgcagagtgaagaagaggacgattcgcctgatacgcaagaggaaagccagaccttgctgctgcgtgccacccgcatggataacagcgacaccctgtgggatcacttgttcgaagatgaaagccagcaaactgcattaccctctgcactggcgcactattttgcccaactgcggggcgactcccccggcgatgctctaaatcgtcagcgcgaagcctttatggcccgctggattggatgggcgatgcagcaaaataatggcgacgtgttagttgtctgcggtggctggcacgctccggcactggcaaaaatgtggcgcgaatgtccgcaggtaattaacacgccagaattgccgtcgctggcagatgccgttacaggttgttatctcaccccctacagtgaaaagcgccttgatgtgctggcaggatacctttcaggaatgcctgccccggtctggcaaaactggtgctggcagtggggcttacagcaggcgggagaacaactgctaaaaacggttctcacccgtttgcgccagcacaagttgcctgcttcgaccgcggatatggctgccgctcatctgcatgcgatggcactggcacagttgcgcggtcatacactaccgttacgcactgactggctggatgccatagcaggatcgctgattaaagaagccctgaatgcgccgttgccgtggagctatcgcggcgttattcatcccgataccgatccgattctgctaacgttgatagacacattagcgggtgacggattcggtaaacttgccccttctacgccacaaccgcctctgccaaaagatgtcacttgcgaactggaacgtaccgcaatctctcttccggcggagcttaccttaaatcgctttaaccccaatggactagcgcaaagtcaggtgttacatcggctggcaatactggagatcccagggattgtacgccagcagggaagcacactgacacttgcaggcaacggtgaagaacgctggaaattaacccgcccgcttagccagcatgcggcattgattgaggccgcctgctttggtgccacactccaggaagccgcacgccataaattagaagccgatatgctggacgcgggtggaatcggcagcattaccacatgtcttagccaagcggcgtcagcgggtctggcgtccttcagtcaacaattactggagcaactcacattattaatcgcccaggaaaatcaatttgccgaaatgggccaggcgctggaagtgctatatgccttatggcggctggatgaaattagcggtatgcaaggcgcgcagatattacaaacgacgttatgcgcggctatcgatcgcacgctgtggctgtgtgaatccaacggcagaccggatgaaaaggagtttcacgctcacttgcatagctggcaagcgttgtgtcatatcctgcgcgatctacatagcggtgtgcaactccccggcgtttcgctttctgcggcggtagccttgctggagcgacacagtcaggcgattcatgtcctggcactggatcgcggcgcgactcttggtgcgctgatgcgtctggaacatcccaacgctagtgccgaagcggcgctgacgatgctggcgcagttatccccggcacaatccggcgaggcgctgcacggtttgctggcattagcccgtcatcaactggcctgtcagccggcatttatcgccggtttcagcagtcatttaaatcaactaagtgatgccgattttaccaatgccctgcccgatttacgcgcggcaatggcctggctaccgccacgagaacgcgggacgctggcgcatcaggtgcttgagcattatcaactggcgcaacttcccgtttcggcactgcaaatgccgttgcattgtccaccgcaagccattgcacatcatcaacaactcgaacagcaggcactggcatcgctgcaacactggggagttttccatgtctga

SEQ ID NO: 473449 - DNA, 1137 bp, Shigella flexneri
atgtctgaactgaacgatcttctgaccacccgtgagctacaacgctggcgattaattcttggcgaagcggcagaaacgacgctttgtgggctggatgacaacgcccggcagatagatcacgcgctggagtggctgtatgggcgcgatcctgaacggctccagcgtggtgaacgctctagtggattaggtggctcaaatctcaccactcctgagtggatcaacagtattcacacgctgtttccgcaacaggtgattgagcggctggaaagcgatgccgtactgcgctacggcattgaagatgtggtgacaaatctcgacgtgctggaacgtatgcagccttccgaaagcctgctacgcgccgttttgcacaccaaacatctgatgaaccccgaagtactggctgccgcccgcaggattgtgcgccaggttgtggaagaaattatggcgcgactggcaaaggaagttcgtcaggctttttctggtgtccgcgatcgtcgtcgccgctcatttattccactggcgcgaaactttgatttcaaaagtactctgcgcgccaacctgcaacactggcacccgcaacacggcaagttgtatatcgaattcccccgctttaacagccgcattaaacgccaaagcgagcaatggcaactggtcttactggttgatcaaagcggatcgatggtcgattcggtgatccactctgcggtgatggcggcctgtttatggcagttacccggcattcgtacccatctggtggcgtttgacacaagcgtcgttgatctcacggcagacgttgccgatccggtagagttattaatgaaagtgcaattaggcggcggaaccaatatcgccagtgccatggagtatggtcggcaacttattgaacaacctgcaaaaagcgtcattatcctcgtgagcgatttttatgaagggggttcatcatcattgctgacgcaccaagtgaaaaagtgtgtccagagcggcatcaaagtgctgggactggcagcgctcgatagcacagcaacaccttgctatgaccgcgatacggcccaggcgctgattaatgtcggcgcacaaatagccgccatgacaccgggcgagctggcatcatggcttgcggagaatcttcagtcatga

SEQ ID NO: 473450 - DNA, 2004 bp, Shigella flexneri
atgaattcactacgtccggaattattagaactgacaccgcaggcactgacggcgttaagcaatgccggttttgttaagcgcagccttaaggaactggaaaatggcaacgtcccggaaatcagccatgagaacagcgctttaatcgccaccttcagtgacggtgtccgtacccagctggcgaacggccaggcactgaaagaggctcagtgcacctatggggccagcggcatgtgccgtcatcgcgtgatgctggtgttaagttatcaacgactttgtgctaccgcccagcctacgggaaaagaagaggaatgggatccggcaatctggctggaagaactggctacccttcccgatgccacccgcaaacgcgcacaggcgctggtcgctaaaagcatcaccattgagttgttctgtgcgccgggtgaaattccctctgcccgcttaccgatgagcgatgtgcgtttttattcccgcagcagtattcgtttcgcccgttgtgattgtattgaaggcacactttgcgaacatgtcgtactggcagtacaggcctttgtccaggcaaaagcgcagcaagcggaattgactcatttaatctggcagatgcgcagcgaacacgtcacatcatctgacgatccgtttgccagcgaagaaggcaaaacgtgtcgtcaatatgttcaacaactaagccaggcattatggctgagcggcatcagccagccgcttattcactacgaggccgctttcagccgcgcgcagcaagcagcggaacgctgcagctggcgatgggtgagtgaatcgctacggcaactgcgcgccagcgttgatgccttccacgcccgcgccagccactatcatgccggagaatgcttacgtcagcttgcggcattaaacagtcgattaaattgcgcacaagagatggcccggagcgacagtgttggtgaagttcctcctgtgccgtggcgcacggtcgttggctctggcattgccggagaagcaaagcttgatcatctgcggctggtgtctttaggtatgcgttgctggcaggatattgagcattatggtttacgcatctggtttaccgatcccgacaccggcagtattttgcacctttcgcgcagttggccgcgaagtgaacaggaagactcaccggcagctacgcgtcggctgtttagttttcaggctggcgcactggcgggtgggcaaattgtttcacaagcagcaaaacgcagtgccgatggcgagctgctgttagctacccgcaaccgcttaagcagcgttgtaccgctgtcgcctgatgcctggcaaatgttgagcgcgccgttacgccagccgggcattgtggctttgcgggaatatttacgccagcgtccccccgcctgcatacggcctcttaatcaggtcgataacttatttattctgccggtcgctgagtgtatttcgctcggttgggatagcagccgccagacgctggatgcgcaggtaatcagcggcgaaggtgaagataatctgctgacgttatcactgccagcctcagccagcgcgccttatgccattgaacgcatggcggcgcttttgcaacaaacagacgaccccgtgtgtctggtttctggctttgtcagttttgttgatgggcaattgacactggaaccacaggtaatgatgacaaagactcgtgcctgggcgctggacgcagaaactgcgcctgtggtggtatcactaccttctgccagcgttctgcctgtgccgtctactgctcatcagttgctgatgcgctgccaggcgttacttattcaactgctccataacggctggcgctatcaggaacagagcgctattaatcaggcagagttgctggcgaatgacctcaccgcggtgggtttttatcggctggcacatgtgttggcacaatttcgtaatacagaaagcgaggcacgggtagaagcaatgaataacggtgttttgctttgcgaacaattattccccatgcttcagcaacaaggatga

SEQ ID NO: 473451 - DNA, 696 bp, Shigella flexneri
gtgaatgcaccttttgaatatcatgctaacaacccgtctggtaatacaaagtacaattgcaaccgcattgaacctttaagtatatccagtggggctaaagcgatagtatatttttatatcaagaagacatttgcaggaaaattgattattcctgaaacaaagatagtgacattgtatggaacaattagccgtgacaccccggtggattactcacagccgatggctgatgtttatattcggggcgatattacagctccgcaaagttgcgaaataaataatttaaagccagtttgttttgattttaaagaaataccagctgcagatttttcatctgttgttggaagtgcggtaacaacacataaaattactaaaacagtcactattgagtgtgaaaacctggggatactgaataccgatgatatcagtacgtctttttatgctaccgaacccaatacggacaattcaatggtcgtaacttcaaactctaacgtggggataaaaatttacgacaaaaataataaggaaatcaaagtgaacggtggtgagttgccaacagacatggataaatcaacagtgtatggtgaaaaatcaggtagtgtaactttttcagctgctcctgcgagccttactggagctcgcccagccccggggcaatttactgcaacagcgacgataactgttgagattgtgcgctaa

SEQ ID NO: 473452 - DNA, 1041 bp, Shigella flexneri
atgaaagttatgcgtaccaccgtcgcaactgttgtcgccgcgaccttatcgatgagtgctttctctgtgtttgcagaagcaagcctgacaggtgcaggtgcaaccttccctgcgccggtgtatgccaaatgggctgacacttaccagaaagaaaccggtaataaagttaactaccagggtatcggttcttccggtggcgtaaaacagattatcgctaataccgttgattttggtgcctctgacgcgccgctgtctgacgaaaaactggctcaggaaggtctgttccagttcccgaccgtgattggcggcgtggtgctggcggttaacattccagggctgaagtctggcgaactggtgctggatggtaaaaccctcggcgacatctacctgggcaaaatcaagaagtgggatgatgaagccatcgccaaactgaatccgggtctgaaactgccttcacaaaacattgctgtagtacgccgcgcagatggctccgggacttccttcgtcttcaccagctacctggcgaaagtgaacgaagagtggaaaaacaacgttggtactggctctaccgtaaaatggccgatcggtctgggcggtaaaggtaacgacggtatcgccgcgttcgttcagcgtctgccgggtgcaattggttatgttgaatatgcttacgcgaagcagaacaacctggcgtacaccaaactgatctccgctgatggtaaaccggttagtccgaccgaagaaaacttcgctaatgcagcaaaaggtgcagactggagcaaaaccttcgctcaggatctgaccaaccagaaaggcgaagatgcatggcctattacctctaccacgttcattctgatccacaaagatcagaagaaaccagaacaaggcacagaggtgctgaaattcttcgactgggcgtacaaaaccggggctaaacaggcgaacgacctggattacgccagcctgccggatagtgtagttgaacaggttcgcgctgcgtggaagaccaatattaaagacagtagcggtaagccgctgtactaa

SEQ ID NO: 473453 - DNA, 960 bp, Shigella flexneri
atggctgcaaccaagcccgcttttaacccaccgggtaaaaagggcgacataattttcagcgtgctggtaaaactggcggcgctgattgtgctattgatgttgggtggcattattgtctctctgatcatctcctcctggccgagcattcagaaatttggtctggctttcctatggaccaaagagtgggatgcaccgaacgatatctacggggcgctggtgccgatctacggtacgttggtgacttcgtttatcgcgctgctgatcgccgtcccggtgagtttcggtatcgccctgttcctgactgagcttgcgcctggctggctgaaacgcccgctgggtatcgccattgagctgctggcagccattccaagtatcgtttacggcatgtggggcctgtttatctttgcgccgctgttcgccgtttactttcaggagccggtcggcaatatcatgtcgaatatcccgattgttggcgcgctgttctctggccccgcatttggtatcggtatcctcgcggcaggcgtgatcctcgccatcatgattattccgtacattgcggcggtaatgcgtgatgtgttcgaacaaaccccggtgatgatgaaagagtcggcctacggtattggctgcaccacctgggaagttatctggcgtatcgttcttccgttcaccaaaaatggtgttatcggcggcatcatgctggggctgggccgcgcgctcggtgaaaccatggcggtgacctttatcatcggtaacacctaccagctcgacagcgcctcgctgtacatgccgggcaatagtatcacctctgcgctggcgaacgaatttgcggaagcggaatccggtctgcacgttgccgcactgatggaactgggcctgatcctgtttgtgattaccttcatcgtcctcgccgcatcgaagtttatgattatgcgcctggctaagaatgagggggcacgctaa

SEQ ID NO: 473454 - DNA, 891 bp, Shigella flexneri
atggctatggttgaaatgcaaaccactgcggcgctggctgaatctcgccgcaaaatgcaggcgcgtcgccgcctcaaaaaccgtattgcgctgacgctctcgatggcgacgatggccttcggcctgttctggctgatctggattttaatgtccaccatcactcgcggtatcgacggtatgtcgctggcgctgttcactgaaatgacgccgccgcccaatacggaaggtggtggtctggcgaacgccctggcgggtagcgggctgttaattttgtgggccacggtattcggtacgccgctgggcattatggcggggatttatctggcggaatatggtcgtaaatcctggctggcagaagtgattcgcttcattaacgacattctgctctccgcgccgtcgattgtggttggtctgtttgtctacaccatcgtggtggcacagatggagcacttctccggctgggcgggcgtaattgcgctggcgctgttgcaggtgccgatcgttatccgcaccactgagaacatgctgaaactggtgccggacagcctgcgtgaagcggcttatgcgctgggtacaccgaagtggaagatgatctccgcgattacgctgaaagcgtcggtgtccgggattatgaccggtatcctgctggcgattgcccgtattgccggtgaaaccgcgccgctgctgtttaccgcgctctccaaccagttctggagcacggacatgatgcagccgatcgccaacctgccggtgacgatctttaagtttgcgatgagcccgtttgcggaatggcaacaactggcctgggccggggtattgatcattaccctgtgcgtcctgctgctgaacattctggcgcgcgttgtttttgcgaagaataaacacggttaa

SEQ ID NO: 473455 - DNA, 774 bp, Shigella flexneri
atgagtatggttgaaactgccccgagtaaaattcaggttcgtaatttgaacttctactacggcaaattccatgccctgaaaaacatcaacttggatatcgccaaaaaccaggttacggcgtttatcgggccgtccggctgcggtaaatcgacgctgctgcgtaccttcaacaaaatgtttgaactgtacccggagcagcgtgcggaaggtgaaattctgcttgatggcgacaacatcctgaccaactctcaggatatcgccctgctgcgtgcgaaagtgggcatggtgttccagaaaccgacgccgttcccgatgtccatctacgacaacatcgcctttggcgttcgtctgtttgagaagctctcccgtgccgacatggacgagcgcgtgcagtgggcattgaccaaagccgcattgtggaacgaaaccaaagataaattgcaccagagcggttactctctctctggtggtcagcaacagcgtctgtgtattgcgcgtggtatcgccattcgcccggaagtgctgctgctcgacgaaccgtgttcggcgctcgaccccatctctaccgggcgtattgaagagctgatcaccgaactgaagcaggattacaccgtggtgatcgtcacccacaacatgcagcaggctgcgcgttgttccgaccacacggcatttatgtacctgggcgaattgattgagttcagcaacacggacgatctgttcaccaagccagcgaagaaacaaacagaagactacatcaccggtcgttacggttga

SEQ ID NO: 473456 - DNA, 726 bp, Shigella flexneri
atggacagtctcaatcttaataaacatatttccggccagttcaacgccgaactggaaagtatccgcacgcaggtgatgaccatgggcggcatggtggagcagcagctttctgatgcaatcaccgcgatgcataaccaggacagcgatctggcgaagcgcgtgatcgaaggcgacaagaacgtcaacatgatggaagtggcgatcgatgaagcctgcgtgcgcattatcgccaaacgtcagccgacggcgagcgacctgcgactggttatggtgatcagtaaaaccattgccgagctggagcgtattggcgacgtggcggacaaaatctgccgtactgcgctggagaaattctcccagcagcatcagccgttgctggtaagtctggagtcgctgggccgtcataccatccagatgctgcacgacgtgctggacgcgttcgcgcggatggacattgacgaagcggtacgtatttatcgtgaagataaaaaagtcgatcaggaatacgaaggtattgttcgtcaactgatgacctacatgatggaagattcgcgcactattccgagcgtacttaccgcgctgttctgtgcgcgttcaatcgaacgtatcggcgaccgctgccagaatatttgtgagtttatcttctactacgtgaagggtcaggatttccgtcatgtaggcggtgatgagctggataaactgctggcgggaaaagatagcgacaaataa

SEQ ID NO: 473457 - DNA, 822 bp, Shigella flexneri
atgaacatgcaaatcaccaaaattctcaacaataatgttgtggtggttattgatgatcaacagcgggaaaaagtcgtcatggggcgcggaattggctttcaaaaacgcgctggcgaaagaattaactcaagtggaatagaaaaagagtatgccttgagcagtcatgaactgaacgggcgattaagcgaactcttaagtcatattcctcttgaggtgatggcaacctgtgatcgtcttatctctttagcgcaggagcgcttgggaaaattacaggacagtatttatatctcgctaactgaccattgccagtttgcgattaaacgctttcagcaaaacgtgttgctgtgggatatccagcggctttacccgaaagagttccagctaggggaagaagcgttaaccattattgataaacggttgggcgtgcagttaccgaaagatgaagtgggctttattgccatgcatctggtcagtgcccaaatgagcggaaatatggaggatgttgcaggtgtcacgcagttaatgcgcgaaatgctgcaattaataaaatttcagttcagccttaattaccaggaagaaagcttgagttatcagcgactggttacacatctgaagtttttatcctggcgtattcttgaacatgcttcaattaacgatagtgatgaatcattacaacaagcagtaaaacaaaattacccgcaagcatggcaatgtgcggaacggatcgccatttttattggtttgcagtatcaacgtaaaatttcacccgcagagattatgtttttagccataaatatagagcgcgtgcgcaaagaacactga

SEQ ID NO: 473458 - DNA, 1878 bp, Shigella flexneri
atgacggagttagccagaaaaatagtcgcaggagtcgggggcgcagataacattgtgagtctgatgcattgcgcaacgcgattacgttttaagttaaaggatgaaagcaaagcgcaagctgaggtactgaaaaagacccccggtattattatggtggtggaaagcggtggtcagtttcaggtggtcataggtaaccatgtggccgatgtcttcctggcggttaacagcgtggcaggccttggcgaaaaagcgcaacaggcaccggaaaatgatgagaaaggtaatctgctaaaccgctttgtttatgttatttcaggtatttttacgcctctgatcggtctgatggcggcaaccgggatcctgaaaggtatgctggctctggcgctcacttttcagtggacgaccgaacaaagtggtacttatttaattttattcagcgccagtgatgccttgtttgggttcttcccgataatcctgggatacaccgcgggcaaacgcttcggcggtaatccatttactgccatggtgattggtggagcgttagtgcatccattaattctgactgccttcgagaacgggcaaaaagcggatgcgccggggctggatttcctgggtattccggtcacattgttgaattactcgtcatcggttattcccattattttttctgcctggttgtgcagcattctggaacgccgacttaatgcgtggttaccgtcggcaatcaaaaatttcttcacaccattgctatgtctgatggttatcacacccgtcacctttctgctggtggggccgctatcaacctggataagcgaaatgattgccgccggttatctctggctttatcaggcggttcctgcatttgcgggcgcggtaatgggcggcttctggcaaatcttcgtcatgttcggactgcacaggggcctggtgccgctgtgtatcaataacttcaccgtgctgggctacgacaccatgatcccgctgttaatgcccgccattatggcgcaggtcggggcggcgctcggcgtcttcctctgcgaacgcgatgcgcagaaaaaagtggtggcgggatcagcggcgttgacgggtctgtttggtatcaccgaaccagcggtatatggcgtcaacctgccgcgtaagtacccctttgttatcgcctgtatcagtggagcattgggggccaccatcattggctacgcgcaaacgaaagtttactcctttggtttgccaagtattttcaccttcatgcagaccatcccgtcaacggggattgatttcaccgtctgggccagcgttattggcggtgtcattgccataggttgcgcatttgttggtacgttgatgcttcatttcatcaccagtaaacgtcagccagcgcagggtgccccgcaagagaaaacaccagaggttattacaccacctgagcagggcggtatctgttcaccgatgacgggagagattgtgccgctcattcacgtcgctgataccacgtttgccagtggcctgttgggtaaaggtatcgccattctgccctcggttggtgaagtgcgttctccggttgcgggtcgaattgcttcgttgttcgccacattacacgccattggcattgagtcagatgatggtgtggagatcctgattcatgtcggtatcgacaccgtaaaactggacggcaaattcttttccgctcacgtcaacgtgggtgacaaggtcaatacaggcgatcggctgatttcttttgatatccctgctattcgcgaggccggatttgatctgacgacgccggtattaatcagtaatagcgatgattttacagacgtattaccccacggcacggcgcagataagcgcaggtgaaccgctgttatccatcattcgctaa

SEQ ID NO: 473459 - DNA, 1395 bp, Shigella flexneri
atgaaagcatttccagaaacatttctttggggtggcgcaacagctgccaatcaggtggaaggtgcctggctggaagatggcaaagggatcacgacctcagatttacagcctcatggcgtaatgggaaaaatggaaccgcgcatcctggggaaagagaatatcaaagatgtcgccatcgatttttattaccgttacccggaagatatcgcgttatttgccgagatgggcttcacctgtctgcgtatttccattgcctgggcgcgaattttccctcagggcgacgaagccgaaccgaatgaagcggggttagcgttttacgatcggctgtttgatgaaatggcgcaggcggggatcaagccgctggtaacgttatcccattacgaaatgctatatgggctggtgaaaaactacggcggttgggctaatcgggcggtcatcgatcacttcgagcattacgcccgcacggtctttacccgctaccaacataaagtagcgttatggctgacgtttaatgaaatcaatatgtcgttacacgcgccattcacgggcgtggggctggcagaagagagtggcgaggcggaagtttatcaggcgatccatcatcaactggttgccagtgcgcgggcagttaaagcctatcatagcctgatccccgaagcgaaaatcggcaatatgcttctcggtgggctggtttaccccctcacctgccagccacaggatatgttgcaggccatggaagagaaccggcgctggatgttctttggtgatgttcaggcgcgtggccaatatcccggctatatgcagcgtttcttccgcgaccacaatatcaccattgagatgactgaaagtgacgcagaagatttaaaacatactgtagatttcatctcttttagttattacatgactggttgtgtttcccacgacgaaagcattaataaaaatgcgcagggcaacatactgaatatgatccccaatccgcatctgaaaagttcagagtgggggtggcaaattgatccggttggattacgggttctgttaaatacgctttgggatcgttatcaaaaaccgttatttattgtcgagaatggattaggcgtaaaagacagcgttgaagcggatggttcgatacaggacgattatcgaattgcctatttaaacgatcacctggtacaggtaaatgaagcgattgccgatggtgtggatattatggggtacaccagttgggggccaattgatttagtcagtgcatctcattcacaaatgtctaagcgctacggctttatttatgtggatcgtgatgataatggcgaaggaagcctcacaagaacgcgtaagaaaagcttcggatggtatgcagaagtgatcaaaacgcgggggctgtcattaaaaaaataa

SEQ ID NO: 473460 - DNA, 1512 bp, Shigella flexneri
atgtttagacgaaatcttattacctctgccatcttattaatggcaccgttagccttttctgcacaatcattggctgaatcattaacggtggaacaacgccttgagttattagaaaaagcgttaagagaaacgcaaagcgaactcaaaaagtataaagatgaagagaagaaaaaatatacgccagcgacggtgaatcgtagcgtaagtacgaatgatcaagggtatgccgccaatccgttcccgaccagtagtgccgcaaaacctgatgctgtactggtcaaaaatgaagagaaaaatgccagtgagacaggctcgatttattcttccatgactctgaaagatttcagtaagtttgtgaaagatgaaattggctttagttacaacggctattaccgttctggttgggggaccgcctctcatggttcacctaaatcatgggcgattggttctctgggccgctttggtaacgaatactccggctggtttggcgataatgccggtggcgagaactttatgcagttctccgatatgtacgttaccaccaaaggtttcctgccctttgcgccagaggctgatttctgggtgggtaaacacggtgcgccgaaaattgaaatccagatgctggactggaaaacgcagcgtactgatgctgcagcgggtgtaggtctggaaaactggaaagtcggtccgggtaaaattgatatcgcgctggttcgcgaagatgtcgatgattacgatcgcagcctgcaaaacaaacagcagattaatacccatactattgatttacgctataaagatatcccgttatgggataaagcgaccttaatggtgagtggtcgttatgtcacggcaaacgaaagcgcatcggaaaaagataatcaggataataacgggtattatgactggaaagatacctggatgttcggcacatctttaacgcagaaatttgataaaggtggcttcaacgaattctccttcctggttgcgaataactctatcgccaggaactttggccgttatgctggcgcaagtccatttaccacctttaatggtcgttattatggtgatcacaccggcggaacagcagttcgtctgacctcgcagggcgaagcctatatcggcgatcattttattgtggctaacgcgattgtttactccttcggtaacaatatttatagctacgaaacaggcgcacactctgatttcgaatctattcgtgcggttgttcgcccggcctatatttgggaccaatataaccagacaggtgttgaactgggctatttcacccagcaaaacaaagatgcgaatagtaataaatttaatgagtctggttataaaaccacgctcttccatacctttaaagtcaataccagtatgttgacctcgcgtctggaaattcgtttctacgccacgtatatcaaagccctggaaaacgaactggatggcttcaccttcgaagacaataaagacgcccagtttgctgtcggtgcccaggctgaaatctggtggtaa

SEQ ID NO: 473461 - DNA, 954 bp, Shigella flexneri
atgaatataaaaattgctgctttaacgctggctattgccagcggtatttctgctcagtgggccatagcagcggatatgccagccagcccggcacccactatcccggtgaaacagtatgtgactcaggtcaatgccgataacagcgtgacctttcgctactttgcccctggggcaaaaaatgtctctgtagtggtgggtgttccggttccggacaatattcacccgatgaccaaagacgaagcaggagtctggtcgtggcgcacacctatcctgaaaggcaacctgtacgagtattttttcaatgttgatggtgtacgcagcattgatacaggcaccgcaatgactaagcctcagcgccaggttaactccagtatgattctggtgccaggcagttatctggatacgcgttctgttgcgcatggtgatttgatcgccataacttaccactccaacgcattgcaatctgaacgtcagatgtatgtctggaccccgccaggatacaccggcatgggcgagcctttgccagtgctctatttctatcacggttttggtgataccggacgttccgctatcgatcaggggcgtatcccgcaaatcatggataacctgctggctgaagggaaaattaaaccgatgctggtggtgatcccggataccgaaaccgatgcgaagggcattattcccgaagatttcgtgcctcaggaaagacgtaaagtcttttatccgctgaatgctaaagcggcagatcgcgaactgatgaacgatattatcccgctgattagcaagcgttttagtgtccgtaaagatgccgatggtcgcgcgctggcagggctttcacaaggcgggtaccaggcgctggtttccggaatgaatcatctggaaagctttggctggccacattcagtggtgttaccacgacaaccgtaccggatgaaggtgtcgcggcccggctga

SEQ ID NO: 473462 - DNA, 723 bp, Shigella flexneri
atgaaattaatcattaccgaagattaccaggaaatgagccgtgtcgcggcacaccatctgcttggttatatgtcgaagacgcgtcgtgttaacctggcaattaccgccggtagcacgcccaaaggcatgtatgaatacctcaccaccctggttaaaggtaagccttggtacgataactgctatttctataatttcgatgaaattccctttcgcggcaaagagggagaaggcgtaacgattaccaatctgcgtaatctgtttttcacccctgcggggatcaaagaagagaatatccagaagctcactattgataactaccgcgagcatgatcagaaactggcgcgtgaaggcggcctggatttggtggtgctgggattaggtgcagatggtcatttttgtggcaatttgccgaatacgacccatttccatgagcaaaccgtggagttcccgatccagggagagatggttgatattgtggcgcatggtgagttgggcggcgacttttcgttagtgcctgacagctacgtgacgatggggccgaaaagcatcatggcggcgaaaaacttgctgataattgtcagtggcgcaggtaaagcgcaggcactgaaaaatgtgctgcaaggtccggttaccgaagatgttccagcttccgtgttgcagctgcatccttcgctgatggtaatcgctgataaagccgctgccgcagaattagcgttcggttaa

SEQ ID NO: 473463 - DNA, 417 bp, Shigella flexneri
ttgtgtattgcggacggttctgctgcagaaaagtttgcaggtagttttcaggatgatgccagcatagaaggtgttgaatttgagtatgatgaagaggacgaatttgccggtattaagaacacatatcctgatgaaatgctgaaagagttggttgaacgcacgccaggttatcatggatggcaacaggaattctggcttgcgcattgtggcgatttctgtgcctttatcggctatgtgggctggaatgatataaaagatcgcctcgatgaatttgccaaccttgaagaagattgtgagaatttcggtattagaaattctgatctagctaaatgcctgcaaaagggtggtgattgtcagggttatctcttccgctgtctccactgcggcaagctgagactgtggggtgatttttcgtag

SEQ ID NO: 473464 - DNA, 1104 bp, Shigella flexneri
atgacagcccgctggttcaggcgggctttttgtggggtgaatatggcagtaaagatttcaggtgtactgaaagatggggcgggtaaacctgtcgtaaattgtgcgattgaactgcgggccagaagaaccagtccgaccgttgtggcacacgttgttgccacttgcgtgacggacaataacggtgcttatgtgattgaggctgagccggggtattacgaggttgcgcttcactgtaacggctggcagccaacccgtgtcggggatattgatgtggcaccgactgatgcaccggggacactgaacgcgtttctgaatgcaccaaaggatggtgatttacgtccggaggtgatgaagcgctttgaggaaatggtggcgcaggcgcagcagagtgccggggctgcagccggaaacgcacagcagacggcgcaggatgtggcggcagccgcaacggcccgtgatgatgcacaacgttttgcggagaaagcccgacaggatgcaaccgtcacagctgaggacagaaaggccactgcggaagatgtgacaagcacaggagcaaatgcagccgcagccggacagagcgcacaggatgccgcaggttatgcccgcgcagcagaacaggccaaaaatgacattgatgctgcgctgaccggcactctgaaaatggctaaccatctgtcagaaatcgcagcagcaggcgaaaaggcacaacagaagtcccgggataatctggggctgaaaagtgcggccacgatggaagcacagagcgacatttacgaccggacaaaaggccgtctggcgatacccggcgcattcggctttgggtgtgcttttctgcctgaagatgttatccgttttgacactaagagtgatttcctggcctgggtaaggaatgcgctgccaggtgaatattccgttgctggcccctacggcatcatcatacccgacacacggtttgaaggggtgctcagcatccggtggactgatgcacgccctgagacaacagaaccgcggtacagagccaaatcccttactttttacggcattaacggccccatttatcacacccgctaccgctactggcccatatccagactgactgggtga

SEQ ID NO: 473465 - DNA, 600 bp, Shigella flexneri
atgcgtaaactttatgctgccattttgtccgcagccatctgtctggctgtatccggtgcgcctgcatgggcgtctgaacatcagtccacgctgagcgcggggtatcttcatgcctcgacgaacgctcccggcagtgatgatctgaacgggattaacgtgaaataccgttatgagtttacggacacgctggggctggtgacgtcattcagctatgccaacgctgaagatgagcaaaaaacgcattacagtgatacccgctggcatgaggattccgtgcgtaaccgctggttcagcgtgatggcggggctgtctgtgcgcgtgaatgaatggttcagcgcgtatgcgatggcgggcgtggcttacagccgtgtgtcgaccttctccggggattatctccgcgtaactgacaacaaggggaaaacgcacgatgtgctgaccgggagtgatgacaaccgccacagcaacacgtctctggcgtggggggctggcgtgcagtttaacccgaccgaatccgtggccattgaccttgcttatgaaggttccggcagtggcgactggcgcactgacggtttcatcgtgggtgtcggttataagttctga

SEQ ID NO: 473466 - DNA, 3480 bp, Shigella flexneri
atgggtaaaggcagcagtaaggggcataccccgcgcgaagcgaaggacaacctgaaatccacgcagttgctgagtgtgattgatgccatcagcgaagggccggttgacggtccggtggatggattaaaaagcgtgctgctgaacggtacgccggtcctggatagcgaggggaagacaaacttttccggtgttacggtggtgttccgcgccggcgagcaggagcagacaccgccggaggggtttgaatcttccggctcagagactgtgctgggtacggaagtgaaatacgacacgccgatcacccggaccatcacgtcggcaaacattgatcgtctgcgcctgaccttcggtgtgcaggcactggtggaaaccacctcaaagggggaccggaatccgtcggaagtccgcctgctggttcagatacagcgtaacggtggctgggtgacggaaaaagacatcaccattaagggcaaaaccacttcgcagtatctggcctcggtggtggtgggtaacctgccgccgcgcccgtttaatatccggatgcgcaggatgacaccggacagcaccacagaccagctgcagaacaaaacgctctggtcgtcgtacaccgaaatcatcgatgtgaaacagtgctacccgaacacggcgctggtcggcgtgcaggtggattcagagcagttcggtaaccagcaggtgagtcgcaattatcatcttcgcgggcgcattctgcaggtgccgtcgaactataacccgcagacgcggcaatacagcggtatctgggacggaacgcttaagccagcatacagcaacaacatggcctggtgtctgtgggacatgctcactcatccgcgctacggcatggggaaacgtcttggtgcggcagatgtggacaaatgggcgctgtatgtcatcggccagtactgcgaccagtcagtgccggacggatttggcggcacggagccgcgcatcacctgtaacgcttacctgaccacacagcgtaaggcgtgggatgttctcagtgatttctgctcggcgatgcgctgtatgccggtatggaacgggcagacgctgacgttcgtgcaggaccgaccgtcggataaagtgtggacctataaccgcagtaatgtggtgatgccggatgatggcgcgccgttccgctacagcttcagcgccctgaaggaccgccataatgtcgttgaggtgaactggattgatccggacaacggtcatgagacggcgacagagcttgtggaggacacgcaggccattgtccgttacggtcgtaacgtcacgaagatggatgcctttggctgtaccagccggggacaggcgcaccgcgccgggctgtggctgattaaaacggaactgctggaaacgcagaccgtggacttcagcgtcggcgcagaagggcttcgccatgtaccgggtgatgtcattgaaatctgcgatgatgattatgccggtatcagcaccggtggtcgcgtactggcggtgaacagccagacccggacgctgacgctcgaccgtgaaatcacgctgccgtcctccggtaccacgctgataagcctggttgacggaaatggcaatccggtcagcgtggaggttcagtccgtcaccgacggcgtgaaggtgaaagtgagccgggttcctgacggcgttgcagaatacagcgtgtgggggctgaagctgccgacgctgcgccagcgcctgttccgctgcgtgagtatccgtgagaacgacgacggcacgtatgccatcaccgccgtgcagcatgtgccggaaaaagaggccatcgtggataacggggcacactttgacggtgaccggcgcggcacggtgaatggtgtcacgccgccagcggtgcagcatctgaccgccgaagtcaccgcagacagcggggaatatcaggtgctggcgcgatgggacacgccgaaggtggtgaagggtgtgagcttcctgcttcgcctgaccgtggcagcggacgacggcagtgagcggctggtcagcacagccaggacgacggaaaccacataccgcttcaggcagctggcgctggggaattacagtctgacagtccgggcggtaaatgcccgggggcagcagggcgatccggcgtcggtatcgttccggattgcggcaccggcagcgcctgtcactattgaactgataccggggtattttcagataacggtggtcccgaaactggctgtatatgacccgacggtgcagtttgagttctggttttcggaaaagcggattgcggatatcaggcaggttgaaaccagcgcccgctatcttggcacggcgctgtactggatagccgccagtatcaatatcaggccgggccatgattattatttttacgttcgcagtgtgaacaccgttggcaaatcggcatttgtggaggccgtcggtcgggcgagcgatgatgcggaaggttatctgagtttttataaagggttgatcaataaaacgcatctcggcaaggagttgtggacgcagattgataacggtcagcttgcgccggacctgactgaaatcaggacgtccattacgaatgtcagcaatgaaatcacgcaaaccgtcaataaaaaactggaaaatcagagtgctgcaatccagcagatacagaaagttcaggttgatacaaataataacctgaacagcatgtgggctgtgaagctgcaacagatgaaggacggacgcctttatattgcgggtatcggtgccggtattgagaatacgccagcaggaatgcagagtcaggtgctgctggcggcagacaggattgcgatgattaatcctgcgaatggcaacacaaagccgatgtttgttggtcagggcgatcagatattcatgaacgacgtgttcctgaaacgcctgacggctccgaccattaccagcggcggtaatcctccggcattttccctgacacctggcggacggctgacggcgaaaaatgccgatatcagcggtaacgtgaacgcgaactccgggacgctcaacaacgtcacgattaataagaactgtcgggttctgggaaaattgtccgcgaaccagattgaaggcgatctcgttaaaacagtgggcaaacctttcccacgggactcccgggcaccggagaggtggccatcagggaccattaccgtcagggtttatgacgatcagccgtttgatcggcaaattgttattcccgcggtggcgtttcgcggtgctaaacatgagcggaagaataacaatatttattcgtcatgccgcctgatagtgaagaaaaacggtgctgaaatttataaccgaacgaccctggataatacgctgatatatacgggtgttattgatatgcctgccggtcacggtcacatgacgctggagttttctgtatcggcatggctggtaaatggctggtatcccacagcaagtatcagcgatttgctggttgttgtgatgaagaaatccacagcaggtatcagtatcagctga

SEQ ID NO: 473467 - DNA, 543 bp, Shigella flexneri
gtgaaaacgggggctgaagccatccgcgcactggccacacagctcccggcgtttcgtcagaaactgagtgacggctggtatcaggtgcgcattgccgggcgtgatgcaggtgaaaccgaattgtctgcccgtcttaatgagccgctggcaaatggtgcagtgatccacatagtaccgcgtctggtgggagctaaaagtggaggtgtgtttcaggcggtgctgggggcagctgttatggcggttgctatatggatgccgggggtaggaattatggcgagtaatctgctgttttctctcggtgccagtatgacgcttggcggtgttgcacagatgctggcaccgaaagccagaactccccgtacacagacaacggataacggcaaacagaacacctgtttctcctcactggataacatggttgcccagggcaatgttctgcctgttctgtacggtgaaatgcgcgtggggtcgcgggtggtatctcaggagatcagcacggcagacgaaggggatggtggtcaggttgtggtgattggtcgctga

SEQ ID NO: 473468 - DNA, 600 bp, Shigella flexneri
atggctccggaggactggctgcgggcacaaatgcagggtgagattgtggcactggtccacagtcatcccggtggtctgccctggctgagtgaggctgaccggcggctgcaggtgcagagtgatttgccgtggtggctggtctgccggggggcgattcacaagttccgctgtgtgccgcatctcaccgggcggcgctttgagcacggggtgacggactgttacacgctgttccgggatgcttatcatctggcggggattgagatgccggattttcatcgcggggatgactggtggcgtcacggtcagaatctctatctggataatctggaggccacagggctgtatcaggtgccgttgtcatcagcacaaccgggcgatgtgctgctgtgctgttttggttcatcggtgccgaatcatgccgccatttactgcggcgatggtgagctgctgcaccatattcctgaacaactgagtaaacgagagaggtataccgacaaatggcagcgacgcacacactccctctggcgtcaccgggaatggcacgcatctgcctttacggggatttgcaacgatttggccgccgcatcgaccttcgtgtga

SEQ ID NO: 473469 - DNA, 699 bp, Shigella flexneri
atgcaggatatccggcaggaaacactgaatgaatgcacccgtgcggagcagtcagcccgggtggagctctgggaaatcgatctgacagaggtcggtggtgagcgttattttttctgtaatgagcagaacgaaaaaggtgagccggtcacctggcaggggcggcagtatcaggcataccccattcaggggtcggggtttgaactgaacggcaggggctgtgctgcccgtccgacactgacggtctctaacctgcacggcatggtcaccgggatggcggaagatctgcagagtctggtcggcggaacggtggtccggcgtaaggtttacgcccgttttctggatgcggtgaacttcgtcaacggaaacagcgacgccgatccggaacaggaggtgatcagccgctggcgcatcgagcagtgcagcgaactgagcgcggtcagtgcctcttttgtgctggccacaccaacggagacggatggcgcggttttcccggggcgtatcatgctggcgaatacctgtatgtggacttaccgttctgatgagtgtggttacacgggcagggcagtggctgacgagttcgacaaaccaacaacggatatccggaaggacaaatgcagcaagtgtatgcgcgggtgtgagttgcgcaacaataccggtaatttcggcggtttcctttccatcaataaactttctcagtaa

SEQ ID NO: 473470 - DNA, 330 bp, Shigella flexneri
atggagacgtttcactggaaagtgcgcccggatatgaatgtggtatcagagccgaaagtggtgacagtgaagctgggcgatggttatgaacagcgtcgtgcggcgggactgaataaccagttgtcgacttacagcgtgacgatacgtgttcgtaaaggtgaacacccatctttaaaagcctttctggaacggcacggtggcgtccgcgcatttcagtggacgccaccttatgactggaaactgatcagggtggtttgtcgtaaatggtcggcaagcgtgggggcgttatgggtgactgtaacggccgattttgaacaggtggtgaactga

SEQ ID NO: 473471 - DNA, 3042 bp, Shigella flexneri
atggaccagatagccaacctggtcattgatttggggattgatgcggcagagtttaaaaatgaaattccccgtatcaaaaaccttctgaatggtgcagccagcgatgcagaacggtcttctgcccgtatgcagcgttttatggagcgtcagactcaggcggcccggcagacaatgcaggcggcttcttcggctgcaacagcagcatcagcccatgcgcagacggtggagaagaatgcacgggctcatgaacgcatggcccgtgaggtggaacaaacccgtctgcgcgtggatgccctgaatcagaaaatgcgcgaggaacaggcgcaggccagggcactggcggaggcgcaggataaagcggctgccgccttttatcgccagattgacagtgtgaaacaggccggtgcggggcttcaggaattacagcgtattcagcagcagatccgacaggccagaaacagtggcggggttggtcagcaggattatctggcgctgatttcggagatcacggcgaaaacccgtgccctgacgcaggcagaggaacaggccacccggcagaaagcggcgtttatccgccagcttaaagagcaggcaacccgccagaatctgtcgtcttctgagttgcttcgcgccagggcggctcagctgggggtaagcagtgctgcagaagtgtatatccgcaaaatggagcgggcaggaaaagccacacattcgctggggctgaaaagtgcggcagcccggcgggagctgggggtgttaatcagtcagatggcgcgcggcaattttggtgcgctgaggggatccgggataacgctggctaaccgtgccggatggacaggcgcactgatgtcgccgaaaggcatgatgactggcggcgttattggcggacttgtcgcggcggtcctgggtctgggtaaagcctggcatgacggccggaaggagggcgagaaatttaaccgtcagctggcgctgacgggacattatgccggtgtcactgtcgggcagttgtggaaactcagccgggccatatccgggaatggtatcacgcaacatgcggcagccggtgcgctggcacaggtggtgggcagtggggcatttcatggaaacgatattggtatggtggcgaaagctgccgcacagatggagcgatcggttggccagtcggtcagcgataccataaatcagtttaagcggctgaaggatgatcctgtaaatgccgcgaaggcgctggacaatgcgctgcattttttgaatgccactcagcttgagcagatacgcgtccttggggagcaggggcggtccagtgatgcggcccggatcgccatgtctgcgctggcagaggaaaccggtaaacgcacatctgatattgataataatctcaatgcgctgggtagtacgctgcaaaccttgtctgactggtggaagcagttctgggatgcggccatgaatattggtcgtgaagactcgctggatgcgcagattgatgcgttacaggaaaaaattcagcgcgcgaaaaaatatccgtggacaaacgcctccacacaggtggagtacgatcagcagcgtcttaacgatcttcaggagaaaaaacgccggaaggatttgcaggatgcaaaagcgcaggcagaacggaattaccaggagcaacagaaacgccggaatgctgaaaatgccgcgctgaaccggatgaatgaaacggaagctgcacgacatcagcgggaaattgcgcgtattaatgccatgcagtacgccgaccaggctgtcagggatgcggcgatacagcgtgaaaatgaacgttacgaaaaagccattaagaaaaatacacgggcaacccgtaatgatgaggccacccggttattgctgcagtacagtcagcagcaggcacaggtggaagggcagattgctgctgccagacagtcagcaggcattgccactgaaaggatgactgaagcgcataaacagcttctggccctgcagcagcgcatcagcgacctggacgggaaaaagctgacggcagatgaaaagagtgtgctggcccgtaagaatgagctgattcaggcgctgacgctgctggatgtgaaacagcaggagctgcagaaacagacagcgcttaacgacctgagaaaaaaaacggttcagctgaccagccagctggcagacaaagaacgtgcactgcgtgagcagcacaatctggatattgccactgcaggtatgggggataagcagcggcagcgctaccaggcacagttgcgcatccggcaggaataccggcaacagttgcaacagcttgagaatgacagtcgccagaaaggcacttacgggacggaggactaccggagggctgaggaggtgctgaaggggagcctgaagcgacaactgaatgaaaacaaacgctactggcaggaactggaagtggcgcagggcgactggaaaaacggtgccatgcgggcgtttcagaattttacggcggatgcggataatgcggcgggaacggcagaacagatgtttacagtggcattcagcagtgccggtaatgcactggcgacattctgtaccaccggtaagctgaattttaaatccttcacctcttccctgttgtcagatatggccagaattatggcacagatggccatgatgcaggcggtaaagggcgtcggttctttattcggcttcacgactaatgctgatggcggtgtttaccagtctgctgatttgagtcgctacagtggcacggtggttaaccgtccgacgttttttgcttttgcaaaaggcgcgggtgtgatgggggaagcgggacctgaagccattctgccactgcgtcgcggtgctgatggtaagctgggggttgtggcggatactggtggttcaggcatggtgatgtttgccccgcagtacaacattgagatcaataacgacggcacgaacgggcagataggtccggctgccctgaaggtggtttatgacctcgggaaaaaagcggccgcggactttatgcaacagcaggcccgtgatggtggccggttaagtggagcataccggtaa

SEQ ID NO: 473472 - DNA, 330 bp, Shigella flexneri
atgcagtttgtcatgcggcttgcccgggagttccggcgggcagactggcggcggatgctgtcggatatgtcggccactgagcttggtgagtggggcgattatttccggatgcagagcttcagtgatgtgtggatggatgcgcagtttgcctcgctgaaggcattgatcgtgagaatggtgtccggcagcagcgatgctgcggtggctgatttcagccttttaccggaagagaacgggataccggagcgaacggacgaagaactgatgcatcttggggaaggtatttccggaggtgtgcgttatggaccagatagccaacctggtcattga

SEQ ID NO: 473473 - DNA, 387 bp, Shigella flexneri; identical to SEQ ID NO: 463158

SEQ ID NO: 473474 - DNA, 741 bp, Shigella flexneri
atgaccacaccaaatccactggcaaagacgaaaggtgcggggacgacgttctggatgtataccggcaacggcgatgcgtttgcgaaccctttgtcggacactgactggctgcgtcttgcgatggtgaaggatctgcaacctggcgaaatgaccgctgatgcagaagatgacacttatctcgatgatgaagatgcagactggaaaacgacaacccaggggcagaaatccgttggtgatacttcggcgacgctggcctggcgtccgggtgacagcgggcagaaaaaactggttcagttgttcgactccggtgaagtctgcgcgtttcgtatcaaatatcccaacggcactgttgatgttttccgcggctggctgagctcactgggtaaaaccattgcctcaaaagacgtgatgacccgcactgtgaaaatcagcggtgtggggcgtccgtatctggcagaggaaggcactgaaaccgtgggtgttaccggactgacggtggcaccggcatctgtcagtgtcaaagcgggagcaaccaccacactgacctttacagtaaaacctgacggggccagtgacaaagcgatcagtgtgcattcgtcagatcctcagactgcttcggtgaccctgagcgggcttgtggccacggtgaaaggcgtgaagcagggcagtgtcagcatcgtgggcatgacctctgacggagagtttgtggcagtggctgcggtgaccgtcagcgcaccataa

SEQ ID NO: 473475 - DNA, 402 bp, Shigella flexneri
atgaaccgacacacacaaatccgtcagagcgtgctggcacgccttcgggaacagtgtggagacagcgccacgttttttgacgggcttccggcatttattgatgcgcaggaactgcctgccgtggcggtgtggctgagtgatgctcagtacaccggaaaaatgacggatgaagatgactggcaggctgttctgcatattgccgtcttcatccgggcacaggcaccggattcagagctggatatgtggatggagagcaccattttcccggccctgaatgatgtaccggcactttccggactcatcgacaccctgaacccactcggttttaactatcaacgtgataatgagatggctacctgggcgatggcggaaatcacgtaccagatcacgtacacgaattaa

SEQ ID NO: 473476 - DNA, 591 bp, Shigella flexneri
atgaaggggcttgagaatgccatccgcaatctgaacagccttgatacccgtatggtgccacaggccagcgcatgggcgataaaccgtgtggcacagaaagcggtctcggttgccacccggcaggttgccgggaataccgttgcgggcgataaccaggtgaaagggatccccctgaaactggtacgtcagcgtgtccgggtgtttaaagccagtccgtcaggaaaaatgacggccaggatccgcgttaaccggggcaatctgcccgccatcaaactgaacacaacacggcggcgtgctggtgaaggactgagagtgggaaaatactttttccggggggcatttgttcagcaactggcgaatggccgctggcatgttctgaggtgtcttcctgaagcgcgttttgcaacagggcatgaccatcagggcaggctaagaaaaaatcgtcttcctgtggaggtagtgaaaatcccgctgtccggaccgctgacacaggcatttgaagatgcccgcgaccgcatcattgctgcggaaatgccgaaacagctggggtatgccctgaaacaacaactgaggttacatctgagtaaatga

SEQ ID NO: 473477 - DNA, 372 bp, Shigella flexneri
gtggctgatttcgataatctgtttgatgttgcacttgatctcgcagacaaggccattattcgcaatatggggattagagcggtcattacgtcaggccggctaaaagggatcatgatttccggggtttttgatgatcctgaaaatatttctctggtggccggcggtgtgcgtattgaagactctttaccatccctgtttgtgaaaacagcagatattttacggctgtgtcgcaatgatttgctgatgattggtcgtgagtctttctgtgtggatcgtatcacccctgatgatggcggatgtagttatatccggttgcggcgtgaggggctgccgggaaacgtaagggcaggacgatattatgaaggggcttga

SEQ ID NO: 473478 - DNA, 402 bp, Shigella flexneri
atggcaaagaaagacgataacctgaaacgtctgagagaactggcagcatcgctgggacgtgagccggatatctcgggaagcgcagcagatattgcgcagcgtgtggctgagctggaggaggaacttgccaatatggatgacactgacatccgggataagtctgcccacccggaaaatgcgctgaccggacatgaaaatgaggtgatatcagcgcagccggagaccgtgattcagaatatggatgatctggttacagtcgtggcactggtgacgctgcataccgatgcacttcatgccacgcgggatgaacctctggcatttgtgccgccgggaatggcgttccgtgtctttgccggtgtggcagccggaatgacagaacgtggcctggccagaatgcaataa

SEQ ID NO: 473479 - DNA, 294 bp, Shigella flexneri
gtgataacagatgtctggaaatataggggcaaatccaggcagcatctggcgatcagttcctggcgggcgctgattggcttttcaattggcggatcgctgggcctgattctgggactgattagcggactgtcgcgctggggagaaaggctgctggatacctcaattcagatgttgcgcaacgtgccgcatctggcgctgatcccgctggtgattttgtggtttggcattgatgaatccgcgaaaatctttctggtggcgctcggtacgctgttccccatttatatcaacacctag

SEQ ID NO: 473480 - DNA, 324 bp, Shigella flexneri
atggcgcgtagctatggattatccggcataccgctgtttatccatgtgatcctgcccgatgccctgccctcaattatggtcggcgtgcgttttgcgttgggcctgatgtggctgacgctgattgttgccgaaaccatttctgccaattccggcattggttatctggcgatgaatgcgcgagagtttttgcaaacagacgtggtggtagtcgctattattctttacgccctgctcggcaaacttgctgacgtcagcgcgcagctgttagagcgcctctggttgcgctggaacccggcttatcatttgaaggaggccacgatatga

SEQ ID NO: 473481 - DNA, 768 bp, Shigella flexneri
atgaatactgctcgtctgaaccagggcacaccattgttgctcaatgcagtaagcaaacattacgcggaaaatatcgtcctgaaccaactggatttacatattccggcaggtcagtttgtggcggtggtgggccgcagcggtggtggtaaaagtaccctgctgcacctgctggccggtctggaaacgccaaccgcaggcgatgtgttagcgggcaccacaccgctggctgaaattcaggatgatacgcgaatgatgtttcaggatgcgcgtctgctgccgtggaaatcggtgattgataacgttgggttaggccttaaaggtcagtggcgcgatgccgcgcgtcgggcgttggctgcggcaggactggagaatcgcgccggggaatggcctgccgcactttctggcgggcagaaacagcgtgtggcgctggcaagagcgttgattcatcgaccgggtttattgttgcttgatgaaccgctcggggcactggacgccttaacgcgactcgagatgcaggatttgattgtgtcactttggcagcagcacggctttaccgtactgttggtgacgcatgatgtgagcgaagcggtagcaatggctgaccgggtgttgttaattgaagagggaaaaattagtctggatttgacagtggatatcccccgtccgcgtcgattagggtcggtgcgattagcggagctggaagcggaagtattgcaacgggtaatgcggcgtgggcattctgaacaactgattcggcgtcatggttaa

SEQ ID NO: 473482 - DNA, 2616 bp, Shigella flexneri
atgactcaacagccacaagccaaataccgtcacgattatcgtgcgccggattaccagattactgatattgacttgacctttgacctcgacgcgcaaaagacggtcgttaccgcggtcagccaggctgtccgtcatggtgcatcagatgctccgcttcgtctcaacggcgaagacctcaaactggtttctgttcatattaatgatgagccgtggaccgcctggaaagaagaagaagagggcgcactggtcatcagtaatttgccggagcgttttacgcttaagatcattaatgaaataagcccggcggcgaatacggcgctggaagggctttatcagtcaggcgatgcgctttgcacccagtgtgaagccgaaggtttccgccatattacgtattatctcgaccgcccggacgtgctggcgcgttttaccaccaaaattattgccgataaaatcaaatatcccttcctgctttccaatggtaaccgcgttgcgcaaggcgaactcgaaaacggacgccattgggtacagtggcaggacccgttcccgaaaccgtgctacctgtttgcgctggtggcaggcgactttgatgtactgcgcgatacctttaccacgcgttctggtcgcgaagtagcactggagctgtacgtcgatcgcggcaaccttgatcgcgcgccgtgggcgatgacctcgctgaaaaactccatgaaatgggatgaagaacgctttggcctggagtatgacctcgacatctatatgatcgtcgcggtggatttcttcaatatgggcgcaatggagaataagggtctgaatatctttaactccaaatatgtgctggcccgcaccgacaccgccaccgacaaagattacctcgatattgaacgcgttatcggccatgaatatttccataactggaccggtaaccgagtgacctgccgcgactggttccagctcagcctgaaagaaggtttaaccgtcttccgcgatcaggaattcagctctgaccttggttcccgcgcagttaaccgcatcaataatgtgcgcaccatgcgcggattgcagtttgcggaagacgccagcccgatggcgcacccaatccgcccggacatggtcattgagatgaacaacttctacaccctgaccgtttacgagaagggcgcggaagtgatccgtatgatccacaccctgctgggcgaagaaaacttccagaaagggatgcaactctatttcgagcgtcatgatggtagcgcagcgacctgtgacgactttgtgcaggcgatggaagatgcgtcgaatgttgatctctcccatttccgccgttggtacagccagtccggtacgccggttgtgaccgtcaaagacgactacaatccggaaactgagcagtacaccctgaccatcagccagcgcacgccagccacgccggatcaggcagaaaaacagccgctgcatattccgtttgccatcgaattgtatgacaacgaaggtaaagtgatcccgttgcagaaaggcggtcatccggtgaattccgtgctgaacgtcacccaggcggaacagacctttgtttttgataatgtctacttccagccggtgcctgcgctgctgtgcgaattctctgcgccagtgaaactggaatataagtggagcgatcagcaactgaccttcctgatgcgtcatgcgcgtaatgatttctcccgttgggatgcggcgcaaagtttgctggcaacctacatcaagctgaacgtcgcccgtcatcagcaagggcagccgctgtctctgccggtacatgtggctgacgctttccgcgcggtgctgctcgatgagaagattgatccggcgctggcggcagaaatcctgacgctgccttctgtcaatgaaatggctgaactgttcgatatcatagacccgattgctattgccgaagtacgcgaagcactcactcgtactctggcgactgaactggcggatgagctgctggctatttacaacgcgaattaccagagcgagtaccgtgttgagcatgaagatattgcaaaacgcactctgcgtaatgcctgcctgcgcttccttgcttttggtgaaacgcatctggctgacgtgctggtgagcaagcaataccatgaagcaaacaatatgaccgatgcgctggcagcgctttctgcggcggttgctgcacagctgccttgccgtgacgcgctgatgcaggagtacgacgataagtggcatcaggacggtctggtgatggataaatggtttatcctgcaagccaccagcccggcggcgaatgtgctggagacggtgcgtggtctgttgcagcatcgctcatttaccatgagcaacccgaaccgtattcgttcgttgattggtgcgtttgcgggcagcaacccggcagcgttccatgccgaagatggcagcggttaccagttcctggtggaaatgcttaccgacctcaacagccgtaacccgcaggtagcttcacgtctgattgaaccgctgattcgcctgaaacgttatgatgccaaacgtcaggagaaaatgcgcgcggcgctggaacagttgaaagggctggaaaatctctctggcgatctttacgagaagataactaaagcactggcttga

SEQ ID NO: 473483 - DNA, 1203 bp, Shigella flexneri
atgacacaattcgcttctcctgttctgcactcgttgctggatacagatgcttataagttgcatatgcagcaagccgtgtttcatcactattacgatgtgcatgtcgcggcggagtttcgttgccgaggtgacgatctgctgggtatttatgccgatgctattcgtgaacagattcaggcgatgcagcacctgcgcctgcaggatgatgaatatcagtggctctctgccctgcctttctttaaggccgactatcttaactggttacgcgagttccgctttaacccggaacaagtcaccgtgtccaacgataatggcaagctggatattcgcttaagcggtccgtggcgtgaagtcatcctctgggaagttcctttgctggcggttatcagtgaaatggtacatcgctatcgctcaccgcaggccgacgttgcgcaagccctcgacacgctggaaagcaaattagtcgacttctcggcgttaaccgccggtcttgatatgtcgcgcttccatctgatggattttggcacccgtcgccgtttttctcgcgaagtacaagaaaccatcgttaagcgtctgcaacaggaatcctggttcgtgggcaccagcaactacgatctggcgcgtcggctttccctcacgccgatgggaacacaggcacacgaatggttccaggcacatcagcaaatcagcccggatctagccaacagccagcgagctgcacttgctgcctggctggaagagtatcccgaccaacttggcattgcattaaccgactgcatcactatggatgctttcctgcgtgatttcggtgtcgagttcgctagtcggtatcagggcctgcgtcatgactctggcgacccggttgaatggggtgaaaaagccattgcacattatgaaaagctgggaattgatccacagagtaaaacgctggttttctctgacaatctggatttacgcaaagcggttgagctataccgccacttctcttcccgcgtgcaattaagttttggtattgggactcgcctgacctgcgatatcccccaggtaaaacccctgaatattgtgattaagttggtagagtgtaacggtaaaccggtggcgaaactttctgacagccctggcaaaactatctgccatgataaagcgtttgttcgggcgctgcgcaaagcgttcgaccttccgcatattaaaaaagccagttaa

SEQ ID NO: 473484 - DNA, 1401 bp, Shigella flexneri
atgagcgttgtgcctgtagccgacgtactccagggccgcgtagccgttgacagcgaagtcaccgtacgcggatgggtacgtacccgccgagattcaaaagctggcatctccttcctcgccgtttatgacggttcctgctttgatcctgtacaggctgtcatcaataattctctgcccaattacaatgaagacgtcctgcgtctgaccaccggctgctcggtcattgtgacgggtaaagtcgtggcatcgccgggccaggggcaacaatttgaaattcaggccagcaaggttgaagttgctggttgggttgaagatccagacacttacccgatggcggcaaaacgccacagcattgagtatctgcgtgaagtcgctcacctgcgtccgcgcacaaacctgattggtgccgtcgcgcgcgttcgccatacgctggcgcaggcgctgcatcgcttctttaacgagcagggattcttctgggtttcaacgccactgattaccgcatctgataccgaaggtgcaggcgaaatgttccgcgtttctacgctggatctggaaaacctgccgcgtaacgatcagggcaaagtggatttcgacaaagacttctttggtaaagagtctttcctgaccgtatctggccagttgaacggcgaaacctacgcttgcgcattatccaaaatttataccttcggcccgactttccgtgctgaaaactccaacaccagccgtcacctggcggaattctggatgctggagccggaagtggcgtttgctaacctgaacgatatcgcgggtctggctgaagccatgctgaaatatgtcttcaaagcggttctcgaagaacgcgcagacgacatgaaattcttcgctgaacgcgtagataaagatgccgtttcacgtctggaacgcttcattgaagccgatttcgcgcaggtggattacaccgacgcagtgaccattctcgaaaactgcggcaggaagtttgaaaacccggtttactggggcgtcgatctctcttctgagcatgagcgttatctggcggaagaacactttaaagcaccggtagtggttaaaaactatccgaaagatattaaagcgttctatatgcgcctcaacgaagacggtaaaaccgttgcggctatggacgttctggctccgggcatcggtgagatcattggtggctcccagcgtgaagaacgtctggacgttctggacgagcgtatgctggaaatgggcctgaataaagaagattactggtggtatcgcgatctgcgtcgctacggtactgttccgcattcaggtttcggtcttggttttgaacgcctgattgcttacgtaactggcgtgcaaaacgtgcgtgatgtgattccgttcccacgtactccgcgcaacgccagcttctga

SEQ ID NO: 473485 - DNA, 1089 bp, Shigella flexneri
atgatgaagcgcaatattctggcagtgatcgtccctgctctgttagtagcaggtactgcaaacgctgcagaaatctataacaaagatggcaacaaagtagatctgtacggtaaagctgttggtctgcattatttttccaagggtaacggtgaaaacagttacggtggcaatggcgacatgacctatgcccgtcttggttttaaaggggaaactcaaatcaattccgatctgaccggttatggtcagtgggaatataacttccagggtaacaactctgaaggcgctgacgctcaaactggtaacaaaacgcgtctggcattcgcgggtcttaaatacgctgacgttggttctttcgattacggccgtaactacggtgtggtttatgatgcactgggttacaccgatatgctgccagaatttggtggtgatactgcatacagcgatgacttcttcgttggtcgtgttggcggcgttgctacctatcgtaactccaacttctttggtctggttgatggcctgaacttcgctgttcagtacctgggtaaaaacgagcgtgacactgcacgccgttctaacggcgacggtgttggcggttctatcagctacgaatacgaaggctttggtatcgttggtgcttatggtgcagctgaccgtaccaacctgcaagaagctcaacctcttggcaacggtaaaaaagctgaacagtgggctactggtctgaagtacgacgcgaacaacatctacctggcagcgaactacggtgaaacccgtaacgctacgccgatcactaataaatttacaaacaccagcggcttcgccaacaaaacgcaagacgttctgttagttgcgcaataccagttcgatttcggtctgcgtccgtccatcgcttacaccaaatctaaagcgaaagacgtagaaggtatcggtgatgttgatctggtgaactactttgaagtgggcgcaacctactacttcaacaaaaacatgtccacctatgttgactacatcatcaaccagatcgattctgacaacaaactgggcgtaggttcagacgacaccgttgctgtgggtatcgtttaccagttctaa

SEQ ID NO: 473486 - DNA, 1191 bp, Shigella flexneri
atgtttgagaacattaccgccgctcctgccgacccgattctgggcctggccgatctgtttcgtgccgatgaacgtcccggcaaaattaacctcgggattggtgtctataaagatgagacgggcaaaaccccggtactgaccagcgtgaaaaaggctgaacagtatctgctcgaaaatgaaaccaccaaaaattacctcggcattgacggcatccttgaatttggtcgctgcactcaggaactgctgtttggtaaaggtagcgccctgatcaatgacaaacgtgctcgcacggcacagactccgggtggcactggcgcactacgcgtggctgccgacttcctggcaaaaaataccagcgttaagcgtgtgtgggtgagcaacccaagctggccgaaccataagagcgtctttaactctgcaggtctggaagttcgtgaatacgcttattatgatgcggaaaatcacacccttgacttcgatgcactgattaacagtctgaacgaagctcaggctggcgacgtagtgctgttccatggctgctgccataacccaaccggtatcgaccctacgctggaacaatggcagacactggcacaactctccgttgagaaaggctggttaccgctgtttgacttcgcttaccagggttttgcccgtggtctggaagaagatgctgaaggactgcgcgctttcgcggctatgcataaagagctgattgttgccagttcctactctaaaaactttggcctgtacaacgagcgtgttggcgcttgtactctggttgctgccgacagtgaaatcgttgatcgcgcattcagccaaatgaaagcggcgattcgcgctaactactctaaccctccagcacacggcgcttctgttgttgccaccatcctgagcaacgatgcattacgtgcgatttgggaacaagagctgactgatatgcgccagcgtattcagcgtatgcgtcagttgttcgtcaatacgctgcaggaaaaaggtgcaaaccgcgacttcagctttatcatcaaacagaacggcatgttctccttcagtggtctgacaaaagaacaagtgctgcgtctgcgcgaagagtttggcgtatatgctgttgcttctggtcgcgtaaatgtggccgggatgacaccagataacatggctccgctgtgcgaatcgattgtggcagtgctgtaa

SEQ ID NO: 473487 - DNA, 648 bp, Shigella flexneri
atgaactatcgtattattccggtcaccgcattctcccagaactgttcattgatctggtgtgaacaaacccgcctggccgcactggtcgatcctggcggcgatgcggaaaaaatcaaacaggaagttgatgacagcggcctgacactgatgcagatcctgctgacgcatggtcatctggaccacgttggcgcagcggcggaactggcgcaacattacggcgtgccggtttttggcccggaaaaagaagatgagttctggctgcaaggcttgcctgcgcaaagtcgtatgtttggtctggaagagtgccagccgctgacgccagatcgttggctgaacgaaggcgataccatcagcatagggaatgtgactttacaggtgttacattgccctgggcatacgccgggtcatgtcgtgttttttgatgatcgggcaaagctgctgatttctggcgatgttattttcaaaggcggagtagggcgcagtgacttcccgcgtggcgatcataatcaactgatttcttcaatcaaagataaattgctgccactgggggatgacgtgacatttattccgggtcacggaccattatctacacttggttatgagcgcctgcacaatcccttcctgcaagacgaaatgcccgtctggtaa

SEQ ID NO: 473488 - DNA, 549 bp, Shigella flexneri
atggacaaattcgacgctaatcgccgcaaattgctggcgcttggtggcgttgcactcggtgccgccatcctgccgacccctgcgtttgcaacactctctaccccacgcccgcgcattttgacactcaataatcttcataccggagagtcaatcaaagcggagtttttcgatggcagaggctatattcaggaagaattggcaaaacttaaccattttttccgcgattaccgcgcgaacaaaataaagtccatcgacccaggattattcgaccagttgtatcgcctgcaagggttgttaggcacgcgcaaaccggtgcaactcatttccggttatcgttccattgataccaacaatgaactacgcgcccgcagccgtggagtagcgaagaaaagctatcacactaaaggccaggcgatggatttccatattgaaggtatcgcgttaagcaatattcgcaaagccgcgttatctatgcgcgcaggtggtgtaggatattacccacgtagtaactttgtgcatattgataccgggccagcacggcactggtag

SEQ ID NO: 473489 - DNA, 1848 bp, Shigella flexneri
atgttgcttaatatgatgtgtggtcgtcggctgtcggcaatcagtttgtgcctggccgtaacattcgctccactgttcaatgcgcaggccgatgagcctgaagtaatccctggcgacagcccggtggctgtcagtgaacagggcgaggcactgccgcaggcgcaagccacggcaataatggcggggatccagccattgcctgaaggtgcggcagaaaaagcccgcacgcaaatcgaatctcaattacccgcaggttacaagccggtttatcttaaccagcttcaactgttgtatgccgcacgcgatatgcaacccatgtgggaaaaccgtgatgctgttaaagccttccagcaacagctggcagaggtggcgattgctggtttccagccgcagtttaataaatgggtagagttactgaccgatcctggtgttaacgggatggcacgtgacgtggtgctctctgatgcgatgatgggctatctccatttcattgcaaatattccgatcaaaggcactcgctggctatatagcagtaaaccttatgcgctttcaacgccgccgctttcggtgattaaccaatggcagctagcgctggataaaggtcaattgcctacgtttgttgcaggactggcaccgcagcatccgcaatatgcggcgatgcatgaatcgttactggccttactcagtgacaccaaaccgtggccccaactgaccggcaaagcaacgttgcgcccagggcagtggagtaacgacgtaccggcgttgcgcgaaatattgcaacgcacaggcatgttggacggggggccgaaaattactctacctggcgatgacacgccaactgacgcggtagtcagcccatccgctgttactgttgaaacagcagaaactaagccgatggacaagcaaacgacgtctcgtagtaaacctgcgcctgccgttcgtgccgcctacgataatgaactggtggaagccgttaaacgttttcaggcatggcaaggattgggagcagatggtgctattggcccggcaacgcgtgactggttaaacgtaacgcccgcccagcgtgctggcgtgttggcactcaacatccagcgattgcgcttgctgccaacagagctttctaccgggatcatggttaacattccagcctattcgctgctctactatcagaacggcaatcaggtgctggattcgcgagtcattgtcggtcgccccgatcgcaaaacgccgatgatgagcagtgcacttaacaacgtagtggtaaacccgccgtggaacgtaccaccaactctggcacgcaaagatattctgccgaaagtgcgcaacgatccgggatatctcgaaagccatggctatacggtgatgcgcggctggaacagcagagaagcgattgacccatgggaggttgactggtctacaatcacggcctcgaatttaccgtttcgcttccagcaggctccaggcccacggaactcgctggggcgctataaattcaatatgccgagttcagaggccatttatttgcatgacacgccgaaccacaatctgttcaagcgtgatacacgcgcattgagctcaggctgtgtacgagtgaataaagcttccgatctggcgaatatgctgttgcaggatgcaggatggaatgacaaacgtatttctgatgcgctgaagcagggtgatacacgttacgtcaatattcggcagtcgattccggtgaatctctactacctgacggcctttgttggtgcagatgatcgtacccagtatcgtacagatatttacaattatgatctgcctgcgcgatccagctcgcaaatcgtatcgaaagcggaacaattaatcaggtaa

SEQ ID NO: 473490 - DNA, 300 bp, Shigella flexneri
atgaaaccaaatattacgtggggactccaaaaaatacaggcgcacgggatcgccgataacacaatttacgcgactgaaggaacacaaattatcttcaccgttacctctccctggattcctgtttttaaggtgaatgatgatgtaaagattgccctcactctgacccgccacgaagaagcatggtggattatcaatcagtctaccgaatattgctgtacggtaaacgaccagattgtggaacctcatcaccgtatgcgtctgaatgaaggcgacctgatagaatgggggttatcttcatag

SEQ ID NO: 473491 - DNA, 378 bp, Shigella flexneri
ttgttatctcccgaacaagatcttaatcgccatgctgatccttttccttttaacgaagagccctcctcgcaggatctggattcattgcgtgacctggtcaccgaagccgagacattgcaggatatggtcactggtgggttaagcattgacgctattctcaatgtactggatgccactggcgaagatgaaactatctggcctgtcgaaaagactccccctgatatcctgcatttactttccccggaatacgccccggaaacagcgcataacaccgtactgccagatctgacacggaaagagcatcgcatcattggcattgacagccattaccggataaacccggcacaacatggagagatatatcatgacaaacaataa

SEQ ID NO: 473492 - DNA, 633 bp, Shigella flexneri
atgacaaacaataacgagctaccgattaccttgtcggcgctgctgcgggattattccgtggtggagggcattcagatggcagagcaacaggtcaggatgcacccagcgcaggcctcccgccgccacagcctgtttcagttattgtgcgtggcaggcgactggtcgcgggcactgcaacagatccagctatgcgcccggatggacgcaaattatactcgcgaagcgcaggtatttggcgagctgatccgctgtgagatataccgccacgcctgctttcagggcgaacagcggcccggtgttattctcccgccgcccgcctggatggaggatctgctgaccgccctcgcctgtaacgcccgtggtgaagcgcaggaagctgatgctcaccgcagccgcgcgcttgaggccataacagacacttccgggcagtggaatggcggcgcatttgactggattagcgacagcgactcccgtaccggtccggtactcgaactgatcgcgggcggagcatatatctggctgccgttttcacaaatctgttcgctgaaatcgccgcggcctgcgcatctgatcgatttgatctggaaacccgtcaacgtcaccctgaacaatggcgatacacacagtgcctag

SEQ ID NO: 473493 - DNA, 495 bp, Shigella flexneri
gtgagcgcttcccgccagcgtccaggcaatcacctgctgcccacgctgtttgaccgcctgtgtgacgacgccccaaaccagaaacgcgaccacggtatcagcgtcagtccggttcagattaaggagatcatccgccgggatttgtcatttctgctcaacaccgtcagccatgaagatgatattgatgctgcacgttatccgtacgcggcagcgtccgtacttaactacggcctgccgccactggcgggcagctttctgtatgagcacaagtgggacgatatccgcagggccattttgcgaaccatcacccggtttgaaccccggctgaaagcgtccactctgcaaatcatcccacttcaggatgagcgccgccagagtggccataacacattacagtttgaaattcgcggcgagatcctcacgcagccgtatccgactgcattccgggtacgtagcgcgctggatatggagcagagtcgcattacgtttttttaa

SEQ ID NO: 473494 - DNA, 306 bp, Shigella flexneri
atgagcaacgatttcactcaggcgcaggcccccccctggcgttacggttttctgaacctgatgcgccgcgtggatgtgcagttgtgtaccgttccggcgggcaacacctggcaaccacggatggaaaaatttcgcctcggacaaacgcccgcgctgacctttgcgccacgagaaatcgccagtgtgggctggcaggaagggcgcctgcacatcagtctgtacagcctcgggctgtgggggccgaacggtccactgccgctgcactacaccgaactggcgcgtaaccggactgaaagccgacgctga

SEQ ID NO: 473495 - DNA, 537 bp, Shigella flexneri
ttgcgggagagcgctgacagcccgttgccagatcacgctcgtctggcggcatcggcccatctggtgcgtgagtcccgcaatccggacggtctggccaccacgctggcgcactatttcggtgtacctttccggatacaggagtatgtcctgcactggatagccgtggcggacgatgagatcacccggctggggatgcctgccccctcttccgttattggcaatggtgcactcatcggccaggccgtgccggacatgcagtataagttccggctggttatcggcccgctgacgctggaggattaccgacgttttctgcctggcagcaataacctgcccgtcctgacagaactggtccgcgcctttagtggttatgaatactgctgggaaattgagctacagctaaagccccacgccgcccctccggctgttaccggtggtccgtaccaactgggttggactgcatgggcgggtaaagccatgcacgacaacccggtgacgggcatgattttcgaaccagaacagtacctggcgcactga

SEQ ID NO: 473496 - DNA, 1047 bp, Shigella flexneri
atggaaatattcctgtctgacccaatttcggcggaatgcccctgcggcccggatctggagtacgatccggaatacctgctgctgttcacccgcgccgcaccgcgtgaagaagcgcaatatggcgattttgtcagtacgccggaaaacattaactgggcggagcttgagcgggacgcccatcgtctgctgatgcgcagcaaagatatccgcattctggttgtcctgctgcgctgccgtatccagcaggccggtgccaggggactgtcggaggcgctcacgctgctggaaacgttgtgctccacgtacccggacgccatccatcctcaactgctcgcgactgaagatatcaccgccgaagatgctgcggtggcacgcagtaacgcgctggcggcgttgctggaccacgaaggtgtaatggcggatattcgtggcattacactgtcaaataatgctgccatgcgccttcaggtgcgggatgtggagcgttcgctatctgcattacgcccggcggatgcgctggcaccagaatcggtacgccagcaactggcagacctggaagcgcgcggcacactgccgctggatgcctttcgccaggcagcagagaccactgagcggctgcaacgccatgcgcgtgaaacgctgaatgaccaggcaccggacttctcccgtctgacgcaactgctggccctgttaccgggagcagtgcagagcaccacgccggagatcctgccacaaccacaggctgagcagccggaaaacgccaccatcgttcatactgaacagatgcaggcagagcagattgcgctaccggtgcatatcgcggaggaaatatcaccgatgaccggcgcagaaccccggcagatccgcgaccgaaacgacgcgctggaacgcctgcgtgtcatccgtcgctggtttgagcacagcgaaccgagcagcccgaccattcctttgctgcgccaggcagaacgcctggtcggaaaacgcgtctcggaggtaataaatgaaattccagtagaactgctggagaaatgggatgcgctggagtaa

SEQ ID NO: 473497 - DNA, 741 bp, Shigella flexneri
atgaccgctatgagcactgcaattacacgccagatcgttctcgataccgaaaccaccggtatgaaccagattggtgcacactatgaaggccacaagatcattgagattggtgctgttgaagtagtgaaccgtcgcctgacgggcaataacttccatgtttatctcaaacccgatcggctggtggatccggaagcctttggcgtacatggtattgctgatgaatttttgctcgataagcccacgtttgccgaagtagccgatgagtttatggactatatccgcggcgcggagttggtgatccataacgcagcgttcgatataggctttatggactacgagttttcgttgcttaagcgcgatattccgaagaccaataccttctgtaaggtcaccgatagccttgcggtggcgaggaaaatgtttcccggtaaacgcaacagcctcgatgcgctatgtgcccgctacgaaatagataacagtaaacgaacgctgcacggggcattactcgatgcccagatccttgcggaagtttatctggcgatgaccggtggtcaaacgtcgatggcttttgcgatggaaggagagacacagcagcaacaaggtgaagcaacaattcagcgcattgtacgtcaggcaagtaagttacgcgttgtttttgcgacagatgaagagctggcagcacatgaagcccgtctcgatctggtgcagaagaaaggcggaagctgcctctggcgggcataa

SEQ ID NO: 473498 - DNA, 468 bp, Shigella flexneri
atgcttaaacaggtagaaattttcaccgatggttcgtgtctgggtaatcctggacctgggggttacggcgctattttacgctatcgcggacgcgagaaaacctttagcgcaggctacacccgcaccaccaacaaccgtatggagttgatggccgctattgtcgcgctggaggcgttaaaagaacattgcgaagtcattttgagtaccgacagccagtatgtccgccagggtatcacccagtggatccataactggaaaaaacgtggctggaaaacagcagacaaaaaaccagtaaaaaatgtcgatctctggcaacgtcttgatgctgcattggggcagcatcaaatcaaatgggaatgggttaaaggccatgccggacacccggaaaacgaacgctgtgatgaactggctcgtgccgcggcgatgaatcccacactggaagatacgggctaccaagtcgaagtttaa

SEQ ID NO: 473499 - DNA, 723 bp, Shigella flexneri
atgaaaccggcaagagtccctcaaactgtcgtggctcctgattgctggggcgatttgccctggggagagctttatcgcaaggcgctggagcgccagctcaacccgtggttcactaaaatgtatggttttcatctgcttaagattggcaatttaagcgcagaaatcaattgcgaagcgtgcgcggtttctcatcaagtgaatgtttctgcgcaaggaatgcccgtccaggtgcaggcggatccacttcatcttccttttgccgataaatccgttgatatttgtctactggcacataccttgccgtggtgcaccgatccgcatcgtttattacgtgaagccgatcgggtactgattgatgatggctggctggtgattagtggcttcaaccccatcagtttaatgggattacgcaaacttgtgccggtattgcgcaaaacctcgccctataatagccggatgtttactctgatgcggcaactggactggctctctttgttgaattttgaagtgctgcacgccagccgtttccacgttctcccgtggaacaaacacggaggaaaactattgaatgcgcatattcctgcgcttggttgcttacaacttattgttgcccggaaacggactattcctttaacgctaaatccgatgaaacagagtaaaaacaagccacgaattcgccaggcggttggagccacccggcaatgtcgtaaaccacaggcttaa

SEQ ID NO: 473500 - DNA, 756 bp, Shigella flexneri
atgaatcttaacagtattcccgcctttgatgacaattacatctgggttttgaatgatgaggcaggtcgctgcctgattgtcgatcccggagacgcagagccagtattaaacgccattaccgccaataactggcaaccggaggccatatttctaacccaccatcaccacgatcacgttggcggcgtaaaagaactggtggaaaagtttccgcaaattgtggtgtatggtccacaagagacacaagataagggaacaacacaggtagtcaaagatggcgaaactgccttcgttttagggcatgaatttagtgtaattaccacaccgggtcacactttaggacatatctgttacttcagtaaaccttatctattttgcggcgacacgctgttttctggtgggtgtggtcggttgtttgaagggacagctttacaaatgtatcaatcacttaaaaagctaagtgcgttacctgacgatacattggtatgttgtgctcatgaatatacgttatcaaatatgaagtttgctttgagtatttttccgcacgatttgtccataaatgattattatcgtaaagttaaggagttacgggcaaaaaatcaaataacactacccgtaattctgaaaaatgagcggcaaattaatgtttttttaagaacggaagatattgatttaattaatggaattaatgaagaaacattattgcaacaacctgaagagcgttttgcatggttaaggtcaaagaaagataggttctga

SEQ ID NO: 473501 - DNA, 1221 bp, Shigella flexneri
atggacgatgggacgtctatcgcgccagatggtgacttgtgggctttcattggcgacgagctaaagatgggaattccggaaaatgaccggattcgcgaacagaaacagaaatatttacgcaataagagctatctccacgatgtaactttacgggcagagccgtatatgtactggatagcagggcaagttaaaaaacgtaacatgcctatggaactggtactactacccatagtggagagcgcttttgatcctcacgcaacgtctggcgccaatgccgcaggcatctggcagatcattccgagcacggggcgcaattatggtttgaaacagacccgcaattatgacgcgcgtcgcgatgttgttgcttcaacaactgccgcgctgaatatgatgcagcgtctgaacaaaatgtttgacgacgactggcttctgaccgtagcggcttataacagcggcgaaggtcgggtcatgaaggcaattaaaacgaacaaagcgcgtgggaaatccacggacttctggtcgttaccgttgccgcaggaaacgaagcagtacgtgcctaaaatgctggcattgagtgatattctcaaaaacagcaagcgttatggcgtacgtctgccaacgaccgatgaaagccgtgctctggcgcgtgtgcacctgagtagcccggttgaaatggcgaaggttgcagatatggcggggatttccgtcagcaagctgaagacattcaacgctggcgtgaaaggctccacgctgggcgcaagtgggccgcagtacgtgatggtgccaaagaagcatgcagatcaactgcgtgaatctctcgcttcaggcgaaattgctgctgtacagtcgacgctggttgccaacaatacgccgcttaacagccgtgtttacaccgtacgctctggcgacacgctttcaagcatcgcttcacgtctcggcgtaagcaccaaagatttgcagcagtggaacaaactgcgcggatctaagctgaagccaggccaaagtttgacgattggtgcaggcagtagcgcacagcgactggcaaacaacagcgatagcattacgtatcgtgtgcgcaaaggcgattcgctttcaagcattgctaaacgccacggcgtgaacatcaaagatgtgatgcgctggaacagcgacactgcgaatctgcaaccaggcgacaagctgacgttgtttgtgaaaaacaacaacatgccagattcctga

SEQ ID NO: 473502 - DNA, 771 bp, Shigella flexneri
atgacaacacaatcccaccatgaccacgtagaaaagcagtttagctctcaagcctgcgaatatctgaccagtaccgtacatgcatccggacgagatttacagcgcctggcggtgcgtctggctgattatcctggtgcaagtgcacttgatatgggctgcggagcagggcatgccagctttgttgctgcgcaaaacgtgagcgcggtggtggcgtatgacttatctgcccaaatgctggatgtcgtggcacaagctgccgaagcccggcaactgaaaaatatcaccacccgccagggatatgccgaaagtctgccatttgccgataacgcatttgatattgttatcagccgttattctgcccatcactggcatgatgttggtgcagcactgcgtgaagtgaaccggatattgaaacctggcggtaggatgattgtgatggacgtaatgtctccgggtcatccagtgcgcgacatctggttacagacggtagaagcattacgcgatacctctcacgtacgaaactacgccagcggtgagtggttgaggttaatcaatgaagccaatctgatagttgataatttaattacagataagttaccgctggaattttgttcatgggtcgcgagaatgcgtacgccagaagcgttagtagacgctattcgcatttaccaacagagcgcatcgacagaggtgagaacgtattttgccttgcagaatgacggctctttcaccagtgatatcatcatggtagaagcacataaagcggcataa

SEQ ID NO: 473503 - DNA, 780 bp, Shigella flexneri
atgcgctatgttgccggacaacctgcggaaaggatcttaccgccggggtcttttgcgagcatcggccaggcattaccacctggagaaccgttaagtaccgaagagcgtattcggatcctggtgtggaacatatacaaacagcaacgcgctgaatggttgtcggtattaaagaactacggcaaagatgcacatctggtgttattgcaggaagcgcagacaacgccagagttagtacagtttgcgaccgctaactatcttgccgccgatcaggtgcccgctttcgtgctgccacaacatccttccggtgtaatgaccctttcggcggcgcatccagtgtattgctgcccgttacgtgaacgagaacccattttgcgtctggcgaagtcggcactggtgacggtctatccattacctgacacccgcctgttgatggtggttaatatacacgccgtcaacttcagtctgggcgtggatgtctatagtaagcagttacttcctattggtgatcagatagctcaccacagcggcccggtcattatggcgggagatttcaatgcctggagccgtagaaggatgaacgcgttatatcgctttgcgcgggaaatgtcgctgcgccaggtgcgttttaccgatgatcagcgccgtcgggcgtttggccgcccgctcgattttgttttctaccgtggtctgaacgtcagcgaagcttctgtattggttacgcgcgcttccgatcacaatccgctactcgttgaattcagtcccggcaagcctgataaataa

SEQ ID NO: 473504 - DNA, 915 bp, Shigella flexneri
atgaaagccacgtcggaagaactcgccatttttgtttcggtcgtcgaaagcggcagctttagccgggcagcggaacaattagggcaagcaaactcagcggtaagccgggcggtgaaaaagctggaaatgaaacttggcgttagcctgcttaatcggaccacgcggcaacttagcctgacggaagaaggcgagcgttattttcgtcgcgtacagtcaattttgcaggagatggcagcggcagaatcagaaattatggagacgcgtaatacaccgcgtggactgttacggatcgatgccgcaactccagtggtgctgcactttctgatgccgttaattaagcctttccgtgaacgctatccggaagtcactttatcgctagtctcctccgaaacgattattaatttgatcgaaagaaaagtggatgtcgcgatacgcgctggtacgttaacggactccagcttacgtgccaggccgttatttaacagttatcgaaaaattatcgcctcccccgattatatttcccgctacgggaagccagaaacgatcgacgatttaaagcaacatgtttgcctgggattcactgaacccgcttccctcaatacctggccgatagcctgtagtgatggacaattacatgaggtgaagtacggtttgtcatccaatagtggggaaacactgaaacagctttgcctgagtggcaacgggattgcgtgtttgtccgactacatgatcgacaaagaaatcgctcgcggagaattggtggagttaatggcagataaagtgttgccagtggaaatgccattcagtgccgtctattacagcgaccgtgcggtaagtacgcgcatccgggcttttatcgatttccttagcgagcatgtaaaaacagctcccggaggagtaatgccgatcagttaa

SEQ ID NO: 473505 - DNA, 294 bp, Shigella flexneri
atgatggtggcgttttatcgccatgccgggcgcatgtggccgggaattgcgctgagctgttcgctgggaaatatcgccgcatccatcctgcttttttccaccagctcgctgaacatgacctggacgaccatcaatattgttgaagccgtggtcggggcagtgctgctacgtaaattgctgccgtggtataaccccttgcaaaatctggctgactggctgcgtctggcattcggcagcgccattgttccgcctctgttggggggtgcccctattaagttgtcaagcatgttatga

SEQ ID NO: 473506 - DNA, 642 bp, Shigella flexneri
atgactgatcagtctcatcagtgcgtcattatcggtatcgctggcgcatcggcttccggcaagagtcttattgccagtaccctttatcgtgaattacgtgagcaagtcggtgatgaacacatcggcgtaattcccgaagactgctattacaaagatcaaagccatctgtcgatggaagaacgcgttaagaccaactacgaccatcccagcgcgatggatcacagcctgttgcttgagcatttacaagcgttgaaacgcggctcggcaattgacctgccggtttacagctatgttgaacatacgcgtatgaaagaaacggtgacggttgagccgaagaaggtcatcattctcgaaggcattttgttgctgacggatgcgcgtttgcgtgacgaacttaacttctccattttcgttgataccccgctggatatctgcctgatgcgccgcatcaagcgtgacgttaacgagcgtgggcgttcaatggattccgtgatggcgcaatatcaaaaaaccgtgcgcccgatgttcctgcaattcattgagccttctaaacaatatgcggacattatcgtgccgcgcggcgggaaaaaccgcatcgcgatcgatatattgaaagcgaaaataagtcagttctttgaataa

SEQ ID NO: 473507 - DNA, 582 bp, Shigella flexneri
atgcgtctgtgtgaccgagatattgaagcctggcttgatgaaggccgtttgtcgatcaacccacgtccgccagtggagcgtattaacggcgcgacggtggatgtacgcctgggcaataaatttcgtaccttccgtggtcacacggcagcgtttatcgatctgagcggtcccaaagatgaagtgagcgccgcgcttgaccgcgtgatgagcgatgagatcgttctcgacgagggcgaggcgttctatcttcacccaggagagctggcgctggcggtgacactggagtcggtgacgctgccagccgatctggtgggctggctggacgggcgttcctctttggcgcgtctggggctgatggtgcacgtcaccgcgcaccgtatcgatccgggctggtctggttgcattgtgctggagttctacaactccggtaagctgccgctggcgctgcgtccgggcatgttaattggtgcgctgagctttgagccgctttccggcccggcggcgcgaccttacaaccgccgtgaagatgcgaaatatcgcaaccagcagggcgcggtagccagccgaatcgataaagactaa

SEQ ID NO: 473508 - DNA, 1854 bp, Shigella flexneri
atgagacgatttctgacgacgctgatgatactcttggtcgtgctggtggccgggttatctgcgttagtgttgctggtgaatccgaatgatttccgcgactatatggtcaagcaagttgctgcacgtagcggttatcaattgcagctcgacgggccactgcgttggcacgtctggccgcagcttagtatcctctccgggcgaatgtctctcaccgcccagggcgcaagccagccactggttcgcgccgacaacatgcgtctggacgtggcgcttttaccactactgagtcatcaactgagcgttaagcaggtgatgctaaaaggggcagtgatccaactgacgccgcagacggaagcggtgcgcagtgaagacgctccggttgcaccgcgcgacaataccttgccggatctgtcagacgatcgcggatggtcgtttgatatatccagtcttaaggtggcggacagcgttctggtgttccagcatgaagatgacgagcaggtgacaatccgcaatatccgcctgcaaatggaacaagatccccaacatcgtggctcatttgagttctccgggcgggttaatcgcgatcagcgcgatctcacgatatcccttaacggtacggtagatgcttctgattatccgcatgatttaacagcggctattgaacaaattaactggcagttgcagggtgccgatttaccaaaacaaggtattcaggggcaggggagtttccagtcccagtggcaggagtcacataaacgcctttcatttaaccaaattagtttgaccgccaatgacagtacgctgagcggacaagcacaggtcacgctgacagagaaaccggaatggcagctgagactgcaattcccgcaactgaatcttgacaacctcatcccgcttaatgaaaccgcgaatggtgaaaacggtgccgcgcagcaggggcagagccaatcaacgttgccgcgcccggtcatttcttcgcgtattgatgaaccggcctatcagggactgcaaggctttacagctgatattttgttgcaggccagtaacgtgcgctggcgcggaatgaattttacagatgttgccacgcaaatgaccaacaagtcgggtttgctggaaattactcaactgcagggcaagcttaacggtggaaaggtttcactgccgggcacgctggacgcgacatcaataaatccgcggataaacttccagccacggctggagaacgttgagattggtaccattctgaaggcgtttaactatccgatttcgttgaccggaaaaatgtcactggctggtgatttctccggtgctgacatagatgccgacgcattccgccacaactggcaaggacaggcgcatgttgagatgaccgacacacgtatggaagggatgaacttccagcagatgattcagcaagcggtagagcgtaatggcggtgatgtgaaggccgctgaaaacttcgataacgtgacgcggcttgaccgctttaccaccgatttgacgttgaaggatggcgtcgtgacgttaaacgacatgcaaggtcaatcgcctgtgctggcgctgacaggggaaggcatgttgaatctggcagatcaaacctgcgacacccagtttgatattcgggtcgtgggtggctggaacggggaaagcaaactgattgatttcctcaaagaaacgccagtaccgctgcgggtttatggcaactggcagcaactcaattacagcctgcaagtggatcagttactgcgcaaacatctacaggacgaagcgaaacgtcgcctgaatgactgggccgagcggaataaagattcccgcaatggcaaagatgtgaagaagttgctggagaagatgtag

SEQ ID NO: 473509 - DNA, 1584 bp, Shigella flexneri
atggaatggattgccgatccgtctatctgggccgggttaatcacgctgattgtgatcgaactggtcctcggcattgataacctggtctttattgccatcctcgccgaaaaactaccgccgaagcagcgcgaccgcgcacgggttaccgggctgctgctggcgatgttaatgcgcctgttactgctagcgtcaatctcctggctggtcaccctgactcaaccgctgttcagcttccgctcgtttacctttagcgcccgcgacttaatcatgctgtttggtggtttcttcctgttgttcaaagccacgatggagctgaacgaacggctggaagggaaagacagcaataatcccacacaacgcaaaggtgcgaagttctggggcgtggtgacgcaaattgtggtactggacgccattttctcactcgactcagtgattaccgccgtcgggatggtcgaccatttactggtcatgatggccgccgtggttatcgctatcagcctgatgttgatggccagcaagccgttaacgcaatttgttaacagtcacccgaccatcgttattctctgcttaagcttcctgttgatgattggctttagcctggtggcagaaggtttcggcttcgtcattccgaaaggctacctgtacgctgccattggtttctcggtgatgatcgaggcactcaatcagttggctatctttaaccggcgacgttttctttccgctaatcagacgctacgccagcggactaccgaagcggtaatgcgcctgcttagcgggcaaaaagaagatgcggaactggacgccaaaaccgcgtccatgctggtggatcatggaaaccagcagatctttaatccgcaggaacggcggatgattgagcgggtacttaatcttaaccagcgtaccgtaagcagcattatgacgtcgcgccacgatattgagcatatcgatctcaacgcgccggaagaagaaatccgccagttgctggagcgaaatcagcatacgcggctggtggttaccgacggtgatgacgcagaagatttgctcggtgttgttcacgttatcgacctgctacaacagtcactgcgcggcgaaccgctcaacctgcgggtgttgattcgccagccgctggtgttcccggaaaccttgccgttgttaccagccctggagcagttccgtaatgcccgcacgcactttgcttttgtggtggatgagtttggctcggtggaagggattgtgacattaagtgacgtcactgaaaccattgccggtaacttaccgaacgaagtggaagagatcgacgcccgccatgatattcagaagaatgcggacggttcctggacggcgaatggtcatatgccgctggaggatctggtgcaatatgtgccgctgccgctggatgaaaaacgtgaatatcacaccattgccgggctgttgatggagtatttgcagcgtattccaaaacctggcgaagaagttcaggtgggggattatttgcttaaaacgttgcaggtggaaagccatcgcgtgcagaaggtgcagattataccgctgcgtaaggatggcgagatggagtacgaggtgtga

SEQ ID NO: 473510 - DNA, 1140 bp, Shigella flexneri
atgatgaaatccaaaatgaaattgatgccattattggtgtcagtaaccttgataagcggttgcacagtacttccgggcagcaatatgtcgacgatgggcaaagacgtcatcaaacagcaggacgctgatttcgatctcgacaaaatggtgaatgtttatccgctgaccccgcgcctgattgaccaattacgcccacgcccgaatgtagcgcgccccaatatgacgctggaaagcgagatcgcgaattaccagtatcgcgtcgggccgggggacgttcttaatgtcaccgtctgggatcacccggaactcaccacgccagctggtcagtaccgcagctccagcgacaccggcaactgggtacagcctgacggcactatgttttacccgtatatcggcaaggttcacgtagtcgggaaaacgctcgctgaaatccgcagtgatattaccgggcgcttagcgacgtacatcgctgacccgcaggtggacgttaatatcgccgccttccgctcacaaaaggcctatatctcaggtcaggtgaataaatccggtcaacaggcgatcaccaacgtaccactgaccattctcgacgccatcaacgccgcaggtggcctgaccgacaccgctgactggcgcaacgtggtgctaacacacaatggtcgtgaagaacgcatttctttacaggcgctgatgcaaaacggcgacctcaatcagaaccgactgctttatcccggcgatattctctacgtgccgcgtaatgatgatctgaaagtatttgtgatgggtgaagtgaagaaacagagcaccctgaaaatggactttagcggcatgaccctgactgaagctctggccaatgccgaaggtatcgacatgaccacctccaacgccagcggcatctttgtcattcgtccgctgaaaggcgagggcgggcgtaacggcaagattgccaatatctaccagctggatatgtccgatgcgacgtcgctggtgatggcgacagaattccgcctgcaaccttatgacgtggtgtatgtcaccaccgccccggtttcccgctggaaccgtctgatcaatcagttgctgccaactattagcggtgtccgttacatgacggatacagccagcgacattcataactggtaa

SEQ ID NO: 473511 - DNA, 444 bp, Shigella flexneri
atgtttaacaacatcttagttgtctgtgtcggcaatatttgccgttccccgatggcggaacgcttactgcaacgttatcacccggaactgaaagtggagtccgctggactcggcgcgctggtcggtaagggcgctgatcctaccgctatcagcgtcgccgcagaacatcaactgtctctggaaggccactgtgcacgacaaatcagccgccgcctgtgtcgcaactatgacctgattttgaccatggataagcgccatatcgaacgcttatgcgagatggcaccggagatgcgcggcaaagtgatgctgtttggtcactgggataacgaatgtgaaatccccgatccgtatcgcaaaagccgggaaacgtttgcagcggtgtacacattacttgaacggtctgcccgccagtgggcgcaggcattgaacgcagagcaggtataa

SEQ ID NO: 473512 - DNA, 2163 bp, Shigella flexneri
atgacagaaaaagtaaaacaacatgccgctccggtaacgggcagtgatgaaatcgatattggtcgcctggtcggcaccgtcattgaagcgcgctggtgggtgattggcatcaccgtcgtatttgccctctgtgccgtggtttacactttcttcgccacgccgatttatagtgccgacgcactggtacaaatcgagcaaaacagcggcaattcgctggtgcaggatatcggctcggcattagccaacaaaccgcctgcatcggacgccgagatccagttgattcgttcgcgtctggtgcttggtaaaacggtggacgatctcgacctcgatattgcggtgagcaaaaacacgttcccgattttcggggcgggctgggatcgcctgatggggcgtcagaacgagacggtgaaagtgactacctttaaccgcccgaaagagatggcggatcaggtgtttacgcttaatgtgctggatgacaaaaactacaccctgagcagtgatggcggctttagcgcccgtgggcaagcgggccagatgctgaaaaaagaaggcgtcacgctgatggttgaagccattcacgcccgcccgggcagtgagtttaccgtcaccaaatactccacgttggggatgatcaaccaactgcaaaacagcctgacggtaacggagaacggcaaagacgcaggcgtactgagcctgacttataccggtgaagatcgcgaacagatccgcgacattcttaacagcatcgctcgtaactatcaggaacaaaatattgagcgcaaatcggcggaagcgtcgaaaagcctcgctttcctcgcgcaacagttaccggaagtacgtagccgcctcgatgttgccgaaaacaaactgaatgccttccgtcaggataaagattctgttgatctgccgcttgaagcgaaagcggtgctcgattcgatggtgaacatcgacgcgcagttgaacgaactgacctttaaagaggcggaaatctccaagctgtacaccaaagttcacccggcgtaccgcacgctgctggagaaacgtcaggcgctggaagaagagaaagccaaacttaacggtcgcgtaacggcgatgccgaaaaaccagcaggaaattgtccgtctgacccgcgatgtcgagtctggtcagcaggtctatatgcaactgctgaataaagagcaggagctgaaaatcaccgaagccagcaccgtcggcgatgtgcgcattattgacccggcaatcactcagcctggcgtgctaaaaccgaagaaagggctgattatcctcggcgcgattatccttggcctgatgctctctatcgtgggtgtgctgctgcgctcgttgtttaatcgcggcatcgaaagcccgcaagtgctggaagaacacggaatcagcgtctatgccagcatcccgctgtcggagtggcagaaagcgcgcgatagcgtcaaaaccatcaaaggggttaaacgctataaacagagccagctactggcagtggggaatccaaccgatctggcgattgaagccatccgtagtctgcgtaccagtctgcacttcgcgatgatgcaggcgcagaacaatgtgttgatgatgaccggggttagcccgtcaatcggtaaaacctttgtctgcgccaacctggcggcggtgatcagccagaccaataaacgcgtgttgttgatcgactgcgatatgcgcaaaggctacacccacgagctgttgggcaccaataatgtcaatgggctgtcggagattctgattggtcagggcgatattactaccgctgctaaaccgacctctattgccaaatttgacctgatcccgcgcggtcaggtgccgccaaatccttctgaactgttaatgagcgaacgctttgccgaactggtgaactgggcgagtaaaaactatgacctggtgttgattgatacgccgccgattctggcagtgaccgatgcggcaattgttggtcgtcatgtcggaaccacgttaatggtggcgcgttatgcggtcaacacattgaaagaagtggaaaccagtctgagccgctttgagcaaaacggtattccggtgaaaggggtgattctgaactccatcttccgccgcgccagcgcgtatcaggattatggctattacgaatacgaatataagtcggatgcgaaataa

SEQ ID NO: 473513 - DNA, 840 bp, Shigella flexneri
atgaaagacaatccgctgatctcaatctatatgccaacctggaaccgccaacaactggcgattcgggcgataaaatcggtcctgcgccaggactacagcaactgggagatgatcatcgtggatgattgctccacctcctgggaacaactgcaacagtacgtcactgccctcaacgatccgcgtatcacttacatccacaacgacattaacagcggggcgtgcgcggtgcgtaaccaggcgattatgctggcgcaaggggaatacatcaccgggatcgatgatgatgatgaatggacgcccaaccgcctgagcgtcttcctcgcccataaacagcaactggtcacacacgcctttttgtacgctaacgactacgtttgccagggagaagtttattcccaaccggcgagcttaccactgtatcccaaatcgccgtactcacgccgcctgttctataaacgtaatatcattggcaatcaggtctttacctgggcatggcgtttcaaagagtgtttgttcgataccgaactgaaagcagcacaggattacgacatattcctgcggatggtggtggagtacggcgaaccgtggaaagtggaagaggcgacgcagatcctgcatatcaatcacggcgaaatgcagatcacctcgtcaccgaaaaaattctccggatacttccacttttaccgcaagcacaaagacaaattcgaccgcgccagtaaaaaatatcagctgtttaccctctaccagatccgcaataaacgtatgacctggcgcaccttgttgacgctgctgtcggtgcgtaacggcaaacgtctggctgatggtattcgggggcgctaa

SEQ ID NO: 473514 - DNA, 489 bp, Shigella flexneri
atgctggaagatctgcgcgccaacagctggagtttacgcccgtgctgcatggtacttgcctatcgcgtcgctcatttttgttcggtgtggcgcaaaaagaacgtcctcaacaatctgtgggcggccccgctgctggtgctgtatcgcattatcaccgaatgctttttcggttatgaaatccaggccgccgcgaccattggccgccgctttactatccatcacggttacgccgtagtgatcaataaaaacgtggtggcgggggatgatttcaccattcgccacggcgtcactatcggcaatcggggtgccgataacatggcatgtccacacattggcaacggcgtcgaactcggtgccaacgtcattattcttggtgatatcacgcttggtaacaacgtcaccgtgggtgcgggcagcgtggtgctcgactctgtcccggacaacgcgctggtggtgggagaaaaagcgcgagtgaaggtgattaaatga

SEQ ID NO: 473515 - DNA, 1218 bp, Shigella flexneri
atgaatattctgcaatttaatgtgcgactggcggaaggcggggcagcaggtgtggcgttagatctccaccagcgtgcgctgcaacaggggctggcgtcacattttgtctacggctacggcaaaggcggcaaagagagcgtcagccatcagaactatccgcaggtcatcaaacatacgccgcggatgaccgcgatggcgaacattgcgttgtttcgtctgtttaatcgcgatctgttcggcaatttcaatgagttatatcgcaccattactcgcacaccgggtccggtggtcctgcattttcatgtgctgcacagctactggttgaatcttaacagcgtggtgcgcttttgcgaaaaagtgaaaaaccataaaccggatgtcaccctggtctggacgctgcacgaccactggagtgtaaccggacgctgcgcctttaccgacggttgcgaaggctggaaaacgggctgccagaaatgcccgaccttaaataactatccgccggtgaagattgatcgcgcgcaccagctggtggcgggcaaacgccagttattccgcgagatgctggcgctgggctgtcagtttatttcccccagccagcatgtggctgacgctttcaatagtctgtacgggccagggcgttgccggattatcaataatggcattgatatggcaaccgaagcgattctggcagatctgcctccggtgcgcgaaactcagggcaagccgaaaatcgcagtggtggcgcatgacctgcgttacgacggcaaaactaaccagcaactggtgcgtgagatgatggcgctgggcgacaaaatcgaactgcatacctttggtaagttctcgccgttcaccgctggcaacgtggttaatcacggctttgaaactgacaagcgcaagttgatgagcgcgctcaatcagatggatgcgctggtgttcagttctcgtgtcgataactacccgctgattttgtgtgaggcgctatcgattggcgtgccggtgattgccacccatagcgatgcggcgcgggaagtgctgcaaaaatccggtggtaaaaccgtcagtgaagaagaggtgctgcaactggtacagttaagcaaaccggaaatcgcgcaggcgatatttggtaccacgctggctgagttcagccaacgcagtcgcgccgcctacagtggacaacagatgctggaggagtatgtcaacttctatcagaatctgtag

SEQ ID NO: 473516 - DNA, 825 bp, Shigella flexneri
atgtcaacttctatcagaatctgtagctacctgctgctgccactgatctacctgctggttaacgtcaaaatcgcccagcttggcgaaagtttccccatcaccatcgtcacttttttacctgtcttgttactgctgtttttagaacgcatcagcattaaaaaattgatgattgccttagggattggcgcgggactcacggcgtttaactacctgtttggtcagtcgttggatgccggtaaatacgtcacttcaactatgctgtttgtctatattgtgatcattattggcatggtgtggagtattcgttttaaaacaatttcgccacacaaccatcgtaagatattacgtttcttttatctggtggtcggactggtggtggcgctggcggcggtggagatggcgcaaattatcctcaccggtggcagcagtattatggagtcgatttcgaaatatctgatttacagcaacagctatgtgctgaatttcattaaattcggcggcaagcgcacgacagcactttatttcgaaccggcatttttcgctctggcattaatctcaatttggctcagcatcaaacagtttggtatcaaaacgcctaaaacagatgccctgattctcgcagggataatattatccggatcgttttcaggggttatgacctttatcctgttttatttgctggagtgggcatttcaatatctgaataaagaggcgattaagaaaaaattaccgttagcattgatttctctggctgtattccgggttggtgtggtaatcgcgtttccttatatttccacccgtctgggcgatttaggtacggggtaa

SEQ ID NO: 473517 - DNA, 225 bp, Shigella flexneri; identical to SEQ ID NO: 133446

SEQ ID NO: 473518 - DNA, 1125 bp, Shigella flexneri
atggctacgctgccatttatgaccatttacttgagtcgccagtacagcctgagtgtcgatctaatcggttatgcgatgacaattgcgctcactattggcgtcgtttttagcctcggttttggtatcctggcggataagttcgacaagaaacgctatatgttactggcaattaccgccttcgccagcggttttattgccattcctttagtgaataacgtgacgctggttgtgctcttttttgccctcattaactgcgcctattctgtttttgctaccgtgctgaaagcctggtttgccgacaatctttcgtccaccagcaaaacgaaaatcttctcaatcaactacaccatgctaaacattggctggaccatcggtccgccgctcggcacgctgttggtgatgcagagcatcaatctgcccttttggctggcagctatctgttccgcgtttcccatgcttttcattcaaatatgggtaaagcgcagcgagaaaatcatcgccacggaaacaggcagtgtctggtcgccgaaagttttattacaagataaagcactgttgtggtttacctgctctggttttctggcttcttttgtaagcggcgcatttgcttcatgcatttcacaatatgtgatggtgattgctgatggggattttgccgaaaaggtggtcgcggttgttcttccggtgaatgctgccatggtggttacgttgcaatattccgtgggccgccgacttaacccagctaacatccgcgcgctgatgacagcaggcaccctctgtttcgtcatcggactggtcggttttattttttccggcaacaacctgctattgtggggtatgtcagctgcggtatttactgtcggtgaaatcatttatgcgccgggcgagtatatgttgattgaccatattgcgccgccaggaatgaaagccagctatttttccgcccagtctttaggctggcttggtgccgcgattaacccattagtgagtggcgtagtgctaaccagcctgccgccttcctcgctgtttgtcatcttagcgttggtgatcattgctgcgtgggtgctgatgttaaaagggattcgtgcaagaccgtggggggcagcccgcgctttgttgatttaa

SEQ ID NO: 473519 - DNA, 900 bp, Shigella flexneri
atgtcgcgaaaagatggggtgttggcgctactggtagtggtcgtatgggggctaaattttgtggtcatcaaagtggggcttcataacatgccaccgctgatgctggccggtttgcgctttatgctggtcgcttttccggccatcttttttgttgcacgaccgaaagtaccactgaatttgctcttggggtatggattaaccatcagttttgcgcagtttgcctttctgttctgcgccattaactttggtatgcctgctggactggcttcgctggtgttacaggcacaggcgttttttactatcgtgcttggcgcgtttactttcggggagcgactgcatggcaaacaattggcggggatcgccttagcgatttttggcgtactggtgttaatcgaagatagtctgaacggtcagcatgtggcgatgctcggctttatgttgaccctggctgcagcatttagttgggcgtgtggcaacatcttcaataaaaagatcatgtcgcactcaacgcgtccggcggtgatgtcgctggtaatctggagcgctttaatcccaatcattcccttctttgttgtctcgctgattttcgatggttccgcatccatgattcacagtctggttactattgatatgaccaccatcttgtcgctgatgtatctggcgtttgtggcgacaattgttggttatgggatctgggggacgttactgggacgctatgaaacctggcgggttgcaccgttatcgttactggtgcccgtagtcggactggcaagtgcggcactattgttggatgaacgcttaacgggtctgcaatttttaggtgcggtgctcattatgaccgggctgtatatcaatgtatttggcttgcggtggcgtaaagcggtaaaggtgggaagttaa

SEQ ID NO: 473520 - DNA, 219 bp, Shigella flexneri
atgaaaccactttcatccgcaatagcagctgcgcttattctcttttccgcgcagggcgttgcggaacaaaccacgcagccagttgttacttcttgtgccaatgtcgtggttgttcccccatcgcaggaacaaccaccgtttgatttaaatcacatgggtactggcagtgataagtcggatgcgctcggcgtgccctattataatcaacacgctatgtag

SEQ ID NO: 473521 - DNA, 384 bp, Shigella flexneri
atgtccagacgcaatactgacgctattaccattcatagcattttggactggatcgaggacaacctggaatcgccactgtcactggagaaagtgtcagagcgttcgggttactccaaatggcacctgcaacggatgtttaaaaaagaaaccggtcattcattaggccaatacatccgcagccgtaagatgacggaaatcgcgcaaaagctgaaggaaagtaacgagccgatactctatctggcagaacgatatggcttcgagtcgcaacaaactctgacccgaaccttcaaaaattactttgatgttccgccgcataaataccggatgaccaatatgcagggcgaatcgcgctttttacatccattaaatcattacaacagctag

SEQ ID NO: 473522 - DNA, 435 bp, Shigella flexneri
gtgaaaagtaccagcgatctgttcaatgaaattattccattgggtcgcttaatccatatggttaatcagaagaaagatcgtctgcttaacgagtatctgtctccgctggatattaccgcggcacagtttaaggtgctctgctctatccgctgcgcggcgtgtattactccggttgaactgaaaaaagtgttgtcggtcgacctgggagcactgacccgtatgctggatcgcctggtctgtaaaggctgggttgaaaggttgccgaacccgaatgataagcgcggcgtactggtaaaacttaccaccagcggcgcggaaatatgcgaacaatgccatcaattagttggccaggacctgcatcaagaattaacaaaaaacctgacggcggacgaagttgcaacacttgagcatttgcttaagaaagtcctgccgtaa

SEQ ID NO: 473523 - DNA, 666 bp, Shigella flexneri
atgttagatttgtttaaagcaattggcctggggctggtggtgttgctgccgttagctaacccattaacaactgtcgcgctatttcttggcctggcaggcaacatgaacagtgccgaacgtaatcgtcagtcgttgatggcctcggtgtacgtatttgccatcatgatggtggcgtattacgctgggcaactggtgatggatacatttggcatttcgattcccggtctgcgaattgcaggcggcttaatcgtcgcgtttatcggttttcggatgctttttccgcaacagaaagcgattgattcaccggaggcgaaaagcaagtcggaagagctggaagatgaacccagtgccaatattgcctttgtaccactggcaatgccaagtaccgccggtccgggaaccatagcgatgattattagctcggcgtccacagtgcgtcagagttcaaccttcgctgattgggtactgatggttgcgccgccgctgatctttttcctggtggcggttattttgtggggaagcctacgcagctccggcgcaattatgcggctggtgggcaagggtggcattgaagcgatctcccgcctgatggggttcctgctggtatgtatgggtgtgcagtttattattaacggcatcctggaaatcattaaaacgtaccattaa

SEQ ID NO: 473524 - DNA, 1191 bp, Shigella flexneri
atgacaacaaacactgtttcccgcaaagtggcgtggctacgggtcgttacgctggcagtcgccgccttcatcttcaacaccaccgaatttgtccctgttggcctgctctctgacattgcgcaaagttttcacatgcaaaccgctcaggtcggcatcatgttgaccatttacgcatgggtagtagcgctaatgtcattgccttttatgttaatgaccagtcaggttgaacggcgcaaattactgatctgcctgtttgtggtgtttattgccagccacgtactgtcgtttttatcgtggagctttaccgttctggtgatcagtcgcattggtgtggcttttgcacatgcgattttctggtcgattacggcgtctctggcgatccgtatggctccggccgggaagcgggcacaggccttgagtttaattgccaccggtacagcactggcgatggtcttaggtttaccgctcgggcgcattgtggggcagtatttcggctggcgaatgaccttcttcgcgattggtattggggcgcttgttacccttttgtgcctgattaagttacttcccttactgcctagtgagcattccggttcattgaaaagcctcccgctattgttccgccgcccggcattgatgagcatttatttgttaactgtggtggttgtcaccgcccattacacggcatacagctatatcgagccttttgtgcaaaacattgcgggattcagcgccaactttgccacggcattactgttattactcggtggtgcgggcattattggcagcgtgattttcggtaaactgggtaatcaatatgcgtctgcgttggtaagtacggcgattgcgctgttgctggtgtgtctggcactgctgctacctgcggcgaacagtgaaatacacctcggggtgctgagtattttctgggggatcgcgatgatgatcatcgggcttggtatgcaggttaaagtgctggcgctggcaccagatgctaccgacgtcgcgatggcgctattctccggcatatttaatattggaatcggggcgggtgcgttggtaggtaatcaggtgagtttgcactggtcaatgtcgatgattggttatgtgggcgcggtgcctgcttttgctgcgttaatatggtcaatcattatatttcgccgctggccagtgacactcgaagaacagacgcaatag

SEQ ID NO: 473525 - DNA, 1116 bp, Shigella flexneri
atggttacgccagtaagcatcagcaattacatatctcttcctgatgattttcccgctcgtaatattgcacctcaagtaaaagaagttttaaaggattttattgatgcactcagtaccataatatgtgatgaagagtggcgcacgtctttaaacaccaactcagccacaaaaaagatatttaacaaccttgataacttatcatatattcagaggacttcttttcggggtaacgacacactatacaatgaaaaggttcagtttaaactcacttatcctgtcaagaatggaagacacaaagaaaatattgaatttcaggtagtaataaatttaagccctatttatttagataattttcgccatgatggagaaattaatattttttgcgctcccaacccaaagcctgtcactatggggcgcgtatttcagaccggcgtcgagcgtgtgctctttctgtttatgaatgattttattgaacaatttccaatgatcaaccttggcgcccccatcaaaagagcgcatacaccacatattgaacccctgcctccggatcaccataccgctgcagattacttacgccagtttgatttgcttgtcctgaattttatctctcgcggtaattttgtcatactcccccgattatggaataactctgaggttcacagatggttcgtcaataaagatcctaacttgatcaccgccattctcgacataacggacagcgaattaaaagaggatttattgcaaagcctgatggattcattaggttctaacaaacatgtacaacccgaagtctgcatctgcttcttatcccttttagcagaacaagaatctcctcattttcaggacttgtttttatttttcgccaatatgttattgcactatcaccaatttatgaatcccaatgaaagtgatctgaatgacgtgttgatgccagcatcattaagtgatgataaaattatcaaacatatggcgcgcaggcccctcaaactgtttgtaaaaaatgaaacgccgccaaaagttactcacgaagacctggtgaaaaacaggcctcgctcccctgtcagaccacctatacccgcaaccgccaaaacgccagacctccctgaacgtcattaa

SEQ ID NO: 473526 - DNA, 936 bp, Shigella flexneri
atgcgtggcgctgttcccatcattcttgcaggtaacggctacttacttaaacatgcgccgaatgtgatgggctgtgctcagctcattgcccaagtgtttaaagatgcgggaatcccgcaaggcgtatatggctggctgaatgccgacaacgacggtgtcagtcagatgattaaagactcgcgcattgctgctgtcacggtgaccggaagtgttcgtgctggagcggcactgaaaaaatgcgtactggaactgggcggttcggatccatttattgtgcttaacgatgccgatctggaactggcggttaaagcggcggtagccggacgttatcagaataccggacaggtttgtgcagcggcaaaacgctttattatcgaagagggaattgcttcggcatttaccgaacgttttgtgtcagctgcggcagccttgaaaatgggcgatccccgtgatgaagagaacgctctcggaccaatggctcgttttgatttacgtgatgagctgcatcatcaggtggagaaaaccctggcgcagggtgcgcgtttgttactgggcggggaaaagatggctggagcaggtaactactatccgccaacggttctggcgaatgttaccccagaaatgaccgcgtttcgggaagaaatgtttggccccgttgctgcaatcaccattgcgaaagatgcagaacatgcgctggaactggctaatgatagtgagttcggcctttcagcgaccatttttaccaccgacgaaacacaggccagacagatggcggcacgtctggaatgcggtggggtgtttatcaatggttattgtgccagcgacgcgcgagtggcctttggtggcgtgaaaaagagtggctttggtcgtgagctttcccatttcggcttacacgaattctgtaatatccagacagtgtggaaagaccggatctga

SEQ ID NO: 473527 - DNA, 927 bp, Shigella flexneri
gtggcagtcgccatggataatgcaattttagaaaacatcttgcggcaagtgcggccgctcattggtcagggtaaagtcgcggattatattccggcgctggctacagtagacggttcccgattggggattgctatctgtaccgttgacggacagctttttcaggccggagacgcgcaagaacgtttttccattcagtctatttccaaagtgctgagtctcgttgtcgccatgcgtcattactccgaagaggaaatctggcaacgcgtcggcaaagatccgtctggatcaccgttcaattctttagtgcaactggaaatggaacagggtattccgcgtaatccgttcattaataccggtgcgctggtggtctgcgatatgttgcaagggcgactaagcgcaccacggcaacgtatgctggaagtcgtgcgcggcttaagcggtgtgtctgatatttcatacgatacggtggtagcgcgttccgaatttgaacattccgcgcgaaatgcggctatcgcctggctgatgaagtcgtttggcaatttccatcatgacgtgacaaccgttctgcaaaactactttcattactgcgctctgaaaatgagctgtgtagagctggcccggacgtttgtctttctggctaatcaggggaaagctattcatattgatgaacctgtggtgacgccaatgcaggcgcggcaaattaacgcgctgatggcgaccagtggtatgtaccagaacgcgggggagtttgcctggcgggtgggactaccggcgaaatctggcgttggtggcggtattgtggcgattgttccgcatgaaatggccatcgcagtctggagtccggaactggatgatgcaggtaactcgcttgcgggtatcgccgtccttgaacaattgacgaaacagttagggcgttcggtttattaa

SEQ ID NO: 473528 - DNA, 345 bp, Shigella flexneri
atgcagtctctcgatccactcttcgcgcgtttatcccgttcaaaatttcgctctcgctttcgtctgggcatgaaagagcgtcagtattgcctggagaaaggcgcgccagtcatcgaacaacatgcggcggattttgtcgctaaacgtcttgctccggcattaccggctaatgacggtaagcaaacccccatgcgcgggcatccggtgtttatcgctcagcacgccaccgcgacctgctgtcgcggttgtctggctaagtggcataacattccgcagggtgtttcgttaagcgaagaacaacaacgttatatcgtggcggtaatctatcactggctggttgtatag

SEQ ID NO: 473529 - DNA, 1419 bp, Shigella flexneri
atgcatgtacaccccatttcaactttccgtttgttccaggaaggtcatctgctacgtaatagcatcgctatttttgcgctaaccacgctgttctattttattggtgcagagttacggctggttcacgaactttctcttttctggccgctgaatggcgtaatggcgggggtgtttgcccgctatgtctggcttaatcgactgcattactatgcgatcagttatgtggcgatgctggtttatgatgccataaccaccgaatggggactggtttcactggttatcaatttctccaatatgatgtttattgttaccgtcgccttactggtcgtgcgggataagcgtctggggaaaaataagtatgagccagtaagtgctttacggctatttaattactgtctgattgccgcattattatgcgctattgtcggggcgattggttcggtcagtattgatagtctggatttctggcctttgcttgcggactggttcagtgagcaattctcaacgggcgtgttgatcgtgccttgtatgctgacgttggctattcctggagtgctgccgcgctttaaagcagaacagatgatgcccgccatcgcgcttattgtgtcggttattgcctcggtagtcattggcggagcggggagtctggcgttcccgctgcctgcattaatctggtgtgcagtgcgctatacgccgcaggtaacatgtctgttgacctttgtcaccggtgcggtggaaatcgtactggtggcaaattcggtgattgatatctcggtcggttcgccgttctccattccggaaatgttctccgcacgtctcggtattgccacgatggcgatatgcccaattatggtttcttttagcgtggcagcgatcaatttgctaatgaagcaagttgcgctgcgagccgactttgattttctgactcaggtttactcacggtccggtctttatgaggcgctgaaaagtccatcgctgaaacagacacaacatctgacggtcatgctgcttgatatcgactatttcaaaagcattaacgataactatggacatgaatgtggcgataaagtgttaagcgtgtttgcccggcatattcagaagattgtcggtgataaggggctggtggcgcgcatgggcggcgaagaatttgctgttgcagtgccgtcggtgaatcctgtcgatggtctgctaatggcggaaaaaatccgtaaaggcgttgaactgcaaccattcacctggcaacaaaaaacgctttatctcacggtaagtattggcgtcggtagtggtcgcgcatcgtaccgaacgctgaccgatgattttaataaattgatggtcgaagccgatacgtgtctgtatcgctcgaagaaagatgggcgcaaccgtaccagcactatgcgttacggtgaggaagttgtctga

SEQ ID NO: 473530 - DNA, 1452 bp, Shigella flexneri
gtgaaaacactaaatcgtcgcgattttcccggtgcacagtatccagaacgtatcattcagtttggtgaaggtaacttcctgcgcgcctttgttgactggcaaatcgatctcctgaatgagcacaccgatctgaattctggcgtggtcgttgttcgtccgattgaaacttcattcccgccgtcactgagcacgcaggatggtctgtacaccaccattatccgtggcctgaatgagaagggggaagcggtcagcgacgcgcgtctgattcgctcggttaatcgtgaaatcagcgtctacagtgaatacgatgaattcctgaaactggcgcacaacccggaaatgcgctttgttttctctaacaccaccgaagcgggtatcagctaccatgcgggcgataaattcgatgacgcgccagcggtaagctatccggcaaaactgacccgtctgctgttcgaacgctttagccatttcaacggtgcgctggataaaggttggatcatcattccgtgtgagttgattgactacaatggcgacgcgttgcgtgaactggtgctgcgctatgcgcaagagtgggcactgccagaagcatttattcaatggctggatcaggctaacagcttctgttctacgctggtggaccgtatcgttaccggttatccgcgcgatgaagtggctaaactggaagaagaactgggttatcacgatggtttcctcgacaccgctgaacacttttacctgtttgtgattcaggggccgaaatccttagcgactgagctgcgcctggacaaatatccgctcaacgtgctgattgttgacgatattaaaccgtataaagaacgcaaagtggcaatcctcaacggtgcgcacaccgcgctggtgccggtggcgttccaggcagggctggataccgtaggtgaagcgatgaacgatgctgaaatttgcgcattcgttgaaaaagccatctacgaagaaattattccggtactggatttgcctcgtgatgaactggaatctttcgccagtgcagtcaccgggcgtttccgtaacccgtacattaagcatcagctgctgtctatcgcgctcaacggtatgaccaagttccgcacccgcatcctgccgcagctgctggcagggcagaaggcaaatggcacacttccggcgcgccttactttcgcattagcggcattgattgcgttctatcgtggtgagcgtaacggagaaacatatccggtacaggacgatgcacactggctggaacgttatcagcaactctggagccagcatcgtgaccgtgttatcggtacccaggaactggtagcgattgtgttggcagaaaaagaccactgggagcaggacctgacgcaagtgcctggtctggtcgagcaggttgctaatgacctggatgcgattcttgaaaaagggatgcgcgaagctgtacgtccgttgtgctaa

SEQ ID NO: 473531 - DNA, 267 bp, Shigella flexneri
atggtgaggtacttcgggttccttgccaaccgggtgtgtggagagaagctgccgcaggtgtaccgtgctctggggatggataaaccggaaccagtggcgaaagtgtgctatgcacaaatggtgaaacagttcctgagtcgtgacccgttcgaatgcgtgctgtgtggcggccggatggtataccgccgggtcatcgcgggactgaatgtggaggggctgaagaaaaacgcgcgggatatcagtctgctgaggtatatgccggcctga

SEQ ID NO: 473532 - DNA, 303 bp, Shigella flexneri
atgaaaaaaagaaattttagcgcagagtttaaacgcgaatccgctcaactggttgttgaccagaaatacacggtggcagatgccgccaaagctatggatgttggcctttccacaatgacaagatgggtcaaacaactgcgtgatgagcgtcagggcaaaacaccaaaagcctcccccattaccccggaacaaattgaaatccgtgagctcaggaaaaagctacaacgcattgaaatggagaatgaaatattaaaaaaggctaccgcgctcttgatgtcagactccctgaacagttctcgataa

SEQ ID NO: 473533 - DNA, 903 bp, Shigella flexneri
gtgtggtttgacgaagagccaccatacagcatttatggcgaaggtcttacccgtaccaacaaatacgggcaattctcaattctgacgtttaccccgctgatggggatgtctgacgttgttaccaagttcctgaagaaccccagcaagtcgcagaaagtggtcaacatgaccatctatgacgctgagcactataccgacgagcagaaagagcaaatcatcgcatcatatcccgagcatgagagagaggcgcgtgctcgcggtattcctacgatgggtagtggtcgaatcttccagataccggaagagacgattaagtgtcagccgttcgagtgtcctgatcacttctacgtaattggcgggatggatttcggatgggatcacccacaggcgcaagttcagctttggtgggataaggaggcagacacaatctacgtttcacgcgtgtggaaggcgaaagaaaaaacagccgttcaggcgtggggagccgttaaatcatgggcgcataaagtgccaaccgcatggcctcatgatggaaaccagcacgagaagggcggcggtgagcagctcaaagggcagtatgcagacgctggatttatgatgttgcaggagcatgcgacatggcctgatggcggtaacgctgttgagccaggcatcactgaattgcgcgacatgatgctcgatggtcgcttcaaagtattcaatacctgtgagccattctttgaggagttccgcctctatcaccgtgatgaaaacgggaaaatcgtcaagcttaacgacgacgtgctatccgccgttcgctatgcatacatgatgcgccgcttcgcaaaaatgatgcgcgacatcaaaaaaccaaaagagaaaaagataccagccccaatcaggcccatcgcacggagaacttaa

SEQ ID NO: 473534 - DNA, 471 bp, Shigella flexneri
atggccgacgaaaacagactcaattccattctgtgtaagtttgacgcagactggatggcgagcgatgaagccagaaccgaggcgacaaatgacctgtattttagccgagtgtcgcaatgggatgactggctatcaaactacactaccctgcaatatcgcggacaattcgatgttgttcgcccgggggtcaggaaactggtcgcagagatgcgccggaaccctgtcgacgttctcttccgacccaaagacggcgctaatcctgatgcagccgatgtattgatggggatgtatcgtactgatatgcgccataacacggcaaagattgccgttaacgttggcgttcgtgagcagatagagtcaggcgttggtgcatggcgtctggtcacgcagtacgaagacaacgatccaacaagcaacaatcaggtaatccgacgcctgccaatccatgaagcctgctcacacgtcatatga

SEQ ID NO: 473535 - DNA, 1677 bp, Shigella flexneri
atggataagagcgacgctaagcactgcacggtgattaacgccttgtcgcgcaatggctggaaagagttcgcagaggattacggtattgacccggataccctgccatctttccagaatcctaacgatacatggctattcccgtgggtgtcgaatgatgtcgtctacgtcgctgagtattacgaggtagaagaggagaaggagaaggtcttcatctaccgcgacccgctgacaggtgagccggtcagctattaccagcaggatatcaaagacgtcatcgacgacctggctaatcgtggattcattaaggtagcagagcgcaaggtgaagcgtcggcgtgtgtataagtcgatcatcacctgtacgcagatactgaaagaccgcgagaagatagccggagagcatattccaatcgttccagtgtatggcgaatggtcattcgctggtgacaaggagtgctacgagggtgtggtaaggctgacgaaagacggtcaacgccttcgtaacatgattatgtcgttcaacgccgatattgttgctcggtcaccgaagaagaaaccgaccttcttccctgagcaaatcgaaggctacgaatacatgtacggcggaaatgatgactatccgtactatctgcagaacaggaccgatgaaaacggtaacgacctgccgattggtccaatctcctacatggaaaaccctgaagtgccgcaagccaacgcttacatgcttgaggctgccaccaacgcagtgaaagaagtggctagtcttggcgtggatgcgcaggcggcaaatggtcaggtcgcttttgataccgtcaatcaactgaacatgcgggcagaccttgagacatacgtgtttcaggataacctggctaccgcaatgcgacgtgatggcgagatttatgcctcaatggtcaacgatatttatgacgttcctcgtcatgtaacgctgacacttgaagatggaagcgagaaagacgttcaactctatgcgcaagttgtcgattaccagtccggcaatgtggtcacactcaacgacattcgcggtcgatatgagtgctatacagacgttgggccatccttccagagtatgaaggaacagaaccgcgcagagattcaggagttgctcaccaaggttccgcaaggtactccagagttccagatgctgatgctgcaatacttcacgctgcttgacggtaaaggcgtcgagatgatgcgagagtacgcgaacaagcaactggtgatgatggggctgaagaaaccagaaacacctgaagagatggagatggtgcagcaggcacaacaacagccgcagcagccatcagcagagcaaattcaggcgcagggtatccttctgcaaggtcaggctgaattgctcaaggcagagaaccaacaggcgcagattcaggttgaagctgccaaggttgaagcccaaaaccaactcaacgccgcgaagattgcagaaatattcaacaatatggacctcgacaagcaggcagaactgcgtgagtacctcaggctcgtaggtcaattccagcaacagcgcagcaaagatgctcgtgctaacgctgagctgcttcttaaagatgcagaccagactcattcacaacgcatggatttcgcgaatcttatgcgtcaagttcaaatcccctccggcggagtagccgagacacctcaataa

SEQ ID NO: 473536 - DNA, 912 bp, Shigella flexneri
atggaccaaaccaccgacattcaggcttctgaagaattaaccctgcccggcaatcatgcagcggcatctgctgatggcttagttgtcgataatgccaacgacagcgcaggtcaggaagaaggctttgagattgtcctgaaagacgatgagaaaccaaaacaagacccggcaactaatgctgaatttgcccgtcgccgcatcgaacgcaaacgccagcgtgagcttgagcagcagatggaagcggttaagcgtggagagttgccggagcacctgcgggtgaaccctgagttaccaaaacaaccagaccctaacgattatctttccgaagatgcactggctaagtacgactatgaccagagccgcgcactggctgccttccagcaggcaaacagtgaatggcagatcaaggctatggacgcacgaagccaggctgtcgccgagcagggtcgcaaaactcaggagttcacccagcaatcagcgcaatacgtcgaggcggcccgtaagcactacgaggcagcggaaaagctcaatatccctgactatcaggagaaagaggatgcattcatgcaactggtgccgccagcagtcggtgccgacatcatgcgcctcttcccggagaaatccgccgctctcatgtatcaccttggtgctaatcctgagaaaacacgccagttgctggcgatggacgggcaatccgcgctgattgaactcactcgactgtcagaacgtttaactctcaagcctcgagccaagcctgtttcagaagccccgttacctgatgaacccattcagggacatgctgttgctgcaaatatctctgcgattgaaaagcagatggaggcggcagcaaacaaaggggatgtagagacgtaccgcaagctcaaggcgcaactgaataaaggaattcgataa

SEQ ID NO: 473537 - DNA, 1296 bp, Shigella flexneri
atggcattaaatgaaggtcaactggtcacgtatgctctggatgaaatcatcggaaccgtccagaacctgacgccaatggcgtcaaaagtgacaaaatacccccctccggcagaatccatgcagcgttcaagcaacaccgtgtggatgcctgttgagcaggaagcgccaacccagactggctgggatttaactggcaacgcaaccgggattctggaactctccgtgaagtgcaacatgggcgatccggataacgatttcttcgagcttcgtgcagatgacctgcgtgatgagcgttcttaccgtcgccgcatccaggcatccgccaaaaaactggcgaataacattgagtcagcgattgccaaacaggcaactgaaatgggctcgcttgttgttcacgatacccgcgcaattggtccatcgactggcctgcctggctgggattttgtgtctgatgcagagcgactgatgttctcccgtgagctaaaccgcgacatgggcatcagttacttcctgaaccctgacgattaccgcaaagcaggccgcaacctggtagatggtgacatcttcgggcgcgttcctgaagaagcatatcgaaacggtactattcagcgtcagattgctggctttgatgaaattcttcgctcaccgaaacttccggcagttaccaagtcaaccgcgactggtgtaactgtttctggtgcgcagaagtttaagccgcaggcatacacccttgataccgatggtaacaaagagaacgtcgacaaccgtgttgcaacggtgaccgtatcctccaccaccggatttaagcgcggcgacaaaatcagcttcattggtgtgaagttcctgtctcagatggcgaagaatgtgctgactgatgacgcgactttctcaatcacccgtgtgatcgatggtactcacatcgaaatcacgccgaagccgattgcgctggatgacgcgtcactgacaaaagaagagaaggcttacgctaacgtaaacacctctcttgctgataccactccggtaaacgttctgaacgtggcaacaaccaccgctaacgtgttctgggctgatgactcaatccgcctgctgtctcagccgatcccggtaacccatgaactgtttgctggcatgaaaacgtcttccttcagcattccaggtattggtgttaacggcatcttcgcaacgcagggtgatatcaacactctgtctggtaagtgccgtattgctgtgtggtattcagcatgtgctgtacgaccagaggcaattggtgttggtctgcctaaccagaccgcgtga

SEQ ID NO: 473538 - DNA, 231 bp, Shigella flexneri
atgacacacatgatctttcgtcatggcgacatgaagaagtggaaaggcgttggctacgactttgaaatcgtgaaagccgaagagcttcaggaatatctggatgctggctggttttcacatcctgatgaccttttgaaggatgttgcagagccagagccagaagaaaaacagcgtaaaaagcctggtcgaaaacctaaggcggcagcagatgaacctgacaacgaagggtga

SEQ ID NO: 473539 - DNA, 501 bp, Shigella flexneri
atgaacctgacaacgaagggtgatttagttcttgcggcattacgtaagctcggtgttgcatcaaatgccacgttaaccgatgtcgaaccgcagtctatggaagacggcgtcaacgaccttgaaatgatgatggctgaatggcttggcggtgatgcgtcacctggtatcaacgttggctacatttttgctgatgcagatgttgctccggatccgggcgatgagcacggtttatcaaataacgctatcaatgccgtcattttcaaccttgcctgccgaattgctccagattatgcgctggaagcgtctgcaaaacttatagccactgccagatacgggaaagagcgactcgtcaaactgtctgcaatggacagggcaaaagcagctaaatgtaagtccggttatccaaaccgtatgcctgttggtagtggtaaccagttggcgaagtggaatggttggaattacttccaccgaaaggaaccttgcgataacgggagcgaataa

SEQ ID NO: 473540 - DNA, 1419 bp, Shigella flexneri
atgcctattcagcaacttccgcttatgaaaggtgtcggcaaagacttccgaaacgccgactatatcgactatctgccagtgaatatgctggctacacccaaagaaatcctgaacagcagcggatatcttcgctcattcccgggcattgccaaacgttctgacgtgaacggtgtatctcgcggcgtcgagtacaacatggcgcagaatgctgtttatcgcgtgtgtggcggcaagctgtacaaaggagaaagtgaagtcggtgatgttgccggaagtggtcgtgtatcaatggcgcatggtcggacatcacaggcggtaggcgttaatggtcaactggtcgagtatcgctatgatggcacggtcaaaaccgtctcaaactggcctacagacagtggattcactcagtatgagttaggttcagttcgcgacattacgcgcttacgtgggcgttatgcgtggtcaaaagacggaactgattcatggtttatcactgaccttgaagacgaatctcatcctgaccgttacagcgcacaatatcgtgccgagtctcagcctgacggcatcatcggtatcgggacatggcgagacttcatcgtctgctttggttcatcgactattgaatatttctccctgactggcgcaaccaccgttggtgccgctttgtatgttgcacaaccatcgctgatggtgcagaaaggcattgccggaacttactgcaaaacgccattcgctgattcgtatgcgtttatcagcaatccggcaacgggtgcgccgtctgtgtatatcatcgactccggtcaggtgtcaccaattgtcagcgcgagcattgagaaaatcctccgctcctacactgctgatgaactggctgatggtgtgatggaatcgctgcgatttgatgctcatgagttgctgattatccaccttccgcgtcacgtcctcgtgtacgacgcatcttcaagcgccaatggcccacaatggtgtgtgctgaaaacaggtctgtatgacgatgtgtaccgcgctatcgacttcgtttacgaaggcaatcagataacgtgcggcgataagctggaatctgttaccgggaaactgcaattcgatatcagcagccagtacgacaagcaacaggaacacctgctgtttactccactcttcaaagcggataacgccagagtgttcgaccttgaggttgaatcgtcaactggcgttgcgcagtacgccgaccgcctttttctctctgcaaccactgactgcatcaattacgggcgtgagcagatgattgagcagaatgaaccgttcgtttacgacaagcgtgttttgtggaagcgagtagggcgcatcaggaaaaatgtcggcttcaaattgcgcgttatcacgaagtcacctgtcactctgtctggcgctcagataaggattgagtaa

SEQ ID NO: 473541 - DNA, 849 bp, Shigella flexneri
atggctgattcgaatctcaatgtgccggtaatcatccaagctacgcggctcgatacatcagtccttccacgcaatatcttctcgcagtcgtatctgctttacgttatcgcacagggcactgatgttggtaacgtggctaacaaagccaacgaggccggacagggcgcttatgatgcacaggtcaggaacgatgagcaggatgtgattctcgctgaccatgagcagcgaatttctgctgcggaagcaacgcttgttaatcatgaggagcgaatcagacaggcagaatcaactcttcaggaccatgaaacacgaatagctcagaatgaaagcgatatttcgtcgcttgacacaagagttcagtcgctggagtcgcaggtttcagaccatgaaacgcgcatcgatgctctggagtatgcaaccacacgcaagaagtcagaggttgtttactctggtgtatctgtaaccatcccgacagcgccgaccaaccttgttagcctgctgaaaacgctcacaccgtcatccggctcgttggcaccattcttcgacaccgttaacaacaagatggttgtgttcaacgagaacaaaaccctgctcttcaagttgtcgattgtcggcacgtggcccagcggaaccgccaacaggtcaatgcagctaaccttttccggctctgttcctgacacactggtcagcagtcgtaatgcggcgacaacaaccgacaacatcctgttagctacgttcttcagcgtggataaagacggctttcttgccacaaatggcagtacgttaaccattcagtcgaatggtgcggcgtttactgccacaaccatcaagataatcgcggagcagtga

SEQ ID NO: 473542 - DNA, 456 bp, Shigella flexneri
atgattacattcaaaccaacgcgaaacatcgacctgatagaagcagtcggaaatcaccctgacattatcgccgggagcaacaacggtgatggatacgactacaaacctgaatgccgttactttgaggtgaacgtgcacggtcagtttggcggcattgtttactatcaggagattcagccgctgacattagattgccacgccatgtacctgccagagattcgcggcttcagcaaggaaattgggctggcgttctggcgatacattctgactaacaccaccgttcagtgcgtaacatcgttcgctgcacgcaaattccgacacggtcagatgtactgcgcaatgattggccttaagcgtgtaggaaccatcaagaaatacttcaaaggcgtggatgacgtgactttttacagcggcacatgcgaagaactaatcgacttcctgaatcacgggagatag

SEQ ID NO: 473543 - DNA, 693 bp, Shigella flexneri
atgttatatgcatttaagctgggcagaaaactgcgcggcgaggaaccttattgccctgaaaaaggcgggaaaggtggcagttctgataaaagcgcaaagtatgcagcagaagcccagaagtatgctgcagacctgcaaaatcagcagtggcagacgatcatgaaaaaccttgctccgttcacgcctcttgcggagcagtatgttaaccagcttcagaacctttccagtttagaaggtcaggggcaggcacttaatcagtattacaactctaagcagtataaagaccttgcagggcaggcgcgttaccagagtcttgctgctgcggaggcgacgggtggacttggttcgacagccacaagcaatcaactggctacgatcgcgccgacactcggtcagtcttggttatcaaatcagatgagcaattacaacaatctggcaaacgttgggcttggtgcgctgcaaggtcaggcaaacgccgggcagacgtacgccaacaacatgagcagcattgcacagcaaagcgcagctcttgccgctgctaatgccaataaaccatcaagtcttcagactgcaattagcggtggcacgtctggtgcgattgccggtgcaggtcttgccagccttttgggaacatcaacgccttggggcgctggtattggtgctggtatcggattgcttggctcgttgttttaa

SEQ ID NO: 473544 - DNA, 1098 bp, Shigella flexneri
atggctacttggcaaggaacaaacggcggattgttggctggtatcggcggcgtcaactcaaacgctccgagcgtaaatgacatcggcaatacgcttcagcttatcaggcagaacaatgatattgagcgttcaggcgctaacaatgttgggctgactgctttgcaaggtctttcaggtattgcgggtgtttttcagcaggaaaagcaggctcagcggcagaaagaatttcagcaggcgtacgctaatgcttatgcgtctggtgatcgcggtgctttgcgtcagttggctactcaatatccagaccagattgaatccgttcgtaaaggcatgggattcattgatgaagagcagcgtaattctatcggcaccttagcggctggcgcacgccttgcgtcatcgtctccagaagcaatgcaatcatggctgcaaaacaacgccggtgagttagctcgtgttggcgttaatcctcatgacgtcgctcagatgtaccaacagaacccgcggcagttcggcgaatttgtcgatcacctggggatgaacagtctcgggcccgaaaaatactttgacctacaggataaaatgcagggtcgccaggttaccatgcgcggtcaggatctggattcgcaaaccgccgctcggaatcaggcaatcacaatgcgcggacaagatatccaggcgaatttaggtcagcagcgcattaatctggacgcagaaacaaaccgcattaacaacgaaaataagcgccttgaccggatgctatcagcagaaactaacgacctgaagcgccaggaaatacagagccgcatagcagccaacaaccagcagttgcagcagaagcagcaagcgctaaatgatggctacaaagacggcatcaacaccctcacaaccagcatgttcactctgaacgatatcgttagttctccttcacttaagagcattacaggcttacgtggagtaatccccaacgttccaggctcacaggctgcagacactcaggcacgacttgatacctttaaatcacaagcatacctgacagcggttcaggccatgcgaggcatgggcgcactttctgatgccgagggcaaaaagctcgactag

SEQ ID NO: 473545 - DNA, 1731 bp, Shigella flexneri
atggttaattaccgtgatttgttagagcaggctggcgcacgttacggtgtgccagaagggttgatgactgcactgggtgccaaggagtcttcttacaaccctgccgcagtaagctccgccggggctgtaggattgactcaggtcatgcctaggacatggcgtgatatgggttataccgatgagcaaatgcaaaaccccgaatatcaggctgacgctggcgcgcgctatctggcaaagatgtaccagcagtttggtaactggcgtgacgctcttcaggcttatcacgacggtcccggcaacgttatgaaggcaaagcgtggtgaatatacgccaggacctgaaggccgcggttacgttgatgatcgctttgctcaatgggctggtgacccggtgacagactcaacagtcgaacagcgcgccacctctgcaaaggtacatcctcagcaagcccctaacaacccgtttgcacaactggaagtacagtcatccgaacaagtatcggcatcaggtgtgcagtcagacccaaataatccatttgctcagattgagcagcaggcagccagtcagcagccacctcaacccgtaagttctgtcgcaccgaaacctgttcagcaacaaacagttaatcaggccaataatgcaccaacacgggaagaaccatcattgatgcaacaagctggcgattggctcactggtggtcaaagtgcagggcaaattgcagaacaggctggtcgtggtctggtaaacataccatttgacgtattgcagggtggcgcaagtctgattaatgcaatcagtcaggggcttggggggccaaaagtattggatgatgtttatcgtccagtagacagaccgacagacccctacgcgcaagctggagagtcaataggcggttatcttgttcctggagcaggtgtagctggaaacatggtcattggttctctcgctgacgcggcgaatcaacggggtgattttgccgaaaatgccgctattaatgccggacttagcattgctacgcatggcctgataaatggcgttacccgtggtgttcgtggtgcatcaaatataattagtggcaataaaacatctgcacagagagcgaccactgcgccaacagaaacatcaccattctccggtgatgccgctgcagcaacaaatcctgcggttcatgccgcagaggcaagagtagcacaaggtgtaccaatgacgcctgcgacgaagaacccagaggaagtcgttcgcacagtagcagcacaaaaaaggccaaatctcgcttcatcgcttgatgaactagatatcaatcctcaggctgaagttctggagtctgctgaaaggcttaatgttgattcattactcccttcacacttttccgggaacgagcaatacaaggcagttgagcaagcaatcaagtcccgtgcgggttctgctctacaggtgcaggaaaatgaagcaatcaggcagctagcacagggcgcgggtgagataattgatcgcgtttccggtgcaaaagatgctcttggtatgagcgacaagtttattgatacggtcaatggaagaatgtctgcgctgatgaaacgaagcgaccagctttatcgcaatgttgaaaaggcgatgcctgcaggtgcaaaaattgatgcgccatcaacaaggtcaatgctcaaacaggtggcagaagatcttggcgggatgaaaaaccttgaccctattgaaaagagagttgaggtagcctga

SEQ ID NO: 473546 - DNA, 327 bp, Shigella flexneri
atgactaaaaatactcgtttttcccccgaagtccgtcaacgggcagtccgtatggttctggaaagtcagggcgaatatgactcacaatgggcgacaatttgttccattgccccaaagattggctgtacgccggagactctgcgtgtctgggttcgccagcatgagcgggataccgggggcggtgatggagggctcaccaccgctgaacgtcagcgtctgaaagagctggagcgtgaaaatcgtgaactgcgccgcagtaacgatatccttcgccaggcttccgcttattttgcgaaggcggagttcgaccgcctctggaaaaaatga

SEQ ID NO: 473547 - DNA, 1596 bp, Shigella flexneri
atgaccaataatgccagcggtggggccgtatttttgcaacaaggagcggaattttcactattaccagaaaatgaaactggaatgactctgtttgccaataacaccgttacaggagaatataataacggcggggccatatttgctaaagaaaactcaacgctgaatcttactgatgttattttttccggtaacgtcgcaggcggctatggtggcgcaatctattcttctggtactaatgatactggtgccgtcgatttacgtgtcactaacgccatcaataatatcgctaatgatggcaaaggtggcgcaatttataccattaataatgacgtctatttaagtgatgatgtttttaacaataaccaggcatatacatcaacaagttacagtgatggcgatggcggggcaatcgatgttaccgataataatagcgacagcaagcatccttcaggttatacgataataaataacaccgcctttacaaataacacagccgaaggttatggcggggcgatatataccaatagcgcgacggctccctatcttattgatatttctgttgatgacagctacagccagaacggcggcgtgttagtcgatgagaacaatagcgcagcaggctatggagatggtccctccactgcggcgggtggctttatgtatctcggcttaagtgaagttacctttgatattgccgacggaaaaacgctggttatcggcaatacagagaatgacggagctgttgactctattgctggtaccgggttaatcaccaaaacaggttccggcgatctggtacttaatgcagataacaatgactttactggtgagatgcagattgaaaacggtgaagttaccctgggtcgcagcaactccctgatgaatgtcggcgatacgcattgccaggacgatccgcaagactgctacggtctgacgatagggagtattgatcagtatcagaatcaggctgagctaaacgttggctcgacccaacaaacttttgtgcacgcattgacgggctttcagaatggcactttaaatatcgatgctggtggcaacgttactgttaatcagggcagttttgctggcatcatcgaaggtgctggtcagctcaccattgcgcaaaacggcagctacgtgctggcaggggcgcagtcgatggcgctaaccggcgatatagtcgttgatgatggtgcggtgctttcgctggaaggcgacgcggcagatcttaccgctctccaggacgatccgcagtcgatcgtgttaaacggcggtgtgctcgatctctctgatttctccacttggcagagcggcacatcatacaatgatggccttgaagtcagtggcagcagcggaacggttatcggcagtcaggatgtggtagatcttgcaggtggcgacaatttgcatatcggcggcgacgggaaagatggcgtctacgtggtggtcgatgcgagcgacgggcaggtaagtctggcaaacaataatagttatttgggcacaacacaaatcgcctccggtacgctgatggtgagcgacaactcgcagcttggagatacccactataaccgccaggttatctttaccgataagtaa

SEQ ID NO: 473548 - DNA, 723 bp, Shigella flexneri
atgaatgccgaaaaatcgccggaaaaccataacgtagaccacgaagagatcgctaaatttgaagccgtcgcctcccgctggtgggatcttgaaggtgagttcaaaccgttgcaccgcattaacccgctgcgtctgggctatattgccgagcgtgctggcggtttatttggcaaaaaggtgctcgatgtcggttgtggcggcggcattctggccgagagtatggcgcgcgaaggcgcgacggtgaccggtctggatatgggctttgagccattgcaggtggcaaagctgcacgcgctggaaagcggcattcaggtggattacgtgcaggaaaccgtggaagagcacgcggcaaaacatgccgggcagtatgatgtggtgacctgcatggagatgctggagcacgtacccgatccgcagtcagtggtcagagcctgtgcgcaactggtgaaaccaggcggcgatgtctttttctcgacgcttaaccgcaacggcaagtcatggctgatggcggtggttggcgcggaatatattttgcgcatggtgcccaaaggtacgcatgatgtgaagaagtttattaaaccggcagagctgcttggctgggtggatcagaccagtttaaaagagcgacatataaccgggctacattacaacccgatcactaattcctttaagctcggccccggcgtggatgtgaactatatgctgcacacgcagaataagtga

SEQ ID NO: 473549 - DNA, 2628 bp, Shigella flexneri
atgagcgaccttgcgagagaaattacaccggtcaacattgaggaagagctaaagagctcctatctggattatgcgatgtcggtcattgttggccgtgcgctgccagatgtccgagatggcctgaagccggtacaccgtcgcgtactttacgccatgaacgtactaggcaatgactggaacaaagcctataaaaaatctgcccgtgtcgttggtgacgtaatcggtaaataccatccccatggtgactcggcggtttatgacacgatcgtccgtatggcgcagccattctcgctgcgttacatgctggtagacggtcagggtaacttcggttccatcgacggcgactctgcggcggcaatgcgttatacggaaatccgtctggcgaaaattgcccatgaactgatggccgatctcgaaaaagagacggtcgatttcgttgataactatgacggcacggaaaaaattcccgacgtcatgccaaccaaaattcctaacctgctggtgaacggttcttccggtatcgccgtaggtatggcaaccaacatcccgccgcacaacctgacggaagtcatcaacggttgtctggcgtatatcgatgatgaagacatcagcattgaagggctgatggaacacatcccggggccggacttcccgacggcggcaatcattaacggtcgtcgcggtattgaagaagcttaccgtaccggtcgcggcaaggtatatatccgcgcccgtgctgaagtggaagttgacgccaaaaccggacgtgaaaccattatcgtccacgaaattccgtatcaggtaaacaaagcgcgcctgatcgagaagattgcggaactggtaaaagaaaaacgcgtggaaggcatcagcgcgctgcgtgacgagtctgacaaagacggtatgcgcatcgtgattgaagtgaaacgcgatgcggtcggtgaagttgtgctcaacaacctctactcccagacccagttgcaggtttctttcggtatcaacatggtggcattgcaccatggtcagccgaagatcatgaacctgaaagacatcatcgcggcgtttgttcgtcaccgccgtgaagtggtgacccgtcgtactattttcgaactgcgtaaagctcgcgatcgtgctcatatccttgaagcattagccgtggcgctggcgaacattgacccgatcatcgaactgatccgtcatgcgccgacgcctgcagaagcgaaaactgcgctggttgctaatccgtggcagctgggcaacgttgccgccatgttggaacgtgctggcgacgatgctgcgcgtccggaatggctggagcctgagttcggcgtgcgtgatggtctgtactacctgaccgaacagcaagctcaggcgattctggatctgcgtttgcagaaactgaccggccttgagcacgaaaaactgctcgacgaatacaaagagctgctggatcagatcgcggaactgttgcgtattcttggtagcgccgatcgtctgatggaagtgatccgcgaagagctggagctggttcgtgaacagttcggtgacaaacgtcgtactgaaatcaccgccaacagcgcagacatcaacctggaagatctgatcacccaggaagatgtggtcgtgacgctctctcaccagggctacgttaaatatcagccgctttctgaatacgaagcgcagcgtcgtggcgggaaaggtaaatctgccgcacgtattaaagaagaagactttatcgaccgactgctggtggcgaacacgcacgaccatattctgtgcttctccagccgtggtcgcgtctattcgatgaaagtttaccagttgccggaagccactcgtggcgcgcgcggtcgtccgatcgtcaacctgctaccgctggaacaggacgaacgtatcaccgcgatcctgccggtgaccgagtttgaagaaggcgtgaaagtcttcatggcgaccgctaacggtactgtgaagaaaaccgtcctcaccgaattcaaccgtctgcgtaccgccggtaaagtggcgatcaaactggttgacggcgatgagctgatcggcgttgatctgaccagtggcgaagatgaagtaatgctgttctccgccgaaggtaaagtggtgcgctttaaagagtcttctgtccgtgcgatgggctgcaataccactggtgtgcgcggtattcgcttaggtgaaggcgataaagtcgtctctctgatcgtgcctcgtggcgatggcgcaatcctcaccgcaacgcaaaacggttacggtaaacgtactgcagtggcggaatacccaaccaagtcgcgtgcgacgaaaggggttatctccatcaaggttaccgaacgtaacggtttagtggttggcgcggtgcaggtagatgactgcgaccagatcatgatgatcaccgatgccggtacgctggtacgtactcgcgtttcagaaatcagcatcgtgggccgtaacacccagggcgtgatcctcatccgtactgcggaagatgaaaacgtagtgggtctgcagcgtgttgctgaaccggttgacgaggaagatctggataccatcgacggcagtgccgcggaaggggatgatgaaattgctccggaagtggacgttgacgacgagccagaagaagaataa

SEQ ID NO: 473550 - DNA, 507 bp, Shigella flexneri
atgagtggtgaaaaaaaggcgaaaggctggcggttctatggtcttgtaggttttggcgcaatagcactgctttccgctggcgtctgggcgttgcaatatgctggcagtgggccagaaaaaacgttgtcgccgctggtggtgcacaacaatctgcaaatcgatctcaatgagccggacctctttctagacagcgactctctgagccagcttcccaaagatctcctcaccattccgtttctccacgatgttctgagcgaagatttcgttttctattatcagaatcatgccgatcgtctgggcattgaaggcagcattcgccgcattgtctatgaacacgatctcacgctgaaagataagctcttttcgtcactcttagatcagcccgcgcaggcggcgctatggcacgataaacaaggccatctttcacattacatggtgctgatccagcgcagtggtttaagcaaactgctggagccattgttgtttgccgctaccagcgacagctag

SEQ ID NO: 473551 - DNA, 624 bp, Shigella flexneri
atgagacacgggctgctggcgctgatttgctggctgtgttgtgttgttgcccatagcgaaatgctgaatgtcgaacaatccaggctgtttcgcgcctggtttgtacgcattgcacaagaacagctccgccaggggccaagtccacgctggtatcagcaggattgtgcgggcctggtgcgatttgcggcgaacgagacgctgaaagttcacgacagtaaatggctaaaaagtaacggtttatctagccagtatttgccgccagagatgacgctaacacctgaacagcgtcaactggcgcaaaactggaatcaggggagcgggaaaaacggcccctacgtgaccgcgattaatttgattcagtacaacagccagtttattggccaagacataaaccaggcgctgcctggcgatatgatttttttcgatcagggcgatgcccagcacttaatggtctggatggggcgttacgtcatctaccacaccggaagcgccacgaaaactgacaacggaatgcgcgcagtcagtctgcaacaacttatgacatggaaggacacccgatggatacccaacgattccaatcccaatttcattggcatttatcgtttaaattttctggcgcgatag

SEQ ID NO: 473552 - DNA, 2133 bp, Shigella flexneri
gtgcgactggaagcgccggggcgtgattatcggcgctatcagatggaagagtacggcggcgtggacgttcgcctatatcgtattcctgacccgatggcatttttgcgccagcagaaaaacctgcatcgcattgtggtgcaaccgcaatatctgggcgacgggctgaacaatacgctgacctggctgtgggataactggtacggcaaatctcgccgcgtgatgcagcgtactttctcttctcagtcacggcagaatgtgactcaggcattacccgaattacatctcggcaatgccattattaaaccttcccgttatgtacagaacaaccagttttccccgctgaaaaaatatcccttggtggaacagttccgttatccactatggcaggctaaaccggtcgagccgcagcaaggggtaaaactggaaggcgcatccagcaatttcatctcgccgcagccgggtaatatttatattcctctcggccaacaagagccggggctgtacctcgtcgaggagatggtaggtgggtatcgggcgacgacggtggtgtttgtttccgataccgtggcgcttagcaaagtgtcaggtaacgagcttctggtatggaccgcgggtaaaaaacagggtgaagcgaagcccggctcagagatcttgtggactgacggtcttggcgtgatgacccgcggggtgaccgatgacagcggtactttgcagttacaacatatatcgccagaacgttcatacattctgggtaaggatgctgaaggcggcgtttttgtctccgagaacttcttctacgaaagcgaaatctacaacacccgcttgtatatttttaccgatcgcccgctatatcgcgcaggcgatcgtgtcgatgttaaagtgatgggccgcgagttccgcgatccgttgcattcatcccccatcgtcagcgccccggcgaagctttcggtgctggacgctaacggcagtctgttgcaaaccgtcgatgtcacgctggatgcgcgcaatggcgggcagggaagtttccgcctgccagaaaatgccgttgccggaggttatgagttacgtcttgcttaccgcaatcaggtctatagcagcagttttcgcgtggcaaactacatcaagccacatttcgagattggtttagctctcgacaaaaaagagttcaaaactggcgaagcggtcagcggcaaactgcaactgctctacccggatggcgagccggtaaaaaatgcccgcgtgcagttaagtttgcgcgctcagcaattatcaatggtcggtaacgatttgcgttatgccggacgtttccccgtgtcgctggaaggcagcgaaacggtgtccgacgccagcggtcatgtggcgttaaatctccccgccgccgataaaccgagccgctatttgttaaccgtctccgccagtgacggcgcggcgtatcgcgtcaccaccaccaaagagatcctcattgaacgcggcctggcgcattactctttaagtaccgccgcacaatacagtaatagcggcgagtcggttgtgttccgttatgccgcgctggaatcttcaaaacaggttcctgttacgtatgaatggttgcgtctcgaagaccgcacgagccatagcggagagctaccgtcaggcggcaaatcctttaccgtcaatttcgctaaacctggcaactacaatctgacattacgcgataaagacggcttaattctcgctgggttaagtcatgccgtcagcggtaagggcagcacggcgcatactggtacggtagatatcgtggcggataaaacgctgtaccagccaggcgaaaccgcgaagatgctgattactttcccggagccaattgatgaagcgttattgacgctggaacgcgatcgcgtggaacagcagtcgctgctttcgcatccggcaaactggctaacgctacaacgtttaaacgataccctgtatgaagcccgggtaccagtgagcaattcctttgcgcctaacatcactttttcggtgctgtatacccgtaatggtcagtacagttttcagaacgccgggatcaaagttgccgttcctcagcttgatatccgggtgaaaacggacaaaacccattaccagcctggtgaactggtcaatgtcgaatga

SEQ ID NO: 473553 - DNA, 231 bp, Shigella flexneri
atgaaaccaacgtcggtgatcattatggatactcatcctatcatcagaatgtctattgaagttctgttgcaaaaaaacagtgaattgcagattgtcctgaaaacggatgattaccgcataaccatcgattatctccgaacccgtcctgttgatttaatcattatggatatagacttgcccggaacagacggttttaccttcctgaaaagggtaatgctgccaacttactga

SEQ ID NO: 473554 - DNA, 762 bp, Shigella flexneri
atgcaattgagcagcagtgaaccttgcgtggtgatcctgaccgaaaaagaggtagaggtaagcgtcaataaccatgctacgtttacccttccgaaaaactacctggccgccttcgcgtgcaacaataacgtcattgaactctcaacgttaaatcacgtattaatcacccacatcaaccgtaacatcatcaacgattatctgttgtttttaaataagaaattaacctgtgtaaagccctggtcgcggctggcaaccccggttatcgcttgtcatagccgtacaccggaagtgttccggctagccaccaaccacagcaagcagcaatccagcaaaccctgcgaagcggagttgacgcgcgcattactttttaccgtattgtctaactttcttgagcaatcgcggtttattgccctactgatgtatatcttacgcagcagcgtccgcgacagcgtctgccgcattattcaaagcgatattcagcattactggaatctgcgaattgtcgccagttcgctatgtttaagccccagcctgctcaaaaagaaattaaaaaacgaaaataccagctatagccagattgtcacagagtgtcgtatgcgttacgccgtacagatgttattgatggataacaaaaatatcactcaggtggcgcaattatgtggctatagcagcacgtcgtactttatctctgtttttaaggcgttttacagcctgacaccgttgaattatctcgccaaacagcgacaaaaagtgatgtggtga

SEQ ID NO: 473555 - DNA, 891 bp, Shigella flexneri
atgcgtaagttcattttcgtattgctgacactgcttttggtcagccctttttcctttgcgatgaaaggtattatctggcaaccacaaaaccgagatagtcaggttaccgatacccagtggcaggggctgatgagtcagttacgttttcaaggcttcgataccctggttttgcaatggacccgttacggcgatgcatttacccagccagaacagcgcacgttattgtttaagcgtgccgcagctgcgcaacagactggcctgaagctgattgtcgggctgaacgccgatccggaattttttatgcaccagaaacagtcgtctgcagcgctggaaagctatcttaatcgcctgctggctgccgatctccagcaagccagattatggagcgccgcgcctggcataacgccggatggctggtacatcagcgcggaaattgacgacctgaactggcgcagcgaagccgcccgtcaacctttgctaacatggttaaacaacgcgcagcggctgattagcgatgtttcagcaaaaccggtttatatcagtagttttttcgccggaaacatgtcgcccgatggctatcgccaactgctggaacaagttaaagcaaccggagttaatgtctgggtacaggatggcagcggcgtggataaacttaccgctgaacagcgtgaacgttatctacaggccagcgccgattgccaaagctccgccccagcaagcggcattgtttatgaactgtttgtcgccggcaaaggcaaaacctttacagcgaaaccgaaaccggacgcagaaattgcctcgctgttagcgaaacgttcctcttgcggtaaagacatgctctatttctctctgcgctatttgcccgtcgcgcacggcattctcgagtattaa

SEQ ID NO: 473556 - DNA, 708 bp, Shigella flexneri
atgagtaccgctaacaataatgtcggcggtgcagcgcctgggaaaagctatcgtagctacggacaactggaagccgagtaccgcatcggacgcaatatgctgctggaaggcgacctgctctcagtttatagccgcgtctttgccgataccggagaaaacggggtgatgatgccggtgaaaaatccgatgtccggcaccggtctgcgctggaagccgctgcgcgatcagatctttttcctcgccgtcgaacagcagttgccgctgaacgggcaaaatggcgcatccgataccatgctgcgcgccagcgcctcattctttaatggcggcaaatacagcgacgaatggcacccgaacggttcaggctggtttgcccaaaacctgtacctcgatgcggcgcaatatatccgccaggatattcaggcgtggacggcagattatcgcgtcagctggcatcagaaggtagctaacggacagactattgagccttacgctcacgttcaggacaacggctatcgtgataaaggcactcagggcgcgcagcttggcggtgtcggggtccgctggaatatttggaccggcgagacgcactacgacgcctggccgcacaaagtcagtctcggcgtcgagtatcaacatacctttaaggcgattaatcaacgtaacggagagcgcaacaacgcgtttctcaccattggagtgcactggtaa

SEQ ID NO: 473557 - DNA, 1464 bp, Shigella flexneri
gtgcttcttgccgggcagctggacgatcggatcctggcactgcaatcacaggggatcttcaccgatcctcagtcatatattacttacgcgaccgcgctggcttatcgtggcgaaaaagcacgcctccagcattatctcattgaaaataagccgctgtttaccacgggcgcacaagagaaaagttggctctatctgttatctaaatacagcgccaaccccgttcaggcattggcgaattatacggtgcagtttgccgataaccgccagtatgttgttggcgcgacgctaccggtgctgttaaaagaaggtcagtacgacgcagcgcaaaaactgctcgccaccctccccgccaatgaaatgcttgaggagcgttatgctgtcagcgtggcgacccgtaacaaggctgaatctctgcgtctggcacgattgctgtatcagcaagaaccgacaaatcttccccgcctggatcaactgacctggcaactgatgcagaacgagcagtcacgcgaagctgccgatttattgctgcaacgctatcctttccagggcgatgcgcgtgtcagccagactttaatggcgcgactggcgtctctgctggaaagtcatccttacctagcaacgccggcgaaggtggcgattttatcgaaacccttaccgctggcggagcaacgtcagtggcaaagtcagttgccgggtattgcagataattgcccggcaatagttcgcttgctgggcgatatgtcgccttcctacgatgctgccgcctggaaccgtctggcaaagtgttatcgggacacgctacccggtgtggcgttgtatgcatggcttcaggccgaacaacgacaaccgagcgcctggcaacatcgtgcggtagcctatcaggcgtatcaggttgaggactacgccaccgcactggcggcctggcagaaaatcagtcttcacgacatgagcaatgatgatctgctcgccgccgccaacaccgctcaggcagcgggaaatggcgcggctcgcgatcgctggcttcaacaggcagaacaacgtgagctgggaaacaatgctcaatactggtggctgcatgcgcgacgttatatcccagctcagccagaactcgcactgaacgatctcacgcgctcaatcaatattgccccttctgccaactcttacgttgcgcgggcgacaatttatcgccaacgtcataatgttccggccgcggtgagtgatttgcgcgccgcgctggaactggaaccaaataatagcaacacccaggcagcgcttggttacgccttgtgggatagcggtgatatcgcacagtcgcgggaaatgctcgaacaggcgcataaagggcttccggacgatccggcactgatccgacaactggcctacgtgaaccagcgtctggatgacatgcctgcgacgcagcactacgcccggctcgtgattgatgacattgataatcaggcataa

SEQ ID NO: 473558 - DNA, 603 bp, Shigella flexneri
atgaaggagaataaccttaatcgcgtcatcggatggtctggtttactgctgacgtctttattgagtaccagcgcactcgcagacaatatcggcaccagcgcagaagagctggggctgagcgattatcgccattttgttatttatccccgtctcgataaggcgctgaaggcacagaaaaataacgacgaagcaaccgccatccgcgaatttgaatatatacaccaacaggtgccggataatattccgctgactttataccttgcggaagcctatcgtcattttggtcatgatgaccgggcgcggctgttgcttgaggatcaactgaaacgtcacccaggagatgcccgacttgagcgcagtctggcggctattccagttgaagtgaaaagcgttacgactgttgaagaactgcttgcccagcaaaaagcgggcgacgctgcgccgaccctgcgttgtcgcagtgaagtcgggcagaatgccctgcggctggcacaattacctgtcgccagagcgcaactgaactatgcgacgtttgctgcatcgccggaaggaaaaacgctgcgaaccgatctgctgcaacgggcaatctacctgaaacaatga

SEQ ID NO: 473559 - DNA, 2238 bp, Shigella flexneri
gtggactggcttcttgatgtttttgctacctggctctacggcttaaaagtaatcgcgataacgttagcggtcatcatgttcatcagcgggctggacgatttttttattgatgtcgtctactgggtacgccgcattaaacgcaagttgagtgtttatcgccgctacccgcgaatgagttaccgcgaactgtataaaccagatgaaaaaccgttagcgattatggttccggcgtggaatgaaacgggcgtcatcggcaatatggccgagctggcggcgaccacgctcgactacgaaaactatcatatctttgttggcacctaccccaacgaccccgatactcaacgtgatgttgacgaagtgtgcgctcgctttccgaacgtgcataaggtagtctgcgcgcgtcctggtcccaccagcaaagccgactgcctgaacaacgtgctggacgccatcacccagtttgaacgtagcgccaatttcgcttttgctggttttattctgcatgacgccgaagatgtgatttcaccgatggaattgcgtctgttcaactatctggtcgagcgtaaagatctgattcagatcccagtgtatccgtttgaacgcgaatggacgcacttcaccagcatgacttacattgatgagttttcagaactgcatggcaaagatgttccggtgcgtgaagccctcgccggacaagtgcccagcgcaggcgtcggcacctgtttcagccgccgcgccgtgaccgcactgttagctgacggtaacggtattgctttcgacgtgcagagtcttactgaagattacgacattggcttccgcctgaaagaaaaaggtatgacggaaatttttgtccgttttccggtggtggacgaagccaaagaacgcgagcagcgtaaatttttacagcacgcacggacgtcaaacatgatctgcgtgcgcgaatatttccccgataccttttcgactgcggttcgacaaaaatctcgctggatcatcggcattgttttccagggctttaaaacccataaatggacctccagcctgacgctgaactactttctctggcgcgaccgcaaaggggcaatcagtaactttgtcagcttcctcgcgatgctggtgatgatccagcttttgctgttgctggcgtatgaaagtttgtggcccgatgcctggcatttcctttctatttttagcggcagcgcatggttaatgaccctgctgtggctaaactttggcttgatggttaaccgcatcgtgcagcgagtgattttcgtcactggctactacggcctcacgcagggcctgctttccgtcctgcgtcttttctggggcaacctgattaactttatggctaactggcgcgtgctgaaacaggttcttcagcacggcgatccgcgtcgcgtcgcgtgggataaaacaacgcatgacttccccagcgtcactggcgatacccgctcgttgcgcccgttaggtcaaattctgctggaaaatcaggtcatcactgaagaacaactcgatacagcactgcgtaatcgcgtcgaaggtctacgcctgggcggttcaatgctgatgcaggggctgattagcgccgagcagctggcacaggcgctggcagagcaaaacggcgtggcgtgggaatccatcgatgcctggcagatcccgtcctcgctgattgccgaaatgccagcctccgtagcgctgcattatgcagtactgccgctgcgtctggaaaatgatgagttaattgtcggcagtgaagatggtattgacccggtttcgctggcggccctgacgcgtaaagtcggacgcaaagtgcgttacgtcattgttctgcgaggacaaattgtcacagggttacgccactggtatgcacgccgacgcggtcacgatccgcgggcaatgttgtacaatgcggttcagcatcagtggctcacggaacagcagaccggtgaaatctggcggcaatatgtgccgcatcagttcctgttcgccgaaatactgaccacgctcggtcatattaatcgttcagcaattaacgtgttgttattgcgccatgaacgcagttctctgccgctcggcaagtttttggtcaccgaaggcgttatcagccaggaaacgttggatcgcgtcctgacaattcaacgcgaattacaagtttcgatgcaatcactattactcaaagcaggtttaaacacagaacaggttgcgcaactggagtccgaaaatgaaggagaataa

SEQ ID NO: 473560 - DNA, 1443 bp, Shigella flexneri
atggtcagtaagccatttcagcgcccgttttcgctggcaacccgcctgaccttttttatcagcctggccaccatcgcggcgtttttcgcctttgcatggatcataatccactcagtaaaagtgcattttgccgagcaggacattaatgatttaaaagagattagcgccacccttgaacgggtactaaatcaccctgacgaaacgcaagcccgacgcttaatgacgctggaagatatcgtcagtggttattccaacgtgttgatttccctggcagatagccacggcaaaacggtgtatcactcccccggtgcgcctgatatccgcgagtttgcacgtgatgccatacccgataaagacgcgcggggtggcgaggtgtatctcctttccggcccgacgattatgatgccaggccacggtcacgggcatatggaacacagcaactggcggatgattaacttgccggttggcccgttggtggacggcaaaccgatttatacgctctacatcgcgctgtcgatcgattttcatcttcattacataaatgatttgatgaataaacttattatgaccgcatcggtaatcagcatcctgatcgtctttatcgtgctgttggcggtacataaaggtcacgcgccgatccgcagcgtcagccgtcaaatccagaatatcacctcgaaagatctcgacgttcgccttgacccgcagaccgtgccgattgagctggaacagctggtactgtcgttcaaccatatgatcgagcgtattgaggatgtctttactcgccagtccaatttctcagcggatatcgcccacgaaattcgcacaccaattactaatctcattacgcaaacggaaatcgccctcagccagtcgcgcagccagaaggagctggaagatgtgctctactctaatctcgaagagctgacgcgaatggcgaaaatggtcagcgatatgctgtttctcgctcaggccgataacaaccagctaatccccgaaaagaaaatgctcaacctggcggatgaagtcggcaaagtgttcgattttttcgaggcgctagcggaagatcgcggcgtggagttgcggtttgttggcgacaaacgtcaggttgcgggcgatccgttgatgctgcgtcgggcgctaagcaacctgctttctaatgcccttcgttatacgccaaccagagagacaattgtagtacgctgtcagacggtcgatcaccaggtgcaagtttccgtcgaaaaccccggtacgcccattgcgcccgagcacttaccgcgattgtttgaccgtttctatcgcgttgacccctcccgccagcgaaaaggtgaaggtagcggtattgggctggcgatagtgaaatcgattgttgtcgcgcataaaggcacggttgcggtaacgtcagatgcgcgggggacaaggtttgttatcacattacccgcttaa

SEQ ID NO: 473561 - DNA, 684 bp, Shigella flexneri
atgaaactgttgattgtcgaagatgaaaagaaaaccggagaatacttgaccaaagggttaaccgaagccggttttgtggtcgatttggccgacaacgggctgaatggctaccatctggcgatgaccggtgattatgacctgataatcctcgatattatgctgccagacgtgaacggctgggatatcgtgcgcatgttgcgctccgccaataaagggatgccgattctgttgcttaccgcgcttggcaccattgaacatcgcgtcaaggggctggagttgggggcagatgactacctggtgaaaccgttcgcttttgctgaactgctggcgcgggtgcgcactctcctgcggcgcggggcggcggtgattatcgaaagtcagtttcaggttgccgatctgatggtcgatctcgtcagccgcaaagtcaccctcagcggcacgcgcatcactctgaccagtaaagaatttactctgctggagttttttctccgccatcagggcgaagtgctgccccgctcgcttatcgcctcgcaggtatgggacatgaatttcgacagcgacactaacgccattgatgtggcggtgaagcggctacgcggcaaaatcgacaacgactttgagccgaagctgattcaaaccgtgcgcggcgtgggttacatgcttgaggtgccggatggtcagtaa

SEQ ID NO: 473562 - DNA, 1383 bp, Shigella flexneri
atgtctccttgtaaacttctgccattttgtgtggcccttgcgctaactggttgttcactggcaccggattatcagcgtccggtaatgcccgtaccgcagcagttctcactcagccagaacggcctggttaacgcagcggataactaccagaacgtgggctggcgcaccttttttgttgataatcaggtgaagacgctgattagcgaggcgctggtgaataaccgggatttgcgcatggcgacgctgaaagtgcaggaggcacgggcgcaatatcgtctgaccgatgccgaccgctacccacagctcaatggcgagggcagcggcagctggagcggcaatcttaaaggcgattcagccacgacgcgggagttctcgactggccttaacgccagctttgatctcgattttttcggtcgcttaaagaacatgagcgaagccgagcgccaaaattatttagccactgaggaagcccagcgcgcggtgcatattttgctggtttctaatgtcgcgcaaagctatttcaatcagcagctggcgtatgcgcaattgcaaatagccgaagaaacgctgcgtaattatcagcagtcatatgcgtttgtcgaaaaacaactgttgaccggtagcagcaatgttctggcgctggaacaggctcgcggggtgatagaaagtacccgcagtgacatcgctaaacgtcagggggaactggcgcaggcgaataatgcattgcaactgttattgggaagctacggcaagctaccgcaagcgcagacagtaaacagcggcagcctgcaaagcgttaaattaccggcgggcttgtcgtcgcaaatcttattgcagcgcccggatattatggaagctgaacacgcgttaatggcggctaatgctaatattggtgctgcgcgtgcggcatttttcccgtctatcagcctgaccagcggaatatcaaccgccagcagcgatctgtcgtcattatttaacgctagcagcgggatgtggaattttattcctaaaattgagatccccatttttaatgccggacgcaaccaggccaatctggatatcgccgaaattcgccagcagcagtcggtggtgaattatgaacagaaaatccagaacgcctttaaagaggtggcagatgcgctggcattacgtcaaagcctggacgatcaaatcagcgcccagcagcgttatctggcgtcgctgcaaattaccctgcaacgggcgtgggcattatatcagcacggcgcggtaagttatctggaagtgctggatgccgagcgttctttatttgcaacccgacaaactttacttgacctgaattatgcccgtcaggttaacgaaatttatttgtataccgccttagggggcggttggcagcaataa

SEQ ID NO: 473563 - DNA, 333 bp, Shigella flexneri
atgaaaaaagcactgcaagtcgcaatgttcagtctgtttaccgttattggctttaatgcccaggctaacgaacatcatcatgaaaccatgagcgaagcacaaccacaggtcattagtgccaccggtgtggtaaaaggtgttgatctggaaagcaaaaaaatcaccatccatcacgatccgattgctgccgtcaactggccggagatgaccatgcgctttaccatcaccccgcagacgaaaatgagtgaaattaaaaccggcgacaaagtggcgtttaattttgtccagcagggcaacctttctttattacaggatattaaagtcagccagtaa

SEQ ID NO: 473564 - DNA, 774 bp, Shigella flexneri
atgaaaaaaatcgcgcttattatcggcagcatgatcgcgggcggtattatttcagcgtcaggttttacctggtttgaccaggcggaaccgcacgcagaaaaaatgccgaccgcagaacgtaaaatcttattctggtacgacccgatgtatcccaatacgcggttcgataaaccaggtaaatcgccgtttatggatatggatctggtgccgaaatatgccgatgaagagagttctgcgtctggtgtgcgcattgacccgactcagacgcagaatctgggggtgaaaacggctaccgtcacgcgcgggccgctgacttttgcccagagtttcccggcgaatgtcagttacaacgagtatcagtatgccattgtgcaggctcgcgctgccgggtttatcgacaaggtgtatccgcttaccgtgggcgataaagtacaaaagggcacaccgcttctcgacctgaccattcccgactgggtggaagcgcagagtgagtatttactgttgcgcgaaaccggcggtacggcgacccagactgaaggcattcttgagcggctgcgactggcgggaatgccggaggcggatattcgccacctgatcgccacgcaaaaaatccagactcgctttacgctcaaagcgcccattgatggcgtgatcaccgcgtttgatctgcgcgcgggaatgaatatcgccaaagataacgtggtcgcgaaagaggaaggtaggttgcttatctgtgtctgtcattgtctagcattgtccactgtagttaattaa

SEQ ID NO: 473565 - DNA, 321 bp, Shigella flexneri
gtgaagaaaatcatttgtctggccattacgctgctaatgacactccccgcttacgcgaagttaactgttcatgaagaagcccgcatcaacgccatgctggagggattagcacagaaaaaggatttgatatttgtgcgcaacggtgatgaacatacctgcgatgaagcggtttcccacctgcgtctgaagctcggcaatacccgtaaccgcattgacactgccgagcagtttattgataaggtagcttcgtcgtcatcgattaccgggaagccgtatatcgtgaagatccccggtaagagcgatgagaacgcacagccctga

SEQ ID NO: 473566 - DNA, 852 bp, Shigella flexneri
atgagtagtttgttgttgtttaacgataagagtagggcgctgcaggcggatatcgtcgccgtgcagtcgcaggtagtgtacggaagcgtaggcaacagcattgcggtgcctgctataaaacagaacggcttgaatgtctttgccgtgccgacggtattgctgagcaatacgccgcattatgacactttctacggtggtgcgattccggacgaatggtttagcggctatttgcgtgcgcttcaggagcgtgatgcgctgcgccaacttcgtgctgtaaccacgggctatatgggaacggcatcgcaaatcaaaatccttgccgagtggctgactgcgctacgcaaagaccatcctgacctattgatcatggtcgatccggtgattggcgatattgatagcggaatttatgtcaaacctgaccttcccgaggcgtatcgacaatatttactgccgctggcgcagggaattacccccaatatctttgagctggaaatcctgaccggtaaaaattgccgcgatctcgacagtgccattgctgccgcaaaaagtctgctttcagacacattaaaatgggtggtgattaccagcgcctccggtaatgaagaaaatcaggagatgcaggtggtggtggtcagtgccgacagcgtgaatgtcatttcccattcacgggtaaaaaccgacctgaaagggactggcaacctgttttgtgctcagcttatcagtggtttgctgaaagggaaggcgttaaacgatgcggtgcaccgtgcggggttgcgcgtactggaagtgatgcgctacacccagcagcatgagagcgatgaattgattttgccgccgctggcggaagcataa

SEQ ID NO: 473567 - DNA, 510 bp, Shigella flexneri
atgggtttgttcgataaactgaaatctctggtttccgacgacaaaaaggataccggaactattgagatcattgctccactctctggcgagatcgtcaatatcgaagacgtgccggatgtcgtttttgcggaaaaaatcgttggtgatggtattgctatcaaaccaacgggtaacaaaatggtcgcgcctgtagacggtaccattggtaaaatctttgaaaccaatcacgcgttctctatcgaatctgatagcggcgttgaactgttcgtccacttcggtatcgacaccgttgaactgaaaggcgaaggcttcaagcgtattgctgaagaaggtcagcgcgtgaaagttggcgatactgtcattgaatttgatctgccgctgctggaagagaaagccaagtctaccctgactccggttgttatctccaacatggacgaaatcaaagaactgatcaaactgtccggtagcgtaaccgtgggtgaaaccccggttatccgcatcaagaagtaa

SEQ ID NO: 473568 - DNA, 1728 bp, Shigella flexneri
atgatttcaggcattttagcatccccgggtatcgctttcggtaaagctctgcttctgaaagaagacgaaattgtcattgaccggaaaaaaatttctgccgaccaggttgatcaggaagttgaacgttttctgagcggtcgtgccaaggcatcagcccagctggaaacgatcaaaacgaaagctggtgaaacgttcggtgaagaaaaagaagccatctttgaagggcatattatgctgctcgaagatgaggagctggagcaggaaatcatagccctgattaaagataaacacatgacagctgacgcagctgctcatgaagttatcgaaggtcaggcttctgccctggaagagctggatgatgaatacctgaaagaacgtgcggctgacgtacgtgatatcggtaagcgcctgctgcgcaacatcctgggcctgaagattatcgacctgagcgccattcaggatgaagtcattctggttgccgctgacctgacgccgtccgaaaccgcacagctgaacctgaagaaggtgctgggtttcatcaccgacgcgggtggccgtacttcccacacctctatcatggcgcgttctctggaactgcctgctatcgtgggtaccggtagcgtcacctctcaggtgaaaaatgacgactatctgattctggatgccgtaaataatcaggtttacgtcaatccaaccaacgaagttattgataaaatgcgcgctgttcaggagcaagtggcttctgaaaaagcagagcttgctaaactgaaagatctgccagctattacgctggacggtcaccaggtagaagtatgcgctaacattggtacggttcgtgacgttgaaggtgcagagcgtaacggcgctgaaggcgttggtctgtatcgtactgagttcctgttcatggaccgcgacgcgctgcccactgaagaagaacagtttgctgcttacaaagcagtggctgaagcgtgtggctcgcaggcggttatcgttcgtaccatggacatcggcggcgacaaagagctgccatacatgaacttcccgaaagaagagaacccgttcctcggctggcgcgctatccgtatcgcgatggatcgtaaagagatcctgcgcgatcagctccgcgctatcctgcgtgcctcggctttcggtaaattgcgcattatgttcccgatgatcatctctgttgaagaagtgcgtgcactgcgcaaagagatcgaaatctacaaacaggaactgcgcgacgaaggtaaagcgtttgacgagtcaattgaaatcggcgtaatggtggaaacaccggctgccgcaacaattgcacgtcatttagccaaagaagttgatttctttagtatcggcaccaatgatttaacgcagtacactctggcagttgaccgtggtaatgatatgatttcacacctttaccagccaatgtcaccgtccgtgctgaacttgatcaagcaagttattgatgcttctcatgctgaaggcaaatggactggcatgtgtggtgagcttgctggcgatgaacgtgctacacttctgttgctggggatgggtctggacgaattctctatgagcgccatttctatcccgcgcattaagaagattatccgtaacacgaacttcgaagatgcgaaggtgttagcagagcaggctcttgctcaaccgacaacggacgagttaatgacgctggttaacaagttcattgaagaaaaaacaatctgctaa

SEQ ID NO: 473569 - DNA, 258 bp, Shigella flexneri; identical to SEQ ID NO: 2720

SEQ ID NO: 473570 - DNA, 972 bp, Shigella flexneri
atgagtaagatttttgaagataactcgctgactatcggtcacacgccgctggttcgcctgaatcgcatcggtaacggacgcattctggcgaaggtggaatctcgtaaccccagcttcagcgttaagtgccgtatcggtgccaacatgatttgggatgccgaaaagcgcggcgtgctgaaaccaggcgttgaactggttgaaccgaccagcggtaataccgggattgcactggcctatgtagctgccgctcgcggttacaaactcaccctgaccatgccagaaaccatgagtattgaacgccgcaagctgctgaaagcgttaggtgcaaacctggtgctgacggaaggtgctaaaggcatgaaaggcgcaatccaaaaagcagaagaaattgtcgccagcaatccagagaaatacctgctgctgcaacaattcagcaatccggcaaaccctgaaattcacgaaaaaaccaccggtccggaaatctgggaagataccgacggtcaggttgatgtatttattgctggcgttgggactggcggtacgctgactggcgtcagccgctacattaaaggcaccaaaggcaagaccgatcttatctctgtcgccgttgagccaaccgattctccagttatcgcccaggtgctggcaggtgaagagattaaacctggcccgcataaaattcagggtattggcgctggttttatcccggctaacctcgatctcaagctggtcgataaagtcattggcatcaccaatgaagaagccatttctaccgcccgtcgtctaatggaagaagaaggtattcttgcaggtatctcttctggagcagctgttgccgcagcgttgaaactacaagaagatgaaagctttaccaacaagaatattgtggttattctaccatcatcgggtgagcgttatttaagcaccgcattgtttgccgatctcttcactgagaaagaattgcaacagtaa

SEQ ID NO: 473571 - DNA, 762 bp, Shigella flexneri
atggtttcatcattcacatctgccccacgcagcggtttttactattttgcgcaaggctggaagctcgtctcgcaacctgggattcggcgtttcgttattttaccgctgctggtcaatattttgttgatggggggcgcattctggtggctctttacacagctcgatgtctggatcccgactttcatgagttacgttccggactggctacaatggctgagttatctgttgtggcctctggctgtcatctctgtgctgttagtgtttggctatttcttctccacgattgctaactggattgccgctccgtttaacggtttattggctgaacaactggaagcacgattgactggcgctacaccgccagataccgggattttcggtatcatgaaagatgtgccgcgaatcatgaaacgcgaatggcaaaaatttgtctggtatctgccgcgcgcaattgtattactaattctttacttcatccctggtattgggcaaaccgtcgcgccggtactgtggttcctgtttagcgcctggatgttagccatccagtattgcgattaccccttcgataaccacaaagtgccgtttaaagagatgcgcaccgccctgcgcacacgcaaaatcaccaatatgcagtttggtgctttaaccagcctgtttacgatgatcccgctgcttaatctgttcatcatgcccgttgccgtttgtggcgcgacggcgatgtgggtcgattgctatcgcgataaacacgcgatgtggcggtaa

SEQ ID NO: 473572 - DNA, 987 bp, Shigella flexneri
atgatgcaggatttgcgtctgatattaatcattgttggcgcgatcgccataatcgctttactggtacatggtttctggaccagccgtaaagaacgatcttctatgttccgcgatcggccattaaaacgaatgaagtcaaaacgtgacgacgattcttatgacgaggatgtcgaagatgatgagggcgttggtgaggttcgtgttcaccgcgtgaatcatgccccggctaacgctcaggagcatgaggctgctcgtccgtcgccgcaacaccagtacctaccgccttatgcgtctgcgcagccgcgtcaaccggtccagcagccgcctgaagcgcaggtaccgccgcaacatgctccgcgtccagcgcagccggtgcagcagcctgcctatcagccgcagcctgaacagccgttgcagcagccagtttcgccacaggtcgcgccagcgccgcagcctgtgcattcagcaccgcaaccggcacaacaggctttccagcctgcagaacccgtagcggcaccacagcctgagcctgtagcggaaccggctccagttatggataaaccgaagcgcaaagaagcggtgattatcatgaacgtcgcggcgcatcacggtagcgagctaaacggtgaactgcttcttaacagcattcaacaagcgggcttcatttttggcgatatgaatatttaccatcgtcatcttagcccggatggcagcggcccggcgttattcagcctggcgaatatggtgaaaccgggaacctttgatcctgaaatgaaggatttcactactccgggtgtcactatctttatgcaggtaccgtcttacggtgacgagctgcagaacttcaagctgatgctgcaatctgcgcagcatattgccgatgaagtgggcggtgtcgtgcttgacgatcagcgccgtatgatgactccgcagaaattgcgcgagtaccaggacatcatccgcgaagtcaaagacgccaacgcctga

SEQ ID NO: 473573 - DNA, 2016 bp, Shigella flexneri
atggaatcaatcgaacaacaactgacagaactgcgaacgacgctttgccatcatgaatatctttatcatgtgatggatgcgccggaaattcccgacgctgaatacgacaggctgatgcgcgaactgcgcgagctggaaaccaaacatccagaactgattacgcctgattcgcctacccaacgtgtaggtgctgcgccgctggcagctttcagccagatacgccatgaagtaccaatgctgtcactggataacgtttttgatgaagaaagctttcttgctttcaacaaacgtgtgcaggaccgtctgaaaaacaacgagaaagtcacctggtgctgtgagctgaagctggatggccttgccgtcagtattctgtatgaaaatggcgttttagtcagtgccgcgacccgtggcgatggcaccaccggggaagatatcacgtctaatgtgcgtactattcgcgccattccgctgaagctgcacggagagaatatcccggcgcgtctggaagtgcgtggtgaagtgttcctgccgcaggcggggttcgaaaagattaacgaagatgcgcgacgcacgggcgggaaagtttttgctaacccacgtaatgcggcagctggttcactgcgtcagcttgatccgcgtattacagcgaagcgaccgctcacttttttctgctatggcgttggtgttctggaaggtggcgagctgccggatactcatcttggccgtttactgcaatttaaaaagtggggggtgccggtcagcgatcgggtaacgctttgtgaatcggcggaagaagtgctggcgttctatcacaaagtggaagaagaccgcccgacgctgggctttgatatcgacggcgtggtgattaaggtcaactcactggaacagcaggagcagcttggctttgtcgcgcgtgccccgcgctgggcggttgcgtttaaattcccggcgcaggagcagatgacctttgtgcgtgacgtcgagtttcaggttgggcgtactggcgcgattacgcctgttgcgcgtctggaacctgtccatgttgctggcgtgctggtgagtaacgcaaccttacacaatgcggatgaaatcgaacgtcttggtttacgcattggcgataaagtggtgattcgccgcgctggcgacgtgatcccgcaggtggttaacgtcgtgctttctgaacgcccggaagatacccgtgaggttgtattcccgacgcattgtccggtatgtggttctgacgttgagcgtgtggaaggtgaagcggttgcccgctgtaccggtggcctgatttgcggtgcgcagcgtaaagagtcgctgaaacactttgtttcccgccgtgcgatggatgttgacggaatgggcgacaaaatcatcgatcagctggttgaaaaagaatatgtccatactccggcagatctgttcaaactcaccgcaggcaaactgaccggactggagcgtatggggccaaaattggcacaaaacgtggttaacgcgctggaaaaagcgaaagaaaccacctttgctcgcttcctctatgcacttggcatccgtgaagtcggcgaggccaccgcagcaggtctggcggcatatttcggcacgctggaagcgctggaagccgcttcgattgaagagctgcaaaaggtgcctgatgttggcattgtcgttgcatcccacgttcacaacttctttgccgaagaaagcaaccgcaatgtcatcagcgagctgttggcggaaggtgttcactggcctgcgccgatcgttatcaacgcggaagagattgacagcccgtttgttggtaaaaccgtggtgcttacgggcagcttaagccagatgtcgcgtgatgacgctaaagctcgactggtcgaactgggcgcgaaagtcgcgggcagcgtgtcgaagaaaaccgatctggtgatagcgggtgaagctgcaggatctaaactggcgaaggcgcaggaactgggcattgaagtcatcgacgaagcggaaatgctgcgtttgctgggtagctga

SEQ ID NO: 473574 - DNA, 219 bp, Shigella flexneri
atggaaaaagagcagctgattgaaatagccaatacgataatgccgtttggcaaatacaaagggcgtcgcttaattgacctgccggaggagtatctgctgtggtttgcccgcaaagatgagttcccggcagggaagctcggtgagctaatgcaaatcacgctgctgattaaaaccgaggggctgacgcaactggtccagcccctgaagcgtccgctttaa

SEQ ID NO: 473575 - DNA, 999 bp, Shigella flexneri
atgaaactttttcgtatcctcgatcctttcaccttaaccctgatcacggtggtgttgctggcctctttctttccggccagaggcgatttcgtccccttctttgaaaatctgaccaccgcagctattgccctgctgttctttatgcacggcgcgaagttgtcgcgtgaggcgattattgctggcggtggtcactggcgactgcatttgtgggtaatgtgcagcaccttcgtgctgtttccgattctgggtgtactgtttgcctggtggaaaccggtaaatgtcgacccgatgctctactccggttttctctacttgtgcattctcccggctaccgtgcagtctgcaatcgccttcacgtcaatggcgggcggtaacgtcgcggcggcggtttgttctgcgtcagcatccagcctgctggggattttcctttcaccattgctggttggtctggtgatgaatgttcacggtgcaaggggcagccttgagcaggtcggtaaaattatgctgcaactgctgctgccgtttgtgttggggcatctttcccggccgtggattggtgactgggtgtcgcgcaataaaaaatggattgcgaaaactgaccagacgtccattctgttggtggtttatacagcgttcagcgaagccgtcgttaatggtatctggcataaagttggctggggatcattgctgtttatcgtggtggtcagctgcgttcttctggctatcgtgattgtagttaacgtctttatggcacgccgactgagcttcaataaggcagatgaaattactatcgtcttttgtggttcgaaaaagagtctggcaaatggcatcccgatggcaaacattctgttccccacatcggtgatcggtatgatggtgctgcccctgatgattttccatcagatccaattgatggtctgtgcggtgctggcgcgtcgatacaaacgccagaccgaacagttacaggcgcagcaggaaagcagcgccgataaagcttaa

SEQ ID NO: 473576 - DNA, 927 bp, Shigella flexneri
atgaattattctttaaaacaattaaaggttttcgtcacagtagcgcaggagaaaagttttagtcgtgcaggagagcgtatcggcttgagccagtcggcagtaagtcacagtgtgaaggagctggaaaatcatactggtgttcgcctgctggacagaaccacgcgtgaagtggtgcttacagatgcagggcagcagttggctttgcgtcttgagcgactgctggatgaacttaacagcacgttgcgcgataccgggcgtatggggcaacaactgagcggaaaagttcgggtcgctgccagccagaccatttccgcgcatcttattccgcaatgcattgctgaaagccatcgccgctatccagatattcagtttgtcctgcatgatcgtccgcagcagtgggtgatggaaagtattcgccagggagatgtcgactttggcatcgtcatcgatccaggcccagtgggcgatctgcaatgtgaagcgattctttccgagcctttctttctgctttgccatcgcgatagcgctttggccgtggaagattatgtaccctggcaggcattacagggagcgaaattggtgttgcaggattacgcgtcaggcagccgaccgctgattgacgcagcgctggcgcgcaatggtattcaggcgaatattgtgcaggagattggacatccggcgacgctgttcccgatggtagccgcaggcatcggcatcagtattcttcctgcactggcgctaccattgcctgaaggtagcccactggtggttaagcgcattacgccggtggttgaacgccagttgatgctggtgcgcaggaagaaccgttcactttccaccgccgctgaagcgttatgggacgtggtacgagaccagggcaatgcgctaatggctggtcgggaaggggatccgttgtatcagatatag

SEQ ID NO: 473577 - DNA, 342 bp, Shigella flexneri; identical to SEQ ID NO: 460300

SEQ ID NO: 473578 - DNA, 192 bp, Shigella flexneri
atggttaagctggcagaaaccaatcagctggtttgtcacttccgttttgacagccaccagacgattactcagttgacgcaagattcccgcgttgacgatctccagcaaattcataccggcatcatgctctcaacacgcttgctgaatgatgttaatcagcctgaagaagcgctgcgcaagaaaagggcctga

SEQ ID NO: 473579 - DNA, 579 bp, Shigella flexneri
atgagtgaaaaaagcattgttcaggaagcgcgggatattcagctggcaatggaattgatcaccctgggcgctcgtttgcagatgctggaaagcgaaacacagttaagtcgcggacgcctgataaaactttataaagaactgcgcggaagcccaccgccgaaaggcatgctgccattctcaaccgactggtttatgacctgggaacaaaacgttcatgcttcgatgttctgtaatgcatggcagtttttactgaaaaccggtttgtgtaatggcgtcgatgcggtgatcaaagcctaccgtttataccttgaacagtgcccacaagcagaagaaggaccactgctggcattaacccgtgcctggacattggtgcggtttgttgaaagtggattactgcaactttccagctgcaactgctgcggcggcaattttattacccacgctcaccagcctgttggcagctttgcctgcagcttatgtcaaccgccatcccgggcagtaaaaagacgtaaactttcccagaatcctgccgatattatcccacaactgctggatgaacagagagtacaggctgtttaa

SEQ ID NO: 473580 - DNA, 888 bp, Shigella flexneri
gtgcttatcttattaggttacctggttgttctcggtacagttttcggcggttatttgatgaccggtggaagccttggagcactctatcaacccgctgaactggtgattattgccggtgcagggattgggtcgtttatcgtcggcaataatggcaaagcgattaaaggcacgctgaaagcgctgccgttgctgtttcgtcgctccaaatacaccaaagcaatgtatatggatctgctggctctgctttatcggttgatggcgaaatcgcggcagatggggatgttttcgctggaacgtgatattgaaaatccccgtgagagcgagatcttcgccagctacccacgcatcctcgcggatagcgtcatgcttgattttatcgtcgattatctgcgcctgattatcagcggtcacatgaacaccttcgaaatcgaagccctgatggatgaagagattgagacgcacgaaagcgaggcagaagtcccggcgaacagtctggcgctggtcggggactcacttccggcgtttggtattgtcgcggctgtaatggggggcgttcacgcgttaggttcagccgatcgtcctgccgccgagctgggggcgcttatcgcacatgcgatggtggggactttcctcggtattttattggcttacggatttatttccccactagcgagtgttttacgtcagaaaagcgccgaaaccagcaaaatgatgcagtgcgtcaaagtcactctgctttctaatctgaacggttacgcaccgcctatcgccgttgagtttggtcgcaaaacgctctattccagcgaacgtccgtcgtttattgaactggaagagcatgtgcgtgcggtgaaaaatccgcaacaacagacgacaaccgaggaagcatga

SEQ ID NO: 473581 - DNA, 927 bp, Shigella flexneri
atgaagaatcaagcgcatccgattattgtcgtcaaacgacgcaaagccaaaagccacggggcagcacatggatcgtggaagattgcttatgccgactttatgactgcgatgatggccttttttctggtgatgtggctgatctccatctccagcccaaaagagttgattcagattgcggagtacttccggactccactggcgacagcggttacgggcggcgatcgcatttccaatagtgaaagcccaattcccggcggtggtgatgattacacccaaagccagggggaagtgaataagcagccgaacatcgaagagctgaaaaaacgcatggagcaaagtcgattgcggaaattgcggggtgatctcgaccagttgatagagtccgatccgaaactgcgggcgttacgtctccatctcaaaatcgatctggtccaggaaggtctacgtattcagatcatcgatagccagaatcgcccgatgtttagaaccggcagtgccgatgtcgaaccctatatgcgcgacattctgcgcgccatcgcgcctgtgctgaacggtattcccaaccgtattagcctttcaggtcataccgatgattttccctacgccagcggtgagaaaggttacagcaactgggagctttctgccgatcgggccaatgcatcccgccgcgaactgatggtcggagggttggatagcggcaaagtgttacgtgtcgtcggcatggcggcaacgatgcgcttaagcgatcgcggacctgatgatgccgtcaaccgtcgcatcagcctgttggtactgaacaaacaagccgaacaggccattttgcatgaaaacgccgaaagccagaatgagccagtaagcgccctagaaaaacctgaggttgcaccacaggtcagtgttcccacaatgccatcagccgaaccgaggtga

SEQ ID NO: 473582 - DNA, 363 bp, Shigella flexneri
gtgagcatcgatataagcgatttttatcagacattttttgatgaagcggacgaactgttggctgatatggagcagcatctgctggttttgcagccggaagcgccagatgccgaacaattgaatgccatctttcgggctgcccactcgatcaaaggaggggcaggaacttttggcttcagcgttttgcaggaaaccacgcatctgatggaaaacctgctcgatgaagccagacgaggtgagatgcaactcaacaccgacattatcaatctgtttttggaaacgaaggacatcatgcaagaacagctcgacgcttataaacagtcgcaagagccggatgccgccagctgcgattatatctgctag

SEQ ID NO: 473583 - DNA, 1599 bp, Shigella flexneri
ttgcgtcaactggcattagaagcgaaaggcgaaacgccatccgcagtgacccgattaagtgtggttgccaaaagtgaaccgcaagatgagcaaagtcgcagtcagttgccgcgacgaattatcctttcgcgcctgaaggccggcgaagtcgacctgctggaagaagagctggggcatctgacaacgttaaatgacgtggtgaaaggggcggattctctctcggcaatattaccgggcgatatcgccgaagatgacatcacagcggtactctgttttgtgattgaagccgatcagattacctttgaaacagtagaagtttcgccaaaaatagctaccccacctgtgcttaaactggcagccgaacaagcgccaaccggccgcgtggagcgggaaaaaacgacgcgcagcagtgaatccaccagcatccgtgtagcggtagaaaaggttgatcaattaattaacctcgtcggcgagctggttatcacccagtccatgcttgcccagcgttccagcgaactggacccggttaatcatggtgatttgattaccagcatggggcagttacaacgtaacgcccgtgatttgcaggaatcagtgatgtcgattcgcatgatgccgatggaatatgtctttagtcgctatccccggctggtgcgtgatctggcgggaaaactcggcaagcaggtagaactgacgctggtgggcagttccaccgagctcgacaagagcctgatagaacgcattatcgacccgctgacccacctggtacgcaatagcctcgatcacggtattgaactgccagaaaaacggctcgccgcaggtaaaaacagcgtcggaaatttaattctgtctgccgaacatcagggcggcaacatttgcattgaagtgaccgacgatggggcggggctaaaccgtgagcgaattctggcaaaagcggcctcgcaaggtttgactgtcagcgaaaacatgagcgacgacgaagttgcaatgctgatatttgcaccaggcttctccacggcagagcaggtcaccgacgtctccgggcgcggcgtcggcatggacgtcgttaaacgtaatatccaggagatgggcggtcatgtcgaaatccagtcgaagcagggtactggcactacgatccgcattttactgccgctgacgctggccatcctcgacggcatgtccgtacgcgttgcggatgaagttttcattctgccgctgaatgctgttatggaatcactgcaaccccgtgaagccgatctccatccactggccggcggcgagcgggtgctggaagtgcggggtgaatatctgcccatcgtcgaactgtggaaagtgttcaacgtcgcgggcgcgaaaaccgaagccacccagggaattgtggtgatcttacaaagtggcggtcgccgctacgccttgctggtggatcaattaattggtcaacaccaggttgtggttaaaaaccttgaaagtaactatcgcaaagtccccggcatttctgctgcgaccattcttggcgacggcagcgtggcactgattgttgatgtctccgccttgcaggcgataaaccgcgaacaacgtatggcgaacaccgccgcctga

SEQ ID NO: 473584 - DNA, 504 bp, Shigella flexneri
atgaccggtatgacgaatgtaacaaagctggccagcgagccgtcaggccaggaatttctggtatttacccttggtgatgaagagtacggtattgatatcctgaaagtgcaggagatccgtggctacgatcaggtaacacggattgcgaacacgccagcgtttatcaaaggcgtcacgaatctgcgcggcgttattgtgccgattgttgacttacgaattaagttcagccaggtggatgtggactataacgacaacacggtagttatcgtcctgaatctcggacagcgggtggtcggcatcgtggttgacggcgtttcagacgtgctttcattgacggcggagcaaattcgtccggcaccagagtttgccgtgacgctttcaacagaatatctcactggactgggcgcactgggcgaccgtatgttgattctggtgaacatcgaaaaactgctgaacagcgaagagatggcgctgttagatagcgcggcgtcagaagtggcgtaa

SEQ ID NO: 473585 - DNA, 1662 bp, Shigella flexneri
atgattaaccgtatccgcgtagtcacgctgttggtaatggtgctgggggtattcgcactgttacagcttatttccggcagtttgtttttttcttcccttcaccatagccagaagagctttgtggtttccaatcaattacgggaacagcagggcgagctgacgtcaacctgggatttaatgctgcaaacgcgcattaacctgagtcgttcagcggtgcggatgatgatggattcctccaatcaacaaagtaacgccaaagttgaattgctcgatagcgccaggaaaacattggcccaggccgcgacgcattataaaaaattcaaaagcatggcaccgttacctgaaatggtcgctaccagccgtaattttgatgaaaaatataaaaactattacacagcgttaactgaactgattgattatcttgattatggcaatactggagcttatttcgctcagccaacccagggaatgcaaaatgcaatgggcgaagcgtttgctcagtacgccctcagcagtgaaaaactgtatcgcgatatcgtcactgacaacgcagatgattaccgatttgcccagtggcaactggcggttatcgcgctggtggtggtattgattctgctggtggtgtggtacggcattcgccgtatggtgcttactccgctggcaaaaattattgctcacatttgcgaaatcgccggtggtaacctggcgaataccctgaccattgacgggcgcagtgaaatgggtgacctggcgcagagcgtttcacatatgcaacgctctttgactgacaccgtcactcatgtccgcgaaggttcagatgccatctatgccggtacccgtgaaattgcggcgggcaacaccgatctttcctcccgtactgaacagcaggcatccgcgctggaagaaactgccgccagcatggagcagctcaccgcgacagtgaagcaaaacgccgataacgcccgccaggcctcgcaactggcgcaaagtgcctccgacaccgcccagcacggcggcaaagtggtggatggcgtagtgaaaacgatgcatgagatcgccgatagttcgaagaaaattgccgacattatcagcgttatcgacggtattgccttccagactaatatcctcgcgctgaatgccgcggttgaagccgcgcgtgcgggtgaacagggccgtggttttgccgtggtggcgggtgaagtgcgtaatcttgccagtcgcagcgcccaggcggcaaaagagatcaaagccctcattgaagactccgtctcgcgcattgataccggttcggtgctggtcgaaagcgccggggaaacaatgaacaatatcgtcaatgctgtcactcgcgtgactgacattatgggcgagattgcatcggcatcggatgaacagagccgtggcatcgatcaagtcgcattggcggtttcggaaatggatcgcgtcacgcaacagaacgcatcgctggtgcaggaatcagctgccgccgcagctgcgctggaagaacaggcgagtcgtttaacgcaagcggtttccgcgttccgtctggcagccagcccactcaccaataaaccgcaaacaccatcccgtcctgccagtgagcaaccaccggcacagccacgactgcgaattactgaacaagatccaaactgggaaacattttga

SEQ ID NO: 473586 - DNA, 1602 bp, Shigella flexneri
atgtttaatcgtattcgaatttcgaccacgctgtttttaattttgattctctgcgggatcttgcagattggcagtaacggcatgtctttttgggcatttcgcgacgatttgcaacgactgaatcacggcgagcagagcaatcagcaacgtgcggcattagcgcaaactcgggcagtaatgttacaggccagtaccgcgctgaacaaagcaggcactctgacagcgcttagctatccggcggatgacattaaaacgttgatgacgacggcgcgcgccagtctgacgcaatccaccacgctgtttaaaagttttatggcgatgactgcgggcaacgagcacgtcagggcattgcaaaaagagacggagaaaagttttgcccgctggcacaacgatctcgaacatcaggcgacctggcttgaaagtaatcaactttcggatttcctcactgcgccggtgcagggatcacagaatgcgtttgacgttaactttgaggcctggcagctggagatcaaccatgtgctggaagccgccagtgcgcaaagccagcgtaactatcagatttcggcgctggtgtttatcagcatgattattgttgcggcgatctacatcagcagtgcgctgtggtggacgcgcaagatgattgttcaaccactggccattatcggtagccattttgacagcattgctgcgggtaatctggcgcgtccgattgcggtatatggtcgtaatgagatcaccgccatttttgccagcctgaagaccatgcagcaggctttgcgtgggacggtgagtgatgtgcgtaagggaagccatgagatgcacattgggatcgcggagattgtcgcaggcaataacgatctctcaagtcgtaccgaacagcaggcggcatcgctggcacaaacggccgccagtatggagcaattaaccgccacggtagggcaaaacgccgataacgcacgacaggcgtcggaactggcaaaaaatgccgcgacaacggcgcaggcgggcggtgttcaggtcagtaccatgactcacaccatgcaggagatcgccaccagctcgcaaaaaattggcgacattatcagcgttatcgacggaattgctttccagaccaatattctggccctgaatgcggcagtggaagcggctcgcgccggagagcaggggcgtggttttgcggtagtggcaggtgaagtgcgcaatcttgccagccgtagcgcgcaggcagcaaaagagatcaaagggctgatcgaagagtcagtcaatcgtgtccagcagggttcgaaactggtgaataacgccgccgcgaccatgaccgatattgtcagttcggtgacccgcgtgaacgacattatgggagaaattgcttcggcgtcggaagaacaacggcgggggattgagcaggttgcacaggctgtcagccagatggatcaggtgactcagcagaactcctcgctggtagaagaagcggcggtggcaacggaacaactggcgaatcaggccgaccatctttcgtcgcgtgtggcggtatttacccttgaagaacatgaagtagcacgacatgagtcggcgcagttacaaattgcgccagtggtatcctga

SEQ ID NO: 473587 - DNA, 861 bp, Shigella flexneri
atgacttcatctctgccctgtgggcaaacgtctttattgttacagatgaccgagcgcctggcgctttccgacgcgcattttcggcggataagtcaattgatctatcaacgagccgggatcgttctggctgaccataaacgcgacatggtttacaaccgactggttcgtcgtttgcgttcgctgggactgacggatttcggtcattatctgaacttgctggaatctaatcagcacagcggtgagtggcaggcgtttatcaattcgctgaccacgaatctgacggcatttttccgtgaggctcatcatttccctctgctcgcggatcacgcacgtcgccgttctggcgaggatcgcgtatggagcgcggcggcttcgaccggcgaagagccgtacagcattgcgatgactctggctgacacattgggcaccgtgcccggacgctggaaagtgtttgccagtgatatcgacaccgaagtgctggaaaaagccagaagcggtatctatcgccatgaagagttgaaaaacctgacgccgcagcaactgcaacggtatttcatgcgagggacgggaccgcatgaagggctggtacgcgtgcgtcaggagctggcgaactatgttgattttgccccgctgaatttactggcgaaacagtacaccgtgccggggccgtttgatgcgatcttctgtcgtaacgtcatgatctacttcgatcaaactacccagcaggagattttgcgccgctttgttccgctccttaaacccgacggattgctgtttgcgggtcactctgaaaactttagccacctcgagcgccgcttcacgctgcgtggtcagacggtgtatgcgctaagtaaggattaa

SEQ ID NO: 473588 - DNA, 1050 bp, Shigella flexneri
atgagcaaaatcagggtgttatctgtcgatgattcggcactgatgcgccagatcatgacagaaatcatcaacagccatagcgacatggaaatggtggcgaccgcgcctgatccgctggttgcgcgtgacttgattaagaaattcaatcccgatgtgctgacgctggatgttgaaatgccgcggatggacggactggatttcctcgaaaaattaatgcgtttgcgtccaatgcccgttgtgatggtttcttccttgaccggcaaaggatcagaagtcacgctgcgcgcgctggagctgggggcaatagattttgtcaccaaaccgcaactgggtattcgcgaaggaatgctggcgtatagcgaaatgattgctgaaaaggtgcgtacggcagcaaaggcgagccttgcagcacataagccattgtcagcaccgacaacgctgaaggcagggccgttgttgagttctgaaaaactgattgcgattggtgcttcaacgggtggaactgaggcaattcgtcacgtactgcaaccgttgccgctttccagcccggcattgttaattacccaacatatgccgcccggtttcacccgctcttttgccgacagacttaataagctttgccagatcggggttaaagaagccgaagacggagaacgtgtcttgccggggcatgcctatattgcgccgggcgatcggcatatggaactggcgcgtagtggcgcaaattatcaaatcaaaattcacgacggcccggcggttaaccgtcatcggccttcggtagatgtgttgttccattctgtcgccaaacaggcggggcgtaatgcggttggggtgatcctgaccggtatgggcaacgacggcgcggcgggaatgttggcgatgcgtcaggcgggggcatggacccttgcgcaaaacgaagcaagttgcgtggtgttcggcatgccgcgcgaggccatcaatatgggtggtgtctgcgaagtggtcgatcttagccaggtaagccagcaaatgttggcaacaattagtgccggacaggcgatacgtatttaa

SEQ ID NO: 473589 - DNA, 390 bp, Shigella flexneri
atggcggataaagaacttaaatttttggttgtggatgacttttccaccatgcgacgcatagtgcgtaacctgctgaaagagctgggattcaataatgttgaggaagcggaagatggtgtcgacgctctcaataagttgcaggcaggcggttatggatttgttatctccgactggaacatgcccaatatggatggcctggaattgctgaaaacaattcgtgcggatggcgcgatgtcggcattgccagtgttaatggtgactgcagaagcgaagaaagagaacatcattgctgcggcgcaagcgggggccagtggctatgtggtgaagccatttaccgccgcgacgctggaggaaaaactcaacaaaatctttgagaaactgggcatgtga

SEQ ID NO: 473590 - DNA, 645 bp, Shigella flexneri
atgatgcaaccatcaatcaaacctgctgacgagcattcagctggcgatatcattgcgcgcatcggcagcctgacgcatatgctgcgcgacagtttgcgggaactggggctggatcaggccattgccgaagcggcggaagccatccccgatgcgcgcgatcgtttgtactatgttgtgcagatgaccgcccaggctgcggagcgggcgctgaacagtgttgaggcgtcacaaccgcatcaggatcaaatggagaaatcagcaaaagcgttaacccaacgttgggatgactggtttgccgatccgattgaccttgccgacgcccgtgaactggtaacagatacacgacaatttctggcagatgtacccgcgcataccagctttactaacgcgcaactgctggaaatcatgatggcgcaggattttcaggatctcaccgggcaggttattaagcggatgatggatgtcattcaggagatcgaacgccagttgctgatggtgctgttggaaaacatcccggaacaggagtcgcgtccaaaacgtgaaaaccagagtttgcttaatggacctcaggtcgataccagcaaagccggcgtggtagccagtcaggatcaggtggacgatttgttggatagtcttggattttga

SEQ ID NO: 473591 - DNA, 405 bp, Shigella flexneri
atggtagtgtccgctattgccagtacacctcaaaacactacgctaatgagttgggatgccgtgctctatgatctacgtagtgaaaaaattatcagtaaagataattacttgaccgacttaaaccgcagacatcttgaacttgttcttcatactaaccccaatccaagcggttcggtaacgaagattttacgcactatttttactaagcaggtaaagagtttagggccggaactctgtcatttcttgcaccatgaactgacgaaaaaacgttatgaagtatggcatcactacgatgtactgcactaccagtcatcgtcattttctcgttcacaatttaatgcattgataaatttactggcgcaacaatcacgcttcgctgatctaaaattatcaaactacaaataa

SEQ ID NO: 473592 - DNA, 225 bp, Shigella flexneri
atgctcacaccttttggcaccgcgctgttaccgtacatcaacgacatgctggacagaaacgagcaacttaataattttattgcagattataagcatgagaaacgtggtcgggtcaccatctacgccccaaccggcataattacctatttatccaaacatgtaatcgataaaattaaagatatcggtgatatcaccttatcgctaaaaacctgcaatcttgggtaa

SEQ ID NO: 473593 - DNA, 741 bp, Shigella flexneri
atgttagttaatcgcaatattgtggcgttatttgcgttgccttttatggcaagcgcaactgcttctgaattatccattggtgctggtgcagcttataatgaatcgccttatcgcggttataatgaaaatacaaaggcaattccgctgattagttatgaaggtgattctttttatgttcgtcagaccacattaggttttattctgtcgcaaagtgaaaaaaatgaacttagcctgaccgcatcctggatgccgctggaatttgaccctgccgataatgacgattatgccatgcaacagcttgataagcgtgatagtacggctatggcgggggttgcctggtatcaccacgagcgttggggaaccgtgaaagcctctgcggctgcggacgttctggataacagcaacggctgggtgggggagctatcggtattccacaaaatgcagataggtcgcctgtcgctgacacctgcgctgggcgttctctattatgacgagaatttcagtgactattactatggcatttcagagagtgagtcccgtcgtagcggtctggcaagttattccgcgcaggatgcatgggtgccctatgtcagcctgacggcaaaatacccgataggagagcacgtcgtattgatggcgagcgccggatacagcgagctgccggaagagattaccgacagcccgatgattgatcgtaatgagagttttacctttgtcaccggcgtgagctggcgtttttaa

SEQ ID NO: 473594 - DNA, 1980 bp, Shigella flexneri
atgaacatttcggaagtcgatctgcgtaaactgacggtcagcgatccgttcctcggtcagtaccaacaactggtccgcgacgtggtgattccttatcagtgggatgccttgaacgatcgtatcccagaagcggaacccagccatgcgattgaaaactttcgcattgctgccggacttcaggagggtgaattttacgggatggtgtttcaggacagcgacgtcgccaaatggctggaagcggtagcctggtcgctgtgccagaagccggacgccgaactggaaaaaaccgccgacgaggtaatcgaactgatcgcctccgcccaatgtgaagacggctatctcaatacttactttacggtaaaagcacccgaagaacgctggagcaatctggcggagtatcatgaactttactgcgccggtcatctgattgaagccggagtcgccttcttccaggccacgggtaggcggcgcttgctggaagtggtttgccgtctggccgatcatatcgacagcgtatttggtccaaatgaagacaagctgcagggttatcctggtcatccggaaattgaactggcgctgatgcgtctctacgaagtcaccgaagagccgcgctacctggcgctgacgaactattttgtcgaacagcgtggtgcgcaaccgcactattacgaccaggaatatgaaaagcgcgggcagacctcgcactggcacacctacggcccggcgtggatggtgaaagacaaagcctacagccaggcacatttgccccttgcgcaacagcaaaccgccatcggtcacgcggtacgttttgtctacctgatgaccggcgtcgcgcatctcgcgcgtttaagtcacgatgacagcaagcgtcaggactgcctgaggctgtggaacaatatggcccagcgtcagttatatattaccggcggcattggctcgcaaagcagcggcgaagcgttcactagcgattacgatctgccgaatgacacggtttacgccgaaagttatgcttccatcggcctgatgatgttcgcccggcgaatgctggaaatggaaggcgacagtcaatatgccgatgtgatggagcgcgcgctgtacaacaccgtgctcggcggcatggcgctggatggcaaacatttcttctatgtgaatccgctggaagtacatccaaaatcgctgaaattcaaccatatctacgatcacgttaaaccgatccgccagcgttggtttggctgcgcttgttgtccgccaaatatcgcccgcgtgctgacctcgattggtcattatctctacacgccgcgtgaagatgcgttgtatatcaacatatacgcaggaaacagcatggaagtgccggtagaaaatggcacgctgcgcctgcgggttagcgggaactatccgtggcaggagcaggtgacgattgcggttgaatcgccccagccggtacgtcatacgctggctttacgtctgccggactggtgcacacagccgcagatcatattgaatggggaagaggtcgagcaggatattcgtaaagggtatttgcacattacccgcgaatggcaggagggcgatacgctgaatctgactttgccgatgccggtacgccgcgtttacggtaacccgctggtgcgtcacgtcgccggaaaagtggcgattcagcgcggtccgctggtgtattgcctagaacaggccgacaacggcgagtcactgcataatctgtggctgcccaccgatgcgccatttacgacatttgaaggcaagggattgttcagccataagatcttaatccaggcaccgggttaccggtatgaacagagcaatccagagcagcaaccgctgtggcattacgacagcgcgccagccaaacgccagccgcaaactctgacctttatcccgtggtttagctgggctaaccggggcgaaggcgaaatgcggatctgggtgaatgaggaaaagcatcgccatccggaggttggataa

SEQ ID NO: 473595 - DNA, 1401 bp, Shigella flexneri
atgacctctacaccgattactaccgctgatatcgctaacggtaaaattgacgatgcgttatctgtacgggaaaaaataggctacggcctgggtgacgcaggcggcaccgtaataacttgcctgatcatgaattttctcacctttttctacaccgacgtttttggattaactccggcgctggttggcacgctgtttattgcactgcgcgtgtttgatgccatctccgacccggtgatgggcgtcattgccgaccggacgcaaagtcgttgggggcgctttcgtccgtggcagctatggattgccattcccatcggcattatcggcatcctgacgttcaccgtgccagatgccagcatgggagtaaaaatcgcctgggcgttcggtacttacctgctcctttcagtcggttataccgccatcaacgtaccgtactgcgcgctgatcaacaccatgaccacccgccacaatgaagtgatctcctgccagtcctggcgattcgttctctgtggcgtagcgggatttctggtttcggtaggcttaccgtggatggtagatctcttcggtcatggtaatgccgcgcgcggttatcaattgggcgtcggcgtgctgtgcgccatcgccgtggtgatgtttctgtgctgtttcttctgggttcgtgaacgggtgccgctctccacaatggggaaatttaccctgcgcgaacatcttgccgggctgcggaacaacgaccaactgctgctgatgctggtcatgtctttcctgctgattaacgtctttaacattcgcggcggtgggtatatgtacttcattacctacgtcttacaaggcagtacgggctacacgtcgctgttcttcaccatggtcaccttcgcctccattatcggctcggtgattgtcagcccgttaacgcggcgtttcgataccgtcaaaatttattactacaccaacctgctcctcgctgcactggcggtgttgatgtggttcctgccctccggcccggcttatcaaactctgtggctggcggtgatcctcggtaatggcgtgattcttggcttcacattgccattgcacttctcattgatggcctttgccgatgactacggcgagtggaaaacccgcgtacgttcttccggcatgaacttcgccttcaatctgtttttcatcaagctggcctgggcctccagcgccgggatcatcagcctgctgtttatttttgtcgcctaccagcctggcgtggaaaaccagaccgccagttcgcttggcgggatcgcggcgatggaaacattactgcctgcgctattccacctgctgctggcaggggcgatccgcttttgcaaactcaataatcctatgatgtcacgcatagctaccgacctgcgtcagcgtcatgtacagccttaa

SEQ ID NO: 473596 - DNA, 816 bp, Shigella flexneri
atgctcgaattatccatgacgttaccgattaaagtgcaaaatggtggattatttatttcccgcggcgtagggaggcatcctgcaaggcggctggagtcatgggaaattatctttgttgaaaaaggtcgattaacgattcaggaagaagaacggatatttctggtcgatgcgggagagagtttattactctggccgaatcgacaacatgttggggtggaggattttcccgccgatctcaaattttactggctgcattttgaggttaaagcgccggatagcgacccgcgctggctcactcatcttagcgtgccgcaacaaacgaaggttgccgatccgcaggcgctggtggccctgtttcgccagttcttaagcgaacaggaaaagcatcaacgcactccggcgctggagtttattgtgctgctgattttgcagcagctcacccgtgacgcgcgtcttgatgaacaggccgatggcgcaggcaccacccttgcctggaaagcgcagaaactgatccgcacgcaatatcatcgcccgctttctacggcgcttctggcccgcgagctgtactgcaatgctgattatcttgggcgcgtctaccggcgggtgtttcatctgacgttaacagaagcaatccatcgccagcgagtgcgcgaagccgaaaagctgttaattagcgaagcgcgatcgctcactgaagtggctgcgttgtgcgggtttaatgacgttggctatttccggcagatttttcagaaacatactggtttaacgccagcagcgtggaagcggcgttacagcaaggaacatatcaattcgtag

SEQ ID NO: 473597 - DNA, 696 bp, Shigella flexneri
atgttagagcaactgaaagccgacgtgctggcggcgaatctggcgcttcccgctcaccatctggtgacgttcacctggggcaatgtcagcgcggtagacgaaacgcggcaatggatggtaatcaaaccttccggcgtcgagtatgacgtgatgaccgccgacgatatggtggtggttgagatagccagcggcaaggtggtggaaggtagcaaaaagccctcgtccgacacgccaacgcatctggcgctttaccgtcgctacgccgaaatcggtggcattgtgcatacccactcgcgccacgccaccatctggtcgcaggccgggctggatctccccgcctggggcaccacgcacgctgattatttctatggtgccatcccctgcacgcgacagatgaccgcagaggagattaacggcgaatatgaatatcagaccggcgaagtgatcattgaaacctacgaagaacgtggcaggagtccggcacaaatcccggcggtgctggtgcattctcacggcccgttcgcatggggtaaaaacgccgccgatgccgtgcataacgccgtagtactcgaagaatgcgcctatatgggcctattctcgcgccagcttgcgccgcagctccctgcgatgcaaaacgaactgctggataagcactacctgcgtaagcatggggccaatgcctattacgggcagtaa

SEQ ID NO: 473598 - DNA, 861 bp, Shigella flexneri
gtgcgtaatcatccgttagggatttatgaaaaggcgctggcgaaagatctctcctggccggagcggctggtgctggcaaaaagctgcggttttgattttgtcgaaatgtcggtggatgaaaccgacgaacggctttcacgtcttgactggagcaccgcacaaaggacttcgctggttgccgcgatgatcgaaacgggtgttgggatcccgtcgatgtgcctgtccgcacatcgtcgctttccttttggtagccgtgacgacgcggtacgccagcgagcacgggagatcatgagcaaagcgattcgtctggcacgcgatctcggcatacgcaccatccaactggcgggctacgacgtctattacgaagaccacgatgaaggcacccggcaacgttttgctgaagggctggcgtggacggttgaacaggcagcagccgcgcaggtgatgctggcggtggagattatggacaccgcgtttatgaactccatcagtaaatggaaaaagtgggacgagatgctcgcctcgccgtggttcaccgtctacccggacgtcggcaacctcagcgcctggggcaatgatgttcccgccgaactgaaactgggcattgaccgtatcgccgcgatccacctgaaagacacccagccagttaccgagcaaagtcccggacagttccgcgacgtgccgtttggcgaaggctgcgtcgatttcgttggcatcttcaaagcgctgcatgaactgaactatcgaggttctttcctgattgagatgtggaccgaaaaagccaaagagccggtgctggagattattcaggcgcggcgttggattgaagcgcgtatgcaggaggctggatttatatgttag

SEQ ID NO: 473599 - DNA, 663 bp, Shigella flexneri
atgagccgaccacttctgcaactggcacccgaccactcatcacttgaagccgcgcagcgcgacgtgacgctgttaaaagacagcgtcgatatcgtcgaagcgggcaccattctctgtttaaacgaagggcttagcgcggtgaaagccttgcgcgaacaatgcccggacaaaatcatcgttgccgactggaaggtcgccgacgctggtgaaacgctcgcgcaacaggcgtttggcgcaggcgctaactggatgaccatcatctgcgccgcgccgctcgcgacggtggaaaaaggccacacgatggcgcaacgctgcggtggtgaaattcagatcgagttgttcggtaactggacgctggacgacgcccgcgactggcatcgtattggcgtgcggcaggcgatttatcatcgcggtcgtgatgcacaggccagcgggcaacagtggggcgaagccgatctggcacgcatgaaggcgctttccgatatcggccttgagctttccattaccggcgggattacccctgctgacctgccgctgtttaaagatattcgcgtgaaagcgtttattgccgggcgagcactggcaggctcagcaaatccggcgcaggtggctggcgatttccatgcgcaaatcgacgctatctggggaggcaagcgtgcgtaa

SEQ ID NO: 473600 - DNA, 1497 bp, Shigella flexneri
atgacgcaatactggctggggttagattgtggcggtagctggctgaaagccgggctgtatgaccgcgaaggccgggaggcaggcgtgcagcgcctgccgctgtgcgcattaagcccgcagccaggttgggcagagcgcgatatggcagaactgtggcaatgctgcatggctgtcattcgcgaactgcttacccattccggcgttagcggggaacaaattgtcggtatcggtatctccgcacaaggaaaaggcttgtttttgctggataaaaacaacaagccgctcggtaacgccattttgtcctcggatcgccgggcgatggaaatcgttcgtcgctggcaagaagatggcatcccggaaaaactctacccgctgacccgacaaaccttgtggaccgggcatccggtgtcgctgctacgttggcttaaagagcacgaaccagaacgctacgcgcaaattggctgcgtgatgatgacgcacgactacctgcgctggtgtttaaccggcgtcaaaggctgtgaagagagcaatatttccgagtccaacctctacaacatgagtcttggggaatatgacccgtgcctcaccgactggctggggatcgctgaaatcaatcacgccctgccgcctgttgtcggttctgccgaaatctgcggggaaatcaccgctcagacagccgcactgaccggtctgaaagcgggtacgcccgtagtcggcggcctgtttgatgtggttttcaccgcactctgcgccgggatcgaagacgaattcaccctcaacgcagtgatgggcacctgggcggtgaccagcggcataacccgcggtttacgtgacggtgaagcgcatccgtatgtctatggtcgctacgttaacgatggtcaatttatcgttcacgaagccagccctacctcttccggcaacctcgaatggtttaccgcgcagtggggagaaatctcgtttgatgagatcaatcaggccgttgccagcttgccgaaggtcggtggcgatctctttttcctgccgttcctgtacggcagcaacgccggactcgagatgaccagcggtttctacgggatgcaggccattcacaccctcgcgcacctgttgcaggccatctatgaaggggtggtgtttagccatatgacccacctcaaccggatgcgcgaacgttttactgatgtgcacaccctgcgcgtcactggcggcccggcgcactccgatgtctggatgcaaatgctggcggacgtcagcggtctgcgtatcgagctgccgcaggtggaagaaaccggctgttttggcgcggcacttgccgcccgcgtcggcaccggagtttatcgcgatttcagcgaagctcaacgtgacttacagcacccggtacgcaccctgctgccggatatgaccgcgcatcagctttaccaacaaaaataccaacgctatcagcatctcattgccgcacttcagggctttcacgcccgcatcaaggagcacacattatga

SEQ ID NO: 473601 - DNA, 987 bp, Shigella flexneri
atgaaattacgctctgtaacctacgcattattcattgctggcctggctgcattcagcacatcttctctggcggcgcaatctttacgtttcggttatgaaacctcacaaaccgactcgcaacatattgcggcgaaaaaattcaatgatttattgcaggagagaaccaaaggcgagctgaaattaaaattgtttccggatagcaccctcggtaacgcgcaggcgatgatcagcggcgtacgtggcggcaccatcgatatggaaatgtccggctcgaataactttgccgggttatcaccagtgatgaacttgcttgatgtccctttcctgttccgcgataccgctcacgcgcataaaacgctcgacggcaaagtcggtgatgatctgaaagcctcacttgaaggtaaaggactaaaagtactggcctactgggaaaacggctggcgcgatgtcaccaactcgcgcgcaccggttaaaacccccgccgacctgaaagggctgaaaattcgcaccaacaatagcccgatgaatatagccgcattcaaagtctttggcgctaacccgatcccgatgccgtttgccgaagtctataccgggctggaaacccgcactatcgacgctcaggaacacccgatcaacgtcgtctggtcagcaaaatttttcgaagtgcagaagtacctttctctgacgcaccacgcctattccccgcttctggtggtgatcaacaaagcgaagtttgatggcttaagcccggagttccagcaagcgctaatttcatctgcgcaggaagcgggtaactaccagcgcaaactggttgccgaagatcagcaaaaaatcatcgacggcatgaaagaagcgggcgtggaagccatcaccgatctcgatcgcaaagcctttagcgacgcactgggtactcaggtccgcgacatgtttgtaaaagatgttccgcagggtgctgatctactgaaagccgtggatgaggtgcaataa

SEQ ID NO: 473602 - DNA, 1278 bp, Shigella flexneri
atggctgtgctgatttttctgggctgtctgttgggtggtattgctatcggtttgcctattgcctgggcactgttgttgtgcggggcggcgttaatgttctggctggacatgtttgatgtccagatcatggcacaaacgctggtgaacggagccgatagcttctccctcctggcgattccgttctttgtgctggcgggtgaaatcatgaatgcgggcggcttgttaaaacgcattgttgacctgccgatgaaactggtggggcataaaccaggcgggctgggctacgtcggcgtgctggcagctatgattatggcgagcctttctggttctgccgttgcggataccgccgccgttgccgctctactggtgccgatgatgcgcagcgccaactacccggtcaaccgggcggcggggctgattgcctctggcggcattatcgcgccaattattcccccttccattccgtttattatcttcggtgtttccagcggattatccatcagtaagctgtttatggcgggcattgcccctggcataatgatgggcgcaacgctgatgcttacctggtggcggcaggccagtcgccttaatttaccccgccagcaaaaagcaacgatgcaggaaatctggcactcttttgtctccggtatctgggcgctgtttcttccagtcatcattattggcgggtttcgctccggtctgtttacccctaccgaagccggggccgttgctgctttctatgcgctgtttgtcgccacagttatttaccgtgaaatgaccttcgccacactttggcatgtactcattggcgcggcgaaaaccacctcagtggttatgtttctggtggcctcggcacaagtttccgcctggctgattaccattgctgaactgccgatgatggtttctgatttactgcaaccgttggtcgattcaccgcgtctgctgtttatcgtcattatggtggctatcctgattgtcggcatggtcatggatttaacgccgacggtattaattcttaccccggtattaatgcctttagttaaagaggcaggaatcgatccgatttatttcggtgtcatgtttatcattaactgctcaatcggcttaattacaccgcctatcggtaatgtacttaacgttatttcaggggtggcaaaactcaaattcgatgatgcagtcagaggcgttttcccttacgtcctggttttatattcattattagtcgtatttgtttttattcccgatctcatcatcctccctttgaaatggattaattaa

SEQ ID NO: 473603 - DNA, 303 bp, Shigella flexneri; identical to SEQ ID NO: 461521

SEQ ID NO: 473604 - DNA, 576 bp, Shigella flexneri
gtgcaacgtgaagatgtactgggagaagccctgaaattattagaattacaagggattgccaacaccacgctggagatggttgctgaacgtgtggattatccactggacgagctacgccgcttctggccagacaaagaggcaatcctctacgatgcgctgcgttatcttagccaacagatagatgtctggcgtcgtcagctgatgctggacgaaacgcaaaccgccgaacaaaagctgctggcacgttatcaggcgttatcggagtgcgttaaaaacaaccgctatccgggctgtctatttatcgctgcctgtacgttttatcccgatcctggccaccctattcatcaactggccgatcagcaaaaaagcgctgcctacgatttcacccacgaactgttaaccacgctggaagttgacgatccggcgatggtagcaaagcagatggaactggtgctggaaggctgtttaagccgaatgctggtgaatcgtagccaggcggatgtcgacactgcacatcggctggcggaagatatcctgcgcttcgcccgctgccgccagggtggtgcattgacctga

SEQ ID NO: 473605 - DNA, 1698 bp, Shigella flexneri
atggctcaacgcatctttacgctgattctgctactttgcagcacttccgtttttgccggattattcgacgcgccgggacgttcacaatttgtccccgcggatcaagcctttgcttttgattttcagcaaaaccaacatgaccttaatctgacctggcagatcaaagacggttactacctctaccgtaaacagatccgcattacgccggaacacgcgaaaattgccgacgagcagctgccgcaaggcgtctggcatgaagatgagttttacggcaaaagcgagatttaccgcgatcggctgacgcttcccgtaaccatcaaccaggcgagtgcgggagcgacgttaactgtcacctaccagggctgtgctgatgccggtttctgttatccgccagaaaccaaaaccgttccgttaagcgaagtggtcgccaacaacgcagcgtcacagcctgtgtctgtttcgcagcaagagcagcacaccgcgcaattgcccttttccgcgctctgggcgttgttgatcggtattggtatcgcctttacgccatgcgtgctgccaatgtacccactgatttctggcatcgtgctgggtggtaaacagcggctctccactgccagagcattgttgctgacctttatttatgtgcaggggatggcactgacttacacggcgctgggtctggtagttgccgccgcagggttacagttccaggcggcgctacagcacccatacgtgctcattggcctcgccatcgtctttaccttgctggcgatgtcaatgtttggcttgtttactctacaactcccctcttcgctgcaaacacgtctcacgttgatgagcaatcgccaacagggcggctcacctggcggtgtgtttgttatgggggcgattgccggactgatctgttcaccatgcaccaccgcaccgcttagcgcgattctgctgtatatcgcccaaagcgggaacatgtggctgggcggcggcacgctttatctctatgcgttgggcatgggcctgccgctgatgctaattaccgtctttggtaaccgcttgctgccgaaaagcggcccgtggatggaacaagtcaaaaccgcgtttggttttgtgatcctcgcactgccggtcttcctgctggagcgagtgattggtgatgtatggggattacgcttgtggtcggcgctgggtgtcgcattctttggctgggcctttatcaccagcctacaggctaaacgcggctggatgcgcgtggtgcaaataatcctgctggcagcggcattggttagcgtgcgcccacttcaggattgggcatttggtgcgacgcataccgcgcaaactcaaacgcatctcaactttacacaaatcaaaacggtagatgagttaaatcaggcgctcgttgaagccaaaggcaaaccggtgatgttagatctttatgccgactggtgcgtcgcctgtaaagagtttgagaaatacaccttcagcgacccgcaggtgcaaaaagcgttagcagacacggtcttacttcaggccaacgtcacggccaacgacgcacaagatgtggcgctgttaaagcatcttaatgtccttggcctaccgacaattctcttttttgacggacaaggccaggagcatccacaagcacgcgtcacgggctttatggatgctgaaaccttcagcgcacatttgcgcgatcgccaaccgtga

SEQ ID NO: 473606 - DNA, 339 bp, Shigella flexneri
atgcttgatgaaaaaagttcgaataccgcgtctgtcgtggtgctatgtaccgcaccggatgaagcgacagcccaggatttagccgccaaagtgctggcggaaaaactggcggcctgcgcgaccttgatccccggcgctacctctctctattactgggaaggtaagctggagcaagaatacgaagtgcagatgattttaaaaactaccgtatctcaccagcaggcactgctggaatgcctgaagtctcatcatccatatcaaaccccggaacttctggttttacctgttacacacggagacacagattacctctcatggctcaacgcatctttacgctga

SEQ ID NO: 473607 - DNA, 1302 bp, Shigella flexneri
atgctagttgtagagctcatcatagttttgctggcgatcttcttgggcgccagattggggggaataggtattggttttgcaggcggattgggggtgctggttcttgccgctattggcgttaaacccggtaacatcccgttcgatgtcatttccattatcatggcggttatcgccgctatttctgccatgcaggttgctggcggtctggactatctggttcatcagacagaaaagctgctgcgccgtaacccgaaatacatcacgatcctcgcaccgatcgtgacctatttcctgactatctttgctggtactggcaacatctctctggcgacactgccagttatcgctgaagttgcgaaggaacaaggcgttaaaccttgccgtccgctctctactgcagtggtatccgcgcagattgcgatcaccgcatcgccaatctcagcggcagtggtttacatgtcttccgtgatggaaggtcatggcatcagctacctccatctgctctccgtggtcatcccgtccaccctgctggcggttctggtgatgtccttcctggtcactatgctgttcaactccaaactctctgacgatccgatttatcgcaagcgtctggaagagggcttggttgaactgcgcggtgaaaagcagattgaaatcaaatccggtgcaaaaacgtccgtctggctgttcctgctgggcgtagttggcgtggttatctatgcaatcatcaacagcccaagcatgggtctggttgaaaaaccgctgatgaacaccaccaacgcaatcctgatcatcatgctcagcgttgcaactctgaccaccgttatctgtaaagtcgataccgacaacatcctcaactccagcaccttcaaagcaggtatgagcgcctgtatttgtatcctgggtgttgcgtggctgggcgatactttcgtttccaacaacatcgactggatcaaagataccgctggtgaagtgattcagggtcatccgtggctgctggccgtcatcttcttctttgcttctgctctgctgtactctcaggctgcaaccgcaaaagcactgatgccgatggctctggcactgaacgtttcaccgctgaccgctgttgcttctttcgctgcggtgtctggtctgttcattctgccgacctacccgacgctggttgctgcggtacagatggatgacacgggtactacccgtatcggtaaattcgtcttcaaccatccgttcttcatcccgggtactctgggtgttgccctggccgtttgcttcggcttcgtgctgggtagcttcatgctgtaa

SEQ ID NO: 473608 - DNA, 1437 bp, Shigella flexneri
atgtcaaacaacattcgtatcgaagaagatctgttgggtaccagggaagttccagctgatgcctactatggtgttcacactctgagagcgattgaaaacttctatatcagcaacaacaaaatcagtgatattcctgaatttgttcgcggtatggtaatggttaaaaaagccgcagccatggcaaacaaagagctgcaaaccattcctaaaagtgtagcgaatgccatcattgccgcatgtgatgaagtcctgaacaacggaaaatgcatggatcagttcccggtagacgtctaccagggcggcgcaggtacttccgtaaacatgaacaccaacgaagtgctggccaatatcggtctggaactgatgggtcaccagaaaggtgaatatcagtacctgaacccgaacgaccatgttaacaaatgtcagtccactaacgacgcctacccgaccggtttccgtatcgcagtttactcttccctgattaagctggtagatgcgattaaccaactgcgtgaaggctttgaacgtaaagctgtcgaattccaggacatcctgaaaatgggtcgtacccagctgcaggacgcagtaccgatgaccctcggtcaggaattccgcgctttcagcatcctgctgaaagaagaagtgaaaaacatccaacgtaccgctgaactgctgctggaagttaaccttggcgcaacagcaatcggtactggtctgaacacgccgaaagagtactctccgctggcagtgaaaaaactggctgaagtcactggcttcccatgcgtaccggctgaagacctgatcgaagcgacctctgactgcggcgcttatgttatggttcacggcgcgctgaaacgcctggctgtgaagatgtccaaaatctgtaacgacctgcgcttgctctcttctggtccacgtgccggcctgaacgagatcaacctgccggaactgcaggcgggctcttccatcatgccagctaaagtaaacccggttgttccggaagtggttaaccaggtatgcttcaaagtcatcggtaacgacaccactgttaccatggcagcagaagcaggtcagctgcagttgaacgttatggaaccggtcattggccaggccatgttcgaatccgttcacattctgaccaacgcttgctacaacctgctggaaaaatgcattaacggcatcactgctaacaaagaagtgtgcgaaggttacgtttacaactctatcggtatcgttacttacctgaacccgttcatcggtcaccacaacggtgacatcgtgggtaaaatctgtgccgaaaccggtaagagtgtacgtgaagtcgttctggaacgcggtctgttgactgaagcggaacttgacgatattttctccgtacagaatctgatgcacccggcttacaaagcaaaacgctatactgatgaaagcgaacagtaa

SEQ ID NO: 473609 - DNA, 477 bp, Shigella flexneri
ttgcgctggttaccttttattgccattttcctttatgtctatattgagatttcaatctttattcaggttgcccatgtattgggggtattgctgaccctcgtgctggttatattcacgtcagttatcggtatgtcactggtacgtaaccagggctttaagaatttcgtgctgatgcagcaaaaaatggcggcgggtgaaaaccctgcggcggagatgattaaaagtgtttcgctgattattgccggtttgctgcttttattaccgggctttttcaccgacttcctcggtcttctgcttttattgccgccggtgcaaaagcatctgacagtgaagttgatgccacatttgcgcttttctcgcatgccaggcggcggttttagcgccgggaccggtggcggtaatacttttgatggtgagtatcagcgaaaggatgatgaccgcgaccgccttgatcataaagacgatcgccaggattaa

SEQ ID NO: 473610 - DNA, 1257 bp, Shigella flexneri
atgagtggactcaaacaagaactggggctggcccagggcattggcctgctatcgacgtcattattaggcactggcgtgtttgccgttcctgcgttagctgcactggtagcaggcaataacagcctgtgggcgtggcccgttttgattatcttagtgttcccgattgcgattgtgtttgcgattctgggtcgccactatcccagcgcaggcggcgtcgcgcacttcgtcggtatggcgtttggttcgcggcttgagcgagtcaccggctggctgtttttatcggtcattcccgtgggtttgcctgccgcactacaaattgccgccggattcggccaagcaatgtttggctggcatagctggcaactgttgttggcagaactcggtacgctggcgttggtgtggtatatcggtactctcggtgccagttccagtgctaatctacaaaccgttattgccggacttatcgtcgcactgattgtcgctatctggtgggcgggcgatatcaaacctgcgagtatccccttccccgcgccaggaaatatcgaacttaccgggttatttgctgcgttatcagtgatgttctggtgttttgtcggtctggaagcatttgcccatcttgcctcggaatttaaaaatccagagcgtgattttcctcgtgctttgatgattggtctgctgctggcaggattagtctactggggctgtacggtagtcgtcttacacttcgacgcctatggtgaacaaatggcggcggcagcatcgcttccaaaaattgtagtacagttgttcggtgtaggagcgttatggattgcctgcgtaattggctatctggcctgctttgccagtcttaacatttatatacagagcttcgcccgcctggtctggtcgcaggcgcaacataatcctgaccactacctggcacgcctctcttctcgccatatcccgaataatgccctcaatgcggtgcttggctgctgcgtggtgagcacgttggtaattcatgccttagagatcaatctggacgctcttattatttatgccaatggcatctttattatgatttatctgttatgcatgctggcaggctgtaaattattgcaaggtcgttatcgactactggcggtggttggcgggctgttatgcgttctgttactggcaatggtcggctggaaaagtctctatgcgctgatcatgctggtggggttatggctgtttctgccaaaacgaaaaacgccggaaaatggcataaccacataa

SEQ ID NO: 473611 - DNA, 294 bp, Shigella flexneri
atgaatattcgtccattgcatgatcgcgtgatcgtcaagcgtaaagaagttgaaactaaatctgctggcggcatcgttctgaccggctctgcagcggctaaatccacccgcggcgaagtgctggctgtcggcaatggccgtatccttgaaaatggcgaagtgaagccgctggacgtgaaagttggcgacatcgttattttcaacgatggctacggtgtgaaatccgagaagatcgacaatgaagaagtgttgatcatgtccgaaagcgacattctggcaattgttgaagcgtaa

SEQ ID NO: 473612 - DNA, 1647 bp, Shigella flexneri
atggcagctaaagacgtaaaattcggtaacgacgctcgtgtgaaaatgctgcgcggcgtaaacgtactggcagatgcagtgaaagttaccctcggtccaaaaggccgtaacgtagttctggataaatctttcggtgcaccgaccatcaccaaagatggtgtttccgttgctcgtgaaatcgaactggaagacaagttcgaaaatatgggtgcgcagatggtgaaagaagttgcctccaaagcgaacgacgctgcaggcgacggtaccaccactgcaaccgtactggctcaggctatcatcactgaaggtctgaaagctgttgctgcgggcatgaacccgatggacctgaaacgtggtatcgacaaagcggttaccgctgcagttgaagaactgaaagcgctgtccgtaccgtgctctgattctaaagcgattgctcaggttggtaccatctccgctaactccgacgaaaccgtaggtaaactgatcgctgaagcgatggacaaagtcggtaaagaaggcgttatcaccgttgaagacggtaccggtctgcaggacgaactggacgtggttgaaggtatgcagttcgaccgtggctacctgtctccttacttcatcaacaagccggaaactggcgcagtagaactggaaagcccgttcatcctgctggctgacaagaaaatctctaacatccgcgaaatgctgccggttctggaagctgttgccaaagcaggcaaaccgctgctgatcatcgctgaagatgttgaaggcgaagcgctagcaactctggttgttaacaccatgcgtggcatcgtgaaagttgctgcggttaaagctccgggcttcggcgatcgtcgtaaagctatgctgcaggatatcgcaaccctgactggcggtaccgtaatctctgaagagatcggtatggagctggaaaaagcaaccctggaagacctgggtcaggctaaacgtgttgtgatcaacaaagacaccaccactatcatcgatggcgtgggtgaagaagctgcaatccagggccgtgttgctcagatccgtcagcagattgaagaagcaacttctgactacgaccgtgaaaaactgcaggagcgcgtagcgaaactggcaggcggcgttgcagttatcaaagtaggtgctgctaccgaagttgaaatgaaagagaaaaaagcacgcgttgaagatgccctgcacgcgacccgtgctgcggtagaagaaggcgtggttgctggtggtggtgttgcgctgatccgcgtagcgtctaaactggctgacctgcgtggtcagaacgaagaccagaacgtgggtatcaaagttgcactgcgtgcaatggaagctccgctgcgtcagatcgtcctgaactgcggcgaagaaccgtctgttgttgctaacaccgttaaaggcggcgacggcaactacggttacaacgcagcaaccgaagaatacggcaacatgatcgacatgggtatcctggacccaaccaaagtaacccgttctgctctgcagtacgcagcttctgtggctggcctgatgatcaccaccgaatgcatggttaccgacctgccgaaaaacgatgcagctgacttaggcgctgctggcggtatgggcggcatgggtggcatgggcggcatgatgtaa

SEQ ID NO: 473613 - DNA, 354 bp, Shigella flexneri; identical to SEQ ID NO: 459006

SEQ ID NO: 473614 - DNA, 870 bp, Shigella flexneri
atggccataagcatcaagggtgttaataccggtgttattcgcaagagtaataatttcattgcactggcgctgaaaattaaagaacctcgcaataaagaatcgttgttctttatgtctgtcatggaactgcgcgacctgctgattgcgctggaaagtcgtctgcatcaaaagcataaactggatgctgctgcacgccttcagtatgagcaagctcgcgataaagtcattaagaaaatggcagaaaacatcccagaaattctggttgatgagcttaaaaatgccgatattaatcgtcgggttaacacgctggaacttaccgataatcaaggcgaaaatcttaccttcgtattaacgctacatgacggtagcaaatgtgagttagtcgtcaatgagttgcagattgaaatgctggcgcgagcaatcattcatgcaattaataatgcggaaatgcgtgaactggcattacgtattacctcactgttagatttcctgccgttatacgacgttgactgccaggacaatggcaatctggaatatgacacctattcccaaccggaatggaaacataacttgttcgaccattatctggcggtgctttaccgctttaaagatgaaagtggcaaagaacaatttagcggcgcagtggtgaaaacgcgtgaagcaacgccgggtaaagaaatagaggcgatcactcgccgaatgcttgatttcagcccacgactgaaaaaactcgcgggtgtgccatgtcaggtctatgttcgcaccgtagcggcgaataacgcccaaccgctaacccaggatcaatgcttacgcgcgctgcatcacttacgtgtacaatccaccagcaaaactgcaccacaggcgaaataa

SEQ ID NO: 473615 - DNA, 672 bp, Shigella flexneri
atgggatatttaaataacgtcaccggttaccgcgaagatttactggctaaccgtgcgattgttaaacacggtaatttcgcactgttaaccccggatggtctgataaaaaatattattccggactttgaaaattgtgacgcgacaatcctctccacgccaaagctgggtgcctcttttgttgattatctggtcacactgcatcaaaacggtggcaaccaacagggcttcggtggcgaaggcattgaaacgttcctgtatgtgatctctggaaatatcactgccaaagccgaaggcaaaacatttgccttaagcgaaggtggctatctttattgcccaccaggctccttaatgacgtttgttaacgcccaggccgaagacagccaaatctttttatataagcgccgctatgttccggtagaaggccatgcaccgtggctgttttctggcaatgccagcgaactggaacgcattcactatgaaggtatggatgatgtgatcctgctggattttctgcccaaagagttaggttttgatatgaacatgcatatcctctcttttgcaccaggtgccagccacggttatatcgaaacacacgttcaggaacatggtgcctatattctttccggtcagggggtttataacctcggtaatgctgccaacttactgatttag

SEQ ID NO: 473616 - DNA, 1290 bp, Shigella flexneri
gtggtcgttcattgccgcataatccaccgcataacgcatcgaattgcgtgcggcgaaattacacattcccgtcaagctatagaagaaacgctgccctggctttcctcttttggcgctgacccaacgggtgggatgacccgtttactttattcgccggaatggctggaaacccagcagcaatttaaaaaaagaatggcagcaagtgggctggaaacacgtttcgatgaagtggggaatttatacggtcgcctgagtggcaccgaatatccacaggaagtggttctgagcggttcgcatatcgataccgtggttaacggcggtaacctcgacgggcaattcggcgcgctggcggcgtggctggcaattgactggttgaaaacgcaatacggcgcaccgttacgtacggtcgaagtggtggcgatggcagaagaagaaggcagccgcttcccgtatgtcttctggggcagtaaaaatatctttgggctggcgaatcctgacgacgtgcggaatatctgtgatgccaaaggaaatagttttgccgatgcgatgaaggcttgcggatttactctgccgaacgccccactaactccgcgtcaggctataaaagcctttgttgaactgcatattgaacagggctgtgtgctggaaagtaatgggcaatcaattggcgtggtgaatgcaattgtcgggcagcgtcgctatacggtgacgctgaacggcgaatcaaaccatgcaggcaccacgccgatgggttatcgtcgtgatacggtttacgctttcagtcgcatttgccatcagtcgatcgaaaaagcgaaaaagatgggcgatccgctggttctgacctttggcaaagtagagccgcgcccgaatacggtaaatgtggtgccgggtaaaaccacgttcaccattgattgtcgtcataccgacgctgccgtgctgcgcgatttcacccaacagttagaaaacgacatgcgggcgatttgcgatgaaatggacattggtattgatatcgatttatggatggacgaagaacccgtgccgatgaataaggagctggtcgccaccctgacagaattgtgtgaaagagaaaaactgaattaccgggtgatgcacagtggtgccgggcacgacgcgcaaattttcgcgcctcgcgtaccaacctgcatgatttttatccccagcatcaacgggatcagccataacccggcggaacgcaccaatattactgaccttgccgaaggggtcaaaacgttggcactcatgctttatcaacttgcctggcagaaataa

SEQ ID NO: 473617 - DNA, 588 bp, Shigella flexneri
gtggctcaagggattcgcctcgggcgtttcacggttaaacagccacagcgttattgtttgctgcgtattacgccgccttcgcatcctcaaccgcttgcagctgcatggatgcaacgcgcggaggaaaccggacttttcgggccactggcgatggcggcaagcgatccgctgcccgctgaattacgccagtttcgtcactgttttcaggccgcgctcaatggcgttaagaccgactggcggcactggctgggtaaaggccccggattaacgccaagtcatgatgacacgttgagcggaatgctgctggcggcctggtattatggcgctttagatgcgcgcgccggtcgcccgttttttgcctgttccgacaatcttcaactcgttaccacagcggtgagcgtcagttatttacgttatgccgcgcaaggatatttcgcctcgccactcctgcactttgtccatgctctgagttgcccgaaacgtaccgctgttgcgattgattcgctgctggcgctggggcatacgtcaggggcagatacgctgctggggttctggcttggccaacaattattacaaggaaaaccatga

SEQ ID NO: 473618 - DNA, 894 bp, Shigella flexneri
atgaaaacactggttgtagctcttgggggcaacgccttactccagcgcggtgaggcgctgacggcggaaaatcaatatcgcaatatcgccagtgctgtacccgcgctggcacgcctggcccgttcttatcggctggcgattgttcacggcaacgggccgcaggtggggctgctggcgttacagaatctggcgtggaaagaggtagaaccgtatccgctggatgtactggtggcggaaagccaggggatgattggctatatgctggcgcagagcttgagcgcacagccgcagatgccgcctgttacgacggtgctgacgcgcattgaggtttcgcctgatgatccggcgtttttgcagccagagaaatttattggtccggtttatcagccagaagaacaagaggcactggaagcggcttacggctggcagatgaaacgtgatggtaaatatttgcgccgggtggtggcgtctccgcaaccgcgtaaaattctcgacagcgaagccatcgagttgttgctcaaagaggggcatgtggtgatttgcagtggcggcggcggtgtgcctgtgacggaagatggggcagggagtgaagcggtgattgataaagatctcgccgctgcgttgctcgccgagcagattaatgccgatggactggtgatcctcaccgatgctgatgcggtatatgaaaactggggaacgccgcagcaacgtgccattcgccatgccacaccggatgagttagcgccatttgccaaagccgatggttcgatggggccgaaggtaacggcggtgagtggttatgtcagaagccgtagtaaacccgcgtggattggggcgttatcgcgaattgaagagacgctggcgggcgaagcggggacctgtatttcgctgtag

SEQ ID NO: 473619 - DNA, 1068 bp, Shigella flexneri
atgaaacaggtttgcgtcctcggtaacgggcagttaggccgtatgctgcgtcaggcaggcgaaccgttaggcattgctgtctggccggtcgggctggacgctgaaccggcggcggtgccttttcaacaaagcgtgattaccgctgagatcgaacgctggccggaaaccgcattaacccgcgagctggcgcgtcatccggcctttgtgaaccgcgatgtgttcccgattattgctgaccgtctgactcagaaacagcttttcgataagctccacctgccgaccgcgccgtggcagttacttgccgatcgcagcgagtggcctgcggtgtttgatcgtttaggtgaactggcgattgttaagcgtcgcactggtggctatgacggtcgcggtcaatggagtttacgcgccaatgaaaccgaacagttaccggcagagtgttacggtgaatgtattgtcgagcagggcattaacttctctggtgaagtatcgctggttggcgcgcgcggctttgatggcagcaccgtgttttatccgctgacgcataacctgcatcaggacggtattttgcgcaccagcgtcgcttttccgcaggccaacgcacagcagcaggcgcaagccgaagagatgctgtcggcgattatgcaggagctgggctatgtgggcgtgatggcgatggagtgttttgtcaccccgcaaggtctgctgatcaacgaactggctccgcgtgtgcataacagcggtcactggacacaaaacggtgccagcatcagccagtttgagctgcatctgcgggcgattaccgatctgccgttaccgcaaccagtagtgaataatccgtcggtgatgatcaatctgattggtagcgatgtgaattatgactggctgaaattgccgctggtgcatctgcactggtacgacaaagaagtccgtccggggcgtaaagtggggcatctgaatttgaccgacagcgacacatcgcgtctgactgcgacgctggaagccttaatcccgctgctgccgccagagtatgccagcggcgtgatttgggcgcagagtaagttcagttaa

SEQ ID NO: 473620 - DNA, 510 bp, Shigella flexneri
atgtcttcccgcaataatccggcgcgtgtcgccatcgtgatggggtccaaaagcgactgggctaccatgcagttcgccgtcgaaatcttcgaaatcctgaatgtcccgcaccacgttgaagtggtttctgctcaccgcacccccgataaactgttcagcttcgccgaaagcgccgaagagaacggttatcaggtgattattgcgggcgcaggcggcgcagcgcacctgccaggcatgattgccgccaaaacgctggtgccggtgctgggcgtgccagtacagagcgccgcactgagcggtgtcgatagcctctactccatcgtacaaatgccgcgcggcattccggtgggtacgctggcgattggtaaagctggcgcggcaaacgcggcattactggcagcacaaattctcgcgactcacgataaagagctacaccagcgtctgaatggctggcgcaaagcccagaccgacgaagtgctggaaaacccggacccgcgaggtgcggcatga

SEQ ID NO: 473621 - DNA, 723 bp, Shigella flexneri
gtggcgacactctttattgcagatcttcatctctgcgtggaagaaccggcgatcaccgccggttttctgcgttttttagcgggggaagcccgcaaggccgacgcgctgtatattcttggcgatctgtttgaagcatggattggcgacgacgatcccaacccactccatcgccagatggcggcagcgatcaaagcggtgtccgattccggcgttccctgttatttcattcatggcaaccgtgattttctgctcggcaaacgctttgcccgtgaaagcggcatgacattattgccggaagaaaaggtgctcgaactttatggtcgccgggtgttgattatgcatggcgacacgctgtgcaccgatgacgcgggttatcaggcttttcgcgccaaagtccacaaaccctggctgcaaatgctattcctcgccctgccgttgtttgtgcgcaaacgcattgccgcgcgaatgcgcgcgaacagcaaagaagccaacagcagtaaatcgctggcgatcatggacgttaaccaaaacgctgtggtcagtgcgatggaaaaacatcaggtgcaatggctaatccacgggcatacccatcgcccggcggtgcatgaacttatcgccaaccagcaacctgcttttcgcgtggtactgggtgcctggcatacggaaggttcgatggtgaaagtcacggctgatgacgttgagctgattcattttccgttttaa

SEQ ID NO: 473622 - DNA, 495 bp, Shigella flexneri
atggttactttccacaccaatcacggcgatattgtcatcaaaacttttgacgataaagcacctgaaacagttaaaaacttcctggactactgccgcgaaggtttttacaacaacaccattttccaccgtgttatcaacggctttatgattcagggcggcggttttgaaccgggcatgaaacaaaaagccaccaaagaaccgatcaaaaacgaagccaacaacggcctgaaaaatacccgtggtacgctggcaatggcacgtactcaggctccgcactctgcaactgcacagttcttcatcaacgtggttgataacgacttcctgaacttctctggcgaaagcctgcaaggttggggctactgcgtgtttgctgaagtggttgacggcatggacgtggtagataaaatcaaaggtgttgcaaccggtcgtaacggtatgcaccaggacgtgccaaaagaagacgttatcattgaaagcgtgaccgttagcgagtaa

SEQ ID NO: 473623 - DNA, 1386 bp, Shigella flexneri
atgctaaaaatcttcaatactctgacacgccaaaaagaggaatttaagcctattcacgccggggaagtcggcatgtacgtgtgtggaatcaccgtttacgatctctgtcatatcggtcacgggcgtacctttgttgcttttgacgtggttgcgcgctatctgcgtttcctcggctataaactgaagtatgtgcgcaacattaccgatatcgacgacaaaatcatcaaacgcgccaatgaaaatggcgaaagctttgtggcgctggtggatcgcatgatcgccgaaatgcacaaagattttgatgctttgaacattctgcgcccggatatggagccgcgcgcgacgcaccatatcgcagaaattattgaactcactgaacaactgatcgccaaaggtcacgcttatgtggcggacaacggcgacgtgatgttcgacgtcccgaccgatccaacttatggcgtgctgtcgcgtcaggatctcgaccagctgcaggctggcgcgcgcgttgacgtggttgatgacaaacgcaacccgatggacttcgttctgtggaagatgtcgaaagagggcgaaccgagctggccgtctccgtggggcgcgggtcgtcctggctggcacattgaatgttcggccatgaactgcaagcagctgggtaaccactttgatatccacggcggcggttcagacctgatgttcccgcaccacgagaacgaaatcgcgcagtccacctgtgcccatgatggtcagtatgtgaactactggatgcactccggaatggtgatggttgaccgcgagaagatgtccaaatcgctgggtaacttctttaccgtgcgcgatgtgctgaaatactacgacgcggaaaccgtgcgttacttcctgatgtcgggccactatcgcagccagctgaactacagcgaagagaacctgaagcaggcgcgtgcggcgctggagcgcctctacactgcgctgcgcggcacagataaaaccgttgcgcctgccggtggcgaagcgtttgaagcgcgctttattgaagcgatggacgacgatttcaacaccccggaagcctattccgtgctgtttgatatggcgcgtgaagtgaaccgtctgaaagcagaagatatggcagcggcgaatgcaatggcatctcacctgcgtaaactttccgctgtattgggcctgctggagcaagaaccggaagcgttcctgcaaagcggcgcgcaggcagacgacagcgaagtggctgagattgaagcgttaattcaacagcgtctggatgcccgtaaagcgaaagactgggcggcggcagatgcggcacgtgaccgtcttaacgagatggggatcgtgctggaagatggcccgcaagggaccacctggcgtcgtaagtaa

SEQ ID NO: 473624 - DNA, 510 bp, Shigella flexneri
atgccaaccgttattacgcacgccgccgttcccctttgcattggtttagggttgggttcgaaaggtctgttatttgccggaatcatcctggcgatgctgcccgatgccgacgtattgtcgtttaaatttggcgttgcttacggcaatgtttttggtcatcgcggttttacccattcgctggtgtttgcgtttgttgtcccgctcttatgtgtgctgattggacgtcgatggttcagggctgggctgattcgctgctggctgtttttaaccgtctcgttgctatcgcacagcttactggattcggtaaccactggcggtaagggcgttggctggctgtggccgtggtcagatgaacgctttttcgctccctggcaggtgattaaagtcgcgccgtttgcattgtctcgttacaccacagcgtacgggcatcaggtgattatttccgaattgatgtgggtgtggttgccggggatgctactgatgggaatgttgtggtggcgcagacgataa

SEQ ID NO: 473625 - DNA, 213 bp, Shigella flexneri
atggcgacattttctttaggtaaacatccgcacgttgagctgtgcgacttgctgaaactggaaggctggagcgaaagcggcgcgcaggcgaaaatcgcgattgccgaaggcctggtgaaagtcgacggtgcggttgaaacgcgcaaacgctgcaaaatcgtcgccggtcagacagtgagttttgcaggacacagcgtacaggttgttgcctga

SEQ ID NO: 473626 - DNA, 867 bp, Shigella flexneri
atggcagcaaagattattgacggtaaaacgattgcgcagcaggtgcgctctgaagttgctcaaaaagttcaggctcgtattgcagccggactgcgggcaccaggactggccgttgtgctggtgggtagtaaccctgcatcgcaaatttatgtcgcaagcaaacgcaaggcttgtgaagaagtcgggttcgtctcccgctcttatgacctcccggaaaccaccagcgaagcggagctgctggagcttatcgatgcgctgaatgccgacaacaccatcgatggcattctggttcaactgccgttaccggcgggtattgataacgtcaaagtgctggaacgtattcatccggacaaagacgtggacggtttccatccttacaacgtcggtcgtctgtgccagcgcgcgccgcgtctgcgtccctgcaccccgcgcggtatcgtcacgctgcttgagcgttacaacattgataccttcggcctcaacgccgtggtgattggcgcatcgaatatcgtcggtcgcccaatgagcatggaactgttgctcgcaggttgcaccaccaccgtgactcaccgcttcactaaaaatctgcgtcatcacgtagaaaatgccgatctgttgatcgttgccgttggcaagccaggctttattcccggtgactggatcaaagaaggcgcaattgtgattgatgtcggcatcaaccgtctggaaaatggcaaagttgtgggcgacgtcgtgtttgaagacgcggctaaacgcgcctcatacattacgcctgttcccggcggcgttggcccgatgacggttgccacgctgattgaaaacacgctacaggcgtgcgttgaatatcatgatccacagggtgagtaa

SEQ ID NO: 473627 - DNA, 543 bp, Shigella flexneri
atgaaattaagatttatttcgtctgcgctggctgccgcactattcgccgctacgggtagttatgctgccgttgtagatggcggtacaattcactttgaaggcgaactggtgaatgctgcctgttcagtgaatactgactcggcagaccaggttgtcacactcggtcaatatcgtaccgatattttcaatgctgttggtaatacctctgcattaattccattcaccattcagttgaacgactgcgatcctgttgttgccgctaatgctgccgttgcattttctggtcaggctgatgcaatcaatgataatttattggccattgcatccagtacaaatacaacaacagcaacgggtgtcggtattgaaatacttgataatacatccgcaattctcaaacctgatgggaatagcttctcaaccaaccagaacttgatccccaggaccaacgttcttcatttttctgcacgttataaaggcaccggtacaagtgcatcagcagggcaagcaaatgctgacgcgacttttattatgagatacgaataa

SEQ ID NO: 473628 - DNA, 693 bp, Shigella flexneri
atgatgactaaaataaagttattgatgctcatgatattttatttaatcatttcggccagcgcccatgctgccggagggatcgcattaggtgccacgcgtattatttatcccgctgatgctaaacagactgcggtatggattaaaaatagccataccaatgagctctttctggtcaattcgtggattgaaaacagcagcggtgtaaaagaaaagtcattcatcattacaccgccactatttgttagtgaacccaaaagcgaaaatactttgcgtattatttacaccggtccaccgctggcggcagatcgtgagtctctgttctggatgaatgttaagacgatcccttcggtagataaaaatgcattgaacggcaggaatgttttgcaactggcgattttatcgcgcatgaaattatttctccgtccaattcaattacaagaattacccgcagaagcgccggacacactcaagttttcgcgatccggtaactatatcaatgttcataatccatcacctttttatgtcaccctcgttaacctgcaagtgggcagccaaaagttggggaatgctatggcggcacccagagttagttcacaaattcccttaccctcaggagtgcagggaaagctgaaatttcagaccgttaatgattatggttcagtaaccccggtcagagaagtgaacttaaactaa

SEQ ID NO: 473629 - DNA, 519 bp, Shigella flexneri
atgaaaatacccactactacggatattccgcagaggtatacctggtgtctggccggaatttgttattcatctcttgccattttaccctcctttttaagctatgcggaaagttatttcaacccggcatttttattagagaatggcacatccgttgctgatttatcgcgctttgagagaggtaatcatcaacctgcgggcgtgtatcgggtggatctctggcgtaatgatgagttcattggttcacaggatatcgtatttgaatcgacaacagaaaatacaggtgataaatcaggtgggttaatgccctgttttaaccaggtactccttgaacgaattggccttaatagcagtgcatttcccgagttagcccagcagcaaaacaataaatgcatcaatttactgaaagctgtacctgatgccacaattaactttgattttgcagcgatgcgcctgaacatcactattcctcagatagcgttgttgagtagcgctcacggggtaatgactccaacttactga

SEQ ID NO: 473630 - DNA, 657 bp, Shigella flexneri
gtggcaaaaaaagcggggcagatagttgggcgtattaccgcgcaaatagataccttgcaccgtgagcgttacggtgaagataccggtcatttcggcatgattgacgccattgatgatccgcaggattttgccgcgttgtttggcgcagcggaagcgtggttgaagtcacaaggtgcaagtaagatcagcgggcctttcagcctgaatatcaatcaggaaagcggattactgattgaaggttttgacacaccaccctgtgcgatgatgccacacggcaaaccgtggtatgccgcgcatattgaacaactgggttatcacaaaggcattgatttactggcgtggtggatgcagcgaaccgatctcactttctctccggcgctaaaaaaactgatggatcaggtgcgcaaaaaggtgaccattcgctgcatcaatcgtcagcggtttgccgaagagatgcagatcctgcgtgagattttcaactctggctggcagcacaactggggatttgtgccgtttaccgaacatgaattcgcgaccatgggcgaccaacttaaatatctggtgccggacgatatgatctacatcgctgagattgattctgcaccctgcgcgtttattgtggcttgcctaacatcaacgaggcgattgccgatctga

SEQ ID NO: 473631 - DNA, 213 bp, Shigella flexneri
atgggcgtgcgcgacgagtatcagttcagccgcataggcccggtgattgcgctgttattgattgaagccttacgcgatccgtttgcccgccggaagatcgatgcgctggagatgtcatggatcctcgaaaccaatacaggcatgaataacatgctggaacgcattggggcggagccgtacaagcgttaccgattgtatgaaaagcaaatttaa

SEQ ID NO: 473632 - DNA, 771 bp, Shigella flexneri
atgaaagatgaacgtcgccctatttgcgaagtggttgcagagagtatcgaacggttaattatcgacggcgtactgaaggtcggtcagccgcttccctcggaacgtcgactgtgtgaaaagctcggcttctcacgctccgcactgcgtgaaggactgaccgtgctgcgcgggcgcgggattattgaaacggcgcagggtcgcgattctcatgtcgcacggcttaatcgggagcaggacaccagcccgctgatccatctgttcagtacgcagccgcgaacgctgtacgatctgctcgacgttcgcgcattactggagggcgaatcggcaaggctggcggcaacgctgggaacgcaggctgattttgttgtgataacccgctgttatgaaaaaatgctcgccgccagtgagaaccacaaagagatttcgctgatcgaacatgcgcagttggatcacgctttccatctcgccatttgtcaggcttctcacaatcaggtgctggtgtttacgctgcaatcattgaccgatctgatgtttaattcagtgtttgccagcgtaaataatctctaccatcgaccacagcaaaaaaagcagatcgatcgccagcatgcgcggatctacaacgcggtgttgcagcggctgccgcacgtcgctcagcgcgcagcgcgcgatcatgtacggaccgtgaaaaagaatctccacgatatcgagctggaaggccaccatttgattcgctcggcggtgccgctggagatgaacaaggtgggaatgtga

SEQ ID NO: 473633 - DNA, 405 bp, Shigella flexneri
atgagcatcttgtacgaagagcgtcttgatggcgctttacccgatgtcgaccgcacatcggtactgatggcactgcgtgagcatgtccctggacttgagatcctgcataccgatgaggagatcattccttacgagtgtgacgggttgagcgcgtatcgcacgcgtccattactggttgttctgcctaagcaaatggaacaggtgacagcgattctggctgtctgccatcgcctgcgtgtaccggtggtgacccgtggtgcaggcaccgggctttctggtggcgcgctgccgctggaaaaaggtgtgttgttggtgatggcgcgctttaaagagagcctcgacattaaccccgttagtcgccgcgcgcgcgtgcagccgggcgtatgtaacctggcgatctcctag

SEQ ID NO: 473634 - DNA, 1023 bp, Shigella flexneri
gtggcggaaaatgccggtggcgtccactgcctgaaatatggtctgaccgtacataacctgctgaaaattgaagtgcaaacgctggacggcgaggcgctgacgctgggatcggacgcgctggattcacctggttttgacctgctggcgctgttcaccggatcggaaggtatgctcggcgtgaccaccgaagtgacggtaaaactgctgccgaagccgcccgtggcgcgggttctgttagccagctttgactcggtagaaaaagccggacttgcggttggtgacatcatcgccaatggcattatccccggcgggctggagatgatggataacctgtcgatccgcgcggcggaagattttattcatgccggttatcccgtcgacgccgaagcgattttgttatgcgaactggacggcgtggagtctgacgtacaggaagactgcgagcgggttaactacatcttgttgaaagcgggcgcgactgacgtccgtttggcacaggacgaagcagagcgcgtacgtttctgggccggtcgcaaaaatgcgttcccggcggtaggacgtatctccccggattactactgcatggatggcaccatcccgcgtcgcgccctgcctggcgtactggaaggcattgcccgtttatcgcagcaatatgatttacgtgttgccaacgtctttcatgccggagatggcaacatgcacccgttaatccttttcgatgccaacgaacctggtgaatttgcccgcgcggaagagctgggcgggaagatcctcgaactctgcgttgaagttggcggcagcatcagtggggaacatggcatcgggcgagaaaaaatcaatcaaatgtgcgcccagttcaacagcgatgaaatcacgaccttccatgcggtcaaggcggcgtttgaccccgatggtttgctgaaccctgggaaaaacattcccacgctacaccgctgtgctgaatttggtgccatgcatgtgcatcacggtcatttaccttttcctgaactggagcgcttttga

SEQ ID NO: 473635 - DNA, 1053 bp, Shigella flexneri
atgctacgcgagtgtgattacagtcaggcgctgctggagcaggtgaatcaggcaattagcgataaaacgccgctggtgattcagggcagcaatagcaaagcctttttaggtcgcccagtcaccgggcaaacgctggatgtgcgttgtcatcgcggcattgttaattacgacccgaccgagctggtgataaccgctcgtgccggaacgccgctggtggcgattgaagcggcgctggagagcgccgggcaaatgcttccctgcgagccgccgcattatggtgaagaagccacctggggcgggatggtcgcctgcgggctggcggggccgcgtcgcccgtggagcggttcggtccgcgattttgtcctcggcacgcgcatcattaccggcactggaaaacatctgcgttttggtggcgaagtgatgaaaaacgttgccggatacgatctctcacggttaatggccggaagctatggttgtcttggcgtgctcactgaaatctcaatgaaagtgttaccgcgaccgcgtgcctctctgagcctgcgtcgggaaatcagcctgcaagaagccatgagtgaaatcgccgagtggcaactccagccattacccattagtggcttatgttacttcgacaatgcgttgtggatccgccttgagggcggcgaaggatcggtaaaagcagcgcgtgaactgctgggtggcgaagaggttgcgggtcagttctggcagcaattgcgtgaacaacaactgccgttcttctcgttaccaggtaccttatggcgcatttcattacccagcgatgcgccgatgatggatttacccggcgagcaactgatcgactggggcggggcgttacgctggctgaaatcgacagccgatgacaatcaaatccatcgcatcgcccgcaacgctggcggtcatgcgacccgctttagtgccggagatggtggctttgccccgctatcggctcctttattccgctatcaccagcagcttaaacagcagctcgacccttgcggcgtgtttaaccccggtcgcatgtacgcggaactttga

SEQ ID NO: 473636 - DNA, 159 bp, Shigella flexneri
atgcaaacccgattaaccgaagagatgcggcagaacgcgcgctggaagccgacagcatcctgtgcgcctgtgttcactgcggattttgtaccgcaacctgcccaacctatcagcttctgggcgatgaactggacgggccgcgcgggcgcatctatctga

SEQ ID NO: 473637 - DNA, 1053 bp, Shigella flexneri
gtgctggaaggcaacgaagtcacgcttaaaacacaggagcatctcgatcgctgcctcacttgccgcaattgtgaaaccacctgtccttctggtgtgcgctatcacaatttgctggatatcgggcgtgatattgtcgagcagaaagtgaaacgcccactgccggagcgaatgctgcgcgaaggattgcgccaggtagtgccgcgtccggcggtcttccgtgcgctgacgcaggtagggctggtgctgcgaccgtttttaccggaacaggtcagagcaaaactgcctgctgaaacggtgaaagctaaaccgcgtccgccgctgcgccataagcgtcgggttttaatgctggaaggctgcgcccagcctacgctttcgcccaacaccaacgcggcaactgcgcgagtgctggatcgtctggggatcagcgtcatgtcagctaacgaagcaggctgttgtggcgcggtggactatcatcttaatgcgcaggagaaagggttggcacgggcgcgcaataatattgatgcctggtggcccgcgattgaagcaggtgccgaggcaattttgcaaaccgccagcggttgcggcgcgttcgtcaaagagtatgggcagatgctgaaaaacgatgcgttatatgccgataaagcgcgtcaggtcagtgaactggcggtcgatttagtcgaacttctgcgcgaggaaccgctggaaaaactggcaattcgcggcgataaaaaactggccttccactgcccgtgtaccctacaacatgcgcaaaagctgaacggcgaagtggaaaaagtgttacttcgtcttggatttaccttaacggacgttcccgacagccatctgtgctgcggttcagcgggaacatatgcgttaacgcatcccgatctggcacgccagctgcgggataacaaaatgaatgcgctggaaagcggcaaaccggaaatgatcgtcaccgccaacattggttgccagacgcatctggcgagcgccggtcgtacctctgtgcgtcactggattgaaattgtagaacaagcccttgaaaaggaataa

SEQ ID NO: 473638 - DNA, 405 bp, Shigella flexneri
atgaaaactaaagtcattcttagccagcaaatggcgagtgcaattattgccgcaggtcaggaagaggcgcagaaaaataactggtctgtttccattgctgttgccgatgacggcggtcatctgctggcgttaagtcgcatggacgattgcgcgccgattgcggcttacatctcccaggagaaagcgcgtaccgccgcgctggggcgtcgtgaaactaagggctatgaagagatggtgaacaacggacgtaccgcgttcgtgactgcgccgttactgacgtcgctggaaggcggcgtaccggttgttgttgatgggcaaattattggtgccgtgggcgtttctggtttaaccggagcacaggatgcgcaggtcgcgaaagtggcagcagcggtgttggcgaaataa

SEQ ID NO: 473639 - DNA, 2172 bp, Shigella flexneri
atgagtcaaaccataacccagggccgtttacgcattgacgccaattttaaacgttttgtggatggagaagttttgccgggcgtggaactggacgctgctgcattctggcacaatgttgatgagatcgttcacgatctggcaccagaaaatcgtcagttgctggcagaacgcgatcgcattcaggcggcgcttgatgagtggcatcgcagcaatccggggccggtaaaagataaagcggcctataaatctttccttcgtgaactgggctacctggtgccgcaaccggagcgcgtgacggtggaaaccacgggcattgacagcgaaatcaccagtcaggcggggccacagctggtggttccggcaatgaacgcccgctacgcgctgaacgcggcgaacgctcgctggggctcactgtacgatgcgttatacggcagcgacatcatcccgcaggaaggggcgatggtcagtggctacgatccgcagcgcggtgagcaggttatcgcctgggttcgacgtttcctcgatgaatcactaccgctggaaaacggcagctatcaggatgtggtggcgtttaaggtggtcgataaacaattacgcatccagttgaaaaatggtaaagaaaccacgttacgtactccagcacagtttgtcggttaccgtggcgatgccgctgcgccgacctgcattttgctgaaaaataacggcctgcatattgaactgcaaattgatgccaacgggcggattggcaaagacgatccggcgcacatcaacgatgttatcgtcgaagctgctatcagtaccattctcgactgcgaagattcggtcgcggcggttgatgcggaagataaaatcctgctgtaccgcaatctgctgggcctgatgcaggggactctgcaagagaaaatggagaaaaacggtcggcaaatcgtacgtaaactgaatgacgatcgtcagtacaccgccgccgatggctctgaaatttctctgcacggacgctcgttgctgtttatccgcaacgtgggtcatttgatgaccattcctgtgatttgggacagcgaaggcaatgaaatcccggaaggtattcttgatggcgtcatgactggcgcgattgccctctatgatttaaaagtgcagaaaaactcgcgcactggcagcgtctatattgtgaaaccgaaaatgcacggtccgcaggaagtggcgttcgccaacaaactgtttacccgcattgagacaatgctcggtatggcaccgaataccctgaaaatgggcattatggatgaagaacgccggacctcgctgaacttgcgtagctgtatcgctcaggcgcgcaaccgcgtggcgttcatcaataccggtttcctcgaccgtaccggcgatgaaatgcattcggtgatggaagctggcccgatgctgcgtaaaaaccagatgaaatcgacgccgtggatcaaagcctacgaacgtaataacgtgctttccggtctgttctgtgggctgcgcggtaaagcgcaaatcggtaaaggcatgtgggcaatgccggacctgatggcagacatgtacagccagaagggcgaccaactgcgtgccggggcaaacacagcctgggttccgtcaccaaccgctgctacgctccatgcgctgcactaccaccataccaacgtacagagcgtgcaagccaacattgcccagaccgagttcagtgctgaatttgaaccgctgctggacgatctgctgactattccggtggctgaaaacgctaactggtcggcgcaagagatccaacaagagctggataacaacgtgcaggggattctggggtacgtggtgcgttgggtggagcaggggattggttgttcaaaagtgccggatattcacaacgtggcgctgatggaagaccgcgcaacgctgcgtatctccagccagcatatcgccaactggttacgtcacggtattctgaccaaagaacaggtgcaggcgtcgctggagaatatggcgaaagtggttgatcagcaaaatgctggcgatccggcttatcgtccgatggcggggaatttcgctaactcgtgtgcttttaaagctgccagcgatttaatcttcctcggcgtgaaacagccaaacggttataccgaaccgttattacacgcctggcgtttacgcgaaaaagaaagtcattaa

SEQ ID NO: 473640 - DNA, 1596 bp, Shigella flexneri
atggttacctggacccaaatgtatatgccgatgggaggactggggctatccgctctggtcgccctgatcccgataatattcttcttcgttgcactcgcggtattacgtctgaaaggacatgtcgctggagcaataacccttatattatctatcctgattgcgatattcgcctttaaaatgccgattgatatggcatttgctgctgcgggctatggctttatttatggattatggccaattgcgtggattattgtcgcggcggtgttcctgtataaattaaccgttgccagcgggcagttcgatattatccgcagctcggttatctccatcaccgacgatcagcgtttgcaggtgttactgattggtttctcctttggtgcgttgctggaaggagctgctggctttggtgcgacggtggcgtttggtgcgttgggcgtgccgattctggtcgccggtcaggtaacgggaatcgatccgttccacattggcgcaatggcgggacgtcagttaccgttcctgtcggttcttgtgccgttctggctggtagcaatgatggacggctggaaaggggtgaaagagacgtggccagcggcgctggttgctgggggaagcttcgctgtcactcagttctttacctctaactatattggtccggaactgccggatattacttcggcgctggtgagtatcgtctcactcgctttatttcttaaagtctggcggccgaaaaataccgaaacggcaatcagcatggggcaatccgcaggtgcgatggtggtaaataagccatcttctggcggtcccgtgccttcagaatatagtctggggcaaatcattcgtgcgtggtcaccgtttttaatcttaacggtgctggtcaccatctggaccatgaagccgtttaaagcgttatttgctccgggcggcgcgttttattcactggtgattaatttccagatccctcatttgcatcaacaagtgttgaaagcggcacccattgtcgcccaaccaacgccaatggatgcggtgtttaaattcgaccctctctcggctggcggcaccgctatttttattgcggcgattatctctatcttcatcctcggcgtgggcatcaagaaagggattggcgtctttgccgaaatgctaattagtctgaagtggccgatattgtcgattggcatggtgctggcattcgccttcgtcaccaactattccggcatgtccaccacgctggcgctggtactggcaggtacaggcgtgatgttcccgtttttctcaccgtttctcggctggctgggcgtattccttaccgggtcggacacttcttcaaacgccctgtttggttcactgcaatcgaccacggcgcagcaaatcaacgtctctgacactctgctggtggcagcaaataccagcggcggcgtaactggcaagatgatctccccgcaatctatcgccgtggcctgcgccgcgacgggcatggtgggccgagaatctgaactgttccgctacaccgtgaagcacagtctgatttttgccagcgttatcggcgttatcaccctgctgcaggcgtatgtgtttaccgggatgttagtctcgtaa

SEQ ID NO: 473641 - DNA, 234 bp, Shigella flexneri
atgatcgttactatcccacgagatcttgccatcgatcttggctggtcaccgggcacagagcttaccgtggagaaaaaaggcgatagcgttaatttgcgcgccacagagcacaaaccgcgtgggcgtcttaccgtcgcgcagttgttgagccaaatcgatgaaagcgaaattacggagctaaatcagtccacagaaggatgggctgaagggaaaaaaggtaatgaagcatggtaa

SEQ ID NO: 473642 - DNA, 366 bp, Shigella flexneri
atggtaaaggcacggacgccacatcgtggtgagatctggtattttaaccctgatccggttgccgggcatgaacttcaggggccacattattgcattgtggtaacggacaaaaaactcaacaatgttttaaaagttgctatgtgctgcccgatttcaacaggggcaaatgcagcacgttccacaggggtgacggtgaacgtcctcccccgtgatacgcaaaccggtaacctgcatggcgttgtactttgtcaccagctaaaagccgtcgatcttattgcccgtggcgctaaatttcataccgttgccgatgaaaaattgattagtgaagttatcagtaaactggtgaatttaatcgacccacaataa

SEQ ID NO: 473643 - DNA, 789 bp, Shigella flexneri
atgaataacatctggtggcagaccaaaggtcaggggaatgttcatcttgtgctgctgcacggatggggactgaatgccgaagtgtggcgttgcattgacgaggaacttagctcgcattttacgctgcaccttgttgacctgcccggcttcgggcgtagccggggatttggtgcgctgtcacttgctgatatggccgaagccgtgctgcaacaggcacctgataaagccatttggttaggctggagtctgggcgggctggtggcaagccagattgcgttaacccatcccgagcgtgttcaggcgctggtcaccgtggcgtcgtcaccttgttttagtgctcgtgacgagtggccggggataaaaccggacgtgctggcgggatttcagcagcaactcagtgatgattttcagcgtacagtggagcggttcctggcgttacaaaccatggggactgaaacggcgcgccaggatgcgcgggcgttgaagaaaaccgttctggcgttaccgatgccggaggttgacgtgcttaatggcgggctggaaatcctgaaaacggtcgatctccgtcagccgctgcaaaacgtgtccatgccgtttttgcgattgtatggctatctcgacggtctggtgccgcgcaaagtggtgccgatgctggataaactttggcctcacagcgaatcatatatcttcgccaaagcggcccatgcgccgtttatttcgcatccggtcgagttttgtcacctgctggtggcgttgaagcagagggtgttggtggtaagtgagagctaa

SEQ ID NO: 473644 - DNA, 684 bp, Shigella flexneri
atgctaacagtaccgggattatgctggctatgccgaatgccactggcgttaggtcattgggggatttgttcggtctgttcacgcgccacccgcacagataaaacgttatgcccacaatgtggattacccgccacacactcccatcttccctgcggtcgctgcctgcaaaaaccgccgccctggcaaagactggtcacggttgccgactatgcgccgccgttaagtccgcttatccaccagcttaaattttcccggcgcagtgaaatcgccagcgccctgtcacgtctgttactattggaagtcttacacgctcgtcgcaccaccgggttgcaattgccggatcgcatcatcagcgttccgttatggcagcggcgtcactggcgtcggggatttaatcagagcgatttgctgtgtcagccgttatcacgctggttgcactgccaatgggatagcgaagccgtcacacgtacacgggccactgcgacccagcattttctcagtgcccggctgcgcaagcgcaacctgaaaaatgcctttcgtcttgaattgcccgtgcaaggtcgccatatggtgattgtggatgatgtcgttaccaccggaagtaccgtcgcagagattgcgcagttgcttttacgcaatggtgcggcgactgtccaggtctggtgcctttgtcgaaccttgtag

SEQ ID NO: 473645 - DNA, 576 bp, Shigella flexneri
atgatccgtatttccgatgctgcacaagcgcactttgccaaactgctggcaaatcaggaagaagggacacaaatccgcgtatttgtgattaaccctggcacgcctaacgctgaatgtggtgtttcttattgtccgccggatgccgtggaagccaccgacactgccctgaaatttgacctgctgaccgcgtatgttgatgagttaagcgcaccatacctggaagatgcagagatcgactttgttaccgaccagttgggttctcagttaacgctgaaagccccgaacgccaaaatgcgtaaagtggcagacgatgcaccgctgatggagcgcgtggagtatatgctgcagtcgcagatcaacccacagcttgctggtcacggtggtcgcgtttcgctgatggaaatcaccgaagacggttacgccattctgcaatttggcggcggctgtaacggttgttccatggtcgatgtgacgctgaaagaagggatcgagaagcagctgctgaacgaattcccggagctgaaaggtgtgcgcgatctcaccgaacaccagcgcggcgaacactcctactactaa

SEQ ID NO: 473646 - DNA, 1317 bp, Shigella flexneri
atgccattagtcattgttgctatcggtgtaatcttgttgttgctcctgatgatccgcttcaaaatgaacggcttcatcgctctcgtcctcgtggcgcttgctgttggattaatgcaaggaatgccgctggataaagttattggctccatcaaagccggtgtcggcgggacgctcggtagccttgccctgatcatgggttttggcgcaatgctgggcaaaatgctggcagactgcggtggcgcacaacgtatcgccaccacgctgattgccaaatttggtaaaaagcacatccagtgggcggtggtgttaaccggttttaccgttggttttgccctgttctatgaagtgggcttcgtgctgatgctgccgctggtgtttaccatcgcggcttccgcgaatattccattgctgtatgttggtgtaccaatggcggctgcactgtctgtgacccacggcttcctgccaccgcatccgggcccgactgcgattgccaccattttcaatgccgatatgggtaaaaccctgctgtacggtactattctggcaatcccgaccgtgattctcgccggtccggtttacgctcgcgtgttgaaaggtatcgataagccaatcccggaaggtctctacagcgcgaaaaccttcagcgaagaagagatgccgagctttggcgtcagcgtctggacctctctggtgccggttgtgctgatggcgatgcgtgcgattgccgaaatgatcctgccgaaaggtcacgctttcctgccggtagcggagttcctcggtgacccggtaatggcaacgctgattgccgtgctgattgcgatgttcacctttggtctgaaccgtggtcgttcaatggatcagattaacgacacgctggtttcttccatcaaaatcattgcgatgatgctgttgatcatcggtggtggcggtgcgttcaagcaggtgctggtagacagcggcgtggacaaatacattgcttccatgatgcacgaaaccaacatttctccgctgctgatggcctggtcgattgctgccgtactgcgtatcgcgctgggttccgcaaccgttgcggcaatcactgcgggtggtatcgcggcaccgctgattgcaacgacgggtgttagcccagagctgatggttattgcggtgggttccggtagtgtgattttctctcatgtgaacgatccgggcttctggctgttcaaagagtactttaacctgactatcggcgagaccatcaaatcctggtcgatgctggaaaccattatctcggtgtgcggtctggtaggctgtctgctgctgaatatggtgatttga

SEQ ID NO: 473647 - DNA, 2085 bp, Shigella flexneri
atggaaagcaaacgtctggataatgccgcgctggcggcggggattagccccaattacatcaatgcccacggtaaaccgcagtcgattagcgccgaaaccaaacggcgtttgcttgacgcgatgcatcaacgtaccgccacgaaagtggcggtaacgccagtctcgaatgtcatggtttataccagcggcaaaaaaatgccgatggtggtggagggcagcggcgaatatagctggcagctgaccaccgaagaaggaacgcagtacaaaggccatgtaacggggggcaaagcgttcaatctaccgacgaagctgccggaaggttatcacacgctaacactcacccaggacgaccagcgcgcgcattgccgggtgattgtcgccccgaaacgttgttacgaaccgcaggctttgctgaataaacaaaagctgtggggtgcctgcgttcagctttatacgctgcgatcggaaaaaaactggggtattggggattttggcgatctcaaagcgatgctggtggatgtggcaaaacgtggcgggtcgttcattggcctgaacccgattcatgcgctctatccggcaaatccggagagcgccagcccatacagcccgtcttctcgccgttggctgaatgtgatttatatcgacgttaacgccgttgaagatttccatcttagcgaagaggctcaggcctggtggcagttgccgaccacgcaacagacgctgcaacaggcgcgcgatgccgactgggtcgattactccacggttaccgccctaaaaatgacagcattacgaatggcgtggaaaggtttcgcgcaacgtgatgatgagcagatggccgcgtttcgccagtttgttgcagagcagggcgacagcctgttctggcaggctgcctttgatgcgctacatgcccagcaagtgaaagaggacgaaatgcgctggggctggcctgcatggccagagatgtataagaacgtggattcaccagaagtgcgtcagttctgcgaagaacatcgtgatgacgtcgatttttatctctggttgcagtggctggcttacagccagtttgccgcctgctgggagataagccagggctatgaaatgccgattggcttgtatcgtgatctggcggttggcgtagcggaaggtggggcggaaacctggtgtgaccgtgaactatattgcctgaaagcatcggttggcgcgccgccggatatcctcggcccgttggggcagaactggggattaccgccaatggacccgcatatcatcaccgcgcgtgcctatgaaccgtttatcgagctgttgcgtgccaatatgcaaaactgcggcgcattacgaattgaccatgtgatgtcgatgctgcgtttgtggtggataccgtatggcgagacggcagatcagggcgcgtatgttcactatccggtggatgatctgctctcgattctggcactcgaaagtaaacgtcatcgctgtatggtgattggtgaagatctcggtaccgtaccggtagagattgttggtaagctgcgcagcagcggtgtgtactcttacaaagtgctctatttcgaaaacgaccacgagaagacgttccgtgcaccgaaagcgtatccggagcagtcgatggcggttgcggcgacacatgacctgccaacgctgcgtggttactgggagagcggggatctaacgctgggcaaaaccctggggctgtatccggatgaagtggtactgcgcggtctgtatcaggatcgcgaactggcgaagcaagggctgctggatgcactgcataaatatggttgtctgccaaaacgtgccgggcataaggcatcgttgatgtcgatgacgccgacgctgaaccgtggtttgcagcgctacattgccgacagtaacagtgctctgttaggactacagccggaagactggctggatatggccgaaccggtgaatattcctggcaccagttaccagtataaaaactggcgacgcaagctttccgcaacgcttgagtcgatgtttgccgatgatggcgtgaacaagttgctgaaggatttggacagacggcgcagagctgcagcgaagaagaagtag

SEQ ID NO: 473648 - DNA, 2394 bp, Shigella flexneri
atgtcacaacctatttttaacgataagcaatttcaggaagcgctttcacgtcagtggcagcgttatggcttaaattctgcggctgaaatgactcctcgccagtggtggctggcagtgagtgaagcactggccgaaatgctgcgtgctcagccattcgccaaaccggtggcgaatcagcgacatgttaactacatctcaatggagtttttgattggtcgtctgacgggcaacaacctgttgaatctcggctggtatcaggatgtacaggattcgttgaaggcttatgacatcaacctgactgacctgctggaagaagagatcgacccggcgctgggtaacggtggtctgggacgtctggcggcgtgcttcctcgactcaatggcaactgtcggtcagtctgcgacgggttacggtctgaactatcaatatggtttgttccgccagtcttttgtcgatggcaaacaggttgaagcgccggatgactggcatcgcagtaactacccgtggttccgccacaacgaagcactggatgtgcaggtagggattggcggtaaagtgatgaaagacggacgctgggagccggagtttaccattaccggtcaagcgtgggatctccccgttgtcggctatcgtaatggcgtggcgcagccgctgcgtctgtggcaggcgacgcatgcgcatccgtttgatctaactaaatttaacgacggtgatttcctgcgcgccgaacagcaaggcatcaatgcggaaaaactgaccaaagttctctatccaaacgacaaccatactgccggtaaaaagctgcgcctgatgcagcaatacttccagtgtgcctgttcggtagcggatattttgcgtcgccatcatctggcggggcgtaaactgcacgaactggcggattacgaagttattcagctgaacgatacccatccaactatcgcgattccagaactgctgcgcgtgctgaccgatgagcaccagatgagctgggatgacgcctgggccatcaccagcaaaactttcgcttacaccaaccataccctgatgccagaagcgctggaacgctgggatgtgaaactggtgaaaggcttactgccgcgccatatgcagattattaacgaaattaatactcgctttaaaacgctggtggagaaaacctggccgggcgatgaaaaagtgtgggccaaactggcggtggtgcacgataaacaagtgcatatggcgaacctgtgtgtggttggcggtttcgcggtgaacggtgttgcggcgctgcactcggatctggtggtgaaagatctgttcccggaatatcaccagctatggccgaacaaattccataacgttaccaacggtattaccccacgtcgctggatcaaacagtgcaaccctgcactggcggctctgttggataaatcactgcaaaaagagtgggctaacgatctcgatcagctgatcaatctggaaaaattcgctgatgatgcgaaattccgtcagcaatatcgcgagatcaagcaggcgaataaagtctgtctggcggagtttgtgaaagttcgtaccggtattgagatcaatccacaggcgattttcgatattcagatcaaacgtctgcatgagtacaaacgccagcacctgaatctgctgcatattctggcgttgtacaaagaaattcgtgaaaacctgcaggctgatcgcgtaccgcgcgtcttcctcttcggcgcgaaagcggcaccgggctactacctggcgaagaatattatctttgcgatcaacaaagtggctgacgtgatcaacaacgatccactggttggcgataagttgaaggtggtgttcctgccggattattgcgtttcggcggcggaaaaactgatcccggcggcggatatctccgaacaaatttcgactgcaggtaaagaagcttccggtaccggcaatatgaaactggcgctcaatggtgcgcttactgtcggtacgctggatggtgcgaacgttgaaatcgccgagaaagtcggtgaagaaaatatctttatttttggtcataccgtggaacaagtgaaggctattctggccaaaggctacgacccggtgaaatggcggaagaaagataaggtgctggacgcagtattgaaagagctggaaagcggtaaatacagcgacggcgataagcatgccttcgaccagatgctgcacagtatcggcaaacagggcggcgatccgtatctggtgatggcggatttcgcagcctatgttgaggcacaaaagcaggtggatgtgctgtaccgcgaccaggaggcctggactcgcgcggcgatcctcaataccgcccgctgcggtatgtttagctcggatcgctctattcgcgattatcaggctcgtatctggcaggcaaaacgctaa

SEQ ID NO: 473649 - DNA, 669 bp, Shigella flexneri
atgctgattccgtcaaaactaagtcgtccggttcgactcgaccataccgtggttcgtgagcgcctgctggctaaactttccggcgcgaacaacttccggctggcgctgatcacgagtcctgcgggctacggaaagaccaccctcatttcccagtgggcggcaggcaaaaacgatatcggctggtactcgctggatgaaggtgataaccagcaagagcgtttcgccagctatctcattgccgccgtgcagcaggcaaccaacggtcactgtgcgatatgtgagacgatggagcaaaaacggcaatatgccagcctgacgtcactcttcgcccagcttttcattgagctggcggaatggcatagcccactttatctggtcatcgatgactatcatctgatcactaatccagtgatccacgagtcaatgcgcttctttattcgccatcaaccagaaaatctcaccctggtggtgttgtcacgcaaccttccgcaactgggcattgccaatctgcgtgttcgtgaccaactgctggaaattggcagtcagcaactggcatttacccatcaggaagcgaagcagttttttgattgccgtctgtcatcgccgattgaagccgcagaaagcaatcggatttgcgatgacgtttccggttgggcgacggcactatag

SEQ ID NO: 473650 - DNA, 1413 bp, Shigella flexneri
atgaacgatgccctcatcacccgtgtgaccggcgaagaaaacgggcaaatgcgtctcgaagagattgagcgtcaggggctgtttttacagcggatggatgataccggcgagtggttctgctatcacccgctgtttggcaacttcctgcgccagcgctgccagtgggaactggcggcggagctgccggaaatccaccgtgccgccgcagaaagctggatggcccagggatttcccagcgaagcgattcatcatgcgctggcggcaggcgatgcgctgatgctgcgcgatattctgcttaatcacgcctggagtttgttcaaccatagcgaactgtcgctgctggaagagtcgcttaaggccctgccgtgggacagtttgctggaaaatccgcagttagtgttattgcaggcgtggctaatgcaaagccaacatcgctatggcgaagttaacaccctgctagcccgtgctgaacatgaaatcaaggacatcagagaaggcaccatgcatgcagaatttaacgctctgcgcgcccaggtggcgattaacgatggtaatcaggatgaagcggaacggctggcaaaactggcactggaagagctgccgccgggctggttctatagccgcattgtggcaacctcggtgctgggtgaagtgctgcactgcaaaggcgaattgacccgctcactggcgctagtgcagcaaaccgaacagatggcacgccagcacgacgtctggcactacgccttatggagtttaattcagcaaagtgaaattctgtttgcccaagggttcctgcaaaccgcgtgggaaacgcaggaaaaagcgttccagctgatcaacgagcagcatctggaacagctgccaatgcatgagtttctggtgcgcatccgagcacaactgttatgggcctgggcacggctggatgaagccgaagcgtcggcgcgtagcgggattgaagtcttgtcgtcttatcagccacagcaacagcttcagtgcctggcaatgttgattcaatgctcgctggcccgtggtgatttagataacgcccgtagccagttgaaccgtctggaaaacctgctggggaatggcaaatatcacagcgactggatctctaacgccaacaaagtccgggtgatttactggcaaatgaccggcgataaagccgccgctgccaactggttgcgtcatacggctaaaccggagtttgcgaacaaccacttcctgcaaggtcaatggcgcaacattgcccgcgcacaaatcttgctgggcgagtttgaacctgcggaaattgttctcgaagaactcaatgaaaatgcccgcagtctgcggttgatgagcgatctcaaccgtaacctgttgctgcttaatcaactgtactggcaggccggacgtaaaagtgacgcccagcgctga

SEQ ID NO: 473651 - DNA, 240 bp, Shigella flexneri
atggggcactggcttgctggcagactcatgaaagagctggggctggtcagttgccagcagccgactcaccggtataagcgtggcggtcatgagcacgttgctatcccgaatcatcttgagcgacagttcgccgtaacggaaccaaatcaggtgtggtgcggtgatgtgacctatagtgtgcccggagttcagggcgggcatggatgcttaaatgaaccgcgagtctgtctggaatattga

SEQ ID NO: 473652 - DNA, 1524 bp, Shigella flexneri
ttgataatcagcgaaatgcaacgcaagcttgccacatgggcagccaccgatccgtccctacggattcaacggctgctgcgtctaataacacaaccagaatggctggctgaagcggcgcggatcacgctttcaccaaagggggcccatacccccggcgttgatggcgtgaacaaaacaatgctacaggccagactggctgttgagctgcaaatcctcagggatgaattactctcaggccactaccagcccttgcccgccagacgggtttacatccctaaaagcaacggcaaactgcgaccactgggtatccccgcgttgcgggatcgtattgttcagcgggccatgctgatggcgatggagccgatatgggagagtgattttcatacgctctcatatggcttccggcctgagcgcagtgtccaccacgcgatccgcacggtgaaattacagctcacagactgcggtgaaacccggggacgctgggtgattgaaggcgacctgtccagttacttcgacaccgtacatcatcgactgctgatgaaggctgtacgccgcaggatcagtgacgcacgtttcatgactctgctgtggaaaaccatcaaggcgggacatatcgatgtcggtctctttcgggcggccagtgaaggtgtgccacagggcggtgttatatcgccgctattatcgaacatcatgctgaatgagttcgatcaatacctgcatgagcgctacctgagcgggaaagccagaaaagatcggtggtactggaataacagtatccaacggggccgaagtacggcggtcagagaaaactggcagtggaaacccgcggtggcgtactgccgctatgccgatgattttgtcctcatcgtcaaaggcaccaaagcacaggcggaagccatcagggaggagtgtcggggtgtgctcgaaggcagtctgaaactcaggctgaacatggataagactaaaatcacccatgttaatgacggctttatctttctggggcacaggatcattcgcaaacgcagtcgttatggcgagatgcgagtggtctcaacgatcccgcaggagaaagccagaaacttcgccgcatcgctgacagcactgttatcaggcaactacagtgaaagcaaagtcgatatggctgaacaactcaaccgaaaactgaaaggctgggccatgttctatcagttcgttgattttaaggccaaagtcttcagttatatcgaccgtgtcgtgttctggaagctggctcactggctggcccgcaaataccgtacaggtatcgcttccctgatgaggtggtggtgtaaatcaccgaaaccgggtcagagcaaaacgtgggttttatttggtaaaaccaatcacggcaagctcagcggcgaaatactgtaccggttggtggggcaaggcaagaagctgttccgctggcggctacccgaaggtaatccctatctgaggacggagaccagaaacacgtatacatcgcgctttacagaagtggcaatggcgttcgccagcatttaa

SEQ ID NO: 473653 - DNA, 375 bp, Shigella flexneri
atgaaagcactggaaatggcatgggaaacccgtggtaagcccgtcggggtgatgttccacagcgatcaaggcagtcattatacgagcaggcagttccggcaattactgtggcgataccggatcaggcagagtatgagtcggcgtggaaactgctgggataacagcccaatggagcgcttcttcaggagtctgaagaacgaatgggtgccggcgacgggctatgtaagcttcagcgatgcagctcacgcaataacggactatatcgttggatattacagcgcactaagaccgcacgaatataatggtgggttaccaccaaacgaatcagaaaaccgatactggaaaaactctaacgcggaggccagttttagttga

SEQ ID NO: 473654 - DNA, 258 bp, Shigella flexneri; identical to SEQ ID NO: 5061

SEQ ID NO: 473655 - DNA, 768 bp, Shigella flexneri
atgactttacgaactgaaaatctgacggtcagttacgggacagacaaggtacttaacgacgtttcactctcactgccaacggggaagatcaccgccctgatcggtcctaacggttgcgggaaatcgacgctgttaaactgtttttcgcggcttttaatgccgcagtctggcaccgtatttctcggcgataatcccataaatatgctctcatcacgccagttggcccgcaggctttcgctgctgcctcagcaccatttaacgccagaggggatcacagtccaggagctggtttcgtatggtcgtaatccctggctgtcactctgggggcgtctctccgctgaagacaatgcacgagttaatgtcgccatgaaccagacccggatcaatcatcttgccgttcgtcggttaaccgagctttccggcggtcagcgccagcgcgcatttctggcgatggtcctggcccagaatacgcccgttgtattacttgatgagccaaccacctatcttgatatcaatcaccaggtggacctgatgcggttgatgggcgaactccggactcaggggaaaacggtggtcgctgtgctgcacgaccttaatcaggctagccggtactgcgatcaactggtggtaatggcaaacggacatgttatggcgcaaggcacaccagaagaggtgatgaccccaggattgctgagaacagtattcagcgtggaagcggaaatacaccccgagccggtatctggcaggccgatgtgcctaatgaggtag

SEQ ID NO: 473656 - DNA, 957 bp, Shigella flexneri
atgaaaattgcgctggttattttcatcacccttgccctggcgggctgtgcgctgttatcactccatatgggagtgatccccgtgccgtggcgcgcgctgctgaccgactggcaggccggacgcgagcattattatgtattgatggagtaccgactgccgcgcttgctgctggcactgtttgtcggtgcagccctcgccgtggcgggcgtgctgatacaggggattgtgcgcaaccctctggcatcaccggatattctcggcgttaaccatgccgccagcctggcctctgtgggggctctacttcttatgccgtcactgcccgtgatggtgctgccgctgctggcctttgcgggcggcatggcggggttgatattactgaagatgctggcaaagacccaccagccgatgaagctggcgctcaccggcgtggcgctttctgcatgctgggccagcctgacggattatctgatgctctcgcgcccgcaggatgtgaacaacgccctgctgtggctgaccggcagcttatggggccgtgactggagctttgtgaagattgccatcccgctgatgattttatttctgccgctgagcctgagtttttgccgcgatctcgacctccttgcactcggcgatgcgcgcgccaccacgctcggtgtgtcggtgccccatacccgattctgggctttgttactagctgtcgccatgacatctaccggcgtggccgcctgcggcccgattagctttattggtctcgtggtgccgcatatgatgcgtagcatcaccggtggacgtcaccgcagactgctgcctgtttcggccctgacaggtgcgttgctgttggtggttgccgatctgctggcgagaattattcatcccccactggagctcccggttggcgtgctgaccgccattatcggtgcgccgtggtttgtctggttgcttgtgagaatgcgataa

SEQ ID NO: 473657 - DNA, 999 bp, Shigella flexneri; identical to SEQ ID NO: 463144

SEQ ID NO: 473658 - DNA, 903 bp, Shigella flexneri
atgttggcatttatccgttttctttttgcaggcctgctgctggtgatcagccacgcctttgccgccatggttcaggacgaacacggcacgtttacactcgaaaaaacgccacaacggattgtggtgctggaactctcgttcgccgatgcgctggccgccgtggacgtcagcccgatcggtattgccgacgataacgatgcaaaacgcatcctgcccgaagtgcgtgcgcacctgaaaccgtggcagtccgtcggaacgcgcgcgcagccgagcctggaagccattgccgctctgaaaccagacctgatcattgccgacagcagtcgccatgcgggggtttacatcgccttgcagcaaatcgcgccggtactgctgcttaagtcccgcaacgaaacctacgctgaaaatttgcaatctgcggctatcatcggcgaaatggtgggtaaaaagcgagagatgcaggcacgtctggaacaacataaagagaggatggcgcagtgggccagccagcttcccaaagggacacgcgtggcctttggcacatcacgcgaacagcaattcaacctgcatactcaggagacctggaccggcagcgtgctggcctctctggggctgaacgttcccgctgcgatggcgggtgcgtccatgccgtccatcggcctggagcaactgctggcggtcaatcctgcctggctgctggttgcccactatcgcgaagagagcattgttaaacgctggcaacaagatccgctctggcagatgttaaccgccgcgcagaagcagcaggttgcttcggtcgacagtaacacctgggcgcggatgcgcggtatttttgctgcagagcgtattgccgctgacacggtaaaaatcttccaccatcagccgcttaccgttgtgaaatga

SEQ ID NO: 473659 - DNA, 2325 bp, Shigella flexneri
atgacgccgttacgcgtttttcgtaaaacaacacctttggttaacaccattcgcctgagcctgctgccgctggccggtctctcgttttccgcttttgctgcacaggttaatatcgcaccgggatcgctcgataaagcgctcaatcagtatgccgcacacagcggatttaccctctcggttgacgccagcctgacgcgcggcaagcagagcaacggcctgcacggcgattacgacgtcgagagcggcctgcaacaactgctggacggcagcggactgcaggtaaaaccgctgggaaataacagctggacgctggagcccgcgcccgcaccaaaagaagatgccctgaccgtggtcggcgactggctgggtgatgcgcgtgaaaacgacgtatttgaacatgctggcgcgcgtgacgtgatccgccgtgaggatttcgccaaaaccggcgcaaccaccatgcgtgaggtacttaaccgcatccctggcgtcagcgcgccggaaaacaacggcaccggcagccacgacctggcgatgaactttggcatccggggcctgagcccgcgcctcgccagccgctcgaccgtcctgatggacggcatccccgtccccttcgccccttacggtcagccgcagctttcactggctcccgtttcgctcggcaacatggatgccattgacgtggtacgcggtggtggtgcggtgcgttacggaccgcagagcgtgggcggcgtggtgaactttgttacccgtgccattccgcaggactttggtatcgaggcgggcgtggaaggtcagctcagcccaacctcttcacaaaacaacccgaaagagacgcacaacctgatggtgggcggcacagcggacaacggttttggcaccgcgctgctctactccggcacgcgcggcagtgactggcgcgagcacagcgccacccgcatcgacgacctgatgctgaaaagcaaatatgcgccggatgaggtgcacaccttcaacagcctgctgcaatattacgacggtgaagccgacatgcccggtggcctgtctcgcgcggattacgacgccgatcgctggcaatccacccgcccgtatgaccgcttctggggtcgtcgcaagctggcgagcctgggctaccagttccagccagacagccagcataaattcaacattcaggggttctacacccaaaccctgcgcagcggctacctggagcaaggcaaacgcatcaccctctcgccgcgtaactactgggtgcgcggtattgagccacgctacagccagatctttatgatcggcccttccgcgcacgaagtgggcgtgggctatcgctatttgaatgaatcaacgcatgaaatgcgttactacaccgccaccagcagcgggcagttgccgtccggctcaagcccttacgaccgcgatacgcgttccggcaccgaggcgcacgcctggtatctggatgacaaaatcgacatcggcaactggaccatcacgccgggtatgcgtttcgaacatatcgagtcataccagaacaacgccatcacaggcacgcacgaagaagtgagctataacgcaccgcttccggcgttgaacgtgctctatcacctgactgacagctggaatctttatgcaaacactgaaggctcgttcggcaccgtacagtacagccagattggcaaggctgtgcaaagcggcaatgtggaaccggaaaaagcgcgaacctgggaactcggtacccgctacgacgacggcgcgctgacggcggaaatagggctgttcctgattaactttaacaatcagtacgactccaaccagaccaacgacaccgtcactgcacgtggcaaaacgcgccataccgggctggaaacgcaggcacgttacgatctgggtacgctaacgccaacgcttgataacgtttccatctacgccagctatgcgtatgtgaacgcggaaatccgcgagaaaggcgacacctacggcaatctggtaccattctccccgaaacataaaggcacgctgggcgtggactacaagccaggaaactggacgttcaatctgaacagcgatttccagtccagccagtttgcggataacgccaatacggtgaaagagagcgctgacggcagtaccggccgcattcccggcttcatgctctggggcgcacgcgtggcgtatgactttggcccgcagatggcagatctgaacctggcattcggtgtgaaaaacatcttcgaccaggactacttcatccgctcttatgacgacaacaacaaaggcatctatgcaggccagccgcgcacgctgtatatgcaggggtcgttgaagttctga

SEQ ID NO: 473660 - DNA, 954 bp, Shigella flexneri
atgaatcctttgttaaccgattcccgccgtcaggcgctgcgttcagcttcccactggtatgccgttctaagcggcgagcgcgtcagcccacaacaggaagcgcgctggcaacagtggtatgaacaggatcaggataaccagtgggcctggcagcaggttgaaaacctgcgcaaccagcttggcggtgtgcctggcgacgttgccagccgggcgttgcacgatacccgcctcacccgccgtcacgtgatgaaaggattactgctgttgctcggcgctggcggaggctggcagctctggcagtcggaaaccggcgaaggtctgcgggcagattaccgcaccgccaaaggcacagtcagccgtcagcaactggaagatggctccctgctcacgctgaatacccaaagcgcggcggatgtgcgttttgatgcgcatcagcgcaccgtccggctctggtacggtgaaatcgccattactaccgcgaaagatgccctgcaacgccccttccgtgtcctgacccgtcagggccagctcactgctttagggacagaatttaccgtccgccagcaggataatttcacgcagcttgacgtgcagcagcacgctgtggaagtgcttctcgccagtgcccccgcgcaaaaacgcatcgtgaacgctggtgaaagcctgcagttcagcgcctctgagtttggcgcagtgaaaccgctggatgacgagagtacaagctggacgaaggacatcctgagcttcagcgataaaccgctgggtgaggtgatagccacgctaacccgttaccgcaacggcgtgctgcgctgcgatcccgccgttgccgggctgcgcctgagcgggacgttcccgctgaaaaataccgatgcgatcctgaacgttatcgcgcaaacgcttcccgttaaaattcagtctattacgcggtactggataaacatttcaccactgtaa

SEQ ID NO: 473661 - DNA, 522 bp, Shigella flexneri; identical to SEQ ID NO: 463140

SEQ ID NO: 473662 - DNA, 426 bp, Shigella flexneri; identical to SEQ ID NO: 459773

SEQ ID NO: 473663 - DNA, 1290 bp, Shigella flexneri
atgttactggcaggcgctatctttgtcctgaccatcgtattggttatctggcagccgaaaggtttaggcatcggctggagtgcaacgctcggcgcggtactggcgttggttacgggcgtggttcatccgggtgatattccggtggtgtggaatatcgtctggaacgcgacggcggcgtttattgccgtcattatcatcagcctgctgctggatgagtccggcttttttgaatgggcagcgctgcacgtttcacgctggggcaatggacgcggtcgcttgctgtttacctggattgtcctgctcggtgccgccgttgcggccctgtttgccaatgatggcgcggcgcttattttgacgccgattgtcatcgccatgctgctggctttaggattcagtaaaggcacgacgctggcgttcgtgatggcggccggattcattgccgataccgccagcctgccgcttattgtctccaacctggtgaatatcgtttccgctgatttctttggcctcggctttcgcgaatacgcctcggtgatggtgccggtggatatcgccgcgattgttgccacgctggtgatgctacatctctattttcgcaaagatattccgcagaactacgatatggcgctgctgaaatctcccgcagaagcgatcaaagatcctgctacgttcaaaactggctgggttgttttactgcttctgctggtgggatttttcgtcctggaaccgctcggcattccggtgagcgccattgcagctgtgggcgcactgatattatttgtcgtcgctaaacgcggtcatgcgattaatacgggtaaagtcctgcgcggtgccccctggcagattgtcatcttctcgctcggcatgtatctggtggtttatggcctgcgcaatgccggattaacggaatatctttctggcgtactcaacgtgctggcggataacggcctgtgggccgcgacgctcggcaccggattcctcaccgccttcctctcttctattatgaacaatatgccgacggtactggttggcgggttgtccattgatggcagcacggcatctggcgttatcaaagaagcgatggtttatgccaacgtgattggctgcgatttggggccgaaaattaccccgattggtagcctggcaacgctgctctggctgcacgtactttcgcagaagaatatgactatcagctggggatattacttccgtacagggattatcatgaccctgcctgtgctgtttgtgacgctggctgcgctggcgctacgtctctctttcactttgtaa

SEQ ID NO: 473664 - DNA, 354 bp, Shigella flexneri
atgtcatttctgttccccatccaattgttcaaaattcttgctgatgaaacccgtctgggcatcgttttactgcttagcgaactgggagagttatgcgtctgcgatctctgcactgccctcgatcagtcgcagcccaagatatcccgccatctggcattgctgcgtgaaagcgggctattgctggaccgcaagcaaggtaagtgggttcattaccgcttatcgccgcatattccagcatgggcggcgaaaattattgatgaagcctggcgatgtgaacaggaaaagattcaggcaattgtccgcaacctggccagacaaaactgttccggagacagtaagaacatttgcagttaa

SEQ ID NO: 473665 - DNA, 174 bp, Shigella flexneri
atgcatccgcttactcatccactgcctgtcacggcgcatgcctcattgttagatgtgggcaatctcactccggccagagcatcagttaacggcaccacccgtacttctgaccaggactttgaaagcgtttatgcgcattgccagagtgaaaatgcctcagagctaactggataa

SEQ ID NO: 473666 - DNA, 1353 bp, Shigella flexneri
atgactaaacactatgattacatcgccatcggcggcggcagcggcggtatcgcctccatcaaccgcgcggctatgtacggccagaaatgcgcactgattgaagccaaagagctgggcggcacctgcgtgaacgtcggctgcgtgccgaaaaaagtgatgtggcacgcggcgcaaatccgtgaagcgatccatatgtacggccctgattatggtttcgataccaccatcaacaagttcaactgggaaacgttgatcgccagccgtaccgcctatatcgaccgtattcatacttcctatgaaaacgtgctcggtaaaaataacgttgatgtaatcaaaggctttgcccgcttcgttgatgccaaaacgctggaagttaacggcgaaaccatcacggccgatcatattctgatcgccaccggcggtcgtccgagccacccggatattccaggcgtggaatacggtattgattccgatggcttcttcgcccttcctgctttgccagagcgcgtggcggttgttggcgcgggttacatcgccgttgagctggctggcgtgattaacggcctcggcgcgaaaacgcatctgtttgtgcgtaaacatgcgccgctgcgcagcttcgacccgatgatctctgaaacgctggtcgaagtgatgaacgccgaaggcccacagttgcataccaacgccatcccgaaagcggtagtgaaaaatgccgatggtagcctgacgctggagctggaagatggtcgcagtgaaacggtggattgcctgatttgggcgattggtcgcgagcctgccaatgacaacatcaacctcgaagccgctggcgttaaaaccaacgaaaaaggctatatcgtcgtcgataaatatcaaaacaccaatattgaaggtatttacgcggtgggcgataacacgggtgcagtggaactgacaccggtggcagttgcagcgggtcgccgtctctctgaacgcctgtttaataacaagccggatgagcatctggattacagcaacattccgaccgtggtcttcagccatccgccgattggtactgttggtttaacggaaccgcaggcgcgcgagcagtacggcgacgatcaggtgaaagtgtataaatcctctttcaccgcgatgtataccgccgtcaccactcaccgccagccgtgccgcatgaagctggtgtgcgttgggccagaagagaagattgtcggtattcacggcattggctttggtatggacgaaatgttgcagggcttcgcggtggcgctgaagatgggcgcaaccaaaaaagacttcgacaataccgtcgccattcacccaacggcggcagaagagttcgtgaccatgcgttaa

SEQ ID NO: 473667 - DNA, 843 bp, Shigella flexneri
atgctcagttatcgccacagctttcacgctggcaaccacgccgacgtccttaaacataccgttcagagcctgatcatcgagtcgctgaaagagaaagataaaccgtttctctatctcgacacccacgcaggggccgggcgttatcagttaggtagcgaacatgccgagcgtaccggcgaatatctcgaaggtatcgcccgtatctggcagcaggacgatttgcccgcagaactggaggcgtacatcaatgtggtaaaacacttcaaccgtagcggccagttgcgttactaccccggttcgccgttgattgctcgccagctactgcgcgaacaagacagcctgcaactgaccgaactgcacccgagcgattacccgttgctgcgttctggatttcagaaagacagccgtgcacgcgtcgaaaaagccgacggtttccagcaacttaaggccaaactgccgccggtttctcgccgtggtttaatccttatcgacccgccgtatgaaatgaaaaccgactatcaggcggtggtcagcgggatagcagaaggttacaaacgtttcgccactggcacttacgcattgtggtatccggtggtgctgcgccagcaaattaagcgcatgatccacgacctggaagcgaccggcattcgcaaaattctgcaaattgaactggcggtgctgccagacagcgatcgccgtggcatgaccgcttccggcatgattgtgattaacccgccgtggcagctggaacagcagatgaataacgtgctgtcgtggctgcacagcaaactggttccggcaggtaccgggcacgccaccgtaagctggatcgtgccggagtaa

SEQ ID NO: 473668 - DNA, 2043 bp, Shigella flexneri
atgacgaatccgttactgactccctttgaattgcctccgttttctaaaattctcccggaacatgtcgttccagccgtgactaaggcattgaacgactgccgcgaaaatgtggagcgcgtagtagcgcaaggggcaccgtacacctgggaaaatctctgccagccgttggcggaagtggacgatgttttggggcgtatcttctccccggtcagccacctgaactcggtgaaaaatagcccggaactgcgtgaagcgtacgaacaaaccctgccgctgctgtcggaatacagcacctgggtagggcaacatgaagggctgtataaagcgtaccgcgacctgcgcgatggcgatcattacgccacgctgaacacggcgcagaagaaagcggttgataacgccctgcgtgattttgaactctctggcataggtctgccgaaagagaaacagcagcgttacggcgaaattgctacccgtctttctgaactgggcaaccagtacagcaacaacgtcctcgatgcgacgatgggctggaccaaactcgttaccgacgaagcggggctggcggggatgccagaaagcgcgctggctgcggcaaaagcccaagccgaagcgaaagagctggaaggctacctgctgacgctggatatcccaagctacctgccggtaatgacctactgcgacaaccaggctctgcgcgaagagatgtatcgcgcttacagcacccgcgcctccgatcaaggcccgaatgccggtaagtgggataacagcaaggtgatggaagagatcctcgcgctgcgtcacgaactggcgcaactgctgggctttgaaaactacgcctttaaatcccttgccactaaaatggcagaaaacccgcagcaggtgctggatttcttaaccgatctggcaaaacgcgcgcgtccgcaaggcgaaaaagagctggagcaactgcgtgccttcgctaaagccgaatttggtgtcgatgagttgcagccgtgggatatcgcttactacagcgaaaaacagaaacagcacctctacagcatcagcgacgagcagctgcgtccgtacttcccggaaaacaaagcggttaacggcctgtttgaagtggtgaaacgtatttacggcatcaccgctaaagagcgtaaagatgttgatgtctggcatccggatgtacgtttcttcgaactgtatgacgaaaataacgaactgcgcggcagcttctacctcgatctgtatgcccgtgaaaacaagcgcggcggggcgtggatggatggctgcgtaggccagatgcgtaaagctgatggttctctgcaaaaaccggtcgcgtatttgacttgtaacttcaaccgcccggtaaatggtaaaccggcgctgttcactcacgacgaagtgatcaccctgttccacgagttcggtcacggcctgcaccatatgctgacccgcatcgaaaccgctggtgtttccggtatcagcggtgtgccgtgggatgcggtcgaactgccgagtcagtttatggaaaactggtgctgggagccggaggcgctggcgtttatctctggtcactatgaaaccggcgaaccgctgccgaaagagttgctggataaaatgctggcggcgaagaactaccaggcggcgctgtttattctgcgtcagctggagttcggcctgtttgatttccgccttcatgccgagttccgcccggatcagggggcaaaaatcctcgaaactctggcagaaatcaagaaactggttgccgtggtgccatctccgtcctggggccgtttcccgcacgctttcagccatattttcgccggtggttatgcggcaggttactacagctacctgtgggctgacgtactggcggcagatgctttctcgcgctttgaggaagagggcattttcaaccgtgaaaccgggcagtcgttcctcgacaacattctgagccgtggcggttcagaagagccgatggatctgttcaaacgcttccgtggtcgtgaaccgcagctggatgcgatgctggagcattacggcattaagggctga

SEQ ID NO: 473669 - DNA, 753 bp, Shigella flexneri
gtgaaaatctgcttaattgatgaaacaggcgccggagacggcgccttatctgttctggcggcccgctgggggctggagcacgatgaagacaacctgatggcgctggtgttaacgccggaacatctggaattgcgcaagcgtgatgagccaaaacttggcggcatctttgttgattttgttggcggagcgatggcgcaccgacgcaaattcggcggtggtcgcggtgaggcggtggcgaaagcggtgggcattaaaggcgattatttgccggatgtggtggacgccaccgcagggctggggcgcgatgcctttgtactggcttcagtcggctgccgcgtgcggatgctggagcgtaatccagtggttgccgcgctactcgacgacggcctggcgcgtggttatgcggatgcggaaatcggcggctggttgcaggagcggttgcagttaattcacgcctccagcctgacggcgctaaccgatattaccccacgcccgcaggtggtctatctcgatccgatgttcccgcataagcagaaaagcgcgctggtgaaaaaagagatgcgtgtctttcagtcgctggtggggccggatcttgatgccgatggattactggagcctgcacgcttgctggcgaccaaacgcgtggtggtaaagcgcccggactacgcgccaccgctggcgaatgtcgccacgccaaacgcggttgtgactaaagggcatcgctttgatatctatgcaggtacgccagtgtaa

SEQ ID NO: 473670 - DNA, 291 bp, Shigella flexneri
ttgtttattagcgcccttggcctggcgatgattgctgccctggtgccgcagcatttgatgggctttattctcgggatgtggttcctgacgcaggctgccgcgttcttgctgggcggctatgtggcaacatttaccgcggtgccggacaacattaccgatccgcttgagacgttgcccgtctataccaacgtgtttggtaagattggtctggtcacgctgggcgttgcagtagtgatgctgttgatggtgccgtggctgaaacgcatgattgcgacgccggaaagccattaa

SEQ ID NO: 473671 - DNA, 1149 bp, Shigella flexneri
atggggatgctgcagcaacctcgcccatttttcatgatcttttttgtcgagttatgggagcgattcggctactacggcgtgcagggcgtactggcggttttcttcgttaaacagcttggattctcgcaagagcaggcttttgtcacttttggtgcttttgctgcactggtctatggcctcatttccattggcggctatgtcggcgaccacctgttggggaccaaacgcaccattgttcttggagcacttgtgctggcgattggctacttcatgaccggcatgtcgctacttaagcctgacctgattttcatcgccctggggactatcgctgtcggtaacggcctgtttaaagctaacccagccagcttgctttcgaagtgctatccgccgaaagatccgcggcttgatggcgcattcaccctgttctatatgtcgatcaatatcggctcgttgatagcgttatcgctggcccctgtgatcgctgatagattcggttattcagtcacctacaacctgtgcggggcggggttaattatcgcattactggtttacatcgcctgtcgtggaatggtgaaagacattggttctgaacccgacttcaagccgatgagcttcagcaaactgttgtacgtattacttggcagcgtggtgatgatcttcgtatgtgcatggctgatgcacaacgtagaagtcgccaatctggtgctgattgttctctccatcgtcgtcactatcatcttctttcgtcaggcattcaagctggataaaaccgggcgcaataaaatgtttgtcgcctttgtcctgatgctcgaagcggtggtgttttacattctctacgcccagatgccaacatcgctgaacttctttgccatcaacaacgtgcatcatgaaattctcggtttttccatcaacccggtcagcttccaggcgcttaacccgttctgggtggtactcgccagcccaatactggcaggcatttacacgcatctgggtaacaaaggcaaagacctctcgatgccgatgaaatttactctcagcatgtttatgtgctcactgggctttttgacggctgctgctgcgggaatgtggtttgcggatgaccaggggctgacatcgccatggtttatcgtgctggtgtatttattctag

SEQ ID NO: 473672 - DNA, 435 bp, Shigella flexneri
atggcttataaacacattctcatcgcagtcgatctctccccggaaagcaaagttctggtagagaaagcagtctctatggctcgcccctacaatgcgaaagtttctctgatccacgtagatgtaaactactctgacctatacaccgggcttattgatgtgaatctgggtgatatgcagaaacgcatctctgaagagacacatcatgcgctgaccgagctttccactaatgcaggctatccaatcactgaaaccctgagcggcagcggcgacctaggccaggttctggtcgatgcaatcaagaaatacgatatggatctggtggtttgtggtcaccaccaggacttctggagcaaactgatgtcttccgcacgtcagctgatcaacaccgttcacgttgatatgctgattgttccgctacgcgacgaagaagaataa

SEQ ID NO: 473673 - DNA, 336 bp, Shigella flexneri
atgataagcaccgtcgcattattttgggctttatgtgtcgtttgcattgttaacatggcgcgctatttctcatcactacgcgcgttgttagtggtactgcgtaactgcgatccattgctctatcaatatgttgatggagggggcttttttacctcacatggccaacccaacaaacaggtgcgtctcgtttggtatatctatgcccaacgttatcgcgatcatcacgatgatgagtttattcgccgctgtgagcgggtgcgtcggcagtttattctgactagcgcattgtgtggtctggtggtggtcagcctgattgcattgatgatttggcattaa

SEQ ID NO: 473674 - DNA, 378 bp, Shigella flexneri
gtgcttagcaccatcgagtatgcgccggtgtggatcatcatggcggtcgcgctggcgttaggtatcggtacgatgattggctggcgtcgtgtggcaacgactatcggtgagaaaatcggtaagaaaggcatgacctacgctcaggggatgtctgcccagatgacggcggcagtgtcaatcggcctggcgagttataccgggatgccggtttccaccactcacgtactctcctcttctgtcgcggggacgatggtggtagatggcggcggcttacagcgtaaaaccgtaaccagtattctgatggcctgggtgtttacccttccggctgcggtactactttccggcgggctgtactggttctccttgcagttcctgtaa

SEQ ID NO: 473675 - DNA, 372 bp, Shigella flexneri; identical to SEQ ID NO: 11381

SEQ ID NO: 473676 - DNA, 489 bp, Shigella flexneri
gtgtttaaatttcttgtattaacattaggcattatctcttgccaggcttacgcagaagatacggttatagtaaacgaccatgacacttcagccatcaaagattgttggcaaaaaaattcagatgatgatactgacattaacgtgatcaaatcatgcctgcgacaagaatacaatctcgtcgatgcgcaattaaataaagcctatggtgaagcttatcgttatatagaacaagtgccacgcacaggtgcaaaaaaacttgatactgaacaacttaacttgcttaaaaaatcacagcgagcctggctggattttagggacaaagaatgtgaattaatcctttcaaatgaggatgttcaggatttaagtgacccctattctgaatcagaatggctatcatgtatgatcatacagaccaatacgcgaactcgccagttgcagctataccgtaactctgaagatttttatccaagccctttgacaagaggataa

SEQ ID NO: 473677 - DNA, 1734 bp, Shigella flexneri
gtgaatattcaggctcttctctcagaaaaagtccgtcaggccatgattgcggcaggcgcgcctgcggattgcgaaccgcagattcgtcagtcagcaaaagttcagttcggcgactatcaggctaacggcatgatggcagttgctaaaaaactgggtatggcaccgcgacaattagcagagcaggtgctgactcatctggatcttaacggtatcgccagcaaagttgagatcgccggtccaggctttatcaacattttccttgatccggcattcctggctgaacatgttcagcaggcgctggcgtccgatcgtctcggtgttgctacgccagaaaaacagaccattgtggttgactactctgcgccaaacgtggcgaaagagatgcacgtcggtcacctgcgctctaccattattggtgacacagcagtgcgtactctggagttcctcggtcacaaagtgattcgcgcaaaccacgtcggcgactggggcactcagttcggtatgctgattgcatggctggaaaagcagcagcaggaaaacgccggtgaaatggagctggctgaccttgaaggtttctaccgcgatgcgaaaaagcattacgacgaagatgaagagtttgccgagcgtgcacgtaactacgtggtaaaactgcaaagcggtgacgaatatttccgcgagatgtggcgcaaactggtcgacatcaccatgacgcagaaccagatcacttacgatcgtctcaacgtgacgctgacccgtgatgacgtgatgggcgaaagcctctacaacccaatgctgccaggaattgtggcggatctcaaagccaaaggtctggcagtagaaagcgaaggggcgaccgtcgtattccttgatgagtttaaaaacaaggaaggcgaaccgatgggcgtgatcattcagaagaaagatggcggctatctctacaccaccactgatatcgcctgtgcgaaatatcgttatgaaacactgcatgccgatcgcgtgctgtattacatcgactcccgtcagcatcaacacctgatgcaggcatgggcgatcgtccgtaaagcaggctatgtaccggaatccgtaccgctggaacaccacatgttcggcatgatgctgggtaaagacggcaaaccgttcaaaacccgcgcgggtggtaccgtgaaactggcagacctgctggatgaagccctggagcgtgcacgtcgtctggtggcagaaaagaacccggatatgccagctgacgagctggaaaaactggctaacgcggttggtattggtgcggtgaaatatgcggatctctccaaaaaccgcaccacggactacatcttcgactgggacaacatgctggcgtttgagggtaataccgcgccatacatgcagtatgcttacacgcgtgtattgtccgtgttccgtaaagcagaaattaacgaagagcaactggctgcagctccggtaatcatccgtgaagatcgtgaagcgcaactggcagctcgcctgctgcagtttgaagaaaccctcaccgtggttgcccgtgaaggcacgccgcatgtaatgtgtgcttacctgtacgatctggccggtctgttctctggcttctacgagcactgcccgatcctcagcgcagaaaacgaagaagtgcgtaacagccgtctgaaactggcacaactgacagcgaagacgctgaagctgggtctggatacgctgggtattgagactgtagagcgtatgtaa

SEQ ID NO: 473678 - DNA, 567 bp, Shigella flexneri
atggcgaactggcaatctatcgacgagctgcaggatattgcatcggatttaccgcgatttacccacgcattagatgaactttcccgccgtctggggttggatatcactccgctgactgccgatcacatttctttgcgttgccatcaaaacgtcaccgctgagcgctggcgtcgcggttttgaacagtgtggcgagcttttgtcagaaaaaatgatcaatggcagaccgatttgtctgtttaaattgcatgaaccggtacaggttgcgcactggcagttttccaatgtggagctaccgtggcccggggaaaaacgttacccacacgaaggttgggaacatattgaaatcgttctgccgggtgatccagaaacgctgaatgcccgtgcgctggcattgctttctgatgaaggactcagcctaccggggatctcagttaaaaccagttcaccaaaaggtgagcatgagcgattaccgaatccgacgctggcggtcaccgatggcaaaacaactattaagtttcatccgtggtccattgaagagatcgttgccagcgagcagtcagcgtaa

SEQ ID NO: 473679 - DNA, 747 bp, Shigella flexneri
atggcattactggaaatttgctgttacagcatggaatgtgcactaacggcgcagcaaaacggcgcagacagagttgaattatgcgcagccccaaaagaggggggcttaacgccgtcgttgggggtactgaaatccgtgcgccagcgggtgacgatccctgtgcatccgataattcgcccacgcggtggtgatttttgctacagcgacggtgagtttgccgccattcttgaggatgtgcgcacggtccgcgaattaggttttcctggactggtgacgggcgttctcgatgttgacgggaatgtcgatatgccacgaatggaaaaaataatggctgctgccggtccgctggcagtgacttttcatcgcgccttcgatatgtgcgctaaccctttatatacactcaataatcttgcggaattgggcattgcccgggtactgacatcagggcaaaaatcagatgcactgcaaggtttatcaaaaattatggaacttattgcccatcgtgatgctccaatcattatggctggagcaggagtccgtgcagaaaacctgcaccacttcctcgatgccggagtgctggaagtccatagctccgcgggagcgtggcaagcctcaccgatgcgttatcgtaatcaaggattgtccatgtcatcagatgaacacgcggacgagtattcgcgttatatcgtagacggggcggcggttgctgaaatgaaaggaatcattgaacgccatcaggccaaatga

SEQ ID NO: 473680 - DNA, 969 bp, Shigella flexneri
atgagtaaaccttttgaggaatatcagggaactgtccacttttcgaaccagaaagggatacgtgcggaatgtgccgattgccatattccaaagtcagggatggattatttatttgctaaattaaaagcatctaaagatatttatcatgaatttgttagcggcaaaatagacagtgacgataagttcgaaactcatcgccaggaaatggccgaaacagtatggaaagaattaaaagcaactgactctgcaacgtgccgtagttgccattcttttgatgccatggatattgcctcgcaaagtgaatctgcgcagaaaatgcataacaaagcacaaaagggcggcgaaacctgtatcgattgtcataaaggcattgcccattttccgccagaaataaaaatggatgacaacgcggcgcatgagctggaaagtcaggccgctacttcagtgactaatggcgcacatatttatcctttcaaaacttctcgcataggcgagctggctaccgtgaatcctggtaccgatctcaccgtcgttgatgccagtggcaaacagccgatcgttctgttgcagggttatcaaatgcagggcagtgaaaacacgctctacctggcggcaggtcaacggctggcgctagccacattaagtgaagaaggtatcaaggcgctcacggtaaacggggaatggcaggctgacgaatacggcaatcaatggcgtcaggcgtctttacagggtgcgcttaccgatcccgcattagcggaccgtaaaccgctatggcaatacgctgaaaaacttgacgatacctattgcgctggttgtcatgcctctattgccgccgaccattacaccgtcaatgcgtggccgtccattgccaaaggaatgggggcacgaaccagcatgagcgaaaacgaaccggacattttaacgcggtatttccagtacaacgccaaagatattaccgagaaacagtga

SEQ ID NO: 473681 - DNA, 2430 bp, Shigella flexneri
atggcattaacaagacgtgaatttattaaacacagcggtattgccgctggagcgctggtggtgacatcggcagcaccgctccccgcatgggcagaagagaagggcggtaaaatcctcaccgcgggacgttggggagcgatgagcgtagaagtgaaggacggcaagattgtttcttcgacaggcgcgctggcgaaaaccataccgaactccttacagtctacggcggcggatcaggtacacaccacggcgcgtattcagcatccgatggtgagaaaaagctatctcgacaatccactgcaaccggcgaaaggtcgtggcgaagatacctatgtacaggtgagctgggaacaggcattaaaactgattcatgagcaacatgagcgtattcgtaaagctaacggaccatcggccatttttgccggatcttacggctggcgctcttctggcgtgttgcataaagcgcaaaccttactgcaacgttatatgaacctggcgggcggttattccgggcatagcggcgattattcaaccggggcagcacaggtgatcatgccgcatgtggtcggttctgtagaggtgtatgaacagcaggcctcctggccgctgattctggaaaacagccaggttgtggtgctgtggggaatgaacccgctgaataccttaaaaattgcctggagcagtaccgatgagcaagggctggaatacttccatcagctgaaaaaatctggcaaaccagtgattgccattgatcctatccgctccgaaaccatcgaattctttggcgataatgccacctggatcgcgccgaatatgggcaccgacgtggcactgatgttagggattgcgcataccctgatgacacaaggcaaacacgataaagtgttccttgaaaaatacactaccgggtatccgcagtttgaagagtatctgacaggtaagagcgataatacgccgaagagcgcggtctggacggcggaaattactggcgtaccggaagcgcagatagtcaaactcgctgaactgatggcggcgaatcgcacaatgctgatggcaggctggggaattcagcgccagcaatatggtgaacagaaacactggatgctggtgacgctggcggcgatgttagggcagattggtacaccgggcggcggttttggtttctcttatcattactccaatggtggcaacccgacgcgtgttggcggcgtgctgccggaaatgtctgcggcgattgccggacaggccagcgaggccgctgatgatggcggaatgacggcgattcctgttgcccgtatcgtcgatgcgctggaaaatcctggcggcaaatatcagcataacggtaaagaacaaacgtatccgaatatcaaaatgatctggtgggcgggtggcggtaactttacccatcaccaggatactaatcgtctgatcaaagcctggcagaaaccggagatgatcgtcgtttctgaatgctactggaccgcagcagccaaacacgcagatatcgtattaccgatcaccacatcgtttgagcgcaatgacttgacgatgaccggtgattacagcaaccagcatattgtgccgatgaagcaggctgttgctccgcaatttgaagcgcgtaacgattttgacgtgtttgccgatcttgcggaattactcaaacctggcggaaaagagatctataccgaaggtaaagatgaaatggcgtggctgaaatttttctatgatgccgctcagaaaggggcccgtgcgcaacgcgtcactatgccaatgtttaatgccttctggcagcaaaataaactgatcgaaatgcgccgcagcgagaagaacgaacagtacgttcgttatggtgatttccgcgccgatccggtgaaaaatgcgctgggtacgccaagcggcaaaattgagatttactccaaaacgctggaaaaatttggctataaggattgcccggcacacccaacctggcttgcgcctgatgagtggaagggtaccgccgacgagaagcagttgcagcttctgagcgcacatccggcacaccgtttacacagtcagcttaactatgcggaactgcgtaaaaaatatgcggttgccgatcgtgaaccgatcactattcacaccgaagatgctgctcgatttggtattgcgaatggcgatctggtgcgtgtctggaacaaacgtggtcagattttgacaggcgcggtggtgactgacgggatcaaaaaaggcgtggtatgcgtgcatgaaggtgcatggccagatctggaaaacggcttgtgtaaaaacggcagtgcgaacgtgttaacggcggatatccccagctcgcagcgggcaaatgcctgtgccggtaactctgcgctggtgtatatcgaaaaatatacgggtaacgcaccgaagttaacggcatttgataagcctgctgttcaggcgtaa

SEQ ID NO: 473682 - DNA, 972 bp, Shigella flexneri
atgatcgactttggtaacttttattctctgattgccaaaaatcatctttcacactggctcgaaacgctgcccgcgcagattgctaactggcagcgcgagcagcagcacgggctgtttaagcagtggtccaacacggtggaatttctgcctgaaattaaaccgtatcgtctggatttattgcatagcgtaaccgccgaaagcgaagagccactgagcaccgggcaaattaaacgcattgaaacgcttatgcggaacctgatgccatggcgcaaagggccgttctcactgtatggcgtcaacatcgataccgaatggcgttccgactggaaatgggatcgtgttctgccccatctttctgatttaaccggacgcaccattctggatgtcggctgcggcagcggttatcacatgtggcgcatgattggcgcaggcgcgcacctcgcggtggggatcgaccctacgcaactgtttctgtgccagtttgaagcggtgcgtaaactactgggtaacgatcagcgcgcacatttgttaccgttaggtattgaacagcttccggcactgaaagcctttgataccgtcttttcgatgggcgtgctttaccatcgccgttcgccgctggagcatctctggcagttgaaagatcaactggtgaatgagggtgaactggtgctggaaacgctggttattgatggcgatgagaacacggtgctggtaccaggcgatcgttacgcgcaaatgcgtaatgtctatttcatcccttccgcgctggcgctgaaaaactggctgaagaagtgtggttttgtagatatccgcattgtggatgtgtgcgttaccactactgaagagcagcgacgcactgaatggatggttaccgaatctctgtccgatttcctcgacccacatgatccgagtaagacagttgaaggttatcctgcgcctaaacgcgcggtgctgattgcgcgcaagccgtaa

SEQ ID NO: 473683 - DNA, 744 bp, Shigella flexneri
atgtctcaccgcgacacgctattttctgcccctatcgccagactgggcgactggacctttgatgaacgggtcgctgaagtcttcccggatatgatccagcgttccgttcccggctattccaatattatttccatgattggtatgttagccgagcgcttcgttcaacctggtacgcaggtttacgatctgggttgttctctgggcgcggcgacgctctcggtgcgtcgcaacattcatcatgataattgcaaaattattgccatcgacaactccccggcgatgattgaacgctgccgtcgtcatattgacgcctataaagcccctacgccagtagacgtcattgaaggtgatattcgcgatatcgccattgaaaacgcatcgatggtggtgctgaattttaccctgcaattcctggaaccttccgagcgccaggcattactggataaaatttatcaaggactgaacccgggcggcgcgctggtgctttcggaaaaattcagtttcgaagatgccaaagttggtgaactgttgttcaacatgcaccacgactttaaacgtgccaacggttacagcgaactggagatcagccagaagcgcagcatgctggaaaacgtgatgctgaccgattccgtggaaacccataaagcacgcctgcataaagccggttttgagcatagcgagctgtggttccagtgctttaactttggttcactggtggcattaaaagcagaggacgctgcatga

SEQ ID NO: 473684 - DNA, 396 bp, Shigella flexneri
atggtaagcgcgctatatgccgttttaagtgcgttgttattaatgaagttctcttttgatgtcgttcgcctgcgaatgcagtaccgcgttgcctatggtgacggtggttttagcgaactgcaaagcgctattcgcattcatggtaacgcggtggaatatattcccatcgcgattgtgctgatgctgtttatggaaatgaatggcgcagaaacctggatggtgcatatttgcggcatcgttttgcttgctggtcgtctgatgcattattacggttttcatcaccgtctgtttcgctggcgacgttccggcatgagcgccacctggtgtgcgctgttgctgatggtgctggcgaatctttggtatatgccctgggagttggttttctccctgcgttag

SEQ ID NO: 473685 - DNA, 351 bp, Shigella flexneri
ttgctaatcttagacagccgcccggttcatgcatcacgtccacacagtgaagctattcgcgacgctcaacgaaaaaaacctaaagttccggtacatgctgtactgacggcgacaaatccgctgatccgttttatcggtagtgatgatatgacgcaaaaccgggaattatttcaggtctggttacaaaaattagcgcagtggcatcagaccactacgccttatctttttttacatacgccagatattgcccaggccccggaactggtacataccctgtgggaagacttacgtaaaacgcttccagagatcggagcagttccggctattccacagcaatcttctcttttctga

SEQ ID NO: 473686 - DNA, 159 bp, Shigella flexneri
atgagtgatggatggttagattctactatgcaagcaataaacgataggattaaaagcccattatgggtgaagtggcacactgaatttggccacctgaacagaggtgatatgctcacctcagaacaacacaggtgctccaatgaaaaaaagaaattttag

SEQ ID NO: 473687 - DNA, 747 bp, Shigella flexneri
atgaataaaatatactcccttaaatatagtgctgccactggcggactcattgctgtttctgaattagcgaaaagagtttctggtaaaacaaaccgaaaacttgtagcaacaatgttgtctctggctgttgcaggtacagtaaatgcagcaaatattgatatatcaaatgtatgggcgagagactatcttgatcttgcacaaaataaaggtattttccagcccggagcaacagacgtaacaatcactttaaaaaacggagataaattctctttccataatctctcaattccggatttttctggtgcagcagcgagtggcgcagctaccgcaataggaggttcttatagtgttactgttgcacataacaaaaagaaccctcaggccgcagaaactcaggtttacgctcagtcttcttacaaggttgttgacagaagaaattccaatgattttgagattcagaggttaaataaatttgttgtggaaacagtaggtgccaccccggcagagaccaaccctacaacatattctgatgcattagaacgctacggtatagtcacttctgacggttcaaaaaaaatcataggttttcgtgctggctctggaggaacatcatttattaatggtgaatccaaaatctcaacaaattcagcatatagccatgacctgttaagtgctagtctatttgaggtcacccaatgggactcattggatttgcccctatatttccagacatctgttatcacttaa

SEQ ID NO: 473688 - DNA, 2199 bp, Shigella flexneri
atgatgcgcaaaaagtatatgccccgggctcttggtccgctgcttcttgtcgtgctgtcaccagctgtcgcccagcaaaacgatgataatgagatcatagtgtctgccagccgcagcaatcgaactgtagcggagatggcgcaaaccacctgggttatcgaaaatgccgaactggagcagcagattcagggcggtaaagagctgaaagacgcactggctcagttaatccccggccttgatgtcagcagccagagtcgaaccaactacggtatgaacatgcgtggccgcccgctggttgtcctgattgacggtgtgcgcctcaactcttcacgttccgacagccgacaactggactctgtcgatccttttaatatcgaccatattgaagtgatctccggcgcgacggccctgtacggtggcgggagtaccggagggttgatcaacatcgtgaccaaaaaaggtcagccggaaaccatgatggagtttgaggctggcacaaaaagtggctttaacagcagtaaagatcacgatgagcgcattgccggtgctgtctccggcggaaatgaccatatctccggacgtctttccgtggcatatcagaaatttggcggctggtttgacggtaacggcgatgccaccctgcttgataacacccagaccggcctgcagcactccaatcggctggacatcatgggaaccggtacgctgaacatcgatgaatcccggcagcttcaactgataacgcagtactataaaagtcagggagacgacaattacgggcttaatctcgggaaaggcttttccgccatcagcgggagcagcacaccatacgtcagtaaggggctgaattctgaccgcattcccggcactgagcggcatttgatcagcctgcagtactctgacagtgatttcctgggacaggaactggtcggtcaggtttactaccgcgatgagtcgttgcggtactacccgttcccgacggtaaatgcgaataaacaggcgacggctttctcctcgtcacagcaggataccgaccagtacggcatgaaactgactctgaacagccaactgatggacggctggcaaatcacctgggggctggatgctgagcatgagcgctttacctccaaccagatgttcttcgatctggctcaggcaagtgcttccggagggctgaacaaccataagatttacaccaccgggcgctatccgtcatatgacatcaccaatctggcggccttcctgcaatccagctatgacattaatgatatttttaccgttagcggtggcgtacgctatcagtatactgagaacagggtagatgatttcatcgactacacgcagcaacagaagattgctgccgggaaggcgatatctgccgacgccattcctggtggttcggtagattacgataactttctgttcaatgctggtctgctgatgcacatcaccgaacgtcagcaggcatggttcaatttttcccagggggtggcattgccggatccggggaaatattatggtcgcggcatctatggtgcagcagtgaacggccatcttcccctgacaaagagcgtgaacgtcagcgacagtaagctggaaggcgtgaaagtcgattcttatgaactgggctggcgctttatcggtgacaacctgcggactcaaatcgcggcatattactcgctttccaataagagcgtggaaaggaataaagatctgaccatcagtgtgaaggacgacaggcgccgtatttacggcgtggaaggtgcggtggactacctgatcccggatactgactggagtaccggtgtgaacttcaatgtgctgaaaaccgagtcgaaagtgaacggtcaatggcaaaaatatgacgtgaaggaatcaagtccatcgaaagcgacagcttacattaactgggcgccggaaccgtggagtctgcgtgtacagagcaccacttctttcgacgtaagcgatgcagagggtaacgatattaatggttacactaccgtcgattttatcagtagttggcagcttccggtgggaacactcagcttcagcgttgagaacctcttcgaccgtgactataccactgtctggggacagcgtgcacctctgtactacagcccgggttacggccctgcttcactgtacgactacaaaggccggggccgaacctttggtctgaactactcagtgctgttctga

SEQ ID NO: 473689 - DNA, 1338 bp, Shigella flexneri
atgaaaaaaagtgtcgattttattggtgtcgggacagggccatttaatctcagcattgctgcattgtcacatcagatcgaagaactgaactgtctcttctttgacgaacatcctcatttttcctggcatccgggtatgctggtaccggattgtcatatgcagaccgtctttctgaaagatctggtcagtgcagttgcacctacaaatccctacagctttgttaactatctggtgaagcacaaaaagttctatcgcttccttacaagcaggctacgtacagtatcccgtgaagagttttctgactatctccgctgggctgctgaagatatgaataacctgtatttcagtcataccgttgaaaatattgatttcgacaaaaaaagtcgattgtttctggttcagaccagtcggggagaatattttgcccacaatatctgccttggtacaggaaaacaaccttatttaccaccctgtgtgaagcatgtgacacaatcctgtttccatgccagtgaaatgaatcttcgtcggccggacctgagtggaaaacggataaccgtggttggtggaggacagagtggtgcagacctgttccttaatgcattacgcggggaatggggagaagcggcggaaataaactgggtctcacggcgtaataattttaacgcactggatgaggctgcttttgctgatgagtattttacacctgaatatatttcaggcttctccggactgaaggaagatattcgccatcagttactggatgagcagaaaatgacatcggatggcatcactgccgattctttactgaccatttatcgtgagttgtaccaccgttttgaagttctgagaaaaccaagaaatatccgtctgctacccagtcgctcggtaacaactctggaaagtagtggtccgggctggaggttattgatggaacatcatctggatcagggcagagagagcctggaaagtgatgtggtgattttcgccacaggttaccgttctgcattgccacaaatacttccctcactgatgcccttgatcaccatgcacgataagaacacctttaaagtgcgtgatgacttcactctggaatggagtggcccgaaagaaaataacatctttgcggtcaacgccagcatgcaaactcatggcatcgccgaaccccagctcagcctgatggcctggcgatctgcacgtattcttaatcgcgtactggggcgtgatttattcgatctcagtatgccgcccgcactgattcagtggcgcagcggcagccggaaaaaaccacagccggaggctgcttctttaactcactatacagcaaatattcaggaataa

SEQ ID NO: 473690 - DNA, 1743 bp, Shigella flexneri
atgaatcacaaggactgggattttgttaaccgtcggctggtggcaaaaatgttgtctgagatggagtatgagcaggttttccacgcggaatctcagggcgatgaccactactgcattaacctgccgggagcacaatggcgcttcatcgctgaacgtggtatctggggctggctgtggattgatgcccaaacgttgcgctgcacggacgaaccagtactggcgcagacgctgctgatgcagctaaagccggtgctgtcaatgagtgatgccactgttgcagagcatatgcaggatttgtatgccacgctactgggcgacctgcaactgctgaaggcccgtcgcggactgagtgccagtgacctgattaatcttgatgccgatcgtctgcaatgcctgctgagcggtcatcctaaattcgtttttaataaaggtcgccgtggctggggcaaagaggcgctggaacgatatgcgccagagtataccaacaccttcagactgcactggctggcggtaaaacgtgaacatatgatctggcgctgcgataacgatctggatattcagcagttgttgactgccgcaatggatccgcaggagtttacacgcttcagtcaggtctggcaggaaaacgggctggatcacaactggctgccgctgccggtacatccgtggcagtggcagcaaaaaatcgccacagacttcatcgctgattttgccgaaggcaggatggtgtctctcggcgagtttggcgaccagtggctcgcccagcagtcgctgcgtaccctgaccaacgccagccgccggggagggctggatatcaagctgccgctgaccatctacaatacctcatgctaccgggggatccctggcagatatatcgctgccggaccactggcttcacgctggctgcaacaggtttttgcgaccgacgccaccctggtgcaaagcggcgcagtgatccttggtgaaccggctgcaggctatgtgtcccatgaaggctatgccgcgcttgcccgggctccctatcgctaccaggaaatgcttggtgttatctggcgggagaatccgtgccgctggctgaaaccggatgaaagtcctgttctgatggcaacactgatggagtgcgacgaaaacaatcagccgctggcaggcgcatatatcgaccgctccggactggacgctgaaacctggcttacgcaattgttccgggtggttgtggttccgctgtatcacctgctttgccgctacggtgtcgcgcttattgcacacggacaaaatataacgctcgccatgaaagagggggtaccacagcgtgttctgctgaaagacttccagggcgatatgcggctggtgaaagaagcgtttcccgaaatggactctttgcctcaggaggtgcgtgatgtcacatcccgtctgagtgcggactacttaatccatgatttgcagacgggtcacttcgtgacagtactgcgttttatttcgccactgatggttcgtcttggcgtacctgaaaggcgattttatcaactgctggcagcagtgttgagtgattacatgaacaaacatccacaaatggcagagcgttttgcgcttttctcactcttcaggccacaaatcattcgcgtggtgctgaacccggtaaaactgacctggccggacctggatggcggcagtcgcatgctgccgaattaccttgagaatctgcaaaatccgctgtggctggtaactcaggaatatgaatcatga

SEQ ID NO: 473691 - DNA, 948 bp, Shigella flexneri; identical to SEQ ID NO: 19334

SEQ ID NO: 473692 - DNA, 1725 bp, Shigella flexneri
atgaccctgccctctgaaaaaccagccacagatgtggctgcgcagtgcttcctgaatgcactgattcgtgaaaccacagactggaaactgacagaatacccgccagacgaattgctcatcccgctggatgagcagaaatcgctccatttcagagtggcttatttctccccaacccagcatcaccgctttgcatttcctgcacgtctggtcacggcatcaggcagttatcctgtcgactttaccactctctcccggcttattattgataagctacgccatcaactgtttctgcccgttcccctctgcgaaactttccaccagcgcgtgctggaaagccatgtccatacgcaacaggcaattgatgcccgtcatgactgggccgctctgcgtgaaaaagcgttgaattttggcgaggctgagcaggcgctgctgacaggacacgctttccaccctgcgcctaagtctcatgaaccgtttaaccggcgggaggctgaacgctacctgcctgatatggcaccccacttcccactgcggtggttttcggtggataaaacgcaaatcgccggtgaaagtttgcatctcaaccttcaacagcggctgacgcgatttgccgcagagaatgcgcctcagttactcaacgaattaagtgacaaccaatggctgttcccgttgcacccgtggcagggggaatatcttttgcagcaggggtggtgccaggcacttgttgctaaagggctgattaaagacttaggtgaggccggcacgtcgtggctgccgaccacctcttcccgttccctctactgtgccaccagccgcgatatgatcaagttctccctgagcgtacggctgaccaactccatccgtactctgtccgtgaaagaagtgaagcgtgggatgcgcctggcacgcctggctcaaaccgacggctggcagatgctacaggtccgcttcccgactttccgggtaatgcaggaggatggctgggccgggctgctcgatcttaacggcaacatcatgcaggaaagtctgtttgccctgcgtgaaaatctgctggtggatcagccgaaaagccagactaacgtactggtctccctgactcaggccgcacctgatggcggtgattcgctgctggtttcggcggtaaaacgcctgagcgatcgcctcggtatcactgtgcaacaggccgcccatgcatgggttgatgcatactgtcagcaagtgctaaagccgctgtttacggctgaagcggattacggcctggtgctgctggcgcatcagcaaaatattcttgtccagatgcttggggatctgccggtcggatttatttaccgtgactgtcagggcagcgcttttatgcctcacgcgacagactggctcgattctattggcgaggcgcaggcggaaaatattttcacccatgagcagttgctgcgctatttcccttattacctgctggttaactccacttttgctgtgaccgctgcgctgggggctgccgggctggacagcgaatcgaatctgatggctcgtgtacgagcatcgctggctgaagtgcgtgatcaggtgactcataaaacctgtctcaactacgtgctggaaagtccgtactggaacgtaaaaggtaactttttctgttatctgaacgatcataacgagaacaccattgttgacccttcggtgatctatttcgatttcgctaacccgctgcaggctcaggaggtctga

SEQ ID NO: 473693 - DNA, 1194 bp, Shigella flexneri
atgtcaccagggatcgaagatacgccccaaaaaccactgtcctgctggccacttgcgttcagtgccgggcttctcggtatcggacagaacggtctgctggttgtgctccctgttctggtcatacagacaaatctgagtctgtctgtatgggctgccctgctgatgcttggctcaatgctgtttctgccatcgtccccgtggtggggaaagcaaatttcccgtactggcagtaaacctgtggtgttgtgggctctgggaggatatggcataagctttaccctgctagggctgggaagcgtgctgatggctaccagcgccataacaacagcggtgggactgggaatattaatcatcgcccggatcgcctacgggctgaccgtgtcggcaatggtgccagcctgtcaggtctgggcattgcagagagctggagaagggaatcgcatggccgctctggcaaccatcagctccggcctgagttgcggcaggctattcgggccgctgtgcgcggcagcaatgctggccattcatcctctggcgccactggggctgctgatggcagccccagtgctggcgctgctgatgctgctgcggttgcccggcacaccaccacagcccacaccggagtgcaagagcgtcagtctgaagcgggattgtctgccttatctgctttgcgcaatattactggctgcggcggtgagcatgatgcagcttggactttcgcctgcccttactcgccagttcgctacggataccaccgccattagccaacaggtggcctggctgttgggtctgtccgcagtagctgcgcttatcgcgcagttcggggtactccgtccgcagcgcctgactccggtggccctgctcctgagtgccggagtgttgatgagtggtggtctggctatcatgctctccgaacagctatggttgttttacccgggctgtgcagtgctgtcatttggagcagctctggcaacacccgcttatcaacttctactgaatgataagctggctgatggcgcaggcgcgggctggctcgctaccagtcacacacttggctatggactgtgcgctttgctggtgccgctggtatcgaaaacaggtgtcgcaatcgcgctgattatggcagcattatttgcaactatattatttaccattgtgtctgtatttatctggcattaccgtactatcaaataa

SEQ ID NO: 473694 - DNA, 732 bp, Shigella flexneri
atgactcctcacaaagaaaatatcactgaaagagctcagcagtttaaaagagttttagttttacaggatacaacagaacttaattattctggtcagaaagaaaaacaaggagttggtcccaaaaaacataaagatgaaagaaacttatttcttcatcctcaactcgtcatcagtgagtcaggtgtttgcctcggtgtttatgatgactatcagtggttcagggatgaattaaaaaccagtaaaaatacccgacaagaaatctgcaatgatttacttcataaaaaacatgtcagtgaaaaagaaacctggcgttgggttgaaggatataataaagcaacagaactggctcgccaatgccctgatacccatgtattgtcaatttctgatcgtgaaggcgatttttatgacctgtttgaacgcgcagcgcagactcccggaataaaagctgactggcttgtcagaatgaaatttaataacagagcaacgctgaatattaatggtaaacgggatcataggttgttgcacgaaagaatcatggagattacaccgcagcaactggttgaattcactatacctgatgggcgggggcagcaagccagaacactgcctgacatgctttcatcagacgcaggtcctctctcatatcctctgatttactccagtaaggtgatgatcatatctttatttgatagtacggtaatgccagataaatacagacacaatggtaaataa

SEQ ID NO: 473695 - DNA, 2253 bp, Shigella flexneri
atgttttctataaaaccaggacctggaaatttacctatcgacaaccccacattgttatcatggaacattactgatggggatctaaattccaaatttaatacattagaatatctaaactgtataacaaatattattaatgcttgtggagtttatcctcaggatttaaaagacagagaaattatatcaacttttcacgcagaaaaagtcattaatgatctgttaaaaaacgattataaaatttccctttctccagatacaacttaccgagagctgaataaagctgcacagagtagcattacagcgccagacaggataggagaagggaaaacatgggtttatcaacgagatacaatggttgaaagaggtgataacagtggtgttcatcagtatggtccagctgaacatttcactcacattatatctgacaaaccgtccccaaaagataagtatgttgcatatgctattaacattcctgactatgagctagcagccgatgtatataatattaacgtgacgtcaccttccggacagcaagaaacatttaaaatactaatcaatccagaacatctacggcaaacacttgagcgtaaatctcttactgctgttcagaaatcacaatgtgaaatcatcacccccaaaaaacctggcgaagcgattcttcatgcttttaatgccacctaccagcaaatcagggaaaatatgtctgagtttgcacgttcccattatgggtatatacaaatccctccagtgacaactttccgcgccgacggaccagaaactcccgaagaagaaaaaggttactggtttcacgcttatcaacccgaagatctttgtaccatccataatccaatgggggatttgcaggattttatcgcattggttaaagatgctaaaaaatttggtatcgatatcattcctgattatacctttaactttatgggaatcggggggagtggtaaaaatgacctggattatccctctgctgatatacgagcgaagatcagtaaagatatagaaagtggtatccctggctattggcaaggtcaggttttgattccattcattaaagatccagtaacaaaagaacgtaaacaaatccatccagaagatatacatctcactgcaaaagacttcgaagcaagtaaagataacatctctaaggatgaatggaaaaacctccatgcattaaaagaaaagagtttaaatggaatgcctaaaacaacccccaaaagtgaccaggttattatgttgcaaaatcaatacgttcgtgaaatgcgaaaatatggcgtacgaggtttacgttatgatgcagcaaaacactcaaaacatgaacaaatagaaagatcaataaccccaccgcttaaaaattataatgagcgattacacaatactaacttatttaacccaaaatatcatgaaaaaaccgttatgaattacatggaatatctggtaacttgtcagttgaatgaagaacaaatgtcatcgctgctttatgaaagagatgatttaagcgccattgatttttcattgctcatgaagacgataaaagccttttcattcgggggagatctcctaacccttgcatcaaaaccgggttccacaatctcaagcatcccatcagaaagacggatattgattaacattaaccacgattttcctaacaatggcaatcttttcaatgactttctatttaaccatcaacaagatgaacaattagcaatggcatatatggccgctctcccgttcagcaggcctttagtttactgggatggccaggtattaaaatcaacgactgaaattaaaaattatgatgggtccacgcgtgtcggtggtgaggcgtggcttaataaaggttgctctacctatcagcagctctacaatgaattccacgcattatatatagataaagcaggaatatggagcgcatttgagggtgtatttgcaactaaaaacgttctggcctttagtcgtggggattctgtgaacattaatcactctcctcatgatggactagttataataaataaaggaaacgaagaagttgaaggtacctggcctaacaaattgcaacctggaatatataaaaacatggggagtaatagcgttaacattattattaataatacccgaaaaattatctccccttgtaaagtatttacgcttagaggcggatctctaaatatcaatattcctaggcgtagcgctcttcttttagggaaaacaggagaaccgccgaactatctctatttataa

SEQ ID NO: 473696 - DNA, 978 bp, Shigella flexneri
atgaatgcactgaccgccgtacaaaataacgctgtcgattcaggccaggactatagcggattcactctcatcccgtcggcgcaatccccgcgtctgctggaactcaccttcaccgaacagacgaccaaacagtttctcgaacaggttgccgaatggcccgtgcaggcgctggagtacaaatcgtttctgcgttttcgggtaggcaaaattcttgacgatctgtgtgcgaatcagctgcaaccattgctgttgaagaccctgctaaaccgtgctgaaggtgcgctgttgatcaatgcggtaggtatcgatgatgtggcgcaggcagatgagatggtgaagctggcaacggcggtagcgcatctgattggtcgctcaaatttcgatgcgatgagcggtcagtattacgcgcgtttcgtggtgaaaaatgtcgataactcagacagctatctgcgtcagccgcaccgcgtgatggaactgcacaacgacggcacgtatgtcgaagagatcaccgattacgtgctgatgatgaaaatcgatgagcaaaacatgcagggtggaaattcgttgctgctgcatctcgatgactgggaacatctggaccactatttccgccatccactggcgcgtcgcccgatgcgctttgccgcgccgccgagcaaaaacgtcagcaaagatgttttccatccagtgttcgacgttgatcaacagggtcgcccggtgatgcgctatatcgaccagttcgtccagccaaaagattttgaagaaggcgtgtggttgagcgagctttccgatgccattgaaaccagcaaaggcattctttctgtacccgttcccgttggcaaattcctgttgataaacaacctgttctggctgcacggtcgcgaccgctttactccgcacccggatctgcgccgtgaactgatgcgtcagcgtggctatttcgcttacgccactcaccactaccagacgcatcagtaa

SEQ ID NO: 473697 - DNA, 1269 bp, Shigella flexneri
atgtatgattttgtgattattggcggcggcatcatcggcatgtcgaccgccatgcaactgattgatgtttatccggatgcccgcattgcgttgctggaaaaagagtccggcccggcctgtcaccagacgggccacaacagcggcgtgatccatgccggggtctattacacgcccggcagcctgaaggcgcagttttgcctggcggggaaccgtgccaccaaagccttttgcgatcaaaacggcattcgctatgacaactgcggcaagatgctggtcgccacgtctcagctcgaaatggaacggatgcgcgccttatgggaacgcacagcggcgaacggtatcgagcgcgagtggataaacgccgtggaactgcgcgagcgcgaaccgaatatcaccgggcttggtggcatttttgtgccgtccagcggcattgtcagctaccgcgaagtgacggcggcaatggcaaaaatcttccaggccagaggcggcgagattatttataacgccgaagtcagcgccctcagtgagcataaaaacggcgtggtgatacgcacccgtcagggcggtgaatatgaagcatcgacgctgattagctgttccgggctgatggctgaccggctggtgaaaatgctcggcctcgaaccgggctttattatctgcccgttccgtggcgagtatttccgccttgcgccggagcataaccagattgttaaccacctgatttaccccattcccgaccccgcgatgccatttttgggcgtgcatctcacccgcatgatcgacggcagcgtgaccgtcgggccaaacgcggtgctggctttcaaacgcgaaggctatcgcaagcgcgacttctcatttagtgacacgctggagattttgagctcgtcggggattcgccgggtgctgcaaaaccatctacgctcaggactgggcgagatgaaaaactcgctgtgcaaaagcggctatctgcggctggtgcaaaagtattgtccccggctttcgttaagcgatctccagccctggcccgccggtgtgcgggcgcaggcagtatcgccggacggcaagctgattgacgattttctgtttgtcaccaccccacgcacgatccacacctgcaatgcgccctccccggcagcgacatcagcaattcctattggtgcgcatattgtcagcaaggtacaaacgctgttggcaagccagagtaaccccggacgcacgctgcgagcggcacgtagtgtggatgccttacacgccgcatttaatcaataa

SEQ ID NO: 473698 - DNA, 702 bp, Shigella flexneri
atgaaacttaacgacagtaacttattccgccagcaggcgttgattaacggggaatggctggacgccaacaatggtgaagtcatcgacgtcaccaatccggcgaacggcgacaagctgggtagcgtgccgaaaatgggcgcagatgaaacccgcgccgctatcgacgccgccaaccgcgccctgcccgcctggcgtgcgctcaccgccaaagaacgcgccaccattctgcgcaactggttcaatttgatgatgcagcatcaggacgatttagcgcgcctgatgaccctcgaacagggtaaaccgctggctgaagcgaaaggcgaaatcagctacgccgcctccttcattgagtggtttgctgaagaaggcaaacgtatttatggcgacaccattcctggtcatcaggccgataagcgcctgattgttatcaagcagccgattggcgtcaccgccgccatcacgccgtggaactttccggcggcgatgattacccgtaaagccggtccggcgctggcggcaggctgcaccatggtgctgaagcccgccagtcagacgccgttctctgcgctggcgctggcggaactggcgattcgcgcgggcattccggctggcgtgtttaacgtggtcaccggttcggcaggcgcggtcggtaatgaactgaccagcaacccgctggtacgcaaactgtcgtttaccggttag

SEQ ID NO: 473699 - DNA, 726 bp, Shigella flexneri
atggaacagtgcgcgaaagacatcaaaaaagtgtcgctggagctgggcggcaacgcgccgtttatcgtctttgacgatgccgatctcgataaagccgtggaaggcgcgctggcctcgaaattccgcaacgccgggcaaacctgcgtctgcgccaaccgtttatacgtgcaggacggcgtgtatgaccgctttgccgaaaaattacagcaggcggtgagcaaactgcacatcggcgacgggctggagaaaggcgtcaccatcgggccgctgatcgatgaaaaagcggtagcaaaagtggaagagcatattgccgatgcgctggagaaaggtgcgcgtgtggtttgcggcggtaaagcgcacgaacgcggcggcaacttcttccagccaaccattctggtggacgttccggccaacgccaaagtgtcgaaagaagagacgttcggccccctcgccccactgttccgttttaaagatgaagccgatgtgattgcacaagccaatgacaccgagtttggtcttgccgcctatttctacgcccgtgatttaagccgcgtcttccgcgtcggcgaggcgctggagtacggcatcgtcggcatcaataccggcattatttccaatgaagtggccccattcggcggcatcaaagcctcgggtctgggtcgtgaaggttcgaagtatggcatcaaagattacttagaaatcaaatatatgtgcatcggtctttaa

SEQ ID NO: 473700 - DNA, 1260 bp, Shigella flexneri
atgcagcgccgcagtcaggcgattccccgtggcgttgggcaaattcacccgattttcgctgaccgcgcggaaaactgccgggtgtgggacgttgaaggccgtgagtatcttgatttcgcgggcgggattgcggtgctcaataccgggcacctgcatccgaaggtggtggccgcggtggaagcgcagttgaaaaaactgtcgcacacctgcttccaggtgctggcttacgagccgtatctggagctgtgcgagattatgaatcagaaggtgccgggcgatttcgccaagaaaacgctgctggttacgaccggttccgaagcggtggaaaacgcggtaaaaatcgcccgcgccgccaccaaacgtagcggcaccatcgcttttagcggcgagtatcacgggcgcacgcattacaccctggcgctgaccggcaaggtgaatccgtactctgcgggcatggggctgatgccgggtcatgtttatcgcgcgctttatccttgcccgctgcacggcataagcgaggatgacgctatcgccagcatccaccggatcttcaaaaatgatgccgcgccggaagatatcgccgccatcatgattgagccggttcagggcgaaggcggtttctacgccgcgtcgccagcctttatgcagcgtttacgcgctctgtgtgacgagcacgggatcatgctgattgccgatgaagtgcagagcggcgcggggcgtaccggcacgctgtttgcgatggagcagatgggcgtggcgccggatcttaccacctttgcgaaatcgatcgcaggcggtttcccgctggcgggcgtcaccgggcgcgcggaagtgatggacgctgttgcaccgggcggtctgggcggcacctatgccggtaacccgattgcctgcgtggctgcgctggaagtgttgaaggtgttcgagcaggaaaatctgctgcaaaaagccaacgatctggggcagaagctaaaagacggattgttggcgatagccgaaaaacacccggagatcggcgacgtacgcgggctgggatcgatgattgccatcgagctgtttgaagatggcgatcacagcaaaccggacgcaaaactcaccgccgagatcgtggcacgcgcccgcgataagggcctgattcttctctcctgcggcccgtattacaacgtgctgcgcatccttgtaccactcaccattgaagacgctcagatccgtcagggtctggagattatcggtcagtgttttgatgaggcgaagcagtag

SEQ ID NO: 473701 - DNA, 1401 bp, Shigella flexneri
atggggcaatcatcgcaaccacacgagttaggcggcgggctgaaatcacgccacgtcaccatgttgtctattgccggtgttatcggcgcaagtctgtttgtcggttccagcgtcgccatcgccgaagcggacccggcggtattactggcctatctgttcgccggattactggtggttatgattatgcggatgctggcggaaatggcagttgccacgcccgataccggttcgttttccacctatgccgataaagccattggccgctgggcgggctataccatcggctggttgtactggtggttttgggtactggttatcccactggaagccaacatcgccgccatgatcctgcactcgtgggttccaggcattcccatctggttattttccctcgtcattaccctcgccttaactggcagtaatttattaagcgttaaaaactacggcgaatttgagttctggctggcgctgtgcaaagtcatcgctatcctggcctttattttccttggtgcagtcgcaattagcggtttttacccttatgccgaagtgagcgggatctcaagattgtgggatagcagcggctttatgcccaacggtttcggtgcggtattaagcgcgatgttgatcaccatgttctcgtttatgggcgcagaaattgtcaccattgccgccgcggaatccgacatgccggaaaaacatattgtccgcgccaccaactcggttatctggcgtatttctatcttctatttgtgctctatttttgtcgtcgtggcattaataccgtggaatatgccggggctgaaagccgttggatcttatcgctcggttctggaattgctcaatattccccatgcgaaattaatcatggactgtgtgatattactttccgtaaccagttgcctgaactcggccctgtataccgcctcaaggatgctctactccttaagccgtcgcggtgatgctcccgcggtaatgggtaaaatcaaccgcagtaaaaccccgtacgtggcggtgttactctccaccggcgcagcattcttaacggtggtggtgaactattacgcgcctgcgaaggtatttaaatttctgatcgacagctccggcgctatcgccctgctggtttatttagtcatcgccgtttcacagttgcggatgcgcaaaattctgcgagcagaaggaagcgaaattcgcttgcgaatgtggcttgatccctggctcacctggctggtcatcggctttattacctttgtgttggtagtgatgctattccgtccggcgcaacagttagaagtgatctccaccggcttattagcgatagggattatctgtaccgtgccaattatggctcgctggaaaaagctggtattgtggcaaaaaacacccgttcataatacgcgctga

SEQ ID NO: 473702 - DNA, 663 bp, Shigella flexneri
atgaccattacgtctctggatggctatcgctggctgaagaacgatattattcgcggtaattttcaaccggatgaaaaattacggatgagtttactgacatcgcgttatgcacttggcgttgggccgttgcaggaagcactttctcaactggtggcggaacggctggtcacggtggtgaatcaaaaagggtatcgggtggcgtctatgtcagagcaggagctgctcgatattttcgacgcccgcgccaatatggaagcgatgctggtcagtctggcgattgcccgcggtggcgatgaatgggaggcagacgttctcgcaaaagcgcatctgctcagtaagctggaagcctgtgacgccagcgagaaaatgcttgatgagtgggatctgcgtcatcaggcgtttcatacagcaattgtggcgggctgtggttctcactatttgctgcaaatgcgtgaacggttgtttgatctggcggcgcgttatcgatttatctggctgcggcgaacggtgctttcggtggaaatgctggaggataaacacgatcagcaccagaccctgactgcggcggtactgccgcgagatacagcgcgcgccagtgagttaatgcgccagcatttactgacgccaattcccattatccagcaggcgatggctggcaattaa

SEQ ID NO: 473703 - DNA, 450 bp, Shigella flexneri
atgggtctgttcaattttgttaaagatgccggagaaaaactctgggatgcggttacaggtcagcacgataaagacgatcaggtgaagaaggtgcaggagcatctgagcaaaaccggtatacctgatgccgataaagtgaacattcaaattgccgacggcaaagcgacggtcactggtgacggcctgagtcaggaggcgaaggagaaaatccttgttgcggtggggaatatttccggtattgccagtgttgatgatcaggtgaaaacggcgacaccagccactgccagccagttttataccgttaagtctggcgacactctgagtgccatttccaaacaggtctacggtaacgctaatctgtacaataaaatcttcgaagcgaataaaccgatgctaaaaagcccggataaaatttatccggggcaagtgttgcgtattccggaagagtag

SEQ ID NO: 473704 - DNA, 159 bp, Shigella flexneri
atgggtttctggagaatcgtcatcaccatcattctgccgccgatcggcgtgctgctcggtaaagggttcggttgggcgttcattattaatattctgctgacactgcttgggtatatccccggtttgattcacgcgttctgggtgcaaacccgcgattaa

SEQ ID NO: 473705 - DNA, 486 bp, Shigella flexneri
atgcaagtttttatcatgcgtcacggcgacgcagccctcgattccgccagtgattcggttcgtcctctgaccactaatggttgtgacgaatctcgcctgatggcgaactggctgaaaggtcaaaaagtggaaatcgaacgcgttctggtgagcccgttcctgcgagccgagcaaacactggaagaagtaggggattgtctgaacctgccttccagtgcagaagttctgccggagttaacgccctgcggcgatgttggtctggtcagtgcctatttgcaggcgttgaccaatgaaggtgttgcttcggtactggtgatctctcacttaccgttagtcgggtatctggttgccgagttatgtccgggcgaaacgccgcctatgtttaccacctcggccattgccagcgtaacgcttgatgaaagcggaaacggtacattcaactggcagatgagcccgtgtaatctgaagatggcaaaagctatctga

SEQ ID NO: 473706 - DNA, 2145 bp, Shigella flexneri
atggaaatggcatcagcgtttactcttaatgttcgtctggacaacattgctatcatcaccatcgacgtaccggatgagaaaatgaataccctgaaggcggaatttgcctcgcaggtgcgcgccattattaagcaactccgtgaaaacaaagagttgcgcggcgtggtgtttatctccgcgaaaccggacaattttatcgccggagcagacatcaacatgattggcaactgcaaaacggcgcaagaagcggaagcactggcgcggcagggccaacagttgatggcggagattcatgctttgcccattccggttatcgcggctattcatggcgcttgcctgggcggtgggctggagctggcgctggcgtgccacggtcgcgtttgtactgacgatcctaaaacggtgctcggtttgcctgaagtacaacttggattgttacccggttcaggcggcacccagcgtttaccgcgtctgataggcgtcagtacagcattagagatgattctcaccggaaaacaacttcgggcgaaacaggcattaaagctggggctggtggatgacgttgttccgcactccattttgctggaagccgctgttgagctggcgaagaaggatcgcccatcttcccgccctctacctgtacgcgagcgtattctggcggggccgttaggtcgtgcgctgctgttcaaaatggtcggcaagaaaacagaacacaaaactcaaggcaattatccggcgacagaacgcatcctggaggttgttgaaacgggattagcgcagggcaccagcagcggctatgacgctgaagctcgcgcctttggcgaactggcgatgacgccgcaatcgcaagctttgcgtagtatcttttttgccagtacggacgtgaagaaagatcccggtagtgatgcaccgcctgcgccattaaacagcgtgggaattttaggtggtggcttgatgggcggcggtattgcttatgtcactgcttgtaaagcggggcttccggtcagaattaaagatatcaacccgcagggcataaatcatgcgctgaagtacagttgggatcagctggagggcaaagttcgccgtcgtcatctcaaagccagcgaacgtgacaaacagctggcattaatctccggaacgacggactatcgcggctttgcccatcgcgatctgattattgaagcggtgtttgaaaatctcgaattaaaacaacagatggtggcggaagtggagcaaaattgcgccgctcataccatttttgcttcgaacacgtcatctttaccgattggtgatatcgccgctcacgccgcgcgacctgagcaagttattggcctgcatttcttcagtccggtggaaaaaatgccgctggtagagattattcctcatgcgggtacatcggcgcaaaccatcgccactacggtaaaactggcgaaaaaacagggcaaaacgcccattgtcgtgcgtgacaaagccgggttttacgtcaatcgcatcttagcgccttacattaatgaagctatccgcatgctgaccgaaggtgaacgggtagagcacattgatgccgcgctagtgaaatttggttttccggtaggcccaatccaacttttggatgaggtaggaatcgacaccgggactaaaattattcctgtactggaagccgcttatggagaacgttttagcgcgcctgcaaatgttgtttcttcaattttgaacgacgatcgcaaaggcagaaaaaatggtcggggtttctatctttatggtcagaaagggcgtaaaagcaaaaaacaggtcgatcctgccatttacccgctcattggcgcacaagggcaggggcgactctccgcaccgcaggttgctgaacggtgtgtgatgttgatgctgaatgaagcagtacgttgtgttgatgagcaggttatccgtagcgtgcgtgacggggatattggtgcggtatttggcattggttttccgccatttctcggtggaccgttccgctatatcgattctctcggcgcgggcgaagtggttgcaataatgcaacgactggccacgcagtatggttcccgttttaccccttgcgagcgtttggtcgagatgggcgcgcgtggggaaagtttttggaaaacaactgcaactgacctgcaataa

SEQ ID NO: 473707 - DNA, 1311 bp, Shigella flexneri
atgggtcaggttttaccactggttacccgccagggcgatcgtatcgccattgttagcggtttacgtacgccttttgcccgccaggcgacggcttttcatggcattcccacggttgatttagggaagatggtggtaggcgaactgctggcacgcagcgagatccccgctgaagtgattgaacagctggtctttggtcaggtcgtacaaatgcctgaagcccccaacattgcgcgtgaaattgttctcggtaccggaatgaatgtgcataccgatgcttacagcgtcagccgcgcttgcgctaccagtttccaggcggttgcaaacgtcgcagaaagcctgatggcgggaactatccgagcggggattgccggtggggcagattcctcttccgtattgccaattggcgtcagtaaaaaactggcgcacgtgctggttgatgtcaacaaagctcgaaccatgagccagcgcctgaaactcttctctcgcctgcgtttgcgcgacttaatgcccgtaccgcctgcggtagcagaatattctactggcttgcggatgggcgacaccgccgaacaaatggcgaaaacctacggcatcacccgagaacagcaagatgcattagcgcaccgttcgcatcagcgtgccgctcaggcatggtcagacggaaaactcaaagaagaggtgatgactgcctttatccctccttataaacaaccgcttgtcgaagacaacaatattcgcggtaattcctcgcttgccgattacgcaaagctgcgcccggcgtttgatcgcaaacacggaacggtaacggcggcaaacagtacgccgctgaccgatggcgcggcagcggtgatcctgatgactgaatcccgggcgaaagaattagggctggtgccgctggggtatctgcgcagctacgcatttactgcgattgatgtctggcaggacatgttgctcggtccagcctggtcaacaccgctggcgctggaacgtgccggtttgacgatgagcgaactgacattgatcgatatgcacgaagcctttgcagctcagacactggcgaatattcagttgctgggtagtgaacgttttgctcgtgaagtactggggcgtgcacatgccactggcgaagtggacgatagcaaatttaacgtgcttggcggttcgattgcttacggacatcccttcgcggcgaccggcgcgcggatgattacccagacattgcatgaacttcgccgtcgcggcggtggatttggtttagttaccgcctgtgctgccggtgggcttggcgcggcaatggttctggaggcggaataa

SEQ ID NO: 473708 - DNA, 285 bp, Shigella flexneri
atgagtaaatgtagtgctgatgaaaccccggtttgctgctgtatggatgttggcaccattatggacaactccgactgcaccgcgtcttacagccgcgtgtttgcaaaccgcgcagaagcagaacaaacgctggcggcgctgactgaaaaatcccgtagcgtggaatccgaaccgtgcaaaatctccccgactttcactgaagagtctgacggtgtgcgcctggatatcgatttcacttttgcctgcgaagctgaaatgctgatcttccagctgggtctgcgttaa

SEQ ID NO: 473709 - DNA, 1341 bp, Shigella flexneri
atgagccagaaaaccctgtttacaaagtctgctctcgcagtcgcagtggcacttatctccacccaggcctggtcggcaggctttcagttaaacgaattttcttcctctggcctgggccgggcttattcaggggaaggcgcaattgccgatgatgcaggtaacgttagccgtaaccccgcattgattaccatgtttgaccgcccgacattttctgcgggtgcggtttatattgacccggatgtgaatatcagcggaacgtctccgtctggtcgtagcctgaaagccgataacatcgcgcctacggcatgggttccgaacatgcactttgttgcaccgattaacgaccaatttggttggggcgcttctattacctctaactatggtctggcaacagagtttaatgatacttatgcaggcggctctgtcgggggtacaactgaccttgaaaccatgaacctgaacttaagcggtgcgtatcgcttaaataatgcatggagctttggtcttggtttcaacgccatctacgctcgcgcgaaaattgaacgtttcgcaggcgatctggggcagttggttgctggtcagattatgcaatctcctgccgggcaaactcctcaagggcaagcattggcagctaccgccaacggtatcgacagtaataccaaaatcgctcatctgaacggtaaccagtggggctttggctggaacgccggaatcctgtatgaactggataaaaataaccgctatgcactgacctaccgttctgaagtgaaaattgacttcaaaggtaactacagcagcgatcttaatcgtgcgtttaataactacggtttgccaattcctaccgcgacaggtggcgcaacgcaatcgggttatctgacgctgaacctgcctgaaatgtgggaagtgtcaggttataaccgtgttgatccacagtgggcgattcactatagcctggcttacaccagctggagtcagttccagcagctgaaagcgacctcaaccagtggcgacacgctgttccagaaacatgaaggctttaaagatgcttaccgcatcgcgttgggtaccacttattactacgatgataactggaccttccgtaccggtatcgcctttgatgacagcccagttccggctcagaatcgttctatctccattccggaccaggaccgtttctggctgagtgcaggtacgacttacgcatttaataaagatgcttcagtcgacgttggtgtttcttatatgcacggtcagagcgtgaaaattaacgaaggcccataccagttcgagtctgaaggtaaagcctggctgttcggtactaactttaactacgcgttctga

SEQ ID NO: 473710 - DNA, 1059 bp, Shigella flexneri
atgctaccatctatttcaatcaacaataccagcgcagcttacccagaatccatcaatgaaaataacaatgatgaaattaatggattagtacaagagttcaaaaacctttttaatggtaaggaaggaataagcacctgtattaaacatctacttgagcttataaaaaacgccatacgagtaaacgacgatccttatagatctaatattaataattcctcagttacttatattgatattggctccaatgatacagaccatattactattggtatcgacaaccaagaaccaatagaattacctgcgaactataaagacaaagaactcgtccgtactatcattaatgacaacatagttgagaagactcatgatatcaataacaaggaaatgatcttcagcgcattaaaagaaatatatgatggagatcttggttttatcttcgataagatatcacacaaactcagacatacggtaacggaatttgatgagagcgggaaaagcgaaccaacggacttatttacctggtacggtaaagataaaaaaggcgactctctcgctattgtaattaaaaataaaaacggaaatgattacttatctctcggttactacgatcaggacgactaccacattcaaagaggaattcgtattaatggtgatagtctcacccaatattgtagtgaaaacgccaggagtgcttcagcgtggtttgaaagcagtaaagctatcatggcagaatcatttgcaactggttccgatcatcaggttgtaaacgagctcaacggggaaagactgagagaacctaacgaagtttttaaacgtttaggtcgagcaataagatataattttcaagtggacgatgcaaaatttagacgcgataatgtaaaagaaataatttctactttattcgctaacaaagttgacgttgaccatcctgaaaataaatacaaagactttaagaatctcgaagataaagttgaaaaaagacttcaaaatcgccagacgaaatatcaaaatgaaattaatcaactatctgcactaggtgttaattttgatgatatttaa

SEQ ID NO: 473711 - DNA, 756 bp, Shigella flexneri
atgaagcttcgcctgtcggcgcttgctctgggaactacgcttctggtggggtgtgcgagttccggtacagatcagcaagggcgttctgacccgttagaagggttcaaccgcaccatgtacaacttcaacttcaacgtattagacccgtatattgttcgaccggtcgctgtcgcctggcgtgattatgttccgcaaccggcgcgtaatggtttgagcaactttactggcaaccttgaagaacctgcggtgatggttaactacttcttgcagggcgacccttatcaggggatggtccactttacccgctttttcctgaacaccattttggggatgggcggctttattgatgttgcagggatggcgaacccgaaactgcaacggactgaacctcaccgcttcggtagtacgcttggtcattatggcgtgggttatgggccttacgttcagttaccgttctacggtagcttcacgctgcgtgatgacggtggtgatatggcggatgctctttacccggttctttcctggctgacctggccgatgtctgtgggtaaatggacgcttgaagggatcgaaacccgcgctcagctgctggattccgatggtctgctgcgtcagtcgtccgatccttatattatggtgcgcgaagcgtacttccagcgtcatgatttcatcgctaatggcggcgaactcaaaccgcaggaaaatccgaacgcgcaagcgattcaggatgatttaaaagatatcgattctgaataa

SEQ ID NO: 473712 - DNA, 933 bp, Shigella flexneri
atggacaacgacaaaattgatcaacacagcgacgaaattgaagttgagagcgaagaaaaagagcgcggcaaaaaaatagaaatagatgaagaccgactcccctcccgagcgatggcaattcatgagcatatccgccaggatggtgaaaaagagctagaacgcgacgcaatggcgctactgtggtcagccattgcggcgggtctgtcgatgggcgcttcgttactggcaaaagggatatttcatgccgaactggaaggtgtgccgggcagcttcttgctggagaatctcggttatacctttggttttattatcgtcataatggcccgccagcaattatttaccgaaaacaccgtgactgcggtactacccgtcatgcaaaaaccgacaatgagcaacgttggcttacttatgcggttatggggagtcgtgctgctgggtaatattctcgggactggtattgctgcgtgggcatttgaatatatgcctatcttcaatgaagaaactcgcgatgcatttgtcaaaatcggcatggatgtgatgaagaacacccccagcgagatgtttgccaacgcgatcatttccggctggctgatcgccactatggtatggatgtttcctgcagcaggtgcggcaaagattgtggtgattatattgatgacctggcttattgccctgggtgacaccacccatatcgtggtcggttctgttgaaatcctctatctggtgtttaacggtacgctgcactggagcgatttcatctggcccttcgcactacctactttagcggggaacatctgcggcggcacctttatcttcgcgttaatgagtcatgcacagattcgtaacgacatgagcaacaagcgtaaagcagaagcacgccaaaaagcagaacgtgcggaaaacattaagaaaaatgataaaaacccagcataa

SEQ ID NO: 473713 - DNA, 495 bp, Shigella flexneri
atgctcaccgttaagcagattgaagcagcaaagccgaaagaaaaaccataccgccttctcgatggtaatggcctgtacctttatgtccctgtatccgggaaaaaggtatggcagcttcgctacaagattgacggtaaggagaaaatcctgaccgtcggaaaatatccgcttatgactttgcaggaggcaagggataaagcatggactgcgaggaaagacatctcggctggcatcgatccggtaaaggcgaaaaaggcttcgtctaacaacaattcatttagtgcgatttacaaggaatggtacgaacacaagaagcaagtctggtcagtagggtatgcgactgaacttgcaaaaatgtttgatgacgacattttacccatcatcggcggccttgagattcaggatattgagccgatgcaactgctggaagtaatccgcagatttgaagatcgcggtgcaattgaagtggtcaacaaaaactggccaccgagttag

SEQ ID NO: 473714 - DNA, 756 bp, Shigella flexneri
atgccgctgctgtttttctccgtcgctaaaggcaaattgcccacctatattctttcttgctttgcacctctggcaatgctgttggcgcattacgcgttgctggcagcaaaaaataatcctctggcgctgcggattaatggctggattaacatcgcttttggcgtcactggcattattgccacatttgtgatctccccctggggaccaatgaacacgccggtgtggcaaaccttcgagagctataaagtcttttgtgcctggtcgattttttcgctatgggcatttttcggctggtacaccttaacaaacgtcgaaaagacctggtctttcgccgcgctttgcccgctggggctggcgttgctggtaggattttcaattcctgacagagtcatggaaggaaaacatccgcaattttttgtcgagatgacacaagaatcacttcagccaagccgctatattcttactgatagcgtcggtgttgccgcaggtctggcatggagcctgcaacgcgatgacatcatcatgtatcgccagacaggtgagttgaaatacggccttaattatccggatgcgaaagggagatttgtcagcggtgatgagttcgcaaactggcttaatcaacatcgtcaggaggggattattacactcgtgctttcggttgaccgcgatgaagatatcaacagtctcgccattccgcccgcagatgccatcgttcgtcaggagcgtctggtgctgattcagtatcgtcccaaatga

SEQ ID NO: 473715 - DNA, 336 bp, Shigella flexneri
atgatctggctaacattagtctttgccagcttgcttagcgttgccgggcagttgtgtcagaaacaggcaacctgctttgtggcgataaacaaacggcgcaaacatatcgtgctgtggctgggactggcgctggcttgtcttggtcttgccatgatgctctggctgctggtcttgcagaacgtaccggtaggcattgcctacccgatgttaagtctgaattttgtctgggtgacgctggctgcagtaaaactgtggcacgaaccggtatcgccgcgtcactggtgtggggtggcgttcattattggtggcattgtgatcctcgggagtacggtgtaa

SEQ ID NO: 473716 - DNA, 387 bp, Shigella flexneri; identical to SEQ ID NO: 462322

SEQ ID NO: 473717 - DNA, 210 bp, Shigella flexneri
atgctctgcgatgctggcggcgcgataaaaatgatcgccgaagtgaagagtgacttcgccgtgaaagtgggggatttactctcgcctttgcagaatgcgctttattgtattaatcgtgaaaagctgcatacggtgaaagtcctctcggcaagcagttatagccccgatgagtgggaacggcagtgtacagcggcagggaaaactcagtaa

SEQ ID NO: 473718 - DNA, 1356 bp, Shigella flexneri
atgatcttctctgactggccgtggcgtcactggcggcaagtgcggggagaagccatcgccttacgtcttaatgacgagcaactcaactggcgcgagctttgtgctcgcgtcgatgagttagctacgggctttgcggcgcagggggtggttgagggcagcggcgtgatgttgcgggcgtggaatacgccgcaaacgctgctcgcctggctggcgttactgcaatgcggggcgcgggtgttgcccgtgaaccctcagctgccgcaaccgttgcttgaagaattgctgcccaatctgacgctgcaatttgcgctggtgccggatggggaaaacacgtttccggcattaacgtcgctgcacattcagctggttgaaggcgtacatgccgctgcgtggcagccgacgcgtctgtgctcaatgacgttgacctcgggttctaccggtttgccgaaagccgctgtccatacttatcaggcccatcttgccagtgcgcaaggtgtgttatcgctgattccgtttggcgatcacgatgactggttgctctctttaccgctgtttcacgtctccggtcagggaattatgtggcgctggttatacgctggtgcgcggatgacggtgcgtgataaacagccattggagcaaatgctggcaggctgtactcacgcttcactggtgccaacacaactctggcgtttgctggttaaccgcagttccgtttccctgaaagcggtgttacttggcggcgcggctatcccggtcgagttgacggaacaggcgcgcgagcaggggattcgttgcttttgcggctatggtctgaccgagtttgcctccacggtatgtgcgaaagaagccgacggcctggcagacgttggtttgccgctgccgggtcgggaagtgaaaatcgttaataatgaagtgtggctgcgggctgccagtatggcagaaggttactggcgtaacgggcaactggtttcactggttaatgacgaaggctggtacgctacgcgcgatcgcggtgagatgcataatggcaagctgaccattgtcggacgtttagacaatctgttcttcagtggcggtgagggtattcagccggaagaagtcgagcgtgttattgctgcacatcctgcggttttgcaggtgtttatcgtttccgttgccgacaaggagtttggtcatcggccggtagcggtggtggagtatgaccagcaaaccgttgatcttggcgaatgggtgaaagataagctggctcgttttcaacaaccggtgcgctggctgactttaccgccggagctgaaaaacggcggtattaaaatttcacgtcaggcgctaaaagagtgggtgcaacgtcagcaataa

SEQ ID NO: 473719 - DNA, 963 bp, Shigella flexneri
atgcgtagcgcgcaggtataccgctggcagatccccatggacgcgggggtggttctgcgcgacaggcggttaaaaacccgcgacgggctgtacgtttgcctgcgtgagggcgagcgcgaagggtggggggagatctccccactgccgggcttcagccaggaaaactgggaagaggcgcaaagcgtgctgcttgcctgggtaaataactggctggcaggcgattgcgagctaccgcagatgccttccgtggcctttggcgtaagctgtgcattggcagaactgacagatacgttgccgcaagcagccaactaccgtgcggcaccgctgtgtaatggcgatccggacgatctgatcctcaaacttgccgatatgccgggcgagaaagtggcgaaggtcaaagtgggattgtacgaagcggtgcgcgacggcatggtggtgaatctgttgctggaggcaattccggatctgcatttgcgtcttgacgcaaatcgcgcctggacaccgctgaaaggtcagcagtttgccaaatatgttaacccggattatcgccaccgcatcgcgtttctcgaagagccgtgcaaaacccgcgatgattcgcgagcgtttgcccgtgaaaccggcattgccattgcctgggatgaaagcctgcgcgagccggattttgcctttgtggctgaagagggcgtgcgcgcggtagttatcaaacccacgctcacgggcagtctggaaaaagtacgcgagcaggtacaggcggcgcatgcgctggggctgacggcggtgatcagttcttccattgagtcgagcttaggtctaacgcaactggcgcggattgctgcctggttaacgccagacaccattccgggactggacacgctggatctgatgcaggcgcagcaggttcgtcgctggccggggagcccactgccgttagtggacgctgatgtacaggagcagttgttatga

SEQ ID NO: 473720 - DNA, 858 bp, Shigella flexneri
atgatttatcctgatgaagcaatgccttacgcaccggttgaatggcacgactgctccgaaggtttcgaggacattcgttatgaaaaatccaccgacggtatcgcaaaaatcaccattaatcgtccgcaggtgcgcaatgccttccgtcctctgacggtaaaagagatgatccaggcactggcagatgcgcgttatgacgacaatatcggcgtgatcattctgactggcgcaggcgataaagcgttctgctccggtggtgaccagaaagtgcgtggtgattacggcggctataaagatgattccggcgtacatcacctgaacgtgctggacttccagcgtcagatccgtacctgtccgaaaccggttgtcgcgatggtggctggctactccatcggcggtggtcacgttctgcacatgatgtgcgacctgactatcgcagcagataatgccatcttcggtcagactggcccgaaagtcggttccttcgacggcggctggggcgcttcctacatggctcgtatcgtcgggcagaaaaaagcgcgagaaatctggttcctgtgccgtcagtacgacgcaaaacaggcgctggatatgggccttgtcaacaccgtggtaccgctggcggatctggaaaaagaaaccgtccgttggtgccgcgaaatgctgcaaaacagcccgatggcgctgcgctgcctgaaagctgcgctgaacgccgactgtgacgggcaggcggggctgcaggagctggcgggcaacgccaccatgctgttctacatgacggaagaaggtcaggaaggtcgcaacgctttcaaccagaaacgtcagcctgatttcagcaaatttaaacggaatccgtaa

SEQ ID NO: 473721 - DNA, 759 bp, Shigella flexneri
atgatcctgcacgcgcaggcaaaacacggaaaactaggtttaccctggctggtgtttttgcacggtttttccggcgattgccacgaatggcaagaagtgggcgaggcgtttgccgactactcacggttgtatgttgatctcctaggtcatggtggttcggcggcgattagcgtcgatggatttgatgatgtcaccgacttactgcgtaaaaccttggttagttacaacatccttgacttctggctggtggggtactcgcttggcggacgggtggcgatgatggcggcttgccaggggctggcggggctttgtggggttattgtcgaaggcgggcatccggggctgcaaaatgctgaacaacgtgcggaacgtcagcgttccgatcgccaatgggcgcagcgttttcgcacagaaccgttaacggcggtatttgccgactggtatcaacagcctgtttttgcctcgctcaatgacgatcaacgccgggagctggtggcgctgcgcagcaacaataatggcgcaacccttgccgccatgctggaggcgacttctctcgccgtccagcctgatttacgtgctaaccttagcgcccgcacatttgcgttttattatttatgtggtgaacgtgacagcaaattccgcgccctggcggcggaactggctgccgactgccatgtcattcctcgcgccggacataacgcgcatcgggaaaatcccgctggcgtaatcgcaagtctggcgcagatcttgcgtttctga

SEQ ID NO: 473722 - DNA, 1671 bp, Shigella flexneri
atgtcagtaagcgcatttaaccgacgctgggcggcggtcattctggaagcattaacgcgtcacggcgtcagacacatctgtatcgccccaggctcgcgttctacaccgttaacgttagcggcggcggagaattccgcattcattcaccacacccatttcgatgagcgtgggttggggcatctggcgctggggctggcgaaagtcagcaagcagccggtggcggtgattgtgacctccggcacggcggtggcaaatctctatccggcactgattgaagccgggttaaccggagaaaaactgattctcttaaccgccgatcgcccgccggagctaattgactgcggcgcgaatcaggcaattcgccagccgggaatgttcgcctctcaccccacgcacagtatttcattgccgcgcccgacccaggatatccccgcacgttggctggtttctaccatcgaccacgctctcggtacgcttcatgcggggggagtccatatcaactgcccgtttgctgaaccgctgtatggcgaaatggacgataccgggcttagctggcaacagcgtctgggtgactggtggcaggacgacaaaccgtggctgcgtgaagcgcctcgtctggaaagtgaaaaacagcgcgactggttcttctggcgacaaaagcgcggcgtggtggttgccgggcgcatgagtgcggaagagggcaaaaaagttgccctgtgggcgcaaactcttggctggccgctgattggcgatgtgctgtcacaaaccgggcagccgctgccgtgtgccgatctttggttaggcaatgccaaagcgaccagcgagctgcagcaggcgcaaattgtggtgcaactgggaagtagcctgacggggaaacggctcctgcaatggcaggcaagctgtgaaccagaagagtactggattgttgatgacattgaagggcgacttgatccggcacaccatcgcggacgtcgcttaattgccaatattgccgactggctggagctgcatccggcagaaaaacgccagccctggtgcgttgaaatcccgcgcctggcggaacaggcaatgcaggcggttattgcccgccgtgatgcgtttggcgaagcgcaactggcgcatcgcatcagcgactatctgcctgaacaggggcaattgtttgttggtaacagcctggtggtacgtctgattgatgcgctttcgcaacttccggcaggttacccggtgtacagcaaccgaggggccagcggtatcgacggactgctttcgaccgccgcaggcgttcagcgggcaagcggcaaaccgacgctggcgattgtgggcgatctctccgcgctttacgatctcaacgcgctggcgttattgcgtcaggtttctgcgccgctggtattaattgtggtgaacaacaacggcgggcaaattttctcgctgttgccaacgccgcaaagcgagcgtgagcgtttctatctgatgccgcaaaacgtccattttgagcacgccgccgcgatgttcgagctgaaatatcatcatccgcaaaactggcaggaacttgaaacggcatttgccgacgcctggcgcacgccaaccaccacggtgattgaaatggtggttaacgacaccgatggtgcgcaaacgctccagcaacttctggcgcaggtaagccatttatga

SEQ ID NO: 473723 - DNA, 1296 bp, Shigella flexneri
gtgcaatcacttactacggcgctggaaaatctactgcgccatttgtcgcaagagattccggcgacacccggcattcgggttatcgatattcctttccctctcaaagacgcttttgatgccttgagctggctggccagtcagcaaacgtacccgcaattctactggcaacaacgtaatggtgatgaagaagctgccgtcctgggcgcgattacccgttttacgtcgttggaccaggcacaacgttttcttcgccagcacccggaacacgctgacttacgcatttgggggctgaatgcttttgacccgtcgcagggcaatttacttttaccccgcctggaatggcgacgctgtggcggtaaagccacgctgcggctgacgctattcagcgaaagctcccttcagcacgatgcgattcaggcaaaagaatttatcgccacactggtgagtatcaagcccttgcctgggttacatttaaccaccacgcgagaacaacactggccggacaaaacgggctggacgcaattaatcgaactggcaacgaaaaccatcgccgaaggtgagctcgacaaagtggtgctcgctcgggcaactgacctgcatttcgcaagtccggtcaacgcggcggcgatgatggctgccagtcgtcgactgaatctgaattgctaccatttttacatggcctttgatggcgaaaatgcttttcttggctcttcaccggaacggttatggcggcggcgtgacaaagcgctgcgtactgaagcgctggcgggaacagtagcaaatcatcctgatgataagcaggcgcagcagttaggagagtggctgatggcggatgataaaaaccagcgcgagaacatgctggtggtggaagatatctgccaacgattacaggccgatacccagacgctggatgttttaccgccgcaggtactgcgtctgcgtaaagtgcagcatcttcgccgctgtatctggacttcactcaacaaagcggatgatgtgatctgtttacatcagttgcagccaacggcagcagttgctggcttaccgcgcgatctggcgcgacagtttatcgcccgtcacgaaccgttcacccgagaatggtacgccggttctgcgggctatctctcattacaacaaagcgaattctgcgtttccctgcgctcagcaaaaattagcggcaatgtcgtgcgattatatgctggcgcgggcattgtccgtggttccgaccccgagcaagagtggcaggaaatcgacaacaaagcggcagggctgcgtactttattacaaatggaatag

SEQ ID NO: 473724 - DNA, 306 bp, Shigella flexneri
atgtctaatcagtttggtgatacacgtatcgatgacgacctgacgctgcttagtgaaacactggaagaggtgctccgctcctctggcgatcccgccgatcagaaatatgttgagctgaaagcgcatgcagaaaaagcgctggatgatgtgaaaaaacgggttagccaggcttcagacagttattactatcgggcgaagcaggctgtttatcgtgctgatgactacgtccacgaaaaaccctggcaaggaattggtgtgggcgcggccgtcgggctggtactaggactgttgctggcacgccgttaa

SEQ ID NO: 473725 - DNA, 462 bp, Shigella flexneri
atgattgaatggcaagatctgcatcactctgaattatcggtttcccagctttatgccttattacaactgcgttgcgcggtgtttgttgtcgagcagaattgcccttatcaggatatcgatggtgatgatttgacgggggataatcgccatattctcggttggaaaaatgatgaactggtggcgtatgcgaggattctgaaaagtgatgatgatcttgagccggtcgttataggtcgggtgattgtcagtgaagcgttgcgtggtgaaaaagtggggcagcagctgatgagtaaaacactcgaaacatgtacgcatcactggcctgataagcctgtttacctcggggcgcaggcgcatctgcaaaacttctaccagagtttcggttttatccctgtgacggaggtctatgaagaagatggtatcccacacattgggatggcacgcgaggtaattcaggcgtaa

SEQ ID NO: 473726 - DNA, 936 bp, Shigella flexneri
ttgaaacgtgatgaactcatggaattaatttttttaggtacttcagccggtgtgccaacccgcacgcgcaatgtcacggcaatattgcttaacctgcaacatccgacccagagcggactttggttgtttgactgcggtgaaggcacccagcatcagctactgcataccgcctttaaccctggaaaactggacaagatttttatcagtcaccttcatggcgatcatctttttggtttacccggcttgctgtgcagtcgttctatgtcaggcattatccaacccttaacgatttatggtccgcaaggtatccgtgaatttgtggaaaccgtgctgcggattagcggctcatggaccgattatccgctggaaattgtcgaaattggcgctggcgaaattctcgatgatggcctgcgcaaagtaaccgcttatccgctggaacacccactggaatgttatggctatcgtattgaagaacatgataaaccgggtgcattaaatgcccaggcattaaaagctgctggcgtgccgcctggcccactgtttcaggaattaaaagcgggcaaaacaatcacgctggaagatggaaggcagattaacggcgcagattacttagctgctccagtgccaggtaaagcgctcgctattttcggcgataccggcccctgcgatgccgcacttgacctggctaaaggtgtcgatgtcatggtgcacgaagcgacgctggatataaccatggaagccaaagccaatagtcgcggccatagctctacacgccaggctgcgacactagcccgtgaggctggagtcggcaagctaatcattacccacgtcagctcgcgctatgatgacaaaggttgtcaacacctgttacgtgaatgcaggtcaattttcccggcgactgaactggcgaatgatttcaccgtgtttaacgtttaa

SEQ ID NO: 473727 - DNA, 195 bp, Shigella flexneri
atggttacagttgtcagcaattattgtcaattatctcaaacccaactcagtcagacatttgcagaaaaatttactgtgaccgaggaattactgcagtctttaaaaaaaacagcgttatccggagatgaagaaagtattgagttactgcataatattgcgttaggttatgatgaatttggaaaaaaagctgggtaa

SEQ ID NO: 473728 - DNA, 1257 bp, Shigella flexneri
atgggtagtaatatacatggaattagttgcactgcaaataattatttgaaacaggcctggaacgatataaaaaatgagtacgaaaaaaatcaaacatattcaatcacgctttttgaaaacacactggtgtgttttatgcggttgtacaatgaactcagacgtaaagtaaatgaagaggatactccatgtctggaatgtgaatcactagaaaaagaatttgaggaaatgcagaatgataatgatctatcattatttatgagaacattgcgtactaatgatacacaaatttattcaggggtttcaggaggtattacatatactatacaatatgttcaagatgttgatattgttagagtgtccttgccgggcagaggttcagagtctatcacagattttaaaggttattattggtatggctttatggaatatattgaaaacattaatgcgtgtgatgatgttttttctgagtattgtttagatgatgaaaatatgagtatccagccagaacagataaatatgccgggaatatctgatttagatactggtattgatttgtctggcatatcttttattcagagtgaaattaataaaacatatggattaaaatacgctccagtagatggcgatggatattgtctgttaagagccatactggttttaaaagaacatgagtattcatgggcgctgggcagccataagacgcaaaagcaagtatacgaagagtttattaaaattgttgataaacaaacgatcgaggctcttgttgatacggcattctataatctcagggaagatgtaaagacattatttggcgttgatctgcaatctgacaacaaaattcagggtgtgggtagttttatgtcatggagctttctgttttttaaaaaacaattcattgatagttgcttgaatgacaaaaaatgcatactgcatttacccgagtttatatttaatgataacaagaatttgcttgctttagataccgacacgtcggataggattaaagcggtgaagaattttcttgctgttctttcagatagcatttgctcattatttattgttaatagtaatgtggcatcaatctccttgggaaatgaatccttttcaacagatgaagatcttgagtatggttatttaacaaacactggcaatcattatgatgtttacctccctcctgaacttttttctcaggcttataagttaaaaaataaggaaatgaatgcgcaacttgactatttaaatcgttatgcaacttaa

SEQ ID NO: 473729 - DNA, 1242 bp, Shigella flexneri
atgaacaaaacgctaatcgccgcaactgtggcagggatagttttactcgcttcaaatgctcaggcacaaaccgtaccggaaggctatcagctacagcaagtgctcatgatgagccgccataacttacgtgcgccgctggcgaacaatggcagtgtgctggagcagtcgacgccgaataaatggcccgaatgggacgtccccggtgggcaactcaccaccaaaggtggcgtgctcgaagtgtatatgggccattacatgcgtgaatggctggcagagcaggggatagtgaaatcgggggaatgcccgccgccggacaccgtttatgcctatgccaatagtctgcaacgtaccgtcgctaccgcccagttctttattactggtgcattccctgggtgtgatattcctgtgcatcaccaggaaaaaatgggcactatggacccaacctttaacccgatgatcaccgatgattccgccgcattcagtgaacaggcggtggcggcaatggagaaagagctcaggaaactccagcttaccgacagctaccagctactggaaaaaatcgttaactataaagattcccctgcctgtaaagagaaacaacagtgttcgctggtggatggcaaaaatacctttagcgccaagtatcaacaagaaccaggtgtttccgggccgctgaaagtcggcaactcgctggtagatgcgtttactttgcaatactacgaaggttttccgatggatcaggtggcctggggagaaatcaaatctgaccagcagtggaaggtattgtcgaagctgaaaaacggttaccaggacagtctgtttacctcaccggaagtggcgcgcaatgttgcgaaaccgctggtcagttatatcgacaaagccctggtcaccgatcgcgccagtgctccgaaaatcacggtgttagttgggcacgactccaacatagcctctctgttaacggcgctggatttcaaaccgtatcagttgcatgaccagaacgaacgcacgccgattggcggcaaaatcgttttccagcgttggcatgacagcaaagccaatcgcgatttgatgaaaattgaatatgtgtaccagagtgcggaacagttacgtaatgccgatgcgttaaccctgcaggcacctgcgcagcgcgtgacgctggaattaagcggttgcccgatagatgccaacggtttctgcccgatggataagtttgatagcgtgttgaatgaggcggtgaaataa

SEQ ID NO: 473730 - DNA, 228 bp, Shigella flexneri
atgccaactcaagaagcgaaagctcatcacgtcggtgaatgggcatctctgcgcaatacgtcgccggaaatagccgaggccattttcgaagtcgccgggtacgacgaaaaaatggcagaaaagatttgggaagaaggtagtgatgaagtgttagtcaaagcctttgctaagaccgataaagattcgcttttttggggcgaacagaccatcgaacgtaaaaacgtttaa

SEQ ID NO: 473731 - DNA, 597 bp, Shigella flexneri
atggctaaagttctggtgctttattattccatgtacggacatattgaaacgatggcacgcgcagtcgctgagggtgcaagcaaagtggatggcgcagaagttgtcgttaagcgtgtaccggaaaccatgccgccgcaattatttgaaaaagcaggcggtaaaacgcaaactgcaccggttgcaaccccgcaagaactggccgattacgacgccattatttttggtacacctacccgctttggcaacatgtccggtcaaatgcgtaccttcctcgaccagacgggcggcctgtgggcttccggcgcactatacggaaaactggcgagcgtctttagttccaccggtactggcggcggtcaggaacaaaccatcacatccacctggacgacccttgcgcatcacggcatggtgattgtccccattggctacgcagcgcaggaattatttgacgtttcacaggttcgcggcggtacgccgtacggcgcaaccaccatcgcaggcggtgacggctcacgccagccaagccaggaagaactgtctattgctcgttatcaaggggaatatgtcgcaggtctggcagttaaacttaacggctaa

SEQ ID NO: 473732 - DNA, 1329 bp, Shigella flexneri
atggcaatgttcggttttcctcactggcagttaaaatcgacctctacagagagcggcgtggtcgcgccggatgaacgattgccgtttgctcagacggcagtaatgggcgttcaacacgcggtggcgatgtttggcgcgacggtgttaatgccgattctgatggggctggatcccaatctttccattttaatgtcggggatcggcacgttactgtttttctttattaccggcgggcgcgtccccagttatctcggctccagcgcggcttttgtcggcgtggtgattgccgcgacgggctttaacggtcagggcattaacccgaatatcagcatcgcgctgggcgggattatcgcctgtgggctggtttataccgtcattggcctggtggtgatgaaaattggtacacgctggattgaacgactaatgccgccggtggtgacgggtgcggtggtgatggcgattggcctgaacttagcgcctatcgcagtgaaaagtgtatcggcttcggcctttgatagctggatggcggtaatgacggtgctgtgtattgggctggtggcggtgtttacccgtggcatgatccagcggttattgattctcgtaggattaattgtcgcctgtctgctgtatggcgtgatgaccaacgttttagggctgggaaaagccgtcgattttactctcgtcagctatgctgcctggttcggtctgccgcatttttccactcctggttttaatggccaggcgatgatgttgattgcgcccgtggcggtgattctggtggcggaaaacttaggtcatctcaaggcggtcgccgggatgaccggacgcaatatggacccgtatatggggcgagcattcgtcggtgatggtctggcaacgatgctttccggctctgtcggcggtagcggcgtcaccacctatgctgaaaatatcggtgtgatggccgtgacaaaagtctactcgacgctggtgtttgttgcagctgccgtcatcgctatgctgttgggcttttcgccgaaatttggcgcgctgatccataccattccggccgcggtgattggtggtgcatcaattgttgtgttcgggctgattgccgtcgcaggcgcaaggatatgggtacaaaaccgtgtcgatttaagccagaacgctaatttgattatggtcgcagtaaccttcgtgctgggcgcgggtgattttgctctcacgcttggcggttttacgttgggagggatcggtacagcaacctttggcgcgattttactcaatgcgttattaagcagaaggttggttgacgttccaccgccagaagttgttcatcaggagccataa

SEQ ID NO: 473733 - DNA, 495 bp, Shigella flexneri
atgaacatagttgatcaacaaacctttcgcgatgcgatgtcctgtatgggcgcggcggtcaatatcatcaccacggacggtccagccgggcgcgccgggttcaccgccagcgccgtctgcagcgtgaccgacacgccgcccacattactggtgtgcctgaatcgtggggcgtccgtctggccggtattcaatgaaaatcgaacgctgtgtgtaaatacactgagcgccgggcaggagccgctttcaaatctttttggcggcaaaacgcccatggaacaccgctttgccgccgcccgctggcagacgggtgtgaccggatgcccgcaactggaagaggctctggtttcgtttgactgccgtatcagccaggtggtgagcgtcggcacccacgacattctgttttgcgccatcgaagcgattcatcgtcacaccacaccctacgggctggtgtggttcgatcgcagttatcacgcgctgatgcgccctgcttgttaa

SEQ ID NO: 473734 - DNA, 591 bp, Shigella flexneri
atgaacgaagccgttagcccaggtgcgcttagcaccctgttcaccgatgcccgcactcacaacggctggcgggagacacccgtcagcgatgagacgttacaggagctttatgccctgatgaaatgggggccgacatcagctaactgttctccggcacggatcgtgtttatccgcactgcagaaggaaaagaacgtctgcgcccggcgctttccagcggcaatctgcaaaaaaccctgaccgcgcccgtcaccgctatcgtcgcctgggacagtgaattttatgaacggttaccactactgtttccccacggtgatgcccgcagttggtttacctccagcccacaacttgccgaagaaacagcgtttcgcaacagttccatgcaggcggcttatctgatcgtcgcttgccgtgcgctgggactggataccggcccgatgtcgggttttgaccgtcaacacgttgacgacgccttttttgcgggcagcacgctgaagagcaatctgctgattaatatcggctatggcgatagcagcaaactttttgcgcgcctgccacgtctgtcctttgaagaagcctgcgggctgttgtaa

SEQ ID NO: 473735 - DNA, 801 bp, Shigella flexneri
atgaaactttcactctcacctcccccttatgctgatgcacccgtagtggtgttgatttcgggtcttggcggtagcggcagttactggttaccgcaactggcggtgctggagcaggagtatcaggtagtctgttacgaccagcgcggcaccggcaataatcccgacacactggcagaagattacagtatcgcccagatggcagcggaactgcatcaggcgctggtagccgcagggattgagcgttacgcggtggtcggccatgcgctcggtgcgctggtggggatgcagctggcgctggattatcccgcgtcggtaactatgctggtcagcgttaacggctggctacgaataaacgcccatacgcgccgctgttttcaggttcgcgaacgattactgtatagcggcggcgcgcaagcatgggtggaagcgcagccgttgttcctctatcccgccgactggatggcggcccgcgcacctcgcctggaggcagaagacgcgctggcactggcgcattttcagggcaaaaataatttactacgtcgacttaacgccctcaaacgcgctgactttagtcaccatgcggatcgcatccgctgcccggtgcaaatcatctgcgccagtgatgatctgctggtgccaacagcatgttccagtgaacttcatgccgccctgcccgatagccagaaaatggtgatgccctatggcggacacgcctgcaacgtgaccgatcccgaaacgtttaatgctctgttactcaacgggcttgccagcctgttacatcaccgtgaagccgccctgtaa

SEQ ID NO: 473736 - DNA, 387 bp, Shigella flexneri
atgccaaaatccgtaattattcccgctggcagcagcgcaccgctggcccccttcgttcccggcacgctggctgatggcgtggtgtatgtctccggtacgctggcttttgatcaacataataacgtgctgtttgccgatgacccaaaggcgcaaacccgccacgttctggaaactatccgcaaggtgatcgagacggcgggtggcacgatggcggatgtgaccttcaacagcatctttattaccgactggaaaaattacgccgcgattaacgaaatctacgccgagttttttccgggtgataaaccggcgcgattctacattcagtgcggactggtaaaacctgacgcgctggtggaaatcgccacaattgcgcatatcgccaagtga

SEQ ID NO: 473737 - DNA, 696 bp, Shigella flexneri
atgatgacaaccttaaccgctcgaccggaagccattaccttcgatccgcagcaaagtgcgcagatcgtggtggatatgcaaaacgcttatgccacgccaggcggctacttagatctcgccgggtttgatgtctcaaccactcgcccggtcattgccaacattcaaaccgctgtgaccgcagcgcgagcggcagggatgttgatcatctggtttcaaaatggctgggatgaacagtatgtcgaggctggcggccccggctcaccgaattttcataaatcgaacgccctgaaaaccatgcgtaagcagccgcagctgcaggggaaattgctggcgaaaggctcctgggattatcaactggtggatgaactggtgccgcagcctggcgatattgtgctgccgaagccgcgctacagcggtttcttcaatacgccgctggacagcattttacgcagccgtggaatacgccatctggttttcaccggtatcgctaccaacgtctgcgtcgaatcgacgctacgcgatggcttttttctggagcatttcggcgtggtgctggaagacgcaacacaccaggcggggccggaatttgcacagaaagccgcgttgttcaatatcgaaaccttttttggctgggtcagcgacgtcgaaacgttctgcgacgcgctttctcccacgtcctttgctcgtatcgcttaa

SEQ ID NO: 473738 - DNA, 1092 bp, Shigella flexneri
atgaaaattggcgtattcgtacctattggcaacaacggctggctcatttcgacccacgcgccgcagtacatgccgacctttgaactgaataaagccattgcgcaaaaagcggagcattaccatttcgatttcgccctgtcgatgatcaaactgcgtggctttggcggcaaaactgagttctgggatcacaaccttgagtcgttcaccttgatggcgggtctggcagccgtgacctcgcgcattcagatttacgccactgctgccaccttaacgttacctccggcaatcgtcgcccgtatggccgcaaccatcgactccatctctggcgggcgttttggcgtcaacctcgtgactggctggcaaaagcccgagtatgagcagatgggtatctggcctggcgatgactatttctcccgtcgttacgactatctcaccgaatatgttcaggtgctgcgcgacctgtggggcacggggaaaagcgattttaaaggcgattttttcaccatgaatgattgtcgcgtcagtccgcaaccgagtatccccatgaaagtgatctgcgccgggcaaagcgacgctggcatggcgttctccgcccagtatgccgatttcaacttctgtttcggcaaaggcgtaaatacacccacggctttcgccccgaccgctgcgcggatgaaacaggccacagagcaaaccggacgcgacgttggctcttatgtgttgtttatggtgattgccgatgaaaccgacgatgccactcgcgccaaatgggaacactacaaagcgggcgcggatgaagaggcgttaagctggctaaccgaacaaagtcagaaagatacccgctccggtactgacaccaacgttcgtcagatggccgatcccacttcggcggtaaacatcaatatggggacgttagtcggttcttacgccagtgtcgcgcgcatgttagatgaagtcgcaagcgtgcctggtgcagaaggcgtgctgttgaccttcgatgattttctgtcgggaatcgaaaccttcggcgagcgcattcaaccactgatgcagtgccgcgcccatctctctgcgctgactcaggaggtggcatga

SEQ ID NO: 473739 - DNA, 639 bp, Shigella flexneri
atgacgcaaggcgcagtgaaaacaacgggtaaacgttcgcgcgcagtaagcgcgaagaaaaaagcgattcttagcgcagcactggacactttttcacaattcggttttcacggcacaagactggagcagatcgcagagttggcgggtgtttcaaaaaccaatctgctgtattacttcccgtcaaaagaggcgctgtatattgccgtgctgcggcagattctcgatatctggctggcaccgttaaaagcgtttcgtgaagatttcgccccgctggcggcgataaaagagtacatccgtctgaagctggaagtctcacgcgattatccgcaggcttcgcgcctgttctgtatggagatgctggcaggcgcgccgttgttaatggatgaactgacgggcgatttgaaggcattaattgatgagaaatcggcgctgattgccggttgggtcaaaagcggcaaactcgcgccgattgatccgcagcatttgatttttatgatttgggcttccactcaacattacgccgatttcgcccctcaggtggaggcggtgacaggcgcgacgttgcgcgatgaggtatttttcaatcaaacggttgaaaacgtgcagcggattattattgaggggattcgaccacgttaa

SEQ ID NO: 473740 - DNA, 303 bp, Shigella flexneri
atggaaaggttctcctggcatgtggcggataaggggttccgtatggtgaggtactacggttttttgagtccggcgaaacggcggttactggaagaagtggtgtacatcataacggagacagtgagaaaaacggcgatgcaaatcacctggagagggatgtatcagaggttactgaaggttgacccgctgaagtgcgtgctgtgcgggagtcagatgcgttttacggggctgaagcggggctaccgtctggcagagcaggtcctgatgcatgagccgctggcccggatgcggtggtgcggctga

SEQ ID NO: 473741 - DNA, 1698 bp, Shigella flexneri
atggaaccaaaaacaaaaaaacagcgttcgctttatatcccttacgctggccctgtactgctggaatttccgttgttgaataaaggcagtgccttcagcatggaagaacgccgtaacttcaacctgctggggttactgccggaagtggtcgaaaccatcgaagaacaagcggaacgagcatggatccagtatcagggattcaaaaccgaaatcgacaaacacatctacctgcgtaacatccaggacaccaacgaaaccctcttctaccgtctggtaaacaatcatcttgatgagatgatgcctgttatttataccccaaccgtcggcgcagcctgtgagcgtttttctgagatctaccgccgttcacgcggcgtgtttatctcttaccagaaccgccacaatatggacgatattctgcaaaacgtgccgaaccataatattaaagtgattgtggtgactgacggtgaacgtattctggggcttggtgaccagggcatcggcgggatgggcattccgatcggtaaactgtcgctctataccgcctgtggcggcatcagcccggcgtatacccttccggtggtgctggatgtcggaacgaacaaccaacagcggcttaacgatccgctgtatatgggctggcgtaatccgcgtatcactgacgatgaatactatgaattcgttgatgaatttatccaggctgtgaaacaacgctggccggacgtgctgttgcagtttgaagactttgctcaaaaaaatgcgatgccgttacttaaccgctatcgcaatgaaatttgttcttttaacgatgacattcagggcactgcggcggtaacagtcggcacactgatcgcagccagccgcgcggcaggtggtcagttaagcgagaaaaaaatcgtcttccttggcgcaggttcagcgggatgcggcattgccgaaatgatcatcgcccagacccagcgcgaaggattaagcgaggaagcagcgcggcagaaagtctttatggtcgatcgctttggcctgctgacggacaagatgccgaacctgctgcctttccagaccaaactggtgcagaagcgcgaaaacctcagtgactgggataccgacagcgatgtgttgtcactgctggatgtggtgcgcaatgtaaaaccagatattctgattggcgtctcaggacagaccgggctgtttacggaagagatcatccgtgagatgcataaacactgtccgcgtccgatcgtgatgccgctgtctaacccgacgtctcgcgtggaagccacaccgcaggacattatcgcctggaccgaaggtaacgcgctggtcgccactggcagcccgtttaatcctgtggtatggaaagataaaatctaccctatcgcccagtgtaacaacgcctttattttcccgggcatcggcctgggtgttattgcttccggcgcgtcacgtatcaccgatgagatgctgatgtcggcaagtgaaacgcttgctcagtattcgccgctggtcctgaacggcgaaggtctggtactaccggaactgaaagatattcagaaagtctcccgcgcaattgcgtttgcggttggcaaaatggcgcagcagcaaggcgtggcggtcaaaacgtctgctgaagctttgcaacaagccattgacgataatttctggcaagccgaataccgcgactaccgccgtacctccatctaa

SEQ ID NO: 473742 - DNA, 1011 bp, Shigella flexneri
atgaagactgcagttgttacgaaggatcatcatgttgacgttacggataaaacactgcgctcactgaaacatggcgaagccctgctgaaaatggagtgttgtggtgtatgtcataccgatcttcatgttaagaatggcgattttggtgacaaaaccggcgtaattctgggccatgaaggcatcggtgtggtggcagaagttggcccaggtgtcacctcattaaaaccaggcgatcgtgccagcatggcgtggttttacgaaggatgcggtcattgcgaatactgtaacagtggtaacgaaacgctctgccgttcagttaaaaatgccggatacagcgttgatggcgggatggcggaagagtgcatcgtggtcgccgattacgcggtaaaagtgccagatggtctggactcggcggcgcccagcagcattacctgtgcgggggtcaccacctacaaagccgttaaactgtcaaaaattcgtcccggtcagtggattgctatctacggtcttggcggtctgggtaacctcgccctgcaatacgcaaagaatgtctttaacgccaaagtgatcgccattgatgtcaatgatgagcagttaaaactggcaaccgaaatggatgcagatttagcgattaactcacgcaccgaagacgccgccaaaattgtgcaggagaaaaccggtggcgctcacgctgcggtggtaacagcagtagctaaagctgcgtttaactcggcagttgatgctgtccgtgcaggcggtcgtgttgtggctgtcggtctgccgccggagtctatgagcctggatatcccacgtcttgtgctggatggcattgaagtggtcggttcgctggtcggcacgcgccaggatctaaccgaagccttccagtttgccgccgaaggcaaactggtgccgaaagtcgccctgcgtccgttagcggacatcaacaccatctttaccgagatggaagaaggcaaaatccgtggccgtatggtgattgatttccgtcactaa

SEQ ID NO: 473743 - DNA, 285 bp, Shigella flexneri
atgaaaatggccaatcatccccgcccgggggacattattcaggaatcactggacgaacttaatgtcagcctgcgcgagtttgccagagcaatggaaattgcgccctcaacggcaagccgattgctgaccggaaaagcagctttgacgccagaaatggcaattaaactttccgtggtgatcggcagttcgccgcaaatgtggctgaatctgcaaaacgcctggagtctggcagaggcagaaaaaacggtggttgtgtcgcgattacgccgtctggttacgcaataa

SEQ ID NO: 473744 - DNA, 654 bp, Shigella flexneri
atgagtaagtcgaaaatgattgtgcgcaccaaatttattgatcgcgcctgtcactggaccgtggtgatttgcttcttcctggtggcgctgtccgggatttcgttcttcttcccgacgctgcaatggctgacgcaaaccttcggtacgccgcagatgggacgcattttgcaccccttcttcggcattgcgattttcgtcgcactgatgtttatgtttgtgcgttttgtgcatcacaacatcccggataagaaagatattccgtggctgttgaacattgtcgaagtattaaaaggcaatgagcacaaagtggcggatgttggtaagtacaacgccgggcaaaagatgatgttctggtcgatcatgagcatgattttcgtgctgctggtgaccggggtgattatctggcgtccgtactttgcgcagtacttcccgatgcaggttgttcgctacagcctgctgatccacgcggctgcgggtatcatcctgatccacgccatcctgatccatatgtatatggcattctgggtgaaagggtcgattaaagggatgatcgaagggaaggtgagccgtcgctgggcgaagaaacaccatccgcgctggtatcgtgaaatcgagaaggcagaagcgaaaaaagagagtgaagaagggatataa

SEQ ID NO: 473745 - DNA, 885 bp, Shigella flexneri
atggctatggaaacgcaggatattatcaaaaggtccgcaactaactccatcacgccgccttctcaggtgcgtgattacaaagcagaagtcgcgaaacttatcgacgtttccacctgtatcggctgtaaagcctgtcaggtggcgtgttcggagtggaacgacatccgtgatgaagtggggcactgcgtcggggtttacgataaccccgccgatctgagcgccaagtcctggacggtgatgcgctttagcgaaaccgaacagaatggcaagctggagtggctgatccgtaaagacggctgtatgcactgtgaagatccgggctgcctgaaggcgtgcccgtctgctggtgcaatcattcagtacgctaacgggattgtcgatttccagtcggaaaactgcatcggctgtggttactgcattgccgggtgtccgtttaatattccgcgcctcaacaaagaggataaccgggtatataaatgcacgctctgcgtcgatcgcgtcagcgtcggccaggaaccggcttgtgtgaaaacctgtccgaccggggctatccacttcggcaccaagaaggagatgctggagctggcggaacagcgcgtggcgaaactgaaagcgcgtggttacgaacatgctggcgtctacaacccggaaggggtcggtggtacgcacgttatgtacgtgctgcatcacgccgatcagccggagctgtatcacggtctgccgaaagatccgaagatcgacacctcggtaagcctgtggaaaggcgcgttgaaaccgctggcagcggctggctttattgccacttttgccgggttgattttccactacatcggtattggcccgaataaggaagtggacgatgacgaggaggatcatcatgagtaa

SEQ ID NO: 473746 - DNA, 2412 bp, Shigella flexneri
atgaccaaccactgggtggatatcaaaaacgctaacgtcgtaatggtaatgggcggtaacgctgctgaagcgcatcccgtcggtttccgctgggcgatggaagcgaaaaacaacaacgatgcaaccttgatcgttgtcgatccccgttttacgcgtaccgcttctgtggcggatatttacgcacctattcgttccggtacggacattacgttcctgtctggcattttgcgctacctgatcgaaaacaacaaaatcaacgccgaatacgttaaacattacaccaacgccagcctactggtgcgtgatgattttgctttcgaagatggcctgttcagcggttatgacgctgaaaaacgccagtacgacaaatcgtcctggaactatcagttcgatgaaaacggctatgcgaaacgcgatgaaacactgactcatccgcgctgtgtgtggaacctgctgaaagcgcacgtttcccgctacacgccggacgttgttgaaaacatctgtggtacgccaaaagccgacttcctgaaagtgtgtgaagtgctggcctccaccagcgcaccggatcgcacaaccaccttcctgtacgcgctgggctggacgcagcacaccgtgggtgcgcagaacatccgtactatggcgatgatccagttgctgctcggtaacatgggtatggccggtggcggcgtgaacgcattgcgtggtcactccaacattcaggggctgactgacttaggtctgctctctaccagcctgccaggttatctgacgctgccgtcagaaaaacaggttgatttgcagtcgtatctggaagcgaacacgccgaaagcgacgctggctgatcaggtgaactactggagcaactatccgaagttcttcgttagcctgatgaaatctttctatggcgatgccgcgcagaaagagaacaactggggctatgactggctgccgaagtgggaccagacctacgacgtcatcaagtatttcaacatgatggatgaaggcaaagttaccggttatttctgccagggctttaacccggttgcgtccttcccggataaaaacaaagtggtgagctgcctgagcaaactgaagtacatggtggttatcgatccgctggtgactgaaacctctaccttctggcagaaccacggcgagtcgaacgatgtcgatccggcgtctattcagactgaagtattccgtctgccttcgacctgctttgctgaagaggatggttctatcgctaactccggtcgctggttgcagtggcactggaaaggtcaggacgcgccgggcgaagcgcgtaacgacggcgaaattctggcgggtatctaccatcatctgcgcgagttgtaccaggccgaaggtggtaaaggcgtagaaccgctgatgaagatgagctggaactacaagcagccgcacgaaccgcaatctgacgaagtagctaaagagaacaacggctatgcgttggaagatctctatgatgctaatggcgtgctgattgcgaagaaaggtcagttgctgagtagctttgcgcatctgcgtgatgacggtacaaccgcatcttcttgctggatctacaccggtagctggacagagcagggtaaccagatggcaaaccgcgataactccgacccgtccggtctggggaatacgctgggatgggcctgggcgtggccgctcaaccgtcgcgtactctacaaccgtgcttcggcggatatcaacggtaaaccgtgggatccgaaacggatgctgatccagtggaacggcagcaagtggacgggtaacgatattccggacttcggcaatgccgcaccgggtacgccaaccgggccgtttattatgcagccggaagggatgggacgcctgtttgccatcaacaaaatggcggaaggtccgttcccggaacactacgagccgattgaaacgccgctgggcactaacccgctgcatccgaacgtggtgtctaacccggttgttcgtctgtatgaacaagacgcgctgcggatgggtaaaaaagagcagttcccgtatgtgggtacgacctatcgtctgaccgagcacttccacacctggaccaagcacgcgttgctcaacgcaattgctcagccggaacagtttgtggaaatcagcgaaacgcaggcggcggcgaaaggcattaataatggcgatcgtgtcactgtctccagcaagcgaggctttatccgcgcggtggcagtggtaacgcgccgtctgaaaccgctgaatgtaaacggtcagcaggttgaaacggtgggtattccaatccactggggctttgagggtgtcgcgcgtaaaggttatatcgctaacactctgacgccgaatgtcggtgatgcaaactcgcaaacgccggaatataaagcgttcttagtcaacatcgagaaggcgtaa

SEQ ID NO: 473747 - DNA, 588 bp, Shigella flexneri
atggacgtcagtcgcagacaattttttaaaatctgcgcgggcggtatggctggaacaacggtagcggcattgggctttgccccgaagcaagcactggctcaggcgcgaaactacaaattattacgcgctaaagagatccgtaacacctgcacatactgttccgtaggttgcgggctattgatgtatagcctgggtgatggcgcaaaaaacgccagagaagcgatttatcacattgaaggtgacccggatcatccggtaagccgtggtgcgctgtgcccgaaaggggccggtttgctggattacgtcaacagtgaaaaccgtctgcgctacccgaaatatcgtgcgccaggttctgacaaatggcagcgcattagctgggaagaagcattctcccgtattgcgaagctgatgaaagctgaccgtgacgctaactttattgaaaagaacgagcagggcgtaacggtaaaccgttggctttctaccggtatgctgtgtgcctccggtgccagcaacgaaaccgggatgctgacccagaaatttgcccgctccctcgggatgctggcggtagacaaccaggcgcgcgtctga

SEQ ID NO: 473748 - DNA, 825 bp, Shigella flexneri
atggtaggattgattcgcggtgtcagcgaggggctcggcccggtcggcggcgcagctgctatctattcattaagcgggctgctgttaatcttcacggttggatttccgcgtattcggcagattccgaaaggctatttactcgccgggagtctgttattcgtcagctatgaaatctgtctggcgctttccttagggtatgcggcgacccgtcatcaggcgattgaagtgggtatggtgaactatctgtggcccagcctgacaattctctttgccattctgtttaatggtcagaaaaccaactggctgattgtaccaggattattattagccctggtcggcgtctgctgggtgttaggcggtgagaatgggttacattatgatgaaatcatcaataatatcaccaccagcccattgagttatttcctggcgtttattggtgcgtttatctgggcagcctattgcacagtaacgaataaatacgcacgcggatttaacggaattaccgtttttgtcctgctaacgggagcatgtctgtggatttactattttctcacgccacaaccagaaatggtatttagcacgcccgtcatgattaaactcatctctgcggcatttaccttaggatttgcttatactgcatggaatgtcggtatattgcatggcaatgtcaccataatggcggtaggctcgtattttacgcctgtactttcctcagcgcttgcagccgtgctgctcagcgccccgctgtcgttctcgttctggcaaggcgcactaatggtctgcggcggttccctgctctgctggctggcgacacgtcgtggttaa

SEQ ID NO: 473749 - DNA, 1101 bp, Shigella flexneri
atgaaattaaaaatagttgcggtggttgtaactggtttgttagctgcgaacgtagcacacgctgccgaagtctataacaaggatggtaataaactcgacctttatggcaaggttaccgctctacgttattttactgatgataagcgtgacgatggtgataaaacttatgcccgtctcggctttaaaggagaaacgcaaatcaatgatcaaatgattggttttggtcactgggaatatgattttaaaggctataacgatgaagccaacggctcgcgcggcaacaagacccgtctggcctatgctggtttaaaaattagtgaatttggctctctggactatggtcgtaactacggtgtcggctacgacattggttcatggaccgatatgttgccagaatttggtggcgatacctggagtcagaaagatgtcttcatgacataccgtaccaccggtctagcaacctatcgcaactacgatttctttggcttaattgaagggctgaactttgccgcgcaatatcaaggcaaaaatgaacgtactgacaacagtcatctttatggtgctgactacacgcgtgccaacggtgacggtttcggtatctcctcaacttatgtttatgatggctttggtatcggtgcggtatataccaaatccgatcggacaaatgcgcaggaaagagccgcagctaatcctctcaatgcctccggtaagaatgcagaactatgggccacaggtataaagtatgatgccaacaacatctactttgcagctaattacgatgaaacattaaacatgaccacctatggggatggttatatctctaacaaagcacaaagttttgaagtggtggcgcaatatcaattcgacttcggcttgcgcccatcactcgcttacctgaaatcgaaaggcagagatctgggccgctacgccgaccaggacatgattgagtatatcgacgttggtgcgacgtatttcttcaacaaaaatatgtcgacctatgttgattataaaatcaacctgattgatgaaagcgactttacccgtgccgtagatattcgcaccgataacatcgtcgctacgggcattacctatcagttctaa

SEQ ID NO: 473750 - DNA, 1641 bp, Shigella flexneri
atgaatacaactccctcacagcgattaggttttttgcatcacatcaggctggttccgttatttgcctgcattcttggcggtatcttagttctattcgcattaagttctgctctggctggctatttcctctggcaggccgatcgcgatcagcgtgatgttactgcggagattgagattcggaccgggttagcgaacagttcagattttttgcgttcagcccggatcaatatgattcaggccggggctgcgagtcgtattgcggaaatggaagcaatgaagcgaaatattgcgcaagccgaatcggagattaaacagtcgcagcaaggttatcgtgcttatcagaatcgaccggtgaaaacacctgctgatgaagccttcgacactgaattaaatcaacgctttcaggcttatatcacgggtatgcaacctatgttgaaatatgccaaaaatggcatgtttgaagcgattatcaatcatgaaagtgagcagatccgaccgctggataatgcttataccgatattttgaacaaagccgttaagatacgtagcaccagagccaaccaactggcggaactggcccatcagcgcacccgcctgggtgggatgttcatgattggcgcgtttgtgcttgccctggtcatgacgctgataacatttatggtgctacgtcggatcgtcattcgtccactgcaacatgccgcacaacggattgaaaaaatcgccagtggcgatctgacgatgaatgatgaaccggcgggtcgtaatgaaatcggtcgcttaagtcgtcatttacagcaaatgcagcattcactggggatgacagtagggactgttcgacagggcgcggaagagatttatcgtggcaccagcgaaatttcagctggcaatgcggacctgtcatctcgcaccgaagaacaagcggcggctatcgaacaaactgccgccagcatggagcaactcactgcgacggtgaaacagaatgcggataacgcgcatcatgccagcaaactggcgcaagaggcttctattaaagccagcgatggcgggcagacggtttccggtgtagtaaaaacgatgggcgctatctccacgagttcgaagaaaatttctgagatcaccgccgtcatcaacagtattgctttccagacgaatattctggcactgaatgctgccgttgaagccgcgcgagcgggtgagcaagggcgtggatttgccgttgtcgccagcgaagtacggacactcgcaagccgcagcgctcaggcagcgaaagagattgaaggcttgatcagtgaatcagtcaggttaattgacctggggtcggatgaggtggcaacggcagggaaaaccatgagcactattgttgatgccgtcgcgagtgtcacacatatcatgcaggaaatcgccgccgcctcggatgaacaaagtagaggcataactcaggttagccaggcgatttctgaaatggataaggtgacgcaacagaatgcttctctggtagaagaggcctcagcagcggcggtgtcccttgaagaacaggctgcacgattaactgaggcggtgaacgtattccgtctgaacaaacattctgtgtcggcagaacctcgcggagcgggtgaaccagttagtttcgctacggtgtga

SEQ ID NO: 473751 - DNA, 924 bp, Shigella flexneri
atggaaaaaaatagtctgtttagtcagcgcatccgtttgcgccaccttcatacattcgtagctgtcgcacaacaaggaactttggggcgcgcagctgaaacccttaatttgagtcaacctgcgctctctaatacattgaatgaactggagcagctgacgggcgctcgcttgtttgagcgtggtcgtcagggggcgcaacttaccttacccggcgaacaatttttaacgcatgcagtcagagttcttgacgccatcaacactgccggacagtcgcttcatcgtaaagaaggtcttaataatgatgtcgtcagggttggtgcactacctactgcggcactggggatattaccttcggttataggtcagtttcatcagcaacaaaaagagacgaccttgcaagttgcgacaatgagtaaccctatgattctggcgggtttaaaaaccggggaaatcgatatcggcattggtcggatgtcagatcctgaactgatgaccgggcttaattacgaactgctgtttcttgaatcgttgaagctggttgtccgccctaatcacccgctacttcaggagaacgtaacgctaagccgggtgctggaatggccggtcgttgtatcaccagaaggcactgcgccacgccagcattcagatgcattagtgcagagccagggctgtaaaattccttcgggttgtatcgaaacgctgtctacttcgctatctcgtcaacttaccgttgaatacgattacgtgtggtttgtcccttctggcgctgtaaaagacgacctgcgtcatgccacgctggtggccctgcctgttccgggacatggtgcaggcgaaccgattggaatactgacccgcgtagatgcgacgttctcttctggttgccagttgatgattaacgctattcgaaaatcaatgccgttctga

SEQ ID NO: 473752 - DNA, 1344 bp, Shigella flexneri
atggcgaacagcatcacggcggatgagattcgggaacagttttcgcaggcaatgtcagccatgtaccagcaagaagttccgcaatatggcacgctgctggaactggtagctgatgtgaatctggctgtgctggaaaacaatcctcaactgcacgaaaaaatggtaaatgcagacgagctggcgcgactgaatgttgaacgtcatggggcgattcgcgttgggactgcacaagagcttgctactcttcggcggatgtttgccattatggggatgtacccggtgagctattacgatctctcgcaggcaggggtgccggtacattcgacagcatttcggcccattgatgatgcttctctggcgcgtaatcccttccgcgtttttacatccttactccgccttgagcttatcgagaacgaaattttgcgccagaaagcggcggagattctgcgtcagcgcgatatcttcaccccacgttgtcgacaactgttagaggaatatgagcagcagggcggttttaacgaaacacaggcacaggagtttgtgcaggaagccctggaaacgtttcgctggcaccagttagcaacggtagatgaagaaacctatcgcgccttgcacaacgaacatcggttgattgctgatgtggtctgttttcctggatgccatatcaaccacctgacgccacgtacgctggatattgaccgggtgcagtcgatgatgcctgaatgcggaattgaacccaaaattctcatcgaggggccgccgcgccgcgaggtaccgattttactacgccagaccagctttaaagcactggaagagacggtgttgtttgcggggcagaaacagggcacgcataccgcgcgctttggtgaaattgagcagcgtggcgtggcattaacgccgaaagggcgacaactgtatgatgatcttctgcgtaacgctggaaccgggcaggataatctcactcaccaaatgcatttacaggaaaccttccgcacttttcctgacagtgagtttttaatgcgtcagcaagggttggcatggttccggtaccgtctgacgccttcgggtgaggcgcatcgtcaggcgattcatcctggagacgatccacagcccttaattgaacgtggttgggtagtggcgcaacccatcacctatgaagatttcttgcccgttagcgcggcggggatcttccagtcaaatctgggtaatgaaacgcagacacgcagtcacggtaatgccagtcgcgaagcatttgagcaggcgttgggttgtccggttttggatgagttccagctttaccaggaagcggaagaacgcagtaaacgtcgctgtggtttgctttaa

SEQ ID NO: 473753 - DNA, 1620 bp, Shigella flexneri
atggccgccgtgtgcggtaccagcggcattgcttctcttttttctcaggcagcattcgcggcagattctgatattgccgacgggcaaacccagcgttttgacttctccattctacagtcaatggcgcacgacttagcgcaaacagcgtggcgtggtgcgcctcgtccgttacctgacacgctggcgacaatgacgccgcaggcttataacagtattcaatacgacgccgaaaaatcgctctggcataacgttgagaaccgtcaactggacgctcagttcttccatatgggaatgggattccgtcgccgcgttcgtatgttttctgtagatccagcaacacatctggcgcgtgaaattcactttcgcccggagttgttcaaatacaacgatgcaggtgttgataccaaacaattagaagggcaaagcgatctcggctttgccggttttcgcgtgtttaaagcccccgaactggcgcgccgtgatgtagtatcatttctcggcgcgagttatttccgcgccgttgatgatacatatcaatacggtttgtcggcccgcggcctggcgatcgacacttacaccgacagtaaagaagagttccccgactttaccgccttctggtttgatacggtaaaaccgggggcaactacctttaccgtttatgcgttgctcgatagcgccagcattactggtgcctataagttcactatccattgtgagaaaagtcaggtgattatggatgtggaaaatcacctgtatgcgcgcaaagacattaaacagctgggcatttcgccgatgaccagtatgttcagctgcggtactaatgaacgtcggatgtgcgatacaattcatccgcaaattcatgactctgatcgtctgtccatgtggcggggcaacggcgagtggatttgccgtccgctgaataatccgcaaaaattgcagttcaatgcttacaccgacaacaacccgaaagggtttggtttattgcaactggatcgtgacttctcccattatcaggacattatgggctggtataacaaacgcccaagtctgtgggtggaaccgcgtaacaagtggggtaagggcaccatcggcctgatggaaatcccaacaacgggcgaaacgctggataacattgtctgcttctggcagccagaaaaagctgtaaaagcaggtgatgagtttgcattccagtatcgtctgtactggagtgcgcaaccgcctgttcattgcccattagcgcgcgttatggcgacgcgtaccggcatgggcggtttcccggaaggttgggcgccaggtgaacactatcccgaaaaatgggcgcgtcgttttgccgtcgatttcgttggtggtgatctgaaagctgccgcgccaaaaggcattgagccggtgattacgctttccagtggggaagcgaagcaaatcgaaattctctatattgaacccatcgatggttatcgtattcagtttgactggtatccgacttcggactccactgatccggtcgatatgcggatgtatctacgttgtcagggggacgctatcagtgaaacatggctgtatcagtatttcccgccagcgccggataaacgtcagtatgttgacgaccgcgtgatgagttaa

SEQ ID NO: 473754 - DNA, 225 bp, Shigella flexneri; identical to SEQ ID NO: 261075

SEQ ID NO: 473755 - DNA, 537 bp, Shigella flexneri; identical to SEQ ID NO: 461861

SEQ ID NO: 473756 - DNA, 981 bp, Shigella flexneri
atgcgcaaatatcgcctaagtgaagaacagcgagcctttagttatcaggaagatggcactaaaaaaagtgtgttattacggcagattatcgccattagcgattttaacgatgtgatagcaggaaccgctggcggctggatcgatcgcgaaacggtgttagcacaggaaggaaattgctggatttacgaccagaatgctattgcgttcggcggaacggtgatttccggtaatacgcgtatcaccggcaccagcgtgctgtggggagaggtttacgcaacggataacgtctggatcgataatagtgaaatcagccagggtgcatatataagtgacagtgtcaccattcatgactcattagtttacgtgcaatgtagaatatttggtcacgccttaattgatcaacattctatgatcgtcgccgcacaaggcttaacgcccgaccatcaactcctgctccaaatttatgatcgcgcaagggttagcgcctcgcgtattgtccaccaggcacaaatttatggcgatgccgtcgtccggtatgcttttattgaacatcgcgccgaagtttttgattttgccagtgttgaaggtaatgaagagaacaacgtctggctatgcgattgcgctaaagtctacggtcacgcgcaggtgaaagctggcatagaagaagatgccattccgacgattcattacagttcgcaggtggcggaatatgccattgtggaaggtaattgtgtgttaaaacatcatgtcttgattggcggaaatgccgtggtacgtggtggaccgattctgctcgacgagcacgttgtaatacaaggtgagagccgtattacaggtgcggtgataattgaaaaccatgtggagttaaccgaccacgccgtcgttgaagcctttgatggcgacacggttcatgtccgtggtccaaaagtcattaacggcgaggagcgcattacgcgaacgccgctggcagggttattatga

SEQ ID NO: 473757 - DNA, 993 bp, Shigella flexneri
atgcagagcgataaagtgctcaatttgccggcaggctactttggtattgtgttggggacgatagggatgggatttgcctggcgctatgccagccaggtttggcaggtcagccactggttaggggatgggctggtgattctggcgatgatcatctggggattattgactagcgcatttattacccgactcatacgctttccgcatagcgtgctggcggaagttcgccatccagtgctgagcagttttgtgagtttgtttccggcaacgacgatgctggtggcgattggttttgttccgtggtttcgcccactggcggtgtgcatgttcagttttggtgtcgtggttcagttggcttatgccgcctggcaaactgcgggattatggcgcggatctcaccctgaagaagctaccacgcctggactgtatctgccgacagttgccaacaactttatcagcgcaatggcctgtggtgcgttgggctacaccgacgccggtctggtgtttttaggcgcaggcgttttctcatggctaagccttgaaccggtgatcttgcagcgtctgcgcagttcgggagaattacccacggcactgcggacatcactcggcattcagctcgctcctgcgctggtggcctgtagtgcctggctgagcgtcaacggcggcgagggtgacacgctggcgaaaatgcttttcggttatggactgctgcaactgctgtttatgctacgtctgatgccatggtatctctcccagccatttaatgcttcattctggagtttctcgttcggcgtatctgcactggcaaccaccggtttgcatctggggagtggcagcgataatggatttttccatacgctggcggtgccgctgtttatctttaccaattttattattgcaatactgctcatccgtacttttgcgcttctgatgcagggaaaattgttagtcagaaccgagcgcgccgttttaatgaaagcagaggacaaagaatga

SEQ ID NO: 473758 - DNA, 594 bp, Shigella flexneri
atgatcattcgtgacgaaaactattttactgataaatatgaattaacccgcacacactctgaagtactggaagcggtgaaagtggttaaaccgggtaaaacgctggatctgggctgtggcaatggtcgtaacagtctttacctggcagccaatggttatgatgttgacgcatgggataaaaatgccatgagtatcgccaacgtcgagcgcattaaatccattgaaaatctggataatttacacacccgggtcgttgatctgaataacctcacatttgatggacagtacgattttattctttcgactgtggtgctgatgttccttgaggctaaaaccatcccagggttgattgccaatatgcaacgttgcactaaacctggtggttacaacctgattgtggcggcgatggataccgctgattatccatgtaccgtcggcttcacgtttgccttcaaagagggagaattacgtcgatattacgaaggctgggagagggtgaaatacaatgaagacgtcggcgagctgcaccgcaccgacgccaacggtaatcgtattaaactgcgtttcgccacgatgctggcacgtaaaaaatga

SEQ ID NO: 473759 - DNA, 315 bp, Shigella flexneri
atgcgtaccacatcatttgcgaaagttgcagctttatgcggcttgttggctctgtctggttgtgcctctaaaatcacccagccagataaatattctggttttttaaacaattactctgatttaaaagaaacaacctcagcaacaggtaaacctgttttacgttgggtagacccgagttttgatcaaagcaaatatgacagcatcgtctggaacccaatcacttattatccggtaccaaaaccttctacccaggtagggcagaaagttctgaggtgtactggcaatagcggacactaccatttgttctttttttaa

SEQ ID NO: 473760 - DNA, 225 bp, Shigella flexneri; identical to SEQ ID NO: 133446

SEQ ID NO: 473761 - DNA, 516 bp, Shigella flexneri
atgctgaccgataccaagctgcgcaatctcaagcccagggacaaactctacaaagtgaatgaccgggaaggtctctatgtggcagtgactccagccggctccatctcgttccgttacaactactcaatcaacggtcggcaggagaccatcacctttgggcgttatggtgtcggtggcatcaccctggccgaagcccgcgagctgttgggtgacgccaagaagatggttgcggcgggcaagtcgccggccaaggagaaagcccgagacaaggcgcgtatccttgccgatcacgacacgatggcggtggtcaccgcgacgaaagacacggccagccgccatgccgacgcgcaaggcggtttccgccgtcatcgcgccttcgttggctttgccacgaataccgtctgtgccgaaatatttgcgcaccataaggtcgattatcctgtcgtcgggtcgccctcaaaggggacatgcctgctgaaccgcgaatatagagaaatatcccgaatgtgcagttaa

SEQ ID NO: 473762 - DNA, 276 bp, Shigella flexneri
atgccatgctcaaacggtgcttggcgcttcctcccgttgccagatcgtgccaaacacaaacaaaaaaaagcccgcaattacgcgggcttagcggcatttcatgccatcaggtgcctggctgtgccagacgcggaatcattcctgccagacatgctgattaattttgcccttattaacatcacagacagaaagaacgagggtaccaataccattgatggtaactggcaggccgatgaaggacgccgttaccgggataatgtaagaatctatttttga

SEQ ID NO: 473763 - DNA, 396 bp, Shigella flexneri; identical to SEQ ID NO: 236340

SEQ ID NO: 473764 - DNA, 2712 bp, Shigella flexneri; identical to SEQ ID NO: 236341

SEQ ID NO: 473765 - DNA, 333 bp, Shigella flexneri; identical to SEQ ID NO: 236342

SEQ ID NO: 473766 - DNA, 336 bp, Shigella flexneri
atggcgtctaaaaaattttactcagatgatgacatccagctggcaaaagctgctttatcggaattgccagacctcaccgctcaacggaaaacattgcgtgattttcttgatgccattcgtgatgacatcattatcctggtaaggacaaagggttatacactgacagatgttcgtgacacgctcaaaaatgcaggatatgaagtaggagagaaagcacttcgtgacattattcgggaagcagaatcgaaaaaaccatcccgccgttcttcctctaaaacagcacctaaaaagacagactcaggcaggaaagatggcatcgatatgaacaacaattga

SEQ ID NO: 473767 - DNA, 849 bp, Shigella flexneri
atgaatcagactttacccactgctgacctgaatactgccggcacgacagatgttattccgtctgtagctatcgaccgcatcatcgcgcagcgtaacgaaggtattgcactgttcatgcaggcgatggaatgcctggcgacagcgcgcaagattctgctcgatgcgtcaggtgatatttttctttacgggtttgaagactgcgtgactgattccgttcgtcgcatggataagacggaagaagcgaaaaggaatatcacccgtcttgccgaccggaaaatctgggaccgcctgatgacagatacgggcatgtacaccttcatgagttcatgccagcgtgatgagtggaacagccagctgatgagcgacacctgtcctgaaatcaccctggacaatgtactggcaacattccgccatcttaatgccagcaagatgcagacgtttgaacaggggctgattgatgtctaccggaaattgtcatgggattacagaaccaataatccctgccgtctgggtaagaaaataattattgaaaacctactgtaccgctggagtaacgggcgtgtgacgctggactgcagcggacgggaggcactggatgacctggtacgtccgttttatctgctggaggggcgcaacgttcctgacttcaggaacagcatcggggcgcagtatggtgaatttctcgggaacggtgacaatgtcggtaagctgttagaaggggaatattttacggtgcgtggctaccagaaagggaccgtacacattgtctttaagcgttctgaccttgttgaaaaactgaatgatattattgcacggcattatcctggtgcattgccgccacgagtctga

SEQ ID NO: 473768 - DNA, 252 bp, Shigella flexneri; identical to SEQ ID NO: 79083

SEQ ID NO: 473769 - DNA, 183 bp, Shigella flexneri; identical to SEQ ID NO: 236345

SEQ ID NO: 473770 - DNA, 927 bp, Shigella flexneri; identical to SEQ ID NO: 236346

SEQ ID NO: 473771 - DNA, 390 bp, Shigella flexneri; identical to SEQ ID NO: 8270

SEQ ID NO: 473772 - DNA, 267 bp, Shigella flexneri; identical to SEQ ID NO: 236348

SEQ ID NO: 473773 - DNA, 435 bp, Shigella flexneri; identical to SEQ ID NO: 236349

SEQ ID NO: 473774 - DNA, 501 bp, Shigella flexneri; identical to SEQ ID NO: 236350

SEQ ID NO: 473775 - DNA, 504 bp, Shigella flexneri
atggacccggtgtgggtcactgctgcgatcccggagtccatcgcctggctggtgaaagatgcctcgcagtttaccctcaccgttccggcgcgaccggataaaacactcaccatccgcaaatggacgctgctacctggcgtggatgccgcgacccgcacgctgcagctgcgtctggaagtcgacaacgccgacgaggcgctaaaaccgggcatgaacgcctggttgcaactcaacaccgccagcgaaccgatgctgctcattccgtcacaggcgctgattgataccggcaacgaacagcgggtgattaccgttgatgccgacgggcgctttgtaccgaaacgcgttgctgttttccaggcatcgcaaggcgtcaccgcattacgctctggtctggcggaaggtgaaaaggtggtttccggcggcctgttcctgattgattccgaagccaatatttctggcgcactggagcggatgcgctctgaaagtgctacccatgcgcattga

SEQ ID NO: 473776 - DNA, 3144 bp, Shigella flexneri
atgattgaatggattattcgtcgctcggtggcgaaccgttttttggtgctgatgggcgcgttgtttctgagcatctggggcacctggaccatcattaatacgccagtggatgcgttgccggatctctccgatgtgcaggtgattattaaaaccagctatcccggccaggcaccgcaaatcgttgaaaatcaggtgacttatccgctaaccaccaccatgttgtcggtgcctggcgcgaagactgtgcgtggtttctcgcagtttggcgactcttatgtgtatgtcattttcgaagatggcaccgatccgtactgggcgcgttcgcgggtgctggagtacctcaaccaggtacagggtaagctgcctgcgggagtcagcgccgagctgggaccagatgccacgggtgttggctggatctatgaatatgcactggtggatcgcagcggtaagcacgatcttgccgatttacgctcattgcaggactggtttctcaaatatgagctgaaaaccattcctgacgttgcggaagtggcgtcggtaggcggtgtggtgaaagagtatcaggtggttatcgatcctcagcgcctggcgcagtatggcatcagtctcgccgaagtaaaaagcgcgctggatgcttcaaaccaggaagcgggcggttcgtcaatcgaactggcggaagcagaatatatggtgcgcgccagcggctatctacaaacgctcgacgactttaatcacatcgttttaaaagccagtgaaaatggcgtgcccgtttatctgcgcgatgttgcgaaggtccagattggcccgaagatgcgccggggcattgccgaactaaacggcgaaggcgaagtggcgggcggggtggtgatcctgcgatccggcaaaaacgcccgagaagtgatcgccgccgtgaaggacaaactggaaacgctgaaaagtagtctgccggaaggcgtggagatagttacaacatacgaccgcagccagctcattgaccgggccatcgacaacctcagcggcaagttgctggaagagtttattgtggtggcggtagtctgcgcgctgtttctctggcatgtgcgctcggcgctggtggcgattatttcgttgccgctggggttgtgtattgcttttattgtcatgcccttccaggggctgaatgccaatattatgtcgctgggtggcattgcgattgccgtcggggcgatggtcgatgccgctatcgtcatgatcgagaatgcgcataaacggctggaagagtggcagcaccagcatcctgacgccacgctggataataaaacgcgctggcaggtgatcaccgatgcgtctgttgaagtggggccggcgctgtttatcagtctgctgattatcacgttgtcgtttatcccgatcttcaccctggaagggcaggaagggcgtctgtttggcccgttggcgttcaccaaaacgtatgcgatggcgggtgcggcgctgctggcgatcgtagtgatccctatcctgatgggttactggatccgtggcaaaattccgccggaaagcagtaatccgctcaatcgctttttgattcgtgtttatcatccgctgttgctgaaagtactgcactggccgaaaaccacgctgctggtggcggcgctttcggtgctgacggttctctggccgctcaataaagttggcggggaatttttaccgcagatcaatgaaggcgacttgttgtatatgccatcgacgctgccggggatttccgcagcagaggcggcgagtatgctgcaaaaaaccgacaagctaattatgagcgtacctgaagtggcgcgggtatttggcaaaaccgggaaagcggaaaccgccaccgattctgctccgctggagatggtagaaacgaccatccagcttaagccacaggatcagtggcggccaggcatgacaatggacaaaatcattgaggaactggataacaccgtgcgtctgccggggctggcgaatctgtgggtgccgccaattcgtaaccgtatcgatatgctctcaaccggcattaaaagccccatcggcattaaagtttccggcactgtgctggcggatatcgacgcgatggctgagcaaattgaagaagtggcgcgaacggtgccaggcgtagcttctgcgcttgctgagcggctggaaggtgggcgctatatcaacgttgagattaaccgtgaaaaagccgcacgttacggtatgacggtggcggatgtgcagttgtttgtgacttctgcggtgggcggggcgatggttggcgaaacggtggaagggattgcccgttatccaattaatctgcgttatccgcaaagctggcgcgatagtccgcaggcactgcgccagttgccgatcctgacgccgatgaagcagcaaatcaccctggcagacgtggccgacgttaaagtctctaccggaccgtcgatgctaaaaaccgagaatgcgcgcccgacgagctggatttatatcgatgcccgcgatcgtgacatggtgtcggtggttcacgatttgcaaaaagcgatagctgaaaaagtgcagttaaaaccgggcaccagcgtggcattctccgggcagttcgagctactggagcgcgccaaccataagctgaaactcatggtgccgatgacactgatgatcatcttcgtgctgttgtatctggcattccgtcgggtgggcgaagcgttgctgattatcagcagcgtaccgtttgcgctggtgggcggcatctggttactgtggtggatgggctttcatctttctgtggcgacgggtaccggctttattgcccttgccggggtcgccgccgaatttggcgtggtgatgctgatgtatttacgtcacgccatagaggccgagccgtcgttgaataatccacaaacattcagcgagcagaagctggatgaggcgttgtatcacggcgcggtcctgcgcgtgcgcccgaaagcgatgacggtggcggtgattatcgccggtctgctgccgattctgtggggaacgggggctggttcagaggtgatgagccggattgcagcaccgatgattggcggcatgatcaccgcacctttgctgtcgctgtttattatcccggcggcgtataagctgatgtggctgcaccgacatcgggtacggaattaa

SEQ ID NO: 473777 - DNA, 1377 bp, Shigella flexneri
gtgaaaaacgcgtcaaccgtatcggaagatactgcgtcgaatcaagagccgacgcttcatcgcggattacataaccgtcatattcaactgattgcgctgggtggcgcaattggtactggtctgtttcttggcattggcccggcgattcagatggcgggtccggctgtattgctgggctacggcgtcgccgggatcatcgctttcctgattatgcgccagcttggcgagatggtggtcgaagagccggtatccggttcatttgcccactttgcctataaatactggggaccgtttgcgggcttcctctctggctggaactactgggtaatgttcgtgctggtgggaatggcagagctgaccgctgcgggcatctatatgcagtactggttcccggatgttccaacgtggatttgggctgccgccttctttattatcatcaacgccgttaacctggtgaacgtgcgcttatatggcgaaaccgagttctggtttgcgctgattaaagtgctggcgatcatcggtatgatcggctttggcctgtggctgctgttttctggttacggcggcgagaaagccagtatcgacaacctctggcgctacggtggtttcttcgccaccggctggaatgggctgattttgtcgctggcggtaattatgttctccttcggcggtctggagctgattgggattacagccgctgaagcgcgcgatccggaaaaaagcattccaaaagcggtaaatcaggtggtgtatcgcatcctgctgttttatatcggttcactggtggttttactggcactctatccgtgggtggaagtgaaatccaacagtagcccgtttgtgatgattttccataatctcgacagcaatgtggtagcttctgcgctgaacttcgtcattctagtggcatcgctgtcggtgtataacagcggggtttactctaacagccgcatgctgtttggcctttctgtgcagggtaatgcgccgaagtttttgactcgcgtcagccgtcgcggtgtgccgattaactcgctgatgctttccggagcgatcacttcgctggtggtgttaatcaactatctgctgccgcaaaaagcgtttggtctgctgatggcgctggtggtagcaacgttgctgttgaactggattatgatctgcctggcgcatctgcgttttcgcgcggcgatgcgacgtcaggggcgtgaaacacagtttaaggcgctgctctatccgttcggcaactatctttgcatcgccttcctcggcatgattttgctgctgatgtgcacgatggatgatatgcgcttgtcagcgatcctgctgccggtgtggattgtattcctgtttgtggcatttaaaacgctgcgtcggaaataa

SEQ ID NO: 473778 - DNA, 1248 bp, Shigella flexneri
atgcaggatttaatatcccaggttgaagatttagcgggtattgagatcgatcacaccacctcgatggtgatgattttcggtattatttttctgaccgccgtcgtggtgcatattattttgcattgggtggtactgcggaccttcgaaaaacgtgccatcgccagttcacggctttggttgcaaatcattacccagaataaactcttccaccgtttagcttttaccctgcaggggattatcgtcaatattcaggcggtattctggctgcaaaaaggcaccgaagcggcagatattctgactacctgcgcgcagttgtggatcatgatgtatgcgctgctttcagtcttctcgttgctggatgttattttgaatctggcgcagaaattcccggcggcatctcagttaccgctgaaagggatatttcaggggattaaactgatcggcgcaatcctggtcggcattttgatgatctcgctgctgattggtcagtcgccagcgattctgatcagcggtcttggtgcaatggctgccgtgctgatgttggtatttaaagatccgattcttggtctggtggcaggtattcagctttccgcgaacgatatgctgaaactgggcgactggctggaaatgccgaaatacggcgcggatggcgcggtgatcgatattgggttaaccaccgtcaaagtgcgtaactgggacaataccattaccactattcccacctggtctctggtttctgactcctttaaaaactggagcgggatgtcagcatctggcgggcgacgtattaagcgcagtatcagtattgatgtcaccagtattcgttttcttgatgaagacgaaatgcaacgtctgaataaagcgcatttgttaaagccttatttaaccagccgccatcaggaaattaatgagtggaatcgccagcaaggttctacggagtcggtattaaacctgcgccgaatgaccaatattggaacctttcgtgcctatctgaacgaatatctgcgtaaccatccgcggattcgtaaagatatgaccttaatggtacgccaactggctccaggtgataacggtttaccgctcgagatctacgcgtttactaacaccgtggtgtggctggaatatgaaagcattcaggctgatatattcgatcacatatttgcgattgtcgaagagtttggtctgcgacttcatcagtcgccaaccggcaatgatattcgctctctggcgggtgcatttaagcagtaa

SEQ ID NO: 473779 - DNA, 654 bp, Shigella flexneri
atggatatcatttctgtcgccttaaagcgtcattccactaaggcatttgatgccagcaaaaaacttaccccggaacaggccgagcagatcaaaacgctactgcaatacagcccatccagcaccaactcccagccgtggcattttattgttgccagcacggaagaaggtaaagcgcgtgttgccaaatccgctgccggtaattatgtgttcaacaaacgtaaaatacttgatgcctcgcacgtcgtggtgttctgtgcaaaaaccgcgatggacgatgcctggctgaagctggttgttgaccaggaagatgccgatggccgctttgccacgccggaagcgaaagccgcgaacgataaaggtcgcaagttcttcgccgatatgcaccgtaaagatctgcatgatgatgcagagtggatggcaaaacaggtttatctcaacgtcggtaacttcctgctcggcgtggcggcgctgggtctggacgcggtgcccatcgaaggttttgacgccgcaatcctcgatgcagaatttggtctgaaagagaaaggctacaccagtctggtggttgttccggtaggtcatcacagcgttgaagattttaacgctacgctgccgaaatctcgtctgccgcaaaacaccaccttaaccgaagtgtaa

SEQ ID NO: 473780 - DNA, 369 bp, Shigella flexneri
atggataagcaatcactgcacgaaacggcgaaacgcctagctcttgagttaccctttgtcgagctttgctggccttttggcccggagttcgatgtttttaaaattggcggcaagatttttatgctgtcgtcggagctacgcggcgtcccctttatcaatctgaagtccgatccacaaaaatccctgttaaatcagcaaatatacccaagcattaagccagggtatcacatgaataaaaagcactggatttcggtgtattccggcgaggaaatctccgaagcgttacttcgcgatctgatcaacgattcgtggaatctggtggttgatggtctggctaaacgcgatcaaaaaagagtgcgtccaggctaa

SEQ ID NO: 473781 - DNA, 249 bp, Shigella flexneri
atgaaacaccctttagaaaccttgaccaccgcagcaggcattttgctgatggctttcctctcttgcctgctgctgcccgcccccgcactggggctgacgctggcacaaaaactggtgaccatgttccatctgatggatcttagccagctttacactttattgttttgtctgtggtttttagtgctgggcgctattgagtattttgttctgcgctttatctggcgacgctggttctcgctggcggattaa

SEQ ID NO: 473782 - DNA, 1119 bp, Shigella flexneri
atgccattacccgattttcatgtttctgaaccttttaccctcggtattgaactggaaatgcaggtggttaatccgccgggctatgacttaagccaggactcttcaatgctgattgacgcggttaaaaataagatcacggccggagaggtaaagcacgatatcaccgaaagtatgctggagctggcgacggatgtttgccgtgatatcaaccaggctgccgggcagttttcagcgatgcagaaagtcgtattgcaggcagccgcagaccatcatctggaaatttgcggcggtggcacgcccccgtttcagaaatggcagcgtcaggaggtatgcgacaacgaacgctatcaacgaacgctggaaaactttggctatctcatccagcaggcgaccgtttttggtcagcatgtccatgttggctgtgccagtggcgatgacgccatttatttgctgcacggcttgtcacggtttgtgccgcactttattgccctttccgccgcgtcgccatatatgcagggaacggatacgcgttttgccccctcacgaccgaatattttttccgcctttcctgataatggcccgatgccgtgggtcagtaactggcaacaatttgaagccctgtttcgctgtctgagttacaccacgatgatcgacagcattaaagatctgcactgggatattcgccccagtcctcattttggcacggtggaggttcgggtgatggataccccgttaacccttagccacgcggtaaatatggcgggattaattcaggccaccgcccactggttactgacggaacgcccgttcaaacatcaggagaaagattacctgctgtataaattcaaccgtttccaggcctgtcgctatggtctggaaggcgtcattaccgatccgcacactggcgatcgtcgaccgctaacggaagataccttgcgattgctggaaaaaatcgccccttcagcacataaaattggcgcatcgagcgcaattgaagcactgcatcgccaggtcgtcagcggtctgaatgaagcgcagctgatgcgcgatttcgtcgccgatggcggctcgctgattgggctggtgaaaaagcattgtgagatctgggccggtgactaa

SEQ ID NO: 473783 - DNA, 483 bp, Shigella flexneri
atgtcaaagccaaaatacccttttgaaaagcgccttgaagtcgtgaatcactacttcactactgatgatggttacaggatcatctcggcacgttttggtgtcccccgaacccaggtcaggacatgggttgccctctatgaaaaacatggagaaaaaggtttaattcccaaacctaaaggcgttagtgctgatccagagttgcgtattaaggtcgtgaaagctgtgatcgagcagcacatgtcccttaatcaggctgctgctcactttatgcttgctggtagtggttctgtagccaggtggctgaaggtctatgaagagcgcggagaagctggtttacgcgcgctcaagattggcaccaaaagaaacattgcaatatcagttgatccagaaaaagcggcatcagcattggagctgtcaaaagaccgacgcattgaggtgaggtgtactggcaatagcggacactaccatttgttctttttttaa

SEQ ID NO: 473784 - DNA, 2784 bp, Shigella flexneri
atgagaaacctctgtttcttactgacgttagtggcaactctgttgctccccgggcggctgattgccgccgccttaccgcaggatgaaaagttaattaccgggcaactggacaatgacttgcgatatatgatttatccgcatgctcatccaaaggatcaggtaaatttatggctgcaaattcataccggttcattgcaggaagaagacaatgagcgcggcgtggctcattttgtagaacatatgatgtttaacggcacaaaaacatggccgggtaataaagtcatcgaaacatttgagtcaatgggcctgcgttttggtcgcgatgttaatgcctataccagctatgacgaaacggtgtatcaggtgagtttgccgactacgcagaaacaaaatctgcaacaagtgatggcaatcttcagtgaatggagtaatgccgcaacctttgaaaaactcgaagtagacgctgaacgtggcgtaattactgaggaatggcgtgcccatcaggatgcgaaatggcgcacctctcaggcgcgccgccctttcctgctggctaatacccgtaatttagaccgtgaacctatcggcctgatggatactgtcgccacggtcacgccggcacaattgcgccaattttatcaacgctggtatcaaccaaataatatgacctttatcgtggtcggcgatatcgacagtaaagaagcgctggcgctgataaaggataatttaagtaagcttccggctaacaaagcagctgaaaatcgcgtctggccgacaaaagccgaaaaccacctgcgctttaatatcattaatgataaagaaaaccgggtgaacggcatcgcactctattatcgcctgccaatggtacaagtgaacgatgagcaaagctttgtagaacaagctgaatggagcatgttagttcagctgttcaatcaacgtctgcaggaacgcatacagtcgggcgagttgaagactatttctggcggcactgcgcgcagcgttaaaattgcacccgattatcagtcgctgtttttccgtgtaaatgcacgagacgataatatgcaggacgctgcgaatgcattaatggcagagttggcaaccattgatcagcatggtttttctgctgaagaactcgatgatgtcaaatctacccgcctcacctggctgaaaaatgcggttgatcagcaagctgaacgtgatttacgtatgctgaccagtcacctggcatccagctcattaaataatacgccgttcttgtcgccggaagagacatatcaactttcgaaacgtctgtggcagcaaattaccgtgcaaagtctggcggaaaaatggcagcagttaagaaagaaccaggacgcattttgggagcaaatggtaaacaatgagcttgccgccaaaaaagcattgtctcctgcggctatcctggcgctggaaaaagagtacgccaacaaaaagctggcggcttacatcttcccaggcagaaatttatcgttaacagtagacgctgacccacaggcggaaattagcagcaaagaaacgctggctgagaatctgacatcattaacactttccaatggtgccaaggttattctggcaaaatccgcgggtgaagagcaaaagctacaaattattgccgtatcgaataaaggcgatttaagtttccctgcgcagcaaaaatcacttatcgcgctggcaaataaagcagttagcggaagcggcgttggcgaactctcctcttccagcctgaaacgctggagtgcggaaaactcggtaaccatgagcagtaaagtcagtggcatgaatacgttgctctccgttagcgcgcggactaataaccctgaacctggtttccagttgattaaccagcgaatcacccacagcacgattaacgacaatatttgggcatcgctacaaaatgctcaaattcaggcgttgaaaacgctcgaccagcgtccagcggagaaattcgcccagctgatgtatgagacgcgctatgctgatgaccgcacgaaattactgcaagaaaatcagattgcacagtttactgccgcagatgcgctggctgccgatcgccagttgttttcatctccagcggatatcacgtttgtcattgtcggtaatgtcgcagaagacaaactcgtggcgttaattacgcgttacttaggctcaatcaaacactctgattcgccattagccgcaggtaaaccattaactcgcgcgacggacaacgcatcggttactgtaaaagaacaaaatgaacctgtggcacaggtttcacagtggaagcgttatgattcccggacacctgttaatctggcgacgcgtatggcgctcgatgcttttaacgtcgcactggcaaaagatctacgcgttaatattcgtgaacaggcatctggggcatacagcgtttcttctcgcctctcggttgatcctcaggctaaagatatcagtcatttgctggcttttacttgtcaaccagaacgacatgatgaacagttaacgttagcgaatgaagtgatggttaagcgtttgactaaggggatcagtgagcaagaactgaacgaataccagcaaaacgttcagcgcagcctcgatatccaacagcgtagcgttcaacaattagcgaacactattataaatagtcttattcaatatgacgatcctgcagcatggactgagcaggagcaattgttgaaacaaatgacggtagagaatgttaacactgccgttaaacaatatctttctcatccggtaaatacttataccggagtattattgccaaaataa

SEQ ID NO: 473785 - DNA, 2361 bp, Shigella flexneri
atgaagcgagttcttattcctggcgtcattttatgtggcgctgatgtggcgcaggccgtcgatgacaaaaacatgtacatgtatttttttgaagagatgacggtctatgctcctgtccctgtacccgtaaacggcaacacgcattacaccagtgaaagcatcgagcgtttaccgaccgggaatggcaatatcagcgatctgctgagaaccaaccctgcggtacgcatggattcaacgcaaagtacctcgttgaaccagggagatattcgccctgagaaaatctctattcacggtgcgtcgccctaccagaatgcctatttgattgacggtattagtgcaactaataacctgaacccagcgaatgagtccgatgccagtagtgcaaccaatattagcgggatgtcacaggggtattatcttgatgtcagcttactggacaatgtgacgctttatgacagttttgtgccggttgaatttggtcgcttcaatggcggggtaattgatgcaaagatcaaacgcttcaacgctgatgatagcaaggtgaaattgggttatcgcactacgcgtttggactggttaacatcgcatatcgatgagaataacaagagcgcatttaatcaaggttcttcaggaagtacctatttctctccagattttaaaaagaacttttataccttgtcgtttaatcaggagctggctgataactttggcgttaccgccggtttatcgcgccgccagtctgatatcacccgcgcggattatgtttcgaatgacggcattgtcgccggtcgggcacagtataaaaacgttatcgatactgcattgagcaaatttacctggtttgccagcgaccgctttacccacgatttaaccttaaaatataccggctccagccgtgattataataccagcaccttcccgcagtctgatcgcgaaatgggtaataaatcctatggtctggcatgggatatggatacgcaactcgcatgggccaaactacgtaccaccgttggttgggatcatattagtgattatacccgtcacgatcatgacatctggtacaccgaactttcatgtacatatggtgatattacagggcgttgtacccgtggcggattaggacacatttcccaggctgtagataattacaccttcaaaacacgcctggactggcaaaaattcgccgtgggtgatgtttcgcatcaaccctacttcggcgcggaatacatctattccgatgcatggactgaacgccataaccagtctgaatcctatgtgattaatgctgcaggaaagaaaactaaccataccatttaccataaaggtaaaggcagcctgggaattaacaactacacgctgtatatggcggatcacattagctggcggaatgtgtcgttaatgcccggtgtgcgttatgactatgacaactatctgtcaaaccacaatatctccccgcgctttatgacggaatgggatatttttgctgatcaaacctcaatgattaccgccggttataaccgttactatggcgggaatattcttgatatgggattacgtgatatccgcaatagctggacggaatcggtatcaggtaataaaaccctgacgcgttatcagaatttgaaaacgccttataacgatgaactggcaatgggattgcagcaaaaaatcgataagaacgttattgcacgcgcaagtgaagcgcatgatcaaatcagcaaaagcagtcgtaccgacagcgcgactaaaaccaccattactgaatataacaacgatggcaaaaccaaaacgcattcgtttaacctcagttttgaactggccgaacccctgcatatccgccaggtagatattaacccgcaaattgtctttagctatatcaagagcaagggcaacttgtcgttaaacaatggttatgaggagagcaataccggtgataaccaggtggtttataacggtaatctggtctcttacgatagcgttccagtggcagattttaataacccattaaagatctccttaaacatggatttcacgcatcaaccgagcgggttagtgtgggcgaatacgctggcctggcaagaagcgcgtaaagctcgcattatccttggtaagacaaatgcgcaatacatcagcgaatattcagattacaagcagtatgttgacgaaaaactggatagcagcctgacctgggacacccgcttgtcctggacgccacaatttctgaaacaacaaaacctgacgatcagtgccgatattctcaatgtactggatagcaaaaccgctgttgatacaacgaacaccggtgtggcgacctacgccagtggccgtactttctggcttgatgtcagcatgaaattttaa

SEQ ID NO: 473786 - DNA, 582 bp, Shigella flexneri
gtggctaatgcgagtattcgtacgcctgataataagatcatattagagaacttgaactttcatgtttcgccaggcaaatggctattactgaaaggctactctggtgcgggaaaaaccacactgcttaaaacattatcccactgctggccgtggtttaaaggtgatatttcttctcctgctgacagttggtatgtgtcacaaacaccgttaatcaaaagcggcttactgaaagagattatttgtaaagcacttcccctgcccgtagacgataaatcgttgagcgaagtactgcatcaggttggtctgggaaaattggctgcgcgtattcatgaccacgatcgctggggagatattctttccagcggcgaaaaacaacgtatcgccctggcacgattaattttacgacgtccgaaatggatatttcttgacgaaactacctctcatcttgaggaacaagaggctatacgcttactgcgtttagtgcgtgaaaaactacccacaagcggcgtcattatggttacacatcaacccggtgtctggaacctggctgatgatatttgtgacattagcacggttttataa

SEQ ID NO: 473787 - DNA, 1158 bp, Shigella flexneri
atgcacgttacagctaagccctccagttttcaatgtaatctcaaatgtgattactgtttttaccttgaaaaagagtcgcagtttactcatgaaaaatggatggatgacagcactctgaaagagttcatcaaacaatatatcgaagcgtctggcaatcaggtctattttacctggcaaggcggtgaacccactctggctggcctggattttttccgtaaagttattcactatcaacaacgctatgcaggccaaaaacgtatttttaatgcattacaaacgaatggcattttattgaataatgaatggtgtgcctttctcaaagaacatgaatttctggttggtatctcgatcgatggcccccaggagttacatgaccgttacagacgcagtaattcaggtaacggtacttttgcaaaagtgatagcagccatcgagcgtctgaaatcatatcaagtagagtttaatacgttaaccgtcattaataacgttaatgtccattatcctcttgaggtttatcattttttaaaatctatcggcagtaaacatatgcaatttatcgaattgctagaaaccgggacgccgaatattgatttcagtggtcatagtgagaacacattccgtatcattgatttttctgtgcctcccacggcttatggcaagtttatgtcaaccatttttatgcaatgggttaaaaacgatgtgggtgaaattttcattcgtcagtttgaaagctttgtcagccgttttttggggaatgggcatacaagttgtattttccaggagtcctgcaaggataatctggttgttgaaagtaatggagacatttacgaatgcgaccattttgtctatccacagtacaaaattggaaacattaataaatctgaactcaaaacgatgaacagtgtacaactgacagcgcaaaaaaaacggatttcagcgaaatgtcagcaatgtgcatataaacctatctgcaatggcggttgtcctaagcatcgtattactaaagtaaacaatgagactgtttcttatttttgcgaaggttataaaatccttttttcaaccatggtaccttatatgaacgccatggttgagttagctaagaacagagtaccgctttaccacattatggatgttgcaaaacaaatggagaataattaa

SEQ ID NO: 473788 - DNA, 1491 bp, Shigella flexneri
atggatgatcttggttatggacaacttccttttgataagggatcttttgacccaaaaacaatggaaaatcgtgaagttgtcgatacctacaaaatagggatagataaagccattgaagctgcacaaaaatcaacgccgacgctcctttcattaatggatgaaggcgtacgttttactaacggctatgtggcacacggtgtttccggcccctcccgtgccgcaataatgaccggtcgagctcccgcccgctttggtgtctattccaataccgatgctcaggatagtattccgctaacagaaactttcttgcctgaattattccagaatcatggttattacactgcagcagtaggtaaatggcacttgtcaaaaatcagtaatgtgccggtaccggaagataaacaaacgcgtgactatcatgacaacttcaccacattttctgcggaagaatggcaacctcaaaaccgtggctttgattactttatgggattccacgctgcaggaacggcatattacaactccccttcactgttcaaaaatcgtgaacgtgtccccgcaaaaggttatatcagcgatcagttaaccgatgaggcaattggcgttgttgatcgtgccaaaacacttgaccagccttttatgctttacctggcttataatgctccgcacctaccaaatgataatcctgcaccggatcaatatcagaagcaatttaataccggtagtcaaacagcagataactactacgcttccgtttattctgttgatcagggtgtaaaacgcattctcgaacaactgaagaaaaacggacagtatgacaatacaattattctctttacctccgataatggtgcggttatcgatggtcctctgccgctgaacggggcgcaaaaaggctataagagtcagacctatcctggcggtactcacaccccaatgtttatgtggtggaaaggaaaacttcaacccggtaattatgacaagctgatttccgcaatggatttctacccaacagctcttgatgcagccgatatcagcattccaaaagaccttaagctggatggtgttcccttgctgccctggttgcaagataagaaacaaggcgagccacataaaaatctgacctggataacctcttattctcactggtttgatgaggaaaatattccattctgggataattaccacaaatttgttcgccatcagtcagacgattacccgcataaccccaacactgaggacttaagccaattctcttatacggtgagaaataacgattattcgcttgtctatacagtagaaaacaatcagttaggtctctacaaactgacggatctacagcaaaaagataaccttgccgccgccaatccgcaggtcgttaaagagatgcaaggcgtggtaagagagtttatcgacagcagccagccaccgcttagcgaggtaaatcaggagaagtttaacaatatcaagaaagcactaagcgaagcgaaataa

SEQ ID NO: 473789 - DNA, 231 bp, Shigella flexneri; identical to SEQ ID NO: 129443

SEQ ID NO: 473790 - DNA, 585 bp, Shigella flexneri
atgaaaaccagtattatcaacggctcggaagtgtctagattatccgtggcgattcatagcttgagctactctcacttcaacaacgacctgtctgcaaccatgagcaacggtacttacgttgacggtagcaccaactccgacgcttggggcttcggtttgaaaaccggttacgacttcaaactgggtgatgctggttacgtgactccttacggcagcatttctggtctgttccagtctggtgatgactaccagctgagcaacgacatgaaagttgacggtcagccttacgacagcatgcgttatgaactgggtgtagatgcaggttataccttcacctacagcgaagatcaggctctgactccgtacttcaaactggcttacgtctacgacgactctaacaacgataacgatgtgaacggtgattccatcgataacggtactgaagggtctgcggtacgtgttggtctgggtactcagttcagcttcaccaagaacttcagcgcctataccgatgctaactacctcggtggtggtgacgtagatcaagactggtccgcgaacgtgggtgttaaatatacttggtaa

SEQ ID NO: 473791 - DNA, 504 bp, Shigella flexneri
atgttatctgtagttaaacctcttcaggaatttggtaagctcgataaatgtttgtccagatacggtacgcgcttcgagtttaataatgaaaagcaagttatattttccagtgatgtcaataacgaagatactttcgttattttagaaggagttatctctctgcgtagagaagaaaacgtacttatcggtattacccaggctccttatattatggggctggctgatggtttaatgaaaaacgatataccatacaaattaatatcagaaggaaattgtacgggatatcatctaccagccaaacaaacccgcgcaacattattatcaatgattgactggaatgaagaattgcgatcacgtattggtgtgatgaattatatccatcaacgtacacgcatatcgcgttctgtcgtcgcagaagttctcgctgctttgcgtaaaggcggctatatcgaaatgaataaaggcaaactggtcgctatcaaccgtttgccttcagagtattaa

SEQ ID NO: 473792 - DNA, 1158 bp, Shigella flexneri
ttgaaacgtagtctgcttttttctgccgtgctgtgtgcggcgtcattgacctccgtccatgcggcgcagccgatcactgaaccggagtttgcctctgatattgtcgatcgttatgccgatcatattttttacggcagcggtgccacggggatggcgctggttgttatcgacggtaaccagcgcgtctttcgtagttatggcgaaacgcgacctggtaataacgttcgcccgcagctggattcggtcgtgcgtattgcttccctcaccaaactaatgaccagtgaaatgctggtgaaattgctcgaccaggggaccgtaaagttaaacgatccgctaagtaaatatgctccgccaggcgcacgcgtgccgacctacaatgggacgcccattaccctagtgaatctggcaacccataccagcgccctgccccgtgaacagcccggtggcgcggcacatcgtccggtgtttgtctggccaacgcgcgagcaacgctggaaatacctttctacggcgaagctgaaagccgcgccaggcagtcaggcggcgtactctaaccttgcgttcgacctgctggcagatgcactggcgaatgcgtccggcaagccttatacccagttgtttgaagagcagattacccatccattggggatgaaagacaccacctacaccccctcaccggatcagtgccgccgtttaatggttgctgagcgcggtgccagtccgtgcaataacacgctggcggcaattggcagcggcggcgtctattccacgcctggcgatatgatgcgctggatgcagcagtatttgtcatctgatttttatcagcgcagtaaccaggcagatcgcatgcagacgttgatttatcagcgcgcgcagtttacgaaagtgattggcatggatgtccccggcaaagcggatgcgcttggtttaggctgggtatatatggccccgaaagagggtcgtccgaggattattcagaagacaggcggtggtggcggtttcattacctatatggcgatgatcccgcagaagaatattggcgcgtttgtggtggtcactcgttcgccgttgacgcgctttaaaaatatgagcgatggcatcaatgatctggtgaccgagctaagcgggaataaaccgttggttatccccgcatcctga

SEQ ID NO: 473793 - DNA, 1221 bp, Shigella flexneri
atgtttaagtcttttttcccaaagccgggaacgttttttctctcggcctttgtttgggcattgattgccgttatcttctggcaagccggtgggggtgactgggtggcacgtatcaccggcgcttccgggcagatcccgattagcgccgcgcgtttctggtcgttggatttcctgattttttacgcttactacattgtttgcgtaggactttttgcatttttctggtttatctacagcccgcaccgttggcaatactggtcaatactcggtactgcgctgattatcttcgtcacttggtttttggtggaagtcggggtcgccgtcaacgcctggtatgcgccgttctatgatctgattcaaaccgcgctaagttcgccgcataaagtcactatcgaacaattttaccgcgaagtgggcgtctttctggggattgcgctgatcgcggtggtgatcagtgtactgaacaacttctttgtcagtcactacgtgttccgctggcgtacggcgatgaacgaatattacatggcgaactggcaacaactgcgtcatatcgaaggtgccgcacagcgtgtgcaggaagacaccatgcgttttgcttcaacgctggagaatatgggcgtcagttttatcaacgccatcatgacgttgatcgccttcctgccggtgctggtaacgctctccgcgcatgtgccggagctgccgattatcgggcacattccgtatggtctggtgattgccgctatcgtctggtcgctgatggggaccggattgctggcagtggtagggatcaaactgccggggctggagtttaaaaaccagcgagtagaggccgcctaccgtaaagagctggtttatggtgaagacgatgccacgcgcgcgacgccgcctacggtacgcgagctgtttagcgccgtacggaaaaactattttcgcctctattttcactatatgtatttcaacatcgcccgcattctctatttgcaggtcgataacgttttcggtttgttcttgctgtttccgtcaattgttgccggtacgattacgctcggcctgatgacgcagattaccaacgtttttggtcaggttcgcggtgctttccagtacctgattaactcatggaccacactggttgagttgatgtctatctacaaacgtctgcgcagctttgaacatgagctggatggtgacaaaattcaggaagtaacccataccttgagctaa

SEQ ID NO: 473794 - DNA, 1095 bp, Shigella flexneri
atgtcgcgcgtcaatcatctatcttcgctgtcattgttggcggttctggttttagcggggtgtagtagtcaggctccgcaaccgttgaaaaagggcgaaaaagcgatagatgtagcgagcgtcgtgcggcagaagatgcctgcgagcgtgaaagaccgcgatgcctgggcgaaagatctcgccaccacctttgaaagtcaggggctggcaccgacgctggaaaacgtctactcggtgctggcggtggcgcagcaggagtcaaattatcaggcagatccggccgttccgggcttaagcaagatcgcctggcaagagattgaccgtcgtgctgaacggatgcacattcctgcttttctggttcataccgcgctaaaaatcaaatcgccaaacggcaaaagttatagcgaacggttagattcggtgcgtacagaaaagcaattgagcgcgatttttgacgatctgatcagcatggtaccaatggggcagacgctgtttggttcgcttaatccggtgcgcaccggtgggccgatgcaggtcagcattgcttttgccgaacagcataccaaagggtatccgtggaaaatggacggtacagttcgtcaggaagtcttcagtcgccgcggcgggttgtggtttggtacttaccatttactgaattatcccgccagctatagcgcaccgatataccgctttgctgattttaacgctggctggtacgccagccgtaatgccgcgtttcagaacgcagtcagtaaggccagcggcgtgaagctggcactggacggtgatttaattcgttacgacagtaaagaacccgggaaaaccgaactggcaacgcgcaaactggcgggaaaactggggatgagcgacagcgaaattcgccgtcagttagagaaaggtgacagcttctcttttgaggagacggcgctgtacaagaaagtttatcaacttgccgaagcgaaaacgggtaaatcactaccccgcgaaatgttgcctggcattcaactggaaagcccgaaaatcacccgcaacctgactacggcctggtttgcgaagcgcgtagacgaacggcgggcgcgttgtatgaaacagtga

SEQ ID NO: 473795 - DNA, 309 bp, Shigella flexneri
atggctgatttcaccctgtcaaaatcgctgtttagcggaaaatatcgcaatgcctcttcaacgcctggcaacattgcctatgcgttgtttgtgctgttttgcttttgggctggggcgcaattgctgaacctgttagtgcatgcgcccggcgtctatgagcgtttaatgcaggtccaggaaacaggtcgcccacgggtggaaattggtttaggtgtcggcaccattttcgggctgatcccgtttttagcaggctgcctcatttttgcagtggtggcgctatggctgcactggcgacatcgccgccagtaa

SEQ ID NO: 473796 - DNA, 282 bp, Shigella flexneri
atgttgtctacaccacagacggttgttacagaatatgcaaggatgttgtttttcgttaacggagctgccataaatctgcctgtaaaaatccgccgtgactggcactactatgcgttcgccattggccttatattcattcttaatggcgtggtgggggtactgggatttgaagcaaaaggttggcagacctatgccgtcggtctggtgacgtgggtgattagtttctggctggcggggttgattattcgtcgtcgcgatgaagaaactgaaaacgcccaataa

SEQ ID NO: 473797 - DNA, 1095 bp, Shigella flexneri
atggaaaaactgcgggtaggaatcgtttttggtggtaaatcagcggaacatgaagtgtctctgcaatcggcaaaaaacattgtcgatgccattgataaaagtcgcttcgacgttgtgctgctgggcattgataaacaagggcaatggcacgtccgcgatgccagcaattatctgctaaatgcagacgatcctgcccatattgcgttgcgcccttcggcgaccagccttgcgcaggtgccaggtaaacatgagcatcagcttatcgacgcgcaaaacggtcagccgttgccgacggtggatgtcattttcccgattgtccacggtacgctgggcgaagatggttccttgcagggaatgctgcgggtcgccaatttaccgtttgtaggttctgatgttctggcttcagcagcctgtatggataaagatgtcaccaaacgtctgctacgcgatgccgggctgaacattgcgccatttattaccctgacgcgcgctaatcgtcacaacatcagttttgccgaagtggagtctaaactggggttaccactgtttgtaaaaccggctaatcagggctcttctgttggtgtcagcaaagtaaccagtgaagaacagtacgcaattgccgtcgatctggcgttcgagttcgatcataaagtgatcgttgagcaagggatcaaaggtcgtgagatcgaatgcgcagttctgggcaacgacaatccgcaagccagcacctgtggcgagatcgtactcaccagcgatttctatgcctacgacaccaagtacattgacgaagatggcgcgaaagtggtagttccggcagccattgcaccagagatcaacgataagatccgggcgattgccgttcaggcttatcagacgttgggatgcgcaggcatggcgcgtgtagacgtgtttttaaccccagagaacgaagtggtgatcaacgagatcaacacactgcctggcttcaccaacatcagtatgtatccgaagctgtggcaagccagcggtctgggttacaccgatctgatcacacgtttgattgagctggcgctggagcgtcacgctgcggataacgcattgaaaaccacaatgtaa

SEQ ID NO: 473798 - DNA, 261 bp, Shigella flexneri
atgaaaaatctcattgctgagttgttatttaagcttgcccaaaaagaagaagagtcgaaagaactgtgtgcgcaggtagaagctttggagattatcgtcactgcaatgcttcgcaatatggcgcaaaatgaccaacagcggttgattgatcaggtagagggggcgctgtacgaggtaaagcccgatgccagcattcctgacgacgatacagagctgctgcgcgattacgtaaagaagttattgaagcatccttgtcagtaa

SEQ ID NO: 473799 - DNA, 1416 bp, Shigella flexneri
gtgaaacaaagcactattgcactggcactcttaccgttactgtttacccctgtgacaaaagcccggacaccagaaatgcctgttctggaaaaccgggctgctcagggcgatattactgcacccggcggtgctcgccgcttaacgggtgatcagaccgccgctctgcgtgattctcttagcgataaacctgcaaaaaatattattttgctgattggcgatgggatgggggattcggaaattactgccgcacgtaattatgccgaaggtgcgggcggcttttttaaaggtatcgatgccttaccgcttaccgggcaatacactcactatgcgctgaataaaaaaactggcaaaccggactacgtcaccgactcggctgcatcagcaaccgcctggtcaaccggtgtcaaaacctataacggcgcgctgggcgtcgatattcacgaaaaagatcacccaacgattctggaaatggcaaaagccgcaggtctggcgaccggtaacgtttctaccgcagagttgcaggatgccacgcccgctgcgctggtggcacatgtgacttcgcgcaaatgctacggtccgagcgcgaccagtgaaaaatgtccgggtaacgctctggaaaaaggcggaaaaggatcgattaccgaacagctgcttaacgctcgtgccgacgttacgcttggcggcggcgcaaaaacctttgctgaaacggcaaccgctggtgaatggcagggaaaaacgctgcgtgaacaggcacaggcgcgtggttatcagttggtgaacgatgctgcctcactgaattcggtgacggaagcgaatcagcaaaaacccctgcttggcctgtttgctgacggcaatatgccagtgcgctggctagggccgaaagcaacgtaccacggcaatatcgataagcccgcagtcacctatacgcctaatccgcaacgtaatgacagtgtaccaaccctggcacagatgaccgacaaagccattgaattgttgagtaaaaatgagaaaggatttttcctgcaagttgaaggtgcgtcaatcgataaacaggatcacgctgcgaacccttgtgggcaaattggcgagacggtcgatctcgatgaagccgtacaacgggcgctggaattcgctaaaaaggagggtaacacgctggtcatagtcaccgctgatcacgcccacgccagccaggttgttgcgccggataccaaagcgccgggcctcactcaggcgctaaatactaaagatggcgcagtgatggtgatgagttacgggaattccgaagaggattcacaagaacataccggcagtcagttgcgtattgcggcgtatggcccgcatgccgccaatgttgttggactgaccgaccagaccgatctcttctacaccatgaaagccgctctggggctgaaataa

SEQ ID NO: 473800 - DNA, 321 bp, Shigella flexneri
atgaaaataacattactggttaccttgctttttggtctggtttttttaaccaccgtcggcgctgccgagagaaccttaaccccacaacaacagcgtatgacctcctgtaatcagcaggcgacggcgcaggcgttgaaaggggatgctcgtaagacctacatgagtgattgcctgaagaacagcaagtctgcgcctggtgaaaaaagtttgacgccacagcagcaaaagatgcgtgaatgtaataatcaagcaacgcaacaagctctgaaaggtgatgatcgtaataagtttatgagtgcctgcctcaagaaagccgcctga

SEQ ID NO: 473801 - DNA, 372 bp, Shigella flexneri
gtgctggatgcactggagcaggcgttatgggcccgtcgaccgtccggcacggtccatcacagtgataaaggttctcagtatgtatcgctggcctacacacagcggcttaaggaagccggattactggcatcaacaggaagtacaggcgactcgtatgacaacgcgatggcggagagcatcaatggtctttacaaagcggaggtaatacaccgtaagagctggaaaaaccgtgcagaagtggaactggccacactaacgtgggtggactggtataacaatcgacgattgcaggaaaggctgggccacatccctccggcagaagcagaaaaagcttattatgcttccatcggaaacgatgatctggcagcctga

SEQ ID NO: 473802 - DNA, 984 bp, Shigella flexneri
atgcagataaaacgctcgattgagaaaatcccgggggggatgatgctcgtcccgctattccttggcgcactgtgccacaccttctcgccgggggcggggaaatattttggatcattcaccaacgggatgattaccggtacggtgcccattctggcggtgtggtttttttgcatgggggcgtcaataaaattaagcgcgacgggaacggtactgcgtaaatccggtacgctggtggtaactaaaattgccgtcgcgtgggtggttgcggcaattgcctcgcgcattattccggaacatggtgttgaagttggattctttgccggactttcaacgctggcgctggtggcggcgatggatatgaccaacggcggactttacgcttccatcatgcagcagtacggtacgaaagaagaagctggggcatttgtgttgatgtcgttggagtccgggccgctcatgacgatgattattctgggcactgccgggattgcctcgtttgaaccgcatgttttcgtcggcgcagtattaccgttcctggtgggctttgccctggggaatcttgaccctgaattacgagaatttttcagcaaagcggtgcaaacgctgattccattctttgccttcgcgctgggcaataccattgatttgactgtgattgcccagactggtttgctggggatcctgttgggtgtggcagtaattatcgtgaccggtattccgttgattatcgccgataaattgattggcggtggcgatggcactgccggaattgccgcttccagttccgcaggggccgcggtagcgacacctgtgctgattgcagaaatggtgcctgcgtttaaaccgatggctccggcagcaacttcgctggtagcgacggcggtcattgtgacttcgattctggtgccaattcttacctctatctggtcacgtaaagtcaaagccagagcagcgaaaatcgaaattttaggtacggtgaaataa

SEQ ID NO: 473803 - DNA, 621 bp, Shigella flexneri
atgagctataccctgccatccctgccgtatgcttacgatgccctggaaccgcacttcgataagcagaccatggaaatccaccacaccaaacaccatcagacctacgtaaacaacgccaacgcggcgctggaaagcctgccagaatttgccaacctgccggttgaagagctgatcaccaaactggaccagctgccagcagacaagaaaaccgtactgcgcaacaacgctggcggtcacgctaaccacagcctgttctggaaaggtctgaaaaaaggcaccaccctgcagggtgacctgaaagcggctatcgaacgtgacttcggctccgttgataacttcaaagcagaatttgaaaaagcggcagcttcccgctttggttccggctgggcatggctggtgctgaaaggcgataaactggcggtggtttctactgctaaccaggattctccgctgatgggtgaagctatttctggcgcttccggcttcccgattctgggcctggatgtgtgggaacatgcttactacctgaaattccagaaccgccgtccggactacatcaaagagttctggaacgtggtgaactgggacgaagcagcggcacgttttgcggcgaaaaaataa

SEQ ID NO: 473804 - DNA, 834 bp, Shigella flexneri
atgagtaacgcgattacgatggggatattttggcatttgatcggcgcggccagtgcagcctgtttttacgctccgttcaaaaaagtaaaaaaatggtcatgggaaaccatgtggtcagtcggtgggattgtttcgtggattattctgccgtgggccatcagcgccctgttactaccggatttctgggcgtattacagctcgtttagtctctctacgctgctgcctgtttttctgttcggcgctatgtgggggatcggtaatatcaactatggcctgaccatgcgttatctcggcatgtcgatgggaattggcatcgccattggcattacgttgattgtcggtacgctgatgacgccaattatcaacggcaatttcgatgtgctgattaacaccgaaggcggacgcatgacgttactcggcgttctggtggcgctgattggcgtagggattgtaactcgagccgggcagttgaaagagcgcaagatgggcattaaagccgaagagttcaatctgaaaaaagggctggtgctggcggtgatgtgcggcattttctctgccgggatgtcctttgcgatgaacgccgcaaaaccgatgcatgaagccgctgccgcacttggcgtcgatccactgtatgttgctctgccaagctatgttgtcatcatgggcggcggcgcgatcattaacctcggtttctgttttattcgtctggcaaaagtgaaggatttgtcgctaaaagccgacttctcgctggcaaaaccgctgatcattcacaatgtgttactctcggcactgggcgggttgatgtggtatctgcaattctttttctatgcctag

SEQ ID NO: 473805 - DNA, 150 bp, Shigella flexneri
atgagtttctatgtattgtgcggcggtatcgtcgggctggtgctgaaagagtggaacaatacaggacgccgtccggtaacggtgttgagcctcggttgtgtggtgattattgtcgccgctaacatcgtcggcatcggcatggcgaattaa

SEQ ID NO: 473806 - DNA, 939 bp, Shigella flexneri
atggctttctgcaataacgcgaatcttctcaacgtatttgtacgccatattgcgaataatcaacttcgttctctggccgaggtagccacggtggcgcatcagttaaaacttctcaaagatgatttttttgccagcgaccagcaggcagtcgctgtggctgaccgttatccgcaagatgtctttgccgaacatacacatgatttttgtgagctggtgattgtctggcgcggtaatggtctgcatgtactcaacgatcgtccttatcgcattacccgtggcgatctcttttatattcatgctgacgataaacactcctacgcttccgttaacgatctggttttgcagaatattatttattgcccggagcggctgaagctgaatcttgactggcagggagcgattccgggatttagcgccagcgcagggcaaccacactggcgcttaggtagcgtggggatggcgcaggcgcggcaggttatcggtcagcttgagcatgaaagtagtcagcatgtgccgtttgctaacgaaatggctgagttgctgttcgggcagttggtgatgttgctgaatcgccatcgttacaccagtgattcgttgccgccaacatccagcgaaacgttgctggataagctgattacccggctggcggctagcctgaaaagtccctttgcgctggataaattttgtgatgaggcatcgtgcagtgagcgcgttttgcgtcagcaatttcgccagcagactggaatgaccatcaatcaatatctgcggcaggtcagagtgtgtcatgcgcaatatcttctccagcatagccgcctgttaatcagtgatatttcgaccgaatgtggctttgaagatagtaactatttttcggtggtgtttacccgggaaaccgggatgacgcccagccagtggcgtcatctcaattcgcagaaagattaa

SEQ ID NO: 473807 - DNA, 837 bp, Shigella flexneri
atgaccgtattacatagtgtggatttttttccgtcttgtaacgcgtccgtggcgatagaaccccggctcccgcaggcggattttcctgaacatcatcatgattttcatgaaattgtgattgtcgaacatggcacgggtattcatgtgtttaatgggcagccctataccatcaccggtggcacggtctgtttcgtacgcgatcatgatcggcatctgtatgaacataccgataatctgtgtctgaccaatgtgctgtatcgctcgccggatcgatttcagtttctcgccgggctgaatcagttgctgccacaagagctggatgggcagtatccgtctcactggcgcgttaaccacagcgtattgcagcaggtgcgacagctggttgcacagatggaacagcaggaaggggaaaatgatttaccctcgaccgccagtcgcgagatcttgtttatgcaattactgctcttgctgcgtaaaagcagtttgcaggagaacctggaaaacagcgcatcacgtctcaacttgcttctggcctggctggaggaccattttgccgatgaggtgaattgggatgccgtggcggatcaattttctctttcactgcgtacgctacatcggcagcttaagcagcaaacgggactgacgcctcagcgatacctgaaccgcctgcgactgatgaaagcccgacatctactacgccacagcgaggccagcgtcactgacatcgcctatcgctgtggattcagcgacagtaaccacttttcgacgctttttcgccgagagtttaactggtcaccgcgtgatattcgccagggacgggatggctttctgcaataa

SEQ ID NO: 473808 - DNA, 1470 bp, Shigella flexneri
atgacctttcgcaattgtgtcgccgtcgatctcggcgcatccagtgggcgcgtgatgctggcgcgttacgagcgtgaatgccgcagcctgacgctgcgcgaaatccatcgttttaacaatgggctgcatagccaaaacggttatgtcacctgggatgtggatagcctggaaagtgccattcgccttggattaaacaaggtgtgcgaggaagggattcgtatcgatagcattgggattgatacctggggcgtggactttgtgctgctcgaccaacagggtcagcgtgtgggcctgcccgttgtttatcgcgatagccgcaccaatggcctgatgccgcaggcacaacagcaactcggcaaacgcgatatttatcagcgtagcggcatccagtttctacccttcaatacgctttatcagttgcgtgcgctgacggagcaacaacctgaacttattccacacattgctcacgctctgctgatgccggattacttcagttatcgcctgaccggcaagatgaactgggaatataccaatgccaccaccacacaactggtcaatatcaatagcgacgactgggacgagtcgctactggcgtggagcggggccaacaaagcctggtttggtcgcccgacgcatccgggtaatgtcattgggcactggatttgcccgcagggtaatgagattccggtggtcgccgttgccagccatgataccgccagcgcggttatcgcctcgccgttaaacggttcacgcgccgcttatctctcttctggcacctggtcattgatgggcttcgaaagccagacgccatttaccaatgacacggcgctggcagccaacatcaccaatgaaggcggggcggaaggtcgctatcgggtgctgaaaaatattatgggcttatggctgcttcagcgagtgcttcaggaacggcaaatcaacgatctcccggcgcttatcgccgcgacacaggcacttccggcctgccgcttcatcatcaatcccaatgacgatcgctttattaatcctgacgagatgtgcagcgaaattcaggctgcgtgtcgggaaacggcgcaaccgatcccgggaagtgatgctgaactggcgcgctgtattttcgacagtctggcgctgctgtatgccgatgtgttgcatgagctggcgcagctgcgcggtgaagatttctcgcaactgcatattgtcggcggcggctgccagaacacgctgctcaaccagctatgcgccgatgcctgcggtattcgggtgatcgccgggcctgttgaagcctcaacgctcggcaatatcggcatcgagttaatgacgctggatgaactcaacaatgtggatgatttccgtcaggtcgtcagcaccaccgcgaatctgaccacctttacccctaatcctgacagtgaaattgcccactatgtggcgcagattcactctacacgacagacaaaggagctttgcgcatga

SEQ ID NO: 473809 - DNA, 1260 bp, Shigella flexneri
atgaccactcaactggaacaggcctgggagctggcgaaacagcgtttcgcggcggtggggattgatgtcgaggaggcgctgcgccaacttgatcgtttacccgtttcaatgcactgctggcagggcgatgatgtttccggttttgaaaacccggaaggttcgctgaccggggggattcaggccacaggcaattatccgggcaaagcgcgtaatgccagtgagctacgtgccgatctggaacaggctatgcggctgattccggggccgaaacggcttaatttacatgccatctatctggaatcagatacgccagtctcgcgcgaccagatcaaaccagagcacttcaaaaactgggttgaatgggcgaaagccaatcagctcggtctggattttaacccctcctgcttttcgcatccgctaagcgccgatggctttacgctctcgcatcccgacgacagcattcgccagttctggattgatcactgcaaagccagccgtcgcgtttcggcctattttggcgagcaactcggcacaccatcggtgatgaacatctggatcccggatggtatgaaagatatcaccgttgaccgtctcgccccgcgtcagcgtctgctggcagcactggatgaggtgatcagcgagaagctaaaccctgcgcaccatatcgacgccgttgagagcaaattgtttggcattggcgcagagagctacacggttggctccaatgagttttacatggggtatgccaccagccgccagactgcgctgtgcctggacgccgggcacttccacccgactgaagtgatttccgacaagatttccgccgccatgctgtatgtaccgcagttgctgctgcacgtcagccgtccggttcgctgggacagcgatcacgtagtgctgctggatgatgaaacccaggcaattgccagtgagattgtgcgtcacgatctgtttgaccgggtgcatatcggccttgacttcttcgatgcctctatcaaccgcattgccgcgtgggtcattggtacacgcaatatgaaaaaagccctgctgcgtgcgttgctggaacctaccgctgagctgcgcaagctggaagcggcgggcgattacactgcgcgtctggcactgctggaagagcagaaatcgttgccgcggcaggcggtctgggaaatgtattgccaacgtcacgatacgccagcaggtagcgaatggctggagagcgtgcgggcttatgagaaagcgattttgagccagcgtgggtaa

SEQ ID NO: 473810 - DNA, 642 bp, Shigella flexneri
atgcctttactggcaaatacgccgtttattgtcaccggctccggcaaattcttccgtaacgtccagctcgatcctgcagctaacttaggcgtcgtaaaagtcgacagcgatggcgcgggctaccatattctctgggggttaaccaacgaagccgttccaacttctgaacttccggctcactttctctcccactgcgagcgcattaaagccaccaacggtaaagatcgggtgatcatgcactgccacgccaccaacctgatcgccctcacctatgtactggaaaacgacaccgcggtctttactcgccaactgtgggaaggcagcaccgaatgtctggtagtattcccggatggcgttggcattctgccgtggatggtgcccggcacggacgaaatcggccaggcgaccgcacaagagatgcaaaaacattcgctggtgttgtggcccttccacggtgtgttcggttccggaccgacgctggatgaagcctttggtttaatcgacaccgcagaaaaatcagcacaagtattagtgaaggtttattcgatgggcggcatgaaacagaccatcagccgtgaagagttgatagcgctcggcaagcgcttcggcgttacaccactagccagtgcgctggcgctgtaa

SEQ ID NO: 473811 - DNA, 315 bp, Shigella flexneri
atgatccgcaaagcctttgtcatgcaggtaaaccccgacgcccacgaagagtatcagcgtcggcataatcccatctggccggaactggaagcagtgttgaaatctcacggtgtgcataactacgccatttacctcgacaaagcgcgtaatctgctgtttgccatggtagagattgaatctgaagaacggtggaatgcggtagccagtactgatgtttgccaacgttggtggaaatatatgaccgatgttatgcccgctaacccagataacagcccggtgagtagcgagctgcaagaagtgttttacctgccgtaa

SEQ ID NO: 473812 - DNA, 435 bp, Shigella flexneri
atggcagctcttactgcaagctgtattgacctgaatattcagggcaatggcgcttattccgttctgaagcagttggcgacaatagcgttacaaaacggttttatcaccgactcacaccagttcctgcaaaccctgctgctgcgcgaaaaaatgcactctactggatttggttccggtgtcgcagtgccgcacggtaaaagcgcctgcgttaaacaaccgttcgtattattcgcccgcaaagcgcaggctattgactggaaagccagcgatggcgaagacgtcaattgctggatctgcctcggcgtgccgcaaagcggcgaagaggatcaggtcaaaatcatcggcacactgtgtcgcaaaattattcaccaggaatttattcatcaactgcaacagggcgataccgaccaggtgctggccttgttaaatcggtaa

SEQ ID NO: 473813 - DNA, 3846 bp, Shigella flexneri
atgagccagcatttacctttggtcgccgcacagcccggcatctggatggcagaaaaactgtcggatttaccctccgcctggagcgtggcgcattacgttgagttaaccggagaggttgatgcgccattactggcccgcgcggtggttgccggattagcgcaagcagatactttgcggatgcgttttacggaagataacggcgaagtctggcaatgggtcgatgatgcgctgatattcgaactgccagaaattatcgacctgcgaaccaatattgatccgcacggtactgcgcaggcattaatgctggcggatttgcaacaagatttgcgcgtcgatagcggtaaaccactggtctttcatcaactgatacaggtggcagataaccgctggtactggtatcagcgttatcaccatttactggtcgatggcttcagttttccggccattacccgccagatcgccaacatttactgcgcattgctgcgtggcgaaccaacgcctgcttcgccgtttacgcctttcgctgatgtagtggaagagtaccagcaataccgcgaaagcgaagcctggcagcgtgatgcggcattctgggtggaacagcgtcgccaactgccaccgcccgcgtcactttctccggcacctttagcggggcgcagcgcctcggcagatattttgcgtctgaaaatggaatttaccgacggggaattccgccagctggctacgcaactttcaggtgtgcagcgtaccgatttagcccttgcgctgacggctttgtggctggggcgattgtgcaatcgcatggactacgccgccggatttatctttatgcgtcgactgggctcggcggcgctgacggctaccggacccgtgctcaacgttttgccgctgggtattcatattgcggcgcaagaaacgctgccggaactggcaacccgactggcaacccgactggcagcacaactgaaaaaaatgcgtcgtcatcaacgttacgatgccgaacaaattgtccgtgacagcgggcgagcggcaggtgatgaaccgctgtttggtccggtactcaatattaaggtatttgattaccaactggatattcctggtgttcaggcgcaaacccataccctggcaaccggtccggttaatgaccttgaactggccctgttcccggatgaacacggtgatttgagtattgagatcctcgccaataaacagcgttacgatgagccaacgttaatccagcatgctgaacgcctgaaaatgctgattgcccagttcgccgcggatccggcgctgttgtgcggcgatgtcgatattatgctgccaggtgagtatgcgcagctggcgcagatcaacgccactcaggttgagattccagaaaccacgctgagcgcgctggtggcagaacaagcggcaaaaacaccggatgctccggcgctggcagatgcgcgttacctgttcagctatcgggaaatgcacgagcaggtggtggcactggcgaatctgctgcgtgagcgcggcgttaaaccaggggacagcgtggcggtggcactaccgcgctcggtctttttgaccctggcactccatgcaatagttgaagctggcgcggcctggctaccgctggataccggctatccggacgatcgcctgaaaatgatgctggaagatgcgcgtccgtcgctgttaattaccaccgacgatcaactgccgcgctttagcgatgttcccaatttaaccaacctttgctataacgccccgcttaccccccagggcagtgcgccgctgcaactttcacaaccgcaccacacggcttatatcatctttacctctggctccaccggcaggccgaaaggggtaatggtcgggcagacggctatcgtcaaccgcctgttgtggatgcaaaatcattatccgctcacaggcgaagatgtcgttgcccaaaaaacgccgtgcagttttgatgtctcggtgtgggagtttttctggccgtttattgccggggctaaactggtgatggctgaaccggaagcgcaccgcgacccgctcgctatgcagcaattctttgccgaatatggcgtaacgaccacgcactttgtgccgtcgatgctggcagcatttgttgcctcgctgactccgcaaaccgctcgccagagttgcgtgacgttgaaacaggttttctgtagtggtgaggccttaccggctgatttatgccgcgaatggcaacagttaaccggcgcgccgttgcataacctgtatggcccgacggaagcggcggtagatgtcagctggtatccggcttttggcgaggaactggcacaggtgcgcggcagcagtgtgccgattggttatccggtatggaatacgggtctgcgtattcttgatgcgatgatgcatccggtgccgccgggtgtggcgggtgatctctatctcaccggtattcaactggcgcaggggtatcttggacgacccgatctgaccgccagccgctttattgccgatccttttgctcctggtgaacggatgtatcgtaccggagacgttgcccgctggctggataacggcgcggtggagtacctcgggcgcagtgacgatcagctaaaaattcgcgggcagcgtatcgaactgggcgaaatcgatcgcgtgatgcaggcgctgccggatgtcaaacaagccgttacccacgcctgtgtgattaaccaggcggcagccactggtggtgatgcgcgtcagttggtgggctatctggtatcgcaatcgggcctgccgttggataccagcgcattgcaggcgcagcttcgcgaaacattgccgccgcatatggtgccagtcgttctgctgcaactgccgcagttgccacttagcgccaacggcaagctggatcgcaaagccttaccgttgcctgaactgaaggcacaagcgccagggcgtgcgccgaaagcgggcagtgaaacgattatcgccgcggcattcgcgtcgttgctgggttgtgacgtgcaggatgccgatgctgatttctttgcgctgggcggtcattcgctactggcaatgaaactggcagcgcagttaagtcgacagtttgctcgtcaggtgacgccggggcaggtgatggtcgcgtcaaccgtcgccaaactggcaacgattattgatggtgaagaggacagctcccggcgcatgggattcgaaaccattctgccgttgcgtgaaggtaatggcccgacgctgttttgtttccatccggcgtccggttttgcctggcagtttagcgtgctctcgcgttatctcgatccacaatggtcgattattggcattcagtcgccgcgccctcatggacccatgcagacagcgacaaacctggatgaagtctgcgaagcgcatctggcaacgctacttgagcaacaaccgcacggcattgcggcgcggctgcgtgcccgtggcgaacaggtggcatttcttggtttgctggatacctggccgccagagacgcaaaactggcaggaaaaagaggctaatggtctggacccggaagtgctggcggagattaaccgcgaacgcgaggccttcctggcggcacagcagggaagtacttcaacggagttgtttaccaccattgaaggcaactacgctgatgctgtgcgcctgctgacgactgctcatagcgtaccgtttgatggtaaagcgacgctgtttgttgctgaacgcacgcttcaggaaggtatgagccccgaacgcgcctggtcgccgtggattgcggagctggatatctatcgtcaggattgtgcgcatgtggatattatctctccaggggcgtttgtaaaaattgggccgattattcgcgcaacgctaaacaggtaa

SEQ ID NO: 473814 - DNA, 219 bp, Shigella flexneri
atggcattcagtaatcccttcgatgatccacagggagcgttttacattttgcgcaatgcgcaggggcaattcagtctgtggccgcaacaatgcgccttaccggcaggctgggacattgtgtgtcagccgcagtcacaagagtcctgccagcagtggcttgaagcccactggcgtactctgacaccggcgaatttcacccagttgcaggaggcacaatga

SEQ ID NO: 473815 - DNA, 1203 bp, Shigella flexneri
gtgacggcgttaaaagtaggaagtgagagctggtggcagtcgaaacatggcccggaatggcagcgtctgaatgacgaaatgtttgaggtcactttctggtggcgtgatccccaaggttctgaagaatactcgacgataaagcgcgtatgggtctacatcactggtgtgaccgatcatcatcagaacagccagccccagtcgatgcagcgaattgcaggtactgatgtctggcagtggacgacacaactcaatgccaactggcgcggcagctactgctttattcccaccgaacgcgatgacattttttctgcaccatcccccgatcgcctcgaattacgtgaaggctggcgaaaactattaccccaggcaatagccgatccgctgaatccacaaagctggaaaggcgggctagggcacgctgtttctgcactcgaaatgccgcaagcgcctctgcaaccgggatgggattgtccgcaagcgccagaaataccagccaaagaaattatctggaaaagtgaacggttgaaaaattcacgtcgtgtatggatttttaccaccggcgatgtaacagcagaagaacgcccgctggcagttttgctcgatggcgaattttgggcgcaaagtatgcccgtctggcctgtgctgacttcgctgacccatcgtcagcaacttcctcccgccgtgtatgtgttgatcgacgctatcgacaccacgcaccgcgcccacgaactgccgtgtaatgcggatttctggctggcagtacagcaagagttattacccctggtgaaagttattgccccttttagcgatcgcgccgatcgcaccgtggtcgccgggcagagttttggtgggctgtccgcgctgtatgccggactgcactggcctgaacgctttggctgtgtattaagccagtcaggatcgtactggtggccgcatcggggcgggcagcaagagggcgtgttacttgaaaagctaaaagctggtgaagttagcgccgaaggtctgcgcattgtgctggaagcgggtattcgcgagccgatgatcatgcgggccaatcaggcgctgtatgcgcaattacaccctataaaagaatccattttctggcgtcaggttgacggcggacatgatgcgctttgttggcgcggtggcttgatgcaggggttaatcgacctctggcaaccacttttccatgacaggagttga

SEQ ID NO: 473816 - DNA, 2241 bp, Shigella flexneri
atgaacaagaagattcattccctggccttgttggtcaatctggggatttatggggtagcgcaggcacaagagccgaccgatacacctgtttcacatgacgataccattgtcgttaccgccgccgagcagaacttgcaggctcctggcgtttcgaccatcaccgcagatgaaatccgcaaaaacccggttgcccgcgatgtgtcggagatcatccgtaccatgccaggcgttaacctgaccggtaactccaccagtggtcagcgtgggaataaccgacagattgatattcgcggtatgggtccggaaaacacgctgattttgattgacggcaagccggtaagcagccgtaactcggtgcgtcagggctggcgtggcgagcgcgatacccgtggtgatacctcctgggtgccacctgaaatgattgaacgtattgaagttctgcgtggtccggcagctgcgcgttatggcaacggcgcggcgggcggcgtggttaacatcattaccaaaaaaggcagcggcgagtggcacggctcctgggacgcatatttcaatgcgccagaacataaagaggaaggtgccaccaaacgcactaactttagcctggccggtccgctgggcgacgaattcagcttccgcttgtatggcaacctcgacaaaactcaggctgacgcgtgggatatcaaccagggccatcagtccgcgcgtgccggaacgtatgccacgacgttaccagccgggcgcgaaggggtgatcaataaagatattaacggcgtggtgcgctgggacttcgcaccattgcaatcgctggaactggaagcgggttacagccgccagggtaacctgtatgcgggcgatacccagaacaccaactctgacgcttacactcgctcgaaatatggcgatgaaaccaaccgcctgtatcgccagaactacgcgctgacctggaacggtggctgggataacggcgtgaccaccagcaactgggtgcagtatgaacacacccgtaactcgcgtattccggaaggtctggcgggcggtaccgaagggaaatttaacgaaaaagcgacacaggatttcgtcgatatcgatctcgatgacgtgatgctgcacagcgaagttaacctgccgattgatttcctcgttaaccagacgctgacgctgggtacggagtggaatcagcaacggatgaaggacttaagttccaacacccaagcactgaccggaacgaataccggtggcgctattgatggcgtgagtgccaccgaccgtagcccgtattcaaaagcagaaattttctcgctgtttgccgaaaacaacatggagctgactgacagcaccatcgtaacgccggggctgcgtttcgatcatcacagtattgtcggcaataactggagcccggcgctgaacatatcgcaaggtttaggcgatgacttcacgctgaaaataggcattgcccgcgcctataaagcgccgagcctataccagactaacccgaactacattctctacagtaaaggtcagggctgctatgccagcgcgggcggctgctatctgcaaggtaacgatgacctgaaagtagaaaccagcatcaacaaagagattggtctggagttcaaacgcgacggctggctggcgggcgtcacctggttccgtaacgattatcgcaataagattgaagcgggctatgtggctgtagggcaaaacgcagtcggcactgatctctatcagtgggataacgtgccgaaagcagtggttgaaggtctggaaggatcgttaaacgtaccagttagcgaaacggtgatgtggaccaataacatcacttatatgctgaagaatgaaaacaaaaccacgggcgaccgtttgtcgatcatcccggagtacacgttgaactcaacgctgagctggcaggcacgggaagatttgtcgatgcaaacgaccttcacctggtacggcaagcagcagccgaagaagtacaactataaaggtcagccagcggttggcccggaaaccaaagaaatcagtccttacagcattgtgggtctgagcgcgacctgggatgtgacgaagaatgtcagtctgaccggcggcgtggacaacctgttcgacaaacgtttgtggcgtgcaggtaatgcccagaccacgggcgatctggcaggagccaactatatcgccggtgccggcgcgtatacctataacgagccgggacgtacgtggtatatgagcattaatactcacttctga

SEQ ID NO: 473817 - DNA, 630 bp, Shigella flexneri
atggtcgatatgaaaactacgcatacctccctcccctttgccggacatacgctgcattttgttgagttcgatccggcgaatttttgtgagcaggatttactctggctgccgcactacgcacaactgcaacacgctggacgtaaacgtaaaacagagcatttagccggacggatcgctgctgtttatgccttgcgggaatatggctataaatgtgtgcccgcaatcggcgagctacgccaaccggtgtggcctgcggaggtatacggcagtattagccactgcggggctacggcattggccgtggtttcccgtcaaccgattggcgttgatatcgaagaaattttttctgcgcaaacagcgaccgaattgacagacaacattattacaccagcagaacacgagcgactcgcagactgcggtttagccttttctctggcgctgacacttgcattttccgccaaagagagcgcatttaaggcaagtgagatccaaactgatgcaggttttctggactatcagataattagctggaataaacagcaggtcatcattcatcgtgagaatgagatgtttgctgtgcactggcagataaaagaaaaaatagtcataactctgtgccaacacgattaa

SEQ ID NO: 473818 - DNA, 153 bp, Shigella flexneri
atgctgacgaaatatgcccttgtggcagtcatagtgctgtgtttgacggtgctgggatttacgcttctggtcggagactcgctgtgtgagttcaccgtaaaggaacgtaatattgagtttaaggctgttcttgcttacgaaccgaagaagtag

SEQ ID NO: 473819 - DNA, 366 bp, Shigella flexneri
atgaacatggttgagaatatgctcgatcaggcattcaaaaagcttaatcctcacgagcatcctgttctgcactctgaccagggatggcagtatcgtatgagaagatatcaaaatatccttaaagaacatggtattaaacaaagcatgtccagaaaaggcaattgtctagataatgctgtggtggagtgtttctttggaaccttaaagtcggagtgtttttatcttgatgagttcagtaatataagcgaactgaaggatgctgttacggaatatattgaatactataacagcagaagaattagcctgaaattaaaaggtctgactccaattgaatatcggaatcagacctatatgcctcgtgtataa

SEQ ID NO: 473820 - DNA, 834 bp, Shigella flexneri
gtgaaaaaaacacagcgaaaagaaatcgaaaatgtgacaaatatcacaggtgttcgtcaaattgagttatggcggcgtgatgatttacaacacccacggttagatgaggtcgcggaagaagttcccgttgcgctggtctacaacggcatttcgcatgtggtgatgatggcgtcgcccaaagaccttgagtactttgcgctcggtttttcgctttccgaggggataatagaaagtccgcgcgatatcttcggcatggatgtcgttccttcctgtaatggtcttgaagtacaaattgagctttccagccgccgctttatggggttgaaggagcgccgccgggcgctggcgggacgtacgggctgtggcgtatgcggcgtggagcaacttaatgacatcggaaaaccggtgcagccgctaccgttcacccagacgtttgatctcaacaaactggatgatgcattacgtcatctcaacgattttcagccagtggggcgactgactggttgtactcacgccgctgcctggatgttgccatctggcgaactggtcggcgggcatgaagacgtgggtcgccatgtggcgctggacaaactgttaggccgccggtcacaagaaggggaaagctggcagcaaggtgcggtactggtttccagtcgtgccagttatgaaatggtgcaaaagtcggcgatgtgcggcgtagagattttgtttgcggtgtctgccgcgaccacgcttgctgtagaagtggctgagcgctgtaatctgacactggtaggtttttgtaaaccgggtcgggcaacggtttatacccatccgcagcgtttgagcaattaa

SEQ ID NO: 473821 - DNA, 588 bp, Shigella flexneri
atgcaggtcagcagaaggcagttctttaagatctgcgctggcggtatggcaggcaccacggcagcggcactgggttttgcacccagcgtagcactcgcggaaacccggcagtataaactgctgcgcacccgcgaaacccgtaatacctgcacctattgttccgtaggctgtgggctgttgatgtacagcctcggtgacggagcaaaaaacgccaaagcatctatcttccatatcgaaggcgatccggatcacccggtcaaccgcggtgcactttgtccgaaaggcgctggcctggtggatttcatccactccgaaagccgtctgaagtttccggaataccgtgcgccaggttctgataaatggcagcaaatcagttgggaagaggcgtttgatcgcatcgccaaactgatgaaagaagaccgcgatgctaactacattgcgcaaaacgccgaaggcgtgactgttaaccgctggctctccaccgggatgctgtgtgcttccgcgtcgagtaacgaaaccggctatttaacgcaaaaattctcccgcgcgctgggtatgctcgcggtcgacaaccaggcgcgtgtctga

SEQ ID NO: 473822 - DNA, 2415 bp, Shigella flexneri
atgaccaaccactgggtcgacatcaagaacgccaacctcgtcgtggtgatgggcggtaacgccgctgaagctcacccggtcgggttccgctgggcgatggaagccaaaattcacaacggcgcgaagctgattgtgatcgatcctcgctttacgcgtacggcggcggtagctgactactatgcccctattcgttccggtactgacattgctttcctgtcaggcgtattgctgtacctgctgaacaatgaaaaattcaaccacgaatacaccgaagcctataccaacgccagcctgatcgtgcgtgaggattacggctttgaagatggcctgttcaccggctacgacgcggaaaaacgcaagtacgataaatcctcctggacttatgaactggacgaaaacggcttcgccaaacgcgataccacgctgcaacatccgcgctgcgtgtggaacttgctgaaacagcacgtttcccgctacacgccagatgtggttgaaaacatctgtggtacgccaaaagacgcgttcctgaaagtctgcgaatacatcgcagaaaccagtgctcacgataaaactgcctcgttcctgtatgccctcggctggacgcaacactccgttggtgcgcaaaacattcgtacgatggcgatgatccagctgctgctcggcaatatggggatggccggcggcggcgttaacgccctgcgcggtcactccaatattcaggggctgacggacctggggctactgtcgcagagtctgccaggttacatgacgctgccaagcgagaagcagaccgatctgcaaacctaccttaccgccaacacgccaaaaccgctgctggaaggccaggtaaactactggggcaactacccgaaattcttcgtctctatgatgaaggccttctttggtgataaagcgacggcggaaaatagctggggctttgactggttgccgaagtgggataaaggctacgacgtcctgcaatacttcgagatgatgaaagagggcaaggtcaatggctatatctgccagggctttaaccctgttgcctcattcccgaacaaaaacaaagtgatcggttgtctgtcgaaactgaagttcctcgtcaccatcgacccactgaacactgaaacctctaacttctggcagaaccacggtgagctgaacgaagttgactcgtcgaagatccagaccgaagtgttccgtctgccatcgacctgcttcgcagaagagaacggttcaatcgttaactcaggtcgctggttgcagtggcactggaaaggtgcggacgccccggggattgcgctgactgacggtgagatcctctccggtatcttcctgcgcttgcgcaagatgtatgccgaacagggtggcgcgaacccggatcaggtgctgaacatgacctggaactacgccattccgcatgagccgaagtcggaagaagtagcgatggagagcaacggtaaggcgctggccgatattaccgatccggcaaccggtgcggttatcgtcaagaaaggccaacaacttagctcgttcgcccaattgcgcgatgacggtacaacctcctgtggctgctggattttcgccggtagctggacgccggaaggcaaccagatggcgcgtcgtgataacgccgatccgtctggcctcggtaacacgctgggctgggcatgggcatggccgcttaaccgccgcattctgtataaccgcgcctccgcagatccgcagggtaacccgtgggatccgaagcgtcagttgctgaaatgggacggcactaagtggaccggctgggatattccggactacagcgcagcgcctccgggtagcggcgtcgggccgtttatcatgcagcaggaaggcatggggcgtctgtttgccctcgataagatggcggaaggtccgttcccggaacactacgagccgtttgaaacgccgctgggaactaacccgctgcatccaaacgttatctcgaacccagctgcacgtatctttaaagacgacgccgaagcattgggtaaagccgataagttcccgtatgtcggaaccacctatcgtctgaccgagcacttccactactggaccaaacacgcgctgttgaacgcgattttgcagccagagcagtttgtggaaatcggggagtcgctggcgaataaacttggcattgcccagggcgataccgtgaaagtctcctccaaccgtggctatatcaaagccaaagcggtggtgaccaaacgtattcgcacgctgaaagcgaacggcaaagatatcgataccatcggtattccgattcactggggctatgaaggcgtagctaaaaaaggctttattgccaatactttaacgccattcgttggtgatgcgaacacgcagacgccggagtttaagtccttccttgtgaatgtggaaaaggtgtaa

SEQ ID NO: 473823 - DNA, 903 bp, Shigella flexneri
atggcttatcaatctcaagatatcattcgtcgttccgcgactaacggtctgacccccgcgcctcaggcgcgggacttccaggaagaagtggcgaaactcatcgacgttaccacctgtatcggctgtaaagcctgtcaggtggcgtgttcagagtggaacgacattcgcgataccgtcggcaataacattggggtgtacgacaaccccaatgatttaagcgccaaatcgtggacggtaatgcgcttctcggaagtggagcagaacgacaaactggaatggctgatccgcaaagacggctgtatgcactgttccgatccaggctgcctgaaagcgtgcccggcggaaggtgcaattattcagtatgccaacggtatcgtcgacttccagtccgagcagtgcattggctgcggttattgcattgcgggctgtccgttcgacattccgcgcctcaacccggaagacaaccgcgtctacaaatgtacgctgtgcgttgaccgcgtggtggttgggcaagaaccagcctgcgtgaagacctgcccaacgggcgcgattcacttcggcacgaaagagtcgatgaaaacgctggcgagcgagcgcgttgctgagctgaaaacccgcggttacgacaatgcgggtctgtacgatccggcaggcgtcggtggtacacacgtcatgtacgtgctgcaccatgctgacaagccaaatctgtatcatggcttgccggagaacccggaaatcagcgaaaccgtgaaattctggaaaggcatctggaaaccgctcgcggctgttggctttgcggctacctttgcggccagtatcttccactacgtgggtgtcggtccgaaccgtgcggatgaggaagagaataatctgcacgaagagaaagacgaggagcgcaaatga

SEQ ID NO: 473824 - DNA, 636 bp, Shigella flexneri
atgaaacgacgtgacaccatcgtgcgctacaccgcgccggaacgtatcaaccactggatcaccgccttctgcttcatcctggcggcggtgagcgggctgggctttttgttcccgtccttcaactggttgatgcaaatcatgggcacaccgcagctggcgcgaattctgcacccgtttgtcggcgtggttatgtttgcctcgttcatcatcatgtttttccgttactggcatcaaaacctaatcaatcgggatgatatcttttgggcgaagaatattcgtaagatcgtcgtcaacgaggaagtaggtgacaccgggcgttataacttcggtcagaaatgcgttttctgggcggcgattattttcctggttctgctgctggtgagcggcgtgattatctggcgtccttattttgcgcctgctttctcaatcccggtgatccgattcgcgttaatgctgcattcatttgccgcagtggcgttaattgtggttatcatggtgcatatctacgccgccctttgggtgaaaggcacgattaccgccatggtggaaggatgggttaccagcgcctgggcgaagaaacatcacccgcgctggtaccgtgaggtccgcaagacaacggaaaagaaagctgaatga

SEQ ID NO: 473825 - DNA, 930 bp, Shigella flexneri
atgagtattcgcataatcccgcaagatgagctgggttcgagcgagaaacgtacggcggatatgattccgccgttattgttccctcggctcaagaatttatacaaccgccgcgccgagcgtctgcgcgagctggcagaaaataatccgctgggtgattacctgcgctttgctgcgcttatcgcccacgcccagaaagtggtgctgtacgaccatccgctggagatggatctgaccgcgcgcattaaagaagccagcgcacagggcaagcccccgctggatattcacgttctgccgcgtgataagcactggcaaaagctgctgatggcgctaattgctgagctgaaacctgaaatgagcggcccggcgctggcagtgattgagaatctggagaaggcatcgactcaggagctggaagatatggccagcgcgctgtttgcctctgatttctcgtccgtcagcagcgataaagcaccgtttatctgggctgcgctgtcgctctactgggcgcagatggccaatctgatccccggcaaagcccgcgctgaatacggcgaacaacgtcaatattgcccggtatgtggctctatgccggtgtccagcatggtgcaaattggcaccactcagggtctgcgttacctgcactgcaacctgtgtgaaaccgaatggcacgtagtgcgcgtaaaatgcagcaactgcgagcagagcggcaaactgcattactggtcgctggatgacgaacaggccgcgattaaagccgaaagctgcgatgactgcggcacttacctgaagattctttatcaggaaaaagaaccgaaagttgaagccgtggcagatgacctcgcctctctggtactggacgcgcgaatggagcaagaaggctacgcccgtagttccattaacccattcctgtttccgggtgaaggagagtaa

SEQ ID NO: 473826 - DNA, 243 bp, Shigella flexneri; identical to SEQ ID NO: 460631

SEQ ID NO: 473827 - DNA, 363 bp, Shigella flexneri
atgaaacaactgcaacgctcttattatttctggaaaacgcctcgcaaaaacaaaatgacatgcaaaaatccgcatttttttaaatgcttttccggcgtaattttcgcacatacattaatgagtaatatatgtaaggtggtggtaatggcgatgaatacggtttttcttcatttatcagaagaggcaattaaacggctgaacaagcttcggggctggcgtaaggtttcacgatctgcaattttacgcgaagcggttgagcaatatctggagcggcagcaatttccggtgcgtaaagcaaagggaggcaggcaaaagggggaggtagttggtgttgatgatcagtgtaaggagcataaggaatga

SEQ ID NO: 473828 - DNA, 774 bp, Shigella flexneri
ttgggcagtgaaaaaccgttgtttgtaaagcataccgcaatgatgagggaggcatgtaaggaattaccgcagtcagtggaatatgttcctttagcctgtgaagcgcatagccatcgcagcgtcgcccttgccaaaaccgtggctgcgcccatcatggcgacaggtgtgggcttggcattaatgtatgcaacatcatcaggaccgtattatgcgcaaagtctttctggttcgccggatatcgagatgataaaaaatcgcatggctgaattgtttaaccagtcggatatttctgtgcgcaacaaatatagcccggcttttgataaatggaatgaactggtagataaattaaatcacgaaagaaatacagttccgtttgcgtgtttgaccaccattttagcgacggcgataaatgaaactcttgagggggatacgaatgttgccgttgtgatggggtgtaaatctgcgaaagatcgcacgatatccattgtccttggcaactcgatgttgcaaacactccttgaaaaacgcctcgccgatagtggagaaatagaaaatctttttgatcaacagggatattttagttgcgattcattaacacccgaagaattaatgatgttaaaagacctttttgatattcgagttcttcatgtctctaacaaattcaatgttggattgcaaggtaatatcaacactgatgttttacaagattcgttttttaaaaatgtcgatttcattcatgaatataactcgtataccgtagggatgggagtctga

SEQ ID NO: 473829 - DNA, 576 bp, Shigella flexneri
gtgaatgcttcaagtattaatcaaacttacttacatgataaaaatcctggtgacgttattagcctgtatggcactttagataacattccccttgtagttaaggaatgcacgggtaaaaatcatcaaattaatgttaaagccaaattgccacaagaacgaagtgaaaaagttgaggatatgtgtgaaagaatgaaaggtggcatctctatgtttaaccacaccacaaaaacagctgataatatagagcataatttgcagctaagttttctcgtgggttcacgtccgtcgatcaccaataaatactcagcaaaagatgtaggtccagatatacttgcattgcccgtcaacgtatatcatgcggattttaaaattaaaatcaataatgcagtggagaaggcttcatcaattgtgttatgtgctgtgcaaaaaaatctccatgcagcaaggaaggttcttagcgggataataggaaatgtgccaaaaaataataaaccaaaaacaattatttttgatttgcgttttcttagtgcaattaagcagaaagttttttgggcagtgaaaaaccgttgtttgtaa

SEQ ID NO: 473830 - DNA, 339 bp, Shigella flexneri
ttgtcgagtaataatgaatatgacctgtttaaaaatagagaaacctcactgtggaaacgcaaagtaccagaaagcgcagcgctggcaatgacgggaacagtatataaattatttggtaatcgcttactcaacgcccgcaatcagttagataaaaatctcctcgaaatggctatgcaaatggtttatggcaaagatatggtgacaaagtccggggatatattgattgatatacaattaaataaggatggcagtctccagagtaagcactacacacttgatgtaggtgaagttataaacagttataatattgaccctctttgtgaatgcttcaagtattaa

SEQ ID NO: 473831 - DNA, 555 bp, Shigella flexneri
atgtctgatgttttacgcccataccgcgatctttttccacaaatcggtcagcgcgtaatgatcgacgatagcagtgtcgtgattggtgacgttcgtctggctgatgatgtggggatctggccgctcgttgtgattcgtggagatgtacattatgtacagatcggagcacgcaccaatatccaggatggcagtatgttgcatgtcactcataaatcctcgtacaacccagatggcaacccattaaccattggcgaagatgtcactgttggtcacaaggtgatgctccacggctgcaccattggcaatcgagttttggttgggatgggctcaattttacttgatggcgcaatagtagaagatgatgtgatgattggtgcgggtagtctggtcccacaaaataaacggctggagagcggatatctgtatctcggtagccccgtcaaacagatccgcccgttaagtgatgaagagaaggctgggttacgctattccgcgaataattacgtgaaatggaaggacgaatatctggatcagggtaaccagacccagccttga

SEQ ID NO: 473832 - DNA, 258 bp, Shigella flexneri; identical to SEQ ID NO: 458835

SEQ ID NO: 473833 - DNA, 819 bp, Shigella flexneri
atggaaacctatgctgtttttggtaatccgatagcccacagcaaatcgccattcattcatcagcaatttgctcagcaactgaatattgaacatccctatgggcgcgtgttggcacccatcaatgatttcatcaacacactgaacgctttctttcgtgctggtggtaaaggtgcgaatgtgacggtgccttttaaagaagaggcttttgccagagcggatgagcttactgaacgggcagcgttggctggtgcagttaataccctcaagcggttagaagatggacgcctgctgggtgacaataccgatggtgtaggcttgttaagcgatctggaacgtctgtcttttatccgccctggtttacgtattctgcttatcggcgctggtggagcatctcgcggcgtactactgccacttctttccctggactgtgcggtgacaatcactaatcggacggtatcccgcgcggaagagttggctaaattgtttgcgcacactggcagtattcaggcgttgggtatggacgaactggaaggtcatgagtttgatctcattattaatgcaacatccagtggcatcagtggtgatattccggcgatcccgtcatcgctcattcatccaggcatttattgctatgacatgttctatcagaaaggaaaaactccttttctggcatggtgtgagcagcgaggctcaaagcgtaatgctgatggtttaggaatgctggtggcacaggcggctcatgcctttcttctctggcacggtgttctgcctgacgtagaaccagttataaagcaattgcaggaggaattgtccgcgtga

SEQ ID NO: 473834 - DNA, 573 bp, Shigella flexneri
gtgaataataacctgcaaggagacgctatcgcagctgcgatagatgtcctcaatgaaaaacgtgtcatcgcctatccaacggaagccgttttcggtgtcgggtgcgatcctgatagcgaaacagcagtgatgagactgttggagttaaaacagcgtccggttgataaggggctgattttaatcgcggcaaattacgagcagcttaaaccctatattgatgacaccatgttgactgacgtgcagcgtgaaaccattttttcctgctggccaggtcctgtcacctttgtctttcccgcgcctgcgacaacaccgcgctggttgacgggccgctttgattcgcttgctgtacgagtcaccgaccatccgttggtggttgctttgtgccaggcttatggtaaaccgctggtttctaccagtgccaacttgagtggattgccaccttgtcgaacagtagacgaagttcgcgcacaatttggcgcggcgttcccggttgtgcctggtgaaacgggggggcgtttaaatccttcagaaatccgcgatgccctgacgggtgaactgtttcgacaggggtaa

SEQ ID NO: 473835 - DNA, 543 bp, Shigella flexneri
atggcaaaatcagcactgttcacggtgcgtaataatgagtcctgcccaaagtgcggggctgaactggttattcgatccgggaaacacggtccgtttcttggatgctcacagtatccggcgtgtgactacgtccgtcctctgaaatcttcagcggatggacatattgtcaaagttctggaggggcaggtttgccccgtatgtggcgcaaatctggtattacgccagggacgctttggtatgtttattggttgcagtaactaccctgaatgcgaacataccgaacttatcgataaaccggacgaaacagcaattacatgcccccaatgtcggacgggccatctggtccagcgccgctcccgttatggcaaaacatttcactcctgtgatcgctacccggagtgtcaatttgccattaacttcaaaccaatagctggagaatgccctgagtgtcattatccgctactcatcgaaaagaaaaccgcgcagggtgtaaaacacttttgtgccagtaaacaatgtggaaagccggtttcggcggaataa

SEQ ID NO: 473836 - DNA, 474 bp, Shigella flexneri
atgttcgacgtactaatgtatttgtttgaaacctatattcacactgaagctgagttgcgtgtggatcaagacaaacttgaacaggatcttaccgacgcaggttttgagcgagaagatatctacaatgccctgctatggctggaaaaacttgctgattatcaggaagggttggcagaaccgatgcaactggcctcggatcctctctccatgcgtatttatacaccggaagagtgtgaacgactggatgccagctgccgtgggtttctgcttttccttgagcagattcaggtgctcaaccttgaaactcgtgaaatggtgatagagcgagtgctcgcgctggataacgcagagttcgaactggatgatctgaaatgggtgatcctgatggtgttgttcaacatcccgggctgcgaaaatgcgtaccagcaaatggaagaattactctttgaagtgaatgaaggtatgctgcattaa

SEQ ID NO: 473837 - DNA, 1125 bp, Shigella flexneri
atggtcgatacagaaatttggctgcgtttaatgagcatcagcagcttgtacggcgatgatatggtccgtatcgctcactggctggcaaaacagtcgcatattgatgcggttgtattgcagcaaacagggcttacattgcggcaggcacaacgctttctttcatttccacgaaagagtatcgaaagctcactttgttggttggagcaacccaaccatcatttaatccctgcggacagcgaattttatcctcctcaacttcaggcgacgacagattaccccggcgcactgtttgttgaaggagaactgcacgcgctgcattcatttcagcttgccgtagtggggagtcgggcgcattcatggtatggcgagcgatgggggcgattattttgcgaaactctggcgacgtgtggagtgacaattacgagtggactggcgcgtggaatcgatggtgtggtgcataaagcggccttacaggtaaatggcgtcagcattgctgtattggggaatggacttaataccattcatccgcgtcgccatgcccgactggctgccagtctgtttgaacagggtggcgctctcgtctcggaatttcccctcgatgttccaccccttgcttacaatttcccacgaagaaatcgcattatcagtggtctaagtaaaggtgtactggtggtggaagcggctttgcgcagtggttcgctggtgacagcacgttgtgcgcttgagcaggggcgtgaagtttttgccttgccaggtccaatagggaatccgggaagcgaagggcctcactggttaataaaacaaggtgcgattcttgtgacggaaccggaagaaattctggaaaacttgcaatttggattgcactggttgccagacgcccctgaaaattcattttattcaccagatcagcaagacgtggcattgccatttcctgagctcctggctaacgtaggagatgaggtaacacctgttgacgtcgtcgctgaacgtgccggccaacctgtgccagaggtagttactcaactactcgaactggagttagcaggatggatcgcagctgtacccggcggctatgtccgattgaggagggcatgccatgttcgacgtactaatgtatttgtttga

SEQ ID NO: 473838 - DNA, 510 bp, Shigella flexneri
atgtcagttttgcaagtgttacatattccggacgagcggcttcgcaaagttgctaaaccggtagaagaagtgaatgcagaaattcagcgtatcgtcgatgatatgttcgagacgatgtacgcagaagaaggtattggcctggcggcaacccaggttgatatccatcaacgtatcattgttattgatgtttcggaaaaccgtgacgaacggctggtgttaatcaatccggagcttttagaaaaaagcggcgaaacaggcattgaagaaggttgcctgtcgatccctgaacaacgtgctttagtgccgcgcgcagagaaagttaaaattcgcgcccttgaccgcgacggtaaaccatttgaactggaagcagagggtctgttagctatctgtattcagcatgagatggatcacctggttggcaaactgtttatggattatctgtcaccgctgaaacaacaacgaattcgtcagaaagttgaaaaactggatcgtctgaaagcccgggcttaa

SEQ ID NO: 473839 - DNA, 948 bp, Shigella flexneri
gtgtcagaatcactacgtattatttttgcgggtacacctgactttgcagcgcgtcatctcgacgcgctgttgtcttctggtcataacgtcgttggcgtgttcacccagccagaccgaccggcaggacgcggtaaaaaactgatgcccagcccgattaaagttctggctgaggaagaaggtctgcccgtttttcaacctgtttccctgcgtccacaagaaaaccagcaactggtcgccgatttgcaggctgatgttatggtcgtcgtcgcctatggtttaattctgcctaaagctgtgctggagatgccgcgtcttggctgtatcaacattcatggttcactgctgccacgctggcgcggtgctgcaccaatccaacgctcactatgggcgggtgatgcagaaactggtgtaaccattatgcaaatggatgttggtttagacaccggtgacatgctctataagctctcctgcccgattactgcagaagataccagtggtacgctgtacgacaagctggcagagcttggcccacaagggcttatcaccacgttgaaacaattggcagacggcacggcgaaaccagaagttcaggacgaaactcttgtcacttacgccgagaagttgagtaaagaagaagcgcgtattgactggtcactttcggcagcacagcttgaacgctgcattcgcgctttcaacccatggccaatgagctggctggaaattgaaggacagccggttaaagtctggaaagcgtcggtcattgatacggcaaccaacgctgcaccaggaacgatccttgaagccaacaaacaaggcattcaggttgcgactggtgatggcatcctgaacctgctctcgttacaacctgcgggtaagaaagcgatgagcgcgcaagacctcctgaactctcgtcgggaatggtttgttccgggcaaccgtctggtctga

SEQ ID NO: 473840 - DNA, 1290 bp, Shigella flexneri
atgaaaaaacaacgtaatttacgtagcatggcggcccaggccgttgaacaagtcgtcgagcaagggcaatcattaagcaacattctgccaccgctccagcaaaaagtttccgataaagacaaagcacttcttcaagagttgtgctttggcgtactgcgtacgctttcgcagttagactggctgattaataagttaatggcccgtccgatgaccggcaaacagcgcactgtgcattacctgattatggttggtttgtatcaactgctttatacccgcattccacctcatgctgcgctggctgaaacggttgaaggcgctatcgcaattaagcgtccgcaacttaaagggttgattaacggtgtattacgccagttccagcgtcggcaagaagagttattagccgagtttaatacccgtgatgcacgttatctgcatccttcctggttgctgaagcgtctgcaaaaagcgtatccagagcagtggcaatccatcgccgaagccaataaccagcgtccgccaatgtggctgcgtattaatcgtacgcatcattcccgcgacagctggcttgcattgctggatgaagcaggaatgaaaggtttcccgcatgcggattaccctgatgctgtacggctggaaacacctgcacctgttcatgcgctacctggttttgaagacggatgggttaccgttcaggatgcatcagcacaaggttgcatgacctggcttgcgccacaaaacggtgaacacatcttggatctttgtgccgcccccggcggtaaaacaacgcatatccttgaggtggcaccagaagcgcaggttgttgcggttgatattgacgaacagcgcctctctcgcatttacgacaatttaaaacgccttggtatgaaggcaaccgtgaaacaaggtgatggccgttacccttcccaatggtgtggcgagcaacagtttgatcgcattttattagatgcgccttgttcagcaacgggggtgattcgtcgccatccagatattaaatggttacgtcgcgatcgcgatatcccggaactcgcgcaattgcagtctgaaattctcgacgccatttggccgcatttaaaatccggtggaaccctggtctatgccacctgttcggtgttaccggaagagaatagcctgcagattaaagcctttttgcaacgtaccgctgatgccgaactttgcgaaacaggaacaccagagcaaccgggtaaacaaaatcagcctggtgccgaagagggcgacggcttcttttacgctaagctaatcaaaaagtga

SEQ ID NO: 473841 - DNA, 1377 bp, Shigella flexneri
atgaaaattatcattctgggtgccggccaggttggcggcacactggcggaaaacctggttggcgagaacaacgatattactgttgtcgataccaacggtgagcgtctgcggaccttgcaggataaatttgacctgcgagtcgtgcaggggcatggctctcatccacgcgtattgcgggaggcaggtgccgacgacgccgatatgctggttgctgtaaccagttcagatgaaaccaatatggttgcctgccaggtagcctactcacttttcaacacccctaatcgcatcgctcgcatccgctcaccagactacgtacgcgatgccgataagctatttcattcagatgctgtaccgattgatcatctgatcgcaccagagcagttggttatcgataatatttaccgactgattgagtatccaggcgcattgcaggtggtgaacttcgctgagggtaaagtcagcctcgctgtagttaaagcctattatggcggcccgctgattggtaatgcactttcgaccatgcgcgaacatatgccacatatcgatactcgtgtggcagcaattttccgccacgatcgccccattcgtccacaaggttcgaccattgttgaagctggtgatgaagtgttctttattgccgcttcacagcatatccgcgcggtgatgagtgaattacagcgactggaaaaaccgtataaacggatcatgctggttggtggcggtaatatcggtgcagggctggcgcgtcgtctggaaaaagattacagcgttaaactcatcgaacgtaatcagcagcgcgctgccgaactggcggaaaagttgcagaatacgatcgtcttttttggtgatgcgtcggatcaagaactgctggccgaagaacatatcgatcaagttgatctgtttattgccgtcaccaacgatgacgaggccaatatcatgtccgccatgcttgccaaacgtatgggtgcgaaaaaggtgatggtattgatccagcgtcgcgcttatgtggatctggttcaggggagcgtgatcgatattgcaatttcaccacaacaagcaactatttctgcgttgcttagccatgtgcgaaaagcagatattgttggtgtttcctcattgcgccgcggcgtagcagaagctattgaagccgttgctcacggtgatgaaagcacctcacgcgttgtcggcagagtcattgacgaaatcaagctaccgccaggaacgattattggagcggtggtacgtggaaacgacgtgatgattgccaatgacaatctgcgcattgagcaaggcgatcacgtaattatgttcctcacagataaaaagtttattaccgacgtcgaaagactcttccagccaagccctttcttcttgtaa

SEQ ID NO: 473842 - DNA, 675 bp, Shigella flexneri
atgaattcccagacaacaaaagatattccctgcttccgttcttatttgcctgatgccctgcgtttaagatttgaagataaactgaccatccgggccatcgctcagcgtctgggtctcagtcattccacaatacatacgctttttcagcgatttcttgcatccggtatcgcatggccattgcccgattcagtttcattcgctcaacttgacgccatcctttatgccaacagaaagaaggaattaacagagcctcaaatcagagaaggctcatggcgaaaagaacggcgaaccagctatagccgtgaatttaaggtccgtctggctaagcaggcattacagcctggggctgttgttgcccggatcgccagagaacacgatatcaataataacctgctgtttaaatggaaaagccagtacgaggacggcttactgagcgatgatgacatacaggaatgcatgcctgtcccggtggcactgactgatacgccggagccgaccagaccagttacaaatcccttctggcgtaacaagcatgatgagcgccctgagggggctcccggaaacgtcccacggtgcgagctgcatcttaaatcaggtgtggtaaaactgtttgaccctctcactccggaactgttacgggcgctaatccgcgaaatgaaagggggtatccgatga

SEQ ID NO: 473843 - DNA, 741 bp, Shigella flexneri
atgtcagttattggtcgcattcactcctttgaatcctgtggaaccgtagacggcccaggtattcgctttatcacctttttccagggctgcctgatgcgctgcctgtattgtcataaccgcgacacctgggacacgcatggcggtaaagaagttaccgttgaagatttgatgaaggaagtggtgacctatcgccactttatgaacgcttccggcggcggcgttaccgcatccggcggtgaagcaatcctgcaagctgagtttgttcgtgactggttccgcgcctgtaaaaaagaaggcattcatacctgtctggataccaacggttttgttcgtcgttacgatccggtgattgatgaactgctggaagtaaccgacctagtaatgctcgatctcaaacagatgaacgacgagatccaccaaaatctggttggagtttccaaccaccgcacgctggagttcgctaaatatctggcgaacaaaaatgtgaaggtgtggatccgctacgttgttgtcccaggctggtctgacgatgacgattcggcacatcgcctcggtgaatttacccgtgatatgggtaacgttgagaaaatcgaacttctcccctaccacgaactgggcaaacacaaatgggtggcgatgggtgaagaatacaaactcgatggtgttaaaccaccgaagaaagagaccatggaacgcgtgaaaggcattcttgagcagtacggtcataaggtaatgttctaa

SEQ ID NO: 473844 - DNA, 2283 bp, Shigella flexneri
atgtccgagcttaatgaaaagttagccacagcctgggaaggttttaccaaaggtgactggcagaatgaagtaaacgtccgtgacttcattcagaaaaactacactccgtacgagggtgacgagtccttcctggctggcgctactgaagcgaccaccaccctgtgggacaaagtaatggaaggtgttaaactggaaaaccgcactcacgcgccagttgattttgacaccgctgttgcttccaccatcacctctcacgacgctggctacatcaataaagcgttggaaaaagttgttggtctgcagactgaagctccgctgaaacgtgctcttatcccgttcggtggtatcaaaatgatcgaaggttcctgcaaagcgtacaaccgcgaactggacccgatgatcaaaaaaatcttcactgaataccgtaaaactcacaaccagggcgtgttcgacgtttacactccggacatcctgcgttgccgtaaatccggtgttctgaccggtctgccagatgcttatggccgtggccgtatcatcggtgactaccgtcgcgttgcgctgtacggtatcgactacctgatgaaagacaaatacgctcagttcacctctctacaggctgatctggaaaacggcgtaaacctggaacagactatccgtctgcgcgaagaaatcgctgaacagcaccgcgctctgggtcagatgaaagaaatggctgcgaaatacggctacgacatctctggtccggctaccaacgctcaggaagctatccagtggacttacttcggctacctggctgctgttaagtctcagaacggtgctgcaatgtccttcggtcgtacctccaccttcctggatgtgtacatcgaacgtgacctgaaagctggcaagatcaccgaacaagaagcgcaggaaatggttgaccacctggtcatgaaactgcgtatggttcgcttcctgcgtactccggaatacgatgaactgttctctggcgacccaatctgggcaaccgaatctatcggtggtatgggcctcgatggtcgtaccctggttaccaaaaacagcttccgtttcctgaacaccctgtacactatggggccgtctccggaaccgaacatgaccattctgtggtctgaaaaactgccgctgaacttcaagaaattcgccgctaaagtgtccatcgacacctcttctctgcagtatgagaacgatgacctgatgcgtccggacttcaacaacgatgactacgctatcgcttgctgcgtaagcccgatgatcgttggtaaacaaatgcagttcttcggtgcgcgtgcaaacctggcgaaaaccatgctgtacgcaatcaacggcggcgttgacgaaaaactgaaaatgcaggttggtccgaagtctgaaccgatcaaaggcgatctcctgagctacgatgaagtgatggagcgcatggatcacttcatggactggctggctaaacagtacatcactgcactgaacatcatccactacatgcacgacaagtacagctacgaagcctctctgatggcgctgcacgaccgtgacgttatccgcaccatggcgtgtggtatcgctggtctgtccgttgctgctgactccctgtctgcaatcaaatatgcgaaagttaaaccgattcgtgacgaagacggtctggctatcgacttcgaaatcgaaggcgaatacccgcagtttggtaacaatgatccgcgtgtagatgacctggctgttgacctggtagaacgtttcatgaagaaaattcagaaactgcacacctaccgtgacgctatcccgactcagtctgttctgaccatcacttctaacgttgtgtatggtaagaaaactggtaacaccccagacggtcgtcgtgctggcgcgccgttcggaccgggtgctaacccgatgcacggtcgtgaccagaaaggtgctgtagcgtctctgacttccgttgctaaactgccgtttgcttacgctaaagatggtatctcctacaccttctctatcgttccgaacgcactgggtaaagacgacgaagttcgtaagaccaacctggctggtctgatggatggttacttccaccacgaagcatccatcgaaggtggtcagcacctgaacgttaacgtgatgaaccgtgaaatgctgctcgacgcgatggaaaacccggaaaaatatccgcagctgaccatccgtgtatctggctacgcagtacgtttcaactcgctgactaaagaacagcagcaggacgttattactcgtaccttcactcaatctatgtaa

SEQ ID NO: 473845 - DNA, 858 bp, Shigella flexneri
gtgaaagctgacaacccttttgatcttttacttcctgctgcaatggccaaagtggccgaagaggcgggtgtctataaagcaacgaaacatccgcttaagactttctatctggcgattaccgccggtgttttcatctcaatcgcattcgtcttctatatcacagcaaccactggcacaggcacaatgcccttcggcatggcaaaactggttggcggcatttgcttctctctggggctgattctttgtgttgtctgcggagccgatctctttacttccacagtgttgattgttgttgctaaggcgagtgggcgcatcacctggtgtcagttggctaaaaactggctaaatgtctattttggcaacctggtcggcgcactgctgtttgtacttttaatgtggctttccggcgagtatatgaccgcaaatggtcaatggggactaaacgtcctacaaaccgccgaccacaaagtgcaccatacttttattgaggccgtctgtcttggtatcctggcaaacctgatggtatgtctggcagtatggatgagttattctggccgcagcctgatggacaaagcgttcattatggtgctgccggtcgcgatgtttgttgccagcggttttgagcacagtatcgcaaacatgtttatgatcccgatgggtattgtaatccgcgacttcgcatctccggaattctggaccgctgtcggttctgcaccggaaaatttttctcacctgaccgtgatgaacttcatcactgataacctgatcccggttacgatcggtaatattatcggcggtggtttgttggttgggttgacatactgggtcatttacctgcgtgaaaacgatcaccattaa

SEQ ID NO: 473846 - DNA, 1761 bp, Shigella flexneri
atgacgcaaacatttatccccggcaaagatgccgctctggaagattccatcgctcgcttccagcaaaaactttcagacctcggctttcagattgaagaggcctcctggctgaatcccgtgcctaacgtctggtctgtacatattcgcgacaaagagtgcgcactgtgttttaccaacggtaaaggcgcaaccaagaaagcggcgctggcttctgcactcggtgaatatttcgagcgtctctcaaccaactacttttttgctgatttctggctgggcgaaaccatcgccaacggtccatttgtgcattatcccaacgaaaaatggttcccactgagcgaaaatgacgatgtgccagaagggctgctcgatgaccgtctgcgcgcattttacgatccggagaatgaattgaccggcagtatgctgattgacctacaatccggtaacgaagatcgtggtatttgcggtctgccgtttacgcgccagtccgacaatcagaccgtttatattccgatgaatatcattggtaacctgtacgtttctaacggtatgtccgctggcaatacccgcaacgaagcacgcgttcaggggttgtccgaagttttcgaacgctacgtgaaaaaccgcattattgctgaaagcatcagcttgccggaaatcccggcagacgtgctggcgcgttacccagcggtggttgaagcgatcgaaacactggaaacagaaggtttcccgatcttcgcatatgatggttcccttggcggccagtatccggtgatttgcgtggtactgtttaatcctgcaaacggcacctgctttgcctctttcggtgcgcatcctgattttggcgtagcactggaacgtaccgtgaccgagctgctgcaaggtcgtggcctgaaagatttggatgtgtttactccgccaaccttcgatgatgaagaagtcgctgaacataccaacctcgaaacgcactttatcgattccagcggtttaatctcctgggacctgttcaagcaggatgccgattatccgtttgtggactggaatttctccggcaccacggaagaagagtttgctacgctgatggctatcttcaacaaagaagataaagaagtttatattgccgattacgagcatctgggcgtttatgcttgccgtattatcgtgcctggcatgtccgatatttatccggctgaagatctgtggctcgcgaataacagtatgggcagccatttacgtgaaacgattctttcgctaccaggcagcaagtgggaaaaagaagattacctgaacctcatcgagcaactggatgaagaagattttgatgactttacccgcgtgcgtgagctgttgggtctggcgaccgggtcggataacggttggtacaccctgcgtatcggtgaattaaaagccatgctggcgctggctggtggcgatctggaacaggctctggtctggaccgaatggacgatggagtttaactcatcagtatttagtccggaacgcgccaactattatcgctgcctgcaaacgttgttattactggcacaggaagaagatcgccagccgctgcaatatctgaatgcgtttgttcgcatgtacggcgcagatgccgtagaagccgccagtgcggcaatgagcggcgaagcggcgttttacggcctgcaaccggtagatagcgatctgcacgcgtttgctgcacatcagtcgttgttgaaggcctacgaaaagctgcagcgcgccaaagcagcattctgggcaaaataa

SEQ ID NO: 473847 - DNA, 165 bp, Shigella flexneri
atgaccggaagacgcggtgtgcgacagatgtcgctgtttgaagtgttaatcattctcacgctgggttcagcggcgggagatgtggcgttttatgatgatgtgccgatggtgccggtacttatcgtctttatcactctggcgttgttataccgcctggtaatatga

SEQ ID NO: 473848 - DNA, 291 bp, Shigella flexneri
atggagctacgattgcgtggcgtggagcagctggggcaggtacgtctggcgattctcgaaaccaacgggcaaatcagtgtctatttctttgaagatgacaaggtgaaaccgggtttacttattttacccagtgattgtacgcagcgttacaaagtggtgccggagtcggcggactatgcctgcattcgttgtagtgaaatcattcatatgaacgcgggggaaaaacaattatgtccgcgctgtgcaaatccagaatggacgaaggcaagtcgggcaaaacgggtgacctga

SEQ ID NO: 473849 - DNA, 1089 bp, Shigella flexneri
atggctcaaatcttcaattttagttctggtccggcaatgctaccggcagaggtgcttaaacaggctcaacaggaactgcgcgactggaacggtcttggtacgtcggtgatggaagtgagtcaccgtggcaaagagttcattcaggttgcagaggaagccgagaaggattttcgcgatcttcttaatgtctcctccaactacaaggtattattctgccatggcggtggtcgcggtcagtttgctgcggtaccgctgaatattctcggtgataaaaccaccgcagattatgttgatgccggttactgggcggcaagtgccattaaagaagcgaaaaaatactgcacgcctaatgtctttgacgccaaagtgactgttgatggtctgcgcgcggttaagccaatgcgtgaatggcaactctctgataatgcggcttatatgcattactgcccgaatgaaaccatcgacggtatcgccatcgacgagacgccagacttcggcaaagatgtggtggtcgccgccgacttctcttcaaccattctttcccgtccgattgacgtcagccgttatggtgtaatttacgctggcgcgcagaaaaatatcggcccggctggcctgacaatcgtcatcgttcgtgaagatttgctgggcaaagcgaatatcgcgtgtccgtcgattctggattattccatcctcaacgataacggctccatgtttaacacgccgccgacatttgcctggtatctatctggtctggtctttaaatggctgaaagcgaacggcggtgtagctgaaatggataaaatcaatcagcaaaaagcagaactgctatatggggtgattgataacagcgatttctaccgcaatgacgtggcgaaagctaaccgttcgcggatgaacgtgccgttccagttggcggacagtgcgcttgacaaattgttccttgaagagtcttttgctgcaggccttcatgcactgaaaggacaccgtgtggtcggcggaatgcgcgcgtctatttataatgccatgccgctggaaggcgttaaagcgctgacagacttcatggttgagttcgaacgccgtcacggttaa

SEQ ID NO: 473850 - DNA, 1284 bp, Shigella flexneri
atggaatccctgacgttacaacccatcgctcgtgtcgatggcactattaatctgcccggttccaagagcgtttctaaccgcgctttattgcttgcggcattagcacacggcaaaacagtattaaccaatctgctggatagcgacgacgtgcgccatatgctgaatgcattaacagcgttagggttaagctatacgctttcagccgatcgtacgcgttgcgaaattatcggtaacggcggtccattacacgcagaaggtgccctggagttgttcctcggtaacgccggaacggcaatgcgtccgctggcggcagctctttgtctggatagcaatgatattgtgctgaccggtgagccgcgtatgaaagagcgcccgattggtcatctggtggatgcgctgcgcctgggcggggcgaagatcacttacctggaacaagaaaattatccgccgttgcgtttacagggcggctttactggcggcaacgttgacgttgatggctccgtttccagccaattcctcaccgcactgttaatgactgcgcctcttgcgccggaagatacggtgattcgtattaaaggcgatctggtttctaaaccttatatcgacatcacactcaatctgatgaagacgtttggtgttgaaattgaaaatcagcactatcaacaatttgtcgtaaaaggcgggcagtcttatcagtctccgggtacttatttggtcgaaggcgatgcatcttcggcttcttacttcctggcagcagcagcaatcaaaggcggcactgtaaaagtgaccggtattggacgtaacagtatgcagggtgatattcgctttgctgatgtgctggaaaaaatgggcgcgaccatttgctggggcgatgattatatttcctgcacgcgtggtgaactgaacgctattgatatggatatgaaccatattcctgatgcggcgatgaccattgccacgccggcgttatttgcaaaaggcaccaccacgctgcgcaatatctataactggcgtgttaaagagaccgatcgcctgtttgcgatggcaacagaactgcgtaaagtcggcgcggaagtggaagaggggcacgattacattcgtatcactcctccggaaaaactgaactttgccgagatcgcgacatacaatgatcaccggatggcgatgtgtttctcgctggtggcgttgtcagatacaccagtgacgattcttgatcccaaatgcacggccaaaacatttccggattatttcgagcagctggcgcggattagccaggcagcctga

SEQ ID NO: 473851 - DNA, 996 bp, Shigella flexneri
atgaagcaaacagtttatatcgccagccctgagagccagcaaattcacgtctggaacctgaatcatgaaggcgcactgacgctgacacaggttgtcgatgtgccggggcaggtgcagccgatggtggtcagcccggacaaacgttatctctatgttggtgttcgccctgagtttcgcgtcctggcgtatcgtattgccccggacgatggcgcactgacctttgccgcagagtctgtgctgccgggtagtccgacgcatatttccaccgatcaccaggggcagtttgtctttgtaggttcttacaatgcgggtaacgtgagcgtaacgcgtctggaagatggcctgccagtgggcgtcgtcgatgtagtcgaggggctggacggttgccattccgccaatatctcaccggacaaccgtacgctgtgggttccggcattaaagcaggatcgcatttgcctgtttacggtcagcgatgatggtcatctggtggcgcaggaccctgcggaagtgactaccgttgaaggggccggcccgcgtcatatggtattccatccaaacgaacaatatgcgtattgcgtcaatgagttaaacagctcagtggatgtctgggaactgaaagatccgcacggcaatatcgaatgtgtccagacgctggatatgatgccggaaaacttctccgacacccgttgggcggctgatattcatatcaccccggatggtcgccatttatacgcctgcgaccgtaccgccagtctgattaccgttttcagcgtttcggaagatggcagcgtgttgagtaaagaaggcttccagccaacggaaacccagccgcgcggcttcaatgttgattacagcggcaagtatctgattgccgctgggcaaaaatctcaccacatctcggtatacgaaattgttggcgagcaggggctactgcatgaaaaaggccgctatgcggtcgggcagggaccaatgtgggtggtggttaacgcacactaa

SEQ ID NO: 473852 - DNA, 378 bp, Shigella flexneri
atgattggcgtacgttcctccagcggcaaccgattgttgatagaacaacagctagccgacaagccctggaagctggactggttttacgaagtgcgtcatctttcgacgtcattaggactagtggaggcaggactggggatttcggcgcttcctggtctggcaatgccccatgcgccctattcttcgattattggtatcccactggtggaacccgttatacgtcggacattggggattattcgccgcaaagatgccgtgctttctccggcagctgaacgctttttttccttgctgattaatttgtggactgacgataaagacaatttgtggaccaatatcgtcgaacgccagagacatgcgttacaggagataagttaa

SEQ ID NO: 473853 - DNA, 543 bp, Shigella flexneri
atgaagcatgaattatcaagtatgaaggcatttgtcatactggcagagtccagttcatttaacaatgccgctaaattactcaatattacgcaacctgcattaacgcgaagaataaaaaagatggaggaagatttacatattcaactatttgagcgtacaactcgcaaggttacgttaacaaaagcaggaaaaaggttgctcccggaggcgcgggaattaataaagaaattcgatgaaacgctttttaatattcgtgatatgaatgcttatcatcgtggtatggtgacattagcgtgtattccgaccgcagtattttattttttaccgctggcaatcggtaaatttaatgagctgtatcccaatattaaagtgcggattctggaacaaggcacgaataattgcatggaatcggtgctgtgtaacgaatcagactttggcataaacatgaacaacgtcacaaattcatccattgattttaccccactggtcaacgagccattcgtgctggcctgtcggcgtgaccatccattggccaaaaagtag

SEQ ID NO: 473854 - DNA, 1053 bp, Shigella flexneri
atgaaaaaaataccctgcgtgatgatgcgaggtggaacctcgaggggcgcgttcctgttagcggaacatttacccgaagatcaaacgcagcgcgataaaatattgatggcaattatgggttccggtaacgatctggaaattgacggtattggcggcggtaatccactgaccagtaaagtcgccattattagccgttccagcgatccgcgtgctgatgtcgattatctgtttgctcaagttatcgtccatgagcaacgtgtcgataccacgcctaactgcggcaatatgctgtctggcgtaggggcattcgccattgaaaatggtttgattgcagcgacttcgccagttacccgtgtacgtatccgcaacgtcaatacgggtacgttcatcgaagctgatgtgcaaacgccaaatggtgttgtcgagtacgagggtagcgccagaattgacggcgtaccgggtactgccgcaccggttgcgctcactttcctgaatgccgctggaacgaaaaccggaaaagttttcccgactgataatcagattgattattttgacgatgtcccggtgacctgtatcgatatggcgatgccagtcgtcattattccggctgaatatctgggaaaaacaggttatgaattaccggcggaactggatgccgacaaagcattattagcccgcattgaatctatccggctacaagcgggtaaagcaatgggcttaggtgatgtcagtaatatggttatccctaaacctgtgcttatttctccagcgcagaaaggcggggcaattaatgtgcgttattttatgccgcattcttgccatcgcgcgctggcgataaccggtgctattgctatttccagtagttgtgcattggaaggcaccgtcacccgacaaatcgtcccttctgtaggatatggcaatatcaatattgaacaccccagtggtgcgctcgacgttcatttaagtaatgaaggtcaggatgccacgacgttacgcgcatctgttattcggacaaccagaaaaatattttccggtgaagtttatcttccctga

SEQ ID NO: 473855 - DNA, 1434 bp, Shigella flexneri
atgaataagaaatcgttatggaagctaattctgatattagcgatcccatgtattattggttttatgccagctccggcaggattaagcgaactggcgtgggtgctttttggtatttacctggcggccattgtgggtctggttatcaagcctttcccggaacctgtcgtactgttaattgccgttgctgcctcaatggtggtggtcggtaacttatccgacggtgcgtttaagaccaccgccgtattaagcggttactcttcaggtactacctggctggtgttctcggcgtttaccttaagcgccgcatttgtgaccaccggtttaggtaaacttattgcctatctgctgattggtaaaatcggtaacaccatgctgggtctgggttacgttacggtattcctcgatctggtactggctccggcaacaccgtctaacaccgcgcgtgcgggcggcattgtgttaccgatcatcaacagcgtggcggtggctttggggtccgaaccggaaaaaagtccgcgtcgtgtcggacattacctgatgatgtccatttacatggtcaccaaaaccaccagctatatgttctttaccgcaatggcggggaacattctggcgctgaaaatgatcaacgacattctgcacctgcaaattagctggggtggatgggcgctggccgccggattgccgggcatcattatgctgctggtcaccccgctggtaatttacaccatgtatccaccagaaattaaaaaggtggataacaaaaccatcgctaaagcgggccttgccgaactgggaccgatgaaaatccgcgaaaaaatgctgctcggtgtctttgtgctggcgctactgggctggattttcagtaagtctctgggggttgatgaatccactgtggcaatcgttgttatggcgaccatgctgctgctgggtatcgttacctgggaagacgtggttaaaaataaaggcggctggaataccttaatctggtacggcggtattatcggcttaagctccttattatcgaaagttaaatttttcgaatggttagctgaagtctttaaaaataacctggcatttgatggtcacggtaacgttgctttcttcgttattattttcctcagcatcatcgtgcgttatttcttcgcttccggtagtgcctatatcgttgctatgttacctgtatttgccatgctggcgaacgtctccggcgcaccgttaatgttaaccgcgctggcactgttgttctccaactcctatggcggcatggttactcactatggcggcgcggcaggtccggtcatctttggcgtgggttacaacgatattaaatcctggtggttggtcggtgcggtactgacgatattaaccttcttggtgcatatcaccctcggcgtgtggtggtggaatatgctgatcggctggaacatgctgtaa

SEQ ID NO: 473856 - DNA, 2181 bp, Shigella flexneri
atgatcaagttatctgaaaaaggcgtgtttctcgccagtaataacgaaataattgccgaagaacatttcaccggcgaaattaaaaaagaagaagcaaaaaaaggcactattgcctggtctattctctcttctcataatacgtccggaaatatggataaacttaaaattaagtttgattcattagcctctcacgatattacctttgttggtattgtacagaccgctaaagcgtccggaatggaacgtttcccgctgccgtatgtgctgaccaactgccataactcactctgcgccgtcggcggcaccattaacggtgatgaccatgtttttggtttatcggcagctcagcgttatggcggtatttttgtgcctccgcatattgcggtcatccatcaatatatgcgtgagatgatggctggcgggggcaaaatgatcctcgggtcagacagccacacccgttacggtgcattagggacaatggcagtcggtgagggtggcggtgagttggtaaaacagctgcttaatgacacctgggatatcgactatccgggcgtggttgcggtgcatctgaccggaaaacctgcgccgtatgtggggccacaggatgtggcgctggctatcattggcgcggtgttcaaaaacggttacgtcaaaaacaaagtcatggagttcgttggaccgggcgttagcgcgctctctaccgatttccgtaacagcgttgacgtgatgaccacggaaaccacctgtttaagctccgtctggcaaactgatgaagaagtgcataactggctggcgctgcacggtcgcggccaggattactgccagcttaaccctcaaccgatggcgtactacgatggctgcatcagcgttgatttaagcgccatcaaaccaatgattgcgctgccgttccacccgagcaacgtgtatgaaatcgacacactgaaccagaacctgaccgacattctgcgtgagattgaaattgagtccgaacgcgtggcgcacggtaaagccaaactctcgctgctggataaagtggaaaatggtcgcctgaaagtgcagcaggggattatcgcgggctgttctggcggtaactacgaaaacgtcatcgcggcggcgaatgcactgcgcggtcaatcctgtggcaatgacaccttctcgctggcggtttacccgtcatcacagccggtgtttatggatctcgccaaaaaaggtgtggtagcagatttgattggcgcaggcgcaatcatcagaaccgcattctgtggcccatgctttggcgcgggcgatacgccaatcaacaacggtttgagtattcgccacaccacgcgtaacttcccgaaccgcgaaggctctaagccagccaatgggcagatgtcagcggtggcgttgatggacgctcgttctatcgctgcgactgcggcaaacggtggctatttaacctctgccagcgaacttgattgctgggacaacgtgccggagtacgccttcgatgtaacgccgtataaaaaccgtgtttatcagggctttgtgaaaggggcaactcagcaaccgctgatttacggaccgaacattaaagactggccggaattgggtgcgctgactgacaatatcgtcctgaaagtgtgctcgaagatcctcgacgaagtcaccaccaccgacgaactgattccttccggtgaaacctcttcttatcgttcaaatccgattggtctggcggggaatgtcagcgagctgacagaggtgtttgcgcgcattaagcagattgctggtcaggagcatattgatccgctgcaaactgaaattggcagcatggtctatgcggtgaaaccaggcgatggttctgcgcgtgaacaggcggcgagctgccagcgtgtgattggcggtctggcgaatattgccgaggagtacgcgactaaacgctaccgttctaacgtcatcaactgggggatgttaccgctgcagatggcggaagtgccaacctttgaagtgggggattacatttacatccctggcattaaagcggcgctggataatccgggtacgacgtttaaaggttatgtgatccatgaagatgcgccggtaacggaaattacgctttacatggaaagcctgacggctgaagagcgcgagattatcaaggcgggtagtttgattaacttcaataaaaaccgtcagatgtaa

SEQ ID NO: 473857 - DNA, 462 bp, Shigella flexneri
gtgaccaacagctatattgaaggggatgtggatatcgtttctggtcgcggcgcagtggtgttcgataacaccgaattccgcgtggtgaactcacgtacccagcaagaagcatatgtgtttgcaccggctacgctgtctaacatctattacggtttcctcgccgtaaacagccgtttcaatgcttccggtgatggcgtggcgcaactgggccgctcgctggatgttgatgctaataccaacggtcaggtggtgatccgtgatagcgccatcaacgaaggttttaacacggctaaaccgtgggccgatgcggtgatctctaatcgtccgtttgcgggtaataccggcagcgtagatgataacgacgaaatacagcgcaatctgaatgacactaactacaaccgcatgtgggaatacaataaccgcggcgtgggcagcaaagtggttgcagaggcgaagaagtaa

SEQ ID NO: 473858 - DNA, 786 bp, Shigella flexneri
gtgaacacattttcagtttcccgtctggcgctggcattggcttttggcgtgacgctgaccgcctgtagctcaacaccacccgatcaacgtccttctgatcaaactgcgcctggtacctcttctcgcccgattctgtcggcaaaagaagcgctgaatttcgatgcgcaacactattttgcatccctgacaccaggtgctgcagcgtggaatccgtccccgataaccctgcctgcgcaacctgactttgttgtcggcccggcgggtactcaaggtgtaacgcataccacgattcaggcggcggtagatgcggcaattatcaagcgcaccaacaagcgccagtatattgccgtgatgcctggtgagtatcagggaacggtgtatgtccctgctgctccaggtggaatcactctgtacggtacaggtgaaaaaccgattgatgtgaagattgggctttcccttgatgggggcatgagccctgccgactggcgtcacgacgtcaacccgcgcggcaaatatatgccaggtaaaccagcgtggtatatgtacgatagctgccagagcaaacgcagcgacagtatcggtgttctgtgttctgcggtcttctggtcacaaaacaatggactgcaactgcaaaatctgaccatcgaaaacacgctgggcgatagcgtagatgcaggtaaccatccggcggtagcactgcgtactgacggtgaccaagtacagattaacaacgttaacattctcggtcgtcagaacaccttctttgtcaccaacagcggtgtgtag

SEQ ID NO: 473859 - DNA, 771 bp, Shigella flexneri
atgagcaaaattaaagcaataaggagggggctgcctgatgctccacttgaagacatcaccacaaaagaaattgcggcaatgctcaatggatacatagacgagggcaaggcggcatcagccaagttaatcagatcaacactgagcgatgcattccgagaggcaatagctgaaggccatataacaacaaacccggtcgctgccactcgcgcagcaaaatcagaggtaaggagatcaagacttacggctgacgaatacctgaaaatttatcaagcagcagaatcatcaccatgttggctcagacttgcaatggaactggctgttgttaccgggcaacgagttggtgatttatgcgaaatgaagtggtctgatatcgtagatggatatctttatgtcgagcaaagcaaaacaggcgtaaaaattgccatccctacaacattgcatgttgatgctctcgggatatcaatgaaggaaacacttgataaatgcaaagagattcttggcggagaaaccataattgcatctactcgtcgtgaaccgctttcatccggcacagtatcaaggtattttatgcgcgcacgaaaagcatcaggtctttccttcgaaggggatccacctacctttcacgagttgcgcagtttgtctgcaagactctatgagaagcagataagcgataagtttgctcaacatcttctcgggcacaagtcggacaccatggcatcacagtatcgtgatgacagaggcagggagtgggacaaaattgaaatcaaataa

SEQ ID NO: 473860 - DNA, 1029 bp, Shigella flexneri
atggcgcatattgtaaccctaaataccccatccagagaagattggttaacgcaacttgccgatgttgtgaccgatcctgatgaacttctgcgtcttttgaatatagacgcggacgaaaaactgttggccggacgcagcgccaaaaagctgtttgccctgcgtgtgccccgctcatttatcgatcgcatggagaaaggcaatccggacgatcctcttttgcgtcaggtacttacctcgcaagatgagtttgtcgtcgcgtccggattctccaccgacccactggaagaacagcacagcgtagtgcctggtttgttgcataaataccacaaccgggcgcttttgctggtcaaaggcggctgcgcggtaaattgccgctattgcttccgtcgccacttcccctatgccgaaaatcagggcaacaagcgtaactggcagactgcacttgagtatgttgctgcgcatccggaactggacgagatgattttctccggcggcgatccgctgatggcgaaagagcacgagctggactggttgctcacacaactggaagccatcccgcatatcaaacgtctgcggattcacagccgtctgccgattgtgatcccggcacgtatcaccgaggcgctggttgaacgctttgcccgttctacgctgcaaatcttgctggtgaatcacatcaatcatgccaatgaggtagatgaaacgttccgtcaggcgatggctaaattgcgccgtgtcggtgtcaccctgcttaaccagagcgttctgttacgtggtgtgaacgataacgcacaaacgttggcaaacctgagtaatgcgttgttcgatgccggcgtgatgccgtattacctgcatgtgctagataaagtacagggcgcggcgcattttatggtgagtgatgacgaagcacggcagattatgcgtgagttgctgacattggtgtcgggatatctggtgccgaaactggcgcgagaaattggcggcgaacccagcaaaacgccgctggatctccagctacgccagcagtaa

SEQ ID NO: 473861 - DNA, 567 bp, Shigella flexneri
atggcaacgtactatagcaacgattttcgtgctggtcttaaaatcatgttagacggcgaaccttacgcggttgaagcgagtgaattcgtaaaaccgggtaaaggccaggcatttgctcgcgttaaactgcgtcgtctgctgaccggtactcgcgtagaaaaaaccttcaaatctactgattccgctgaaggcgctgatgttgtcgatatgaacctgacttacctgtacaacgacggtgagttctggcacttcatgaacaacgaaactttcgagcagctgtctgctgatgcaaaagcaattggcgacaatgctaaatggctgctggatcaggcagagtgtatcgtaactctgtggaatggtcagccgatctccgttactccgccgaacttcgttgaactggaaatcgttgataccgatccgggcctgaaaggtgataccgcaggtactggcggcaaaccggctaccctgtctactggcgctgtggttaaagttccgctgttcgtacaaatcggcgaagtcatcaaagtggatacccgctctggtgaatacgtctctcgcgtgaagtaa

SEQ ID NO: 473862 - DNA, 126 bp, Shigella flexneri
atgatgaaacgccttatcgttcttgttttgcttgccagcacgctgctcacgggctgtaacaccgcttgcggtttcggcgaagacatcaaacatctcggtaactccatctctcgcgctgccagctaa

SEQ ID NO: 473863 - DNA, 147 bp, Shigella flexneri; identical to SEQ ID NO: 2211

SEQ ID NO: 473864 - DNA, 318 bp, Shigella flexneri
atgtcctggattatcttagttattgctggtctgctggaagtggtatgggccgttggcctgaaatatacccacggctttagccgtttgacgccgagtgttattaccgtgacggcgatgatagtcagtatggcgctacttgcctgggcgatgaaatcgttaccggtagggacggcttatgccgtgtggacgggtattggcgcagtcggcgcggccatcaccggcattgtgctgctcggtgagtccgctaacccgatgcgtctggcgagtctggcgttaatcgtattggggattattggtctgaaactcagcactcactaa

SEQ ID NO: 473865 - DNA, 534 bp, Shigella flexneri
atgcgcctgctccctctcgttgccgcagcgacagctgcatttctggtcgttgcctgtagttttcctacgccgccgcgtggcgtgaccgtagtgaataatttcgacgccaaacgttatctcggtacctggtatgagattgcccgttttgatcaccgttttgaacgtggactggaaaaagtcaccgcaacatacagcctgcgtgatgacggcggcctgaatgtcattaataaaggctataaccctgacagaggaatgtggcagcagagtgaagggaaagcgtactttaccggcgcaccaactcgcgctgcgctgaaagtgtcattctttggtcctttctatggcggttataacgttattgcactcgatcgggaataccgccatgcgctggtttgcggcccggaccgcgactacctgtggatactctcccgcacgccaaccatttctgacgaagtgaaacaggagatgctggcagtcgcgacccgggaagggtttgatgtcagtaagtttatttgggtacagcagcccggtagttag

SEQ ID NO: 473866 - DNA, 1134 bp, Shigella flexneri
atgttcaaaacgacgctctgcgccttattaattaccgcctcttactccacatttgctgcccctcaacaaatcaacgatattgtgcatcgcacaattaccccgcttatagagcaacaaaagatccccggtatggcggtggcggtaatttatcagggtaaaccttattactttacctggggctatgcggacatcgccaaaaagcagcccgtcacacagcaaacgttgtttgagttaggttcggtcagcaaaacatttacgggcgtgcttggtggcgacgctattgctcgaggggaaatcaagttaagcgatcccgcaacaaaatactggcctgaacttaccgctaaacagtggaatgggatcacactattacatcttgcgacctacaccgctggcggcctgccattgcaggtgccggatgaagtgaaatcctcaagcgacttgctgcgcttctatcaaaactggcagcctgcatgggctccaggaacacaacgtctgtatgccaactccagtatcggtttgttcggcgcactggctgtgaagccgtctggtttgagttttgagcaggcgatgcaaactcgtgtcttccagccactcaaactcaaccatacgtggattaatgtacctcccccagaagaaaagaattacgcctggggatatcgcgaaggtaaggcagtgcatgtttcgccaggggcgttagatgctgaagcttatggtgtgaagtcgaccattgaagatatggcccgctgggtgcaaagcaatttacccccccttgatatcaatgagaaaacgcttcaacaagggatacaactggcacaatctcgctactggcaaaccggcgatatgtatcagggcctgggctgggaaatgctggactggccggtcaatcctgacagcatcattaacggcagtgacaataaaattgcactggcagcacgcccggtaaaagcgattaagcccccaactcctgcagtacgcgcatcatgggtacataaaacgggggcgaccggcggatttggtagctatgtcgcgtttattccagaaaaagagctgggtatcgtgatgctggctaacaaaaactatcccaatccagcgagagtcgccgccgcctgtcagattctcaacgctctacagtaa

SEQ ID NO: 473867 - DNA, 360 bp, Shigella flexneri
atgattaatccaaatccaaagcgttctgacgaaccggtattctggggcctcttcggggccggtggtatgtggagcgcaattattgcgccggtgatgatcctgctggtgggtattctgctgccactggggctgtttccgggtgatgcgctgagctacgagcgcgttctggcgttcgcgcagagcttcattggtcgcgtattcctgttcctgatgatcgttctgccgctgtggtgtggtttacaccgtatgcaccacgcgatgcacgatctgaaaatccacgtgcctgcgggcaaatgggttttctacggtctggctgctatcctgacagttgtcacgctgattggtgtcgttacaatctaa

SEQ ID NO: 473868 - DNA, 396 bp, Shigella flexneri
atgacgactaaacgtaaaccgtatgtacggccaatgacgtccacctggtggaaaaaattgccgttttatcgcttttacatgctgcgcgaaggcacggcggttccggctgtgtggttcagcattgaactgattttcgggctgtttgccctgaaaaatggcccggaagcctgggcgggattcgtcgactttttacaaaacccggttatcgtgatcattaacctgatcactctgacggcagctctgctgcacaccaaaacctggtttgaactggcaccgaaagcggccaatatcattgtaaaagacgaaaaaatgggaccagagccaattatcaaaagtctctgggcggtaactgtggttgccaccatcgtaatcctgtttgttgccctgtactggtaa

SEQ ID NO: 473869 - DNA, 735 bp, Shigella flexneri
atggctgagatgaaaaacctgaaaattgaggtggtgcgctataacccggaagtcgataccgcaccgcatagcgcattctatgaagtgccttatgacgcaactacctcattactggatgcgctgggctacatcaaagacaacctggcaccggacctgagttaccgctggtcctgccgtatggcgatttgtggttcctgcggcatgatggttaacaacgtgccaaaactggcatgtaaaaccttcctgcgtgattacaccgacggtatgaaggttgaagcgttagctaacttcccgattgaacgcgatctggtggtcgatatgacccacttcatcgaaagtctggaagcgatcaaaccgtacatcatcggcaactcccgcaccgcggatcagggtactaacatccagaccccggcgcagatggcaaagtatcaccagttctccggttgcatcaactgtggtctgtgctacgccgcgtgcccgcagtttggcctgaacccagagttcatcggtccggctgccattacgctggcgcatcgttataacgaagatagccgcgaccacggtaagaaggagcgtatggcgcagttgaacagccagaacggtgtatggagctgtactttcgtgggctattgctccgaagtctgcccgaaacacgtcgatccggctgcggccattcagcagggcaaagtagaaagttcgaaagactttcttatcgcgaccctgaaaccacgctaa

SEQ ID NO: 473870 - DNA, 1809 bp, Shigella flexneri
gtgcaaacctttcaagccgatcttgccattgtaggcgccggtggcgcgggattacgtgctgcaattgctgccgcgcaggcaaatccaaatgcaaaaatcgcactaatctcaaaagtatacccgatgcgtagccataccgttgctgcagaagggggctccgccgctgtcgcgcaggatcatgacagcttcgaatatcactttcacgatacagtagcgggtggcgactggttgtgtgagcaggatgtcgtggattatttcgtccaccactgcccaaccgaaatgacccaactggaactgtggggatgcccatggagccgtcgcccggatggtagcgtcaacgtacgtcgcttcggcggcatgaaaatcgagcgcacctggttcgccgccgataagaccggcttccatatgctgcacacgctgttccagacctctctgcaattcccgcagatccagcgttttgacgaacatttcgtgctggatattctggttgatgatggtcatgttcgcggcctggtagcaataaacatgatggaaggcacgttggtgcagatccgtgctaacgcggtcgttatggctaccggcggtgcgggtcgcgtttatcgttacaacaccaacggcggcatcgttaccggtgacggtatgggtatggcgctaagccacggcgttccgctgcgtgacatggaattcgttcagtatcacccaaccggtctgccaggttccggtatcctgatgaccgaaggctgccgtggtgaaggcggtattctggtcaacaaaaatggctaccgttatctgcaagattacggcatgggcccggaaactccgctgggcgagccgaaaaacaaatatatggaactgggtccacgcgacaaagtttctcaggccttctggcacgaatggcgtaaaggcaacaccatctccacgccgcgtggtgatgtggtttatctcgacctgcgtcacctcggcgagaaaaaactgcatgaacgtctgccgttcatctgcgaactggcgaaagcgtacgttggcgtcgatccggttaaagaaccgattccggtacgtccgactgcacactacaccatgggcggtatcgaaaccgatcagaactgtgaaacccgcattaaaggtctgttcgccgtgggtgaatgttcctctgttggtctgcacggtgcaaaccgtctgggctccaactccctggcggaactggtggtcttcggccgtctggccggtgaacaagcgacagagcgtgcagcaactgccggtaatggcaacgaagcggcaattgaagcgcaggcagctggcgttgaacaacgtctgaaagatctagttaaccaggatggcggcgaaaactgggcgaagatccgcgacgaaatgggcctggcaatggaagaaggttgcggtatctaccgtacgccggaactgatgcagaaaaccatcgacaagctggcagagctgcaggaacgcttcaagcgcgtgcgcatcaccgacacctccagcgtgttcaacaccgacctgctctacaccattgaactgagccacggtctgaacgttgctgaatgtatggcgcactccgcaatggcacgtaaagagtcccgcggcgcacaccagcgtctggacgaaggttgcaccgagcgtgacgacgtcaactttctcaaacacaccctcgccttccgcgatgctgatggcacgactcgcctggagtacagcgacgtgaagattactacgctgccgccagctaaacgcgtttacggtggcgaagcggatgcagccgataaggcggaagcagccaataataaggagaaggcgaatggctga

SEQ ID NO: 473871 - DNA, 978 bp, Shigella flexneri
atgagcgaaacggcatcctggcagccgagcgcatccattcctaacttattaaaacgcgcggcgattatggcggagatccgtcgtttctttgccgatcgtggagtgctggaggtggagacgccttgtatgagccaggcgacggtaaccgatattcatttggtcccgtttgagacacgtttcgttggccccgggcattcgcaggggatgaatctctggttaatgaccagcccggaataccatatgaaacgcctgctggttgctggttgtgggccggtattccagctgtgccgcagcttccgtaatgaagagatggggcgttatcacaaccctgagttcactatgctggagtggtatcgaccgcactatgatatgtaccggttgatgaacgaggtggacgatctcttacaacaggtgctggactgcccggcagcagaaagcctttcttatcaacaagctttcttgcgttatctggaaattgacccgctctctgccgacaaaacgcaactgcgggaagtcgcagcgaaactggatttgagcaatgttgctgataccgaagaagaccgcgacacgttgctacaattgctgtttacctttggcgtagagccaaatattggtaaagaaaaaccgacctttgtgtaccactttccagccagccaggcatcactggcgcaaatcagtaccgaagatcatcgggtcgctgaacgctttgaggtttattataaaggtattgagctggcgaatggtttccatgaattaacggatgcccgtgagcagcaacaacgctttgaacaagataaccgtaagcgcgcggcgcgcggtttgccgcagcaccccattgaccagaatctgattgaagccttgaaagtcggtatgcctgactgttccggcgtggcattaggtgttgatcgtctggtgatgttggcgctgggcgcggagacactggctgaagtcatcgcctttagcgttgaccgggcataa

SEQ ID NO: 473872 - DNA, 189 bp, Shigella flexneri
atgcctcacacgataaaaaagatgagtctgataggactcatattgatgatctttacttccgtatttggatttgccaatagcccatcggcttattacttaatgggttatagtgcgattcccttttatatattttctgcattgttattctttattccattcgccttaatggtaatgactccaacttactga

SEQ ID NO: 473873 - DNA, 1524 bp, Shigella flexneri
atgcgcaatacactcatacccatcctcgttgcgatatgcttgtttattaccggtgtcgctattttgaacatccagctctggtattccgcaaaagcagagtacctggcgggagcaagatatgccgccaacaatatcaatcatatacttgaagaagcgtcacaggcgactcaaacagcggttaacattgccgggaaggaatgcgacctcgaggagcaatatcagcttggcactgaagcagctctgaaacctcacctgcgcacaatcatcattctcaaacagggaatagtctggtgtacatccctgcctgggaatcgggtcctgctgtctcgtattcctgttgtcccggacagtaatttactgttggctccggcaatcgacaccgttaatagattacctatcctgctctatcagagccaatttgcagatacgcgcattttggttacgataagtgatcaacatattcgcggggcgcttaatgtacccttgaaaggggtaaggtatgtattacgcgtggcggatgacattattggaccaacgggtgatgtgatgacgcttaatggacattatccctataccgagaaggttcactccacaaaatatcatttcactattatctttaacccgccgccactctttagcttctacagacttatcgataaaggctttgggattttaatatttattctgttaatcgcctgcgccgctgccttcctgcttgatagatatttcaataaaagcgcaacgcctgaagagatcctgcgacgggcaataaataatggggagatcgtccctttttaccaacctgtggtaaatggtcgggaagggacattgcggggagttgaggtgttagcccgctggaaacaacctcacggtggatatatttcacccgcggcatttattccacttgctgaaaaatccggattaatcgttccgcttacacaaagcctgatgaataaggttgccagacagatgaacgctatcgcgagtaaactgccggaaggttttcatattggaattaattttagcgcttcgcatattatttcgccgacgtttgtcgacgagtgtttaaatttccgtgacagttttacccgccgcgatttaaaccttgttctggaagtcaccgagcgtgagccattgaatgttgatgaaagtctggttcagcggttgaacattctgcatgaaaatggttttgtcatcgcgctggatgatttcggtactggctactcagggctttcttatcttcatgacctgcatattgattatatcaaaattgatcacagtttcgttggccgcgtaaacgcagacccagaatcaacccgaattctggattgtgtattggatctggcgcgtaaactttcgatcagtatcgtcgctgaaggtgtcgaaacgaaagaacaacttggctatctgaaccaaaataatatcacatttcagcagggttattatttctataaacctgttacatacatcgacctggtcaaaattatcctttctaaaccgaaggtgaaggttatggttgagtga

SEQ ID NO: 473874 - DNA, 201 bp, Shigella flexneri
atgaataatagtaataatctggattatttcactctctatatcatcttttccattgcatttatgctgatcaccctcctggtcatccttattgcaaaacccagtaccgggctgggagaagtgcttgtgacgataaatttgcttaatgcccttgtttggctggcgatcaatctggttaatcgatttaagagaaagactcgttag

SEQ ID NO: 473875 - DNA, 210 bp, Shigella flexneri
atgaaactgaaaaaactccccgggtttagtttgggacttattgctctggcggtgggtaatgcatatgctgaacagtttattcagcacgatgaatataaacatgctgtggcaataaaagatggaaaagtaaaagatattgataatgcgctagttataacaacgggtaatggaagttacgggtatccgttgcaggagagggtagtaagttaa

SEQ ID NO: 473876 - DNA, 2322 bp, Shigella flexneri
ttgcagggtaaaaacacgattgtcacaacgggggattactcaattggtttgctaagtcaaacgagtggaaacctgaatactgacaccataataagagtcaactctgacggttcggttaccccctctttttctgacggagatgatacatttattgttactgcgggtaatcacgcagtcggcgttcttgcgtgtgcatctcccggaagcgcgtgtgcgtgtgtatcttctcttgatgaagaaagtactgccgatacaggaagtaatgaaaataatgccatagcaaaactggatatggcaaaaggggagatcacaacccacggaacagaaagttatgccgcgtacgctaatggcactgtcgtcaaggctggtgacacgcttgattataccaatgccagcgttacattaaccgatgttgatatcaccacgcatggggacaatgctcatgccatcgctgcccgccaggggacagtttcatttaaccagggagaaatttatacaacgggtcctgacgccgcgattgctaaaatttataatggcggcacggtgacgctgaaaaatacatctgcagtcgcgcatcaggggtctggaattgtgctggagtcttccataaatggtcaggaagcaacggtagatattttatctggtagctcactacggtcagcaaatgaaatcctctaccataaaaatgagacgagtaacgtgaccattacggatagtgaggtatcatcggctgcagatgtttttatcaataatattaaaggtcatttgaccgtcgatgcaactaattcaaaaataacgggttcagctaatatttcaacagatgataacactcatacctatctgtcgctttcagataatagtacctgggatattaaagctgactcaacggtgagcaacctcacggttgataatagtacggtctatatttcccgggcagatggacgggatgtcgaaccaacaagattaacaataactgaaaattacgttggtaataatggcgtattgcatctcagaactgaattggatgatgataattcagctacggataaagtcgttattaatggaaatacctctggaacaacccgagttaaagttaccaatgcaggaggcagcggagcttacacgttaaatgggatagagattatcagcgttgagggggaatcaaatggggaatttattaaggattcgaggattttcgccggtgcctacgaatattcattaacccgaggtaataccgaagcgaccaataaaaactggtatctgactaacttccaggcaacgagcggcggtgaaacaaactccggaggaagttcagcgcctactgttgcgcctacccccgtcctgcgccccgaagctggaagttacgtcgccaacctggcagccgctaacactctttttgttatgcgtctgaacgaccgtgcgggtgaaacgcgctacatcgatcctgtaactgaacaggagcgttcaagccgactttggctacgtcaaattggcgggcataatgcctggcgtgacagcaacggacagttgagaacgacctcgcatcgctacgtctcgcagttagggggcgatctgttaaccggtggttttaccgatagtgacagttggcgtttgggagtgatggctggttatgcccgcgactacaacttaactcattccagcgtgtcggattatcgttcgaaagggagtgtcagaggctatagcgcagggctgtatgccacttggtttgccgatgacatcagtaaaaaaggcgcatacattgactcctgggcgcaatatagctggtttaaaaactccgtgaaaggggatgaattagcctatgaatcctatagcgcgaaaggtgcaaccgtctcgctggaagcgggttacggttttgccctgaataaatcctttggtctggaagcggcgaaatatacgtggatcttccagccacaggcacaggctatctggatgggcgtcgatcataatgcgcacacggaagccaatggctcacgtattgagaatgacgcaaataacaacatccagacccgactcggcttccgcacctttattcgtactcaggagaaaaacagcggtccgcacggtgacgactttgaaccttttgttgaaatgaactggatccataacagtaaagattttgctgtctcaatgaacggtgtgaaagtcgaacaagatggggtgagtaatttgggggaaattaaacttggcgtaaatggcaacctgaatccagcggccagcgtctgggggaatgtgggcgtgcagctgggtgataatggctacaatgacaccgcagtgatggtgggcctgaaatataagttctga

SEQ ID NO: 473877 - DNA, 330 bp, Shigella flexneri
atgaaaaaatttgctttactggcgggcctgtttgttttcgcaccaatgacctgggcgcaggactacaatattaaaaacggtttgccgtcagaaacctatattacttgcgcagaagccaacgaaatggcaaaaactgacagcgcacaggttgcagaaattgttgcggtaatgggtaatgccagcgttgccagccgtgatttaaaaattgagcaatctccggaactgagcgccaaagtggtagaaaaactgaatcaggtttgcgctaaagacccgcaaatgctgttgatcacggcaattgatgacaccatgcgtgctatcggcaaaaaataa

SEQ ID NO: 473878 - DNA, 285 bp, Shigella flexneri; identical to SEQ ID NO: 262668

SEQ ID NO: 473879 - DNA, 327 bp, Shigella flexneri
atggaatcgaaatcagtcgatacccgcagtatatatcgtgaactgggtgcaacgctgagttacaacatgcgtctggggaacggtatggaaattgaaccctgcctgaaggcggctgtgcgcaaagaatttgtcgatgataatcgggtgaaagtgaatagtgacggtaattttgtcaatgatttgtcgggcagacgtggaatataccaggcaggtattaaagcctcattcagcagtacgttaagcgggcatttcggggtggggtatagccatggtgccggtgtggagtccccgtggaacgcggtggctggtgtgaactggtcgttctga

SEQ ID NO: 473880 - DNA, 267 bp, Shigella flexneri
atggcattactcgatttctttctctcgcggaagaagaacacagccaacattgcaaaagaacggctgcagattattgttgctgaacgccgtcgcagcgatgcagaaccgcattatctgccgcagttgcgtaaagatattcttgaggtcatttgtaaatacgtacaaattgatcctgagatggtaaccgtacagcttgagcaaaaagatggcgatatttctattcttgagctgaacgtgaccttaccggaagcagaagagctgaaataa

SEQ ID NO: 473881 - DNA, 813 bp, Shigella flexneri
atggcacgcattattgttgttacttcgggtaaagggggtgttggtaagacaacctccagcgcggccatcgccactggtttggcccagaagggaaagaaaactgtcgtgatagattttgatatcggcctgcgtaatctcgacctgattatgggttgcgaacgccgggtcgtttacgatttcgtcaacgtcattcagggcgatgcaacgctaaatcaggcgttaattaaagataagcgtactgaaaatctctatattcttccggcatcgcaaacacgcgataaagatgccctcacccgtgaaggggtcgccaaagttcttgatgatctgaaagcgatggattttgaatttatcgtttgtgactccccggcagggattgaaaccggtgcgttaatggcactctattttgcagacgaagccattattaccaccaacccggaagtctcctcagtacgcgactctgaccgtattttaggcattctggcgtcaaaatcacgccgcgcagaaaatggcgaagagcctattaaagagcacctgctgttaacgcgctataacccaggccgcgtaagcagaggtgacatgctgagcatggaagatgtgctggagatcctgcgcatcaaactcgtcggcgtgatcccagaggatcaatcagtattgcgcgcctctaaccagggtgaaccagtcattctcgacattaacgccgatgcgggtaaagcctacgcagataccgtagaacgtctgttgggagaagaacgtcctttccgcttcattgaagaagagaagaaaggcttcctcaaacgcttgttcggaggataa

SEQ ID NO: 473882 - DNA, 696 bp, Shigella flexneri
atgtcaaacactccaatcgagcttaaaggcagtagcttcactttatctgtggttcatctgcatgaggcagaacctaaggttatccatcaggcgctgaaagacaaaatcgctcaggcccccacatttttaaaacatgcccccgttgtactcaacgtcagtgcactggaagacccggtaaactggtcagcgatgcataaggcggtttcggcaaccggtttgcgggttattggcgtaagtggctgcaaagatgcgcaacttaaagccgaaattgaaaaaatggggctgcctatcctgacggaaggaaaagaaaaagcgccacgtccagctcccgcaccgcaggctccagcgcaaaatacaatgccggtcacaaaaacgcgtttaatagataccccggtgcgttccggtcagcgtatttatgctccacaatgtgatctgattgttacaagccacgttagcgctggggccgaattgattgccgatgggaacattcatgtctatggcatgatgcgcggtcgtgcgctggcaggggcaagtggtgaccgggaaacgcaaatattttgtacgaacctgatggcggaattggtgtccatcgcaggtgaatactggctgagtgatcaaatcccagcagaattttatggcaaagcggcgcgactgcagttagtcgaaaacgctttgaccgttcaaccgttaaattga

SEQ ID NO: 473883 - DNA, 279 bp, Shigella flexneri
atgaatatgatgcgtattatttatatcggattgtcaggtgtggggatgatgttctcatcaatggcgtctggacatgacgctggcggacttcaatctccgacgtgcggcgttgtttgcgacccgtatatttgtgtgaactcagatggcatttccccagagttaacaaggaaatatctcggcgaaaaagccgcttggatttgcccctatatttccagacatctgttatcacttaacccattacaagcccgctgccgcagatattcccgtggcgagcgataa

SEQ ID NO: 473884 - DNA, 405 bp, Shigella flexneri
gtggcggacctgacgtatgttgccacacaggagggatggttgtacctcgctggcatcaaagatgtttatacgtgcgaaattgtcggctacgccatgggagagcgcatgacaaaagagctgacaggtaaagccctgtttatggcgctcaggagccagcgcccacctgccgggctaatccaccactctgatcgaggttcacagtactgcgcatacgattaccgggtcatacaggagcagtctggtctgaaaacatcaatgtcgcgtaaaggtaactgttacgacaacgctccgatggaaagcttctggggaatatctccccggcagccttcagggaaaaatatcatcagatggctgcttaaaaaagaacaaatggtagtgtccgctattgccagtacacctcagtaa

SEQ ID NO: 473885 - DNA, 366 bp, Shigella flexneri
ttgccagtacacctcagtaataatagcggcccaaattcagagctgaacatttaccagtacggtggcggtaactctgcacttgctctgcaaactgatgcccgtaactctgacttgactattacccagcatggcggtggtaatggtgcagatgttggtcagggctcagatgacagctcaatcgatctgacccaacgtggcttcggtaacagcgccactcttgatcagtggaacggcaaaaattctgaaatgactgttaaacagttcggtggtggcaacggtgctgcagttgaccagactgcatcgaactcctccgtcaacgtgactcaggttggctttggtaacaacgcgaccgctcatcagtattaa

SEQ ID NO: 473886 - DNA, 333 bp, Shigella flexneri
atgaatgcgttattactccttgcggcactttccagccagataacctttaatacgacccagcaaggggatatgtacaccattattcctgaagttactcttactcaatcttgtctgtgcagagtacaaatattgtccctgcgcgaaggcagttcagggcaaagtcagacgaagcaagaaaagaccctctcattgcctgctaatcaacccattgctttgacgaagttgagtttaaatatttccccggaagatcgggtgaaaatagttgttactgtttctgatggacaggcacttcatttatcacaacaatggacgccctcttcagaaaagtcttaa

SEQ ID NO: 473887 - DNA, 312 bp, Shigella flexneri
atgttcagaccttttttagactctcttatgctcggcagtttgttttttccttttattgccattgcaggaagcaccgcgcaagggggcgtgatccatttttatggccaaattgtggaaccggcatgtgacgtcagcacccagtcatcacccgtagaaatgaactgcccacagaatggttctattccgggcaaaacctactccagcaaagcgttaatgagcggcaatgtcaaaaacgcgcaaatagcctcagtaaaagtgcagtatcttgataaacagaaaaagctggctgtaatgaacatcgaatataactaa

SEQ ID NO: 473888 - DNA, 534 bp, Shigella flexneri
atgaaaacgcgtattcatgttgtgcagggtgatattaccaaactggccgttgatgtgattgtgaatgcggctaatccgtcattaatgggaggcggcggcgtcgatggggccattcatcgcgcagcgggtccggccctgctggatgcctgtttaaaagtcaggcaacagcagggcgattgccctacggggcatgccgttattacgcttgcaggcgatcttcccgctaaagccgtagtacacaccgtcgggccagtctggcgtggtggggaacaaaacgaagaccagcttttgcaggatgcctatctgaatagcctacgactggtggcggcaaacagctatacgtcagtggcttttcctgcaatcagtactggggtttatagttaccctcgtgcggcagcggctgaaatcgcagttaaaaccgtttcagaatttattacccgtcacgctttacccgaacaggtatactttgtctgttatgatgaagaaaacgcccacctctacgaaagactccttacccaacaaggagatgaatga

SEQ ID NO: 473889 - DNA, 1482 bp, Shigella flexneri
atgatgaagaaaacgcccacctctacgaaagactccttacccaacaaggagatgaatgatttgccccggctggcgagcgcggtgctgccactgtgttcgcaacatcccggtcagtgtggtcttttccctctggagaaaagtctggatgcgtttgccgcccggtatcgtctggccgaaatggcagagcatacgctggatgttcagtattacatctggcaggacgatatgtcggggcggttactgttttccgccctgttagccgcagcaaagcgtggcgttcgcgtccgtttgttgctggacgacaacaatacgcccggacttgacgacattttgcgcttgcttgacagtcatccacgcattgaagtccggctttttaatcctttctcgtttcgcttgctacgtccgcttggatatatcaccgacttttcccgtctcaatcgccggatgcacaataaaagtttcactgtcgatggcgtggttaccctagtgggaggacgaaatattggtgatgcctattttggtgcaggggaagagccacttttttcggatttagatgtcatggcaataggccccgtggtagaggatgttgccgatgatttcgcccgctactggtattgcaaatcggtttcacccttacagcaggtgctggatgtcccggaaggtgaaatggcggatcgcatcgagttacccgcctcctggcataacgatgccatgacgcatcgttatttacgcaaaatggaatccagtccatttataaatcatctggttgatggaacgttgccgcttatctgggcgaagacacgtttattaagtgatgatccggcgaaaggggagggcaaggcaaaacggcattcactgttaccgcagcgcctgttcgatatcatgggctcacccagtgaacgcatcgatattatctcttcctattttgtaccgacacgcgcaggtgtggcgcaactcttacggatggtgagaaaaggggtaaagattgcgatcctaaccaattctcttgccgctaacgatgttgctgtcgtccatgccggatacgcgcgctggcgcaaaaaattgctccgctatggcgtggaattatatgaactcaagccgacgcgtgaacaaagcagtacgttacacgatcgcggcataaccggtaattccggtgccagcctgcatgctaaaacttttagcatcgatggtaaaacggtgtttatcggctctttcaatttcgatccgcgttcaacattgctcaatactgaaatgggcttcgtgatagagagcgaaacgctggcacagttaattgataaacgctttattcagagccagtacgatgcggcctggcagctccgtctggacaggtggggacggatcaactgggttgatcgtcatgcaaagaaagaggttattctcaaaaaagaacccgccaccagtttctggaagcgggttatggtcagactggcgtcgatattgcccgtggaatggttattgtaa

SEQ ID NO: 473890 - DNA, 1158 bp, Shigella flexneri
atgaatccagtacccgcgcaacgtgaatatttcctcgactccatccgcgcctggctgatgttgttagggatcccttttcatatttctttaatctattcgagccatacatggcatgtgaatagcgccgaaccgtcattgtggctaaccctttttaatgacttcatccactcgttccgcatgcaggtatttttcgttatatccggatacttttcctacatgctttttttacgctatcccttgaaaaaatggtggaaagtacgtgtcgaacgtgtaggtatcccgatgttaacagccatccccctactgacattaccgcaatttattatgctgcaatatgtcaaagggaaagcggaaagttggcctgggctatcattgtatgacaaatataatacgttggcctgggaattaatatcacacctgtggtttttactggtgttagtagtcatgacgacgctgtgtgtatggatatttaagcgcatcagaaataatttagaaaattctgataaaacgaataaaaaattctcgatggtaaaactatcggtgatttttttatgcctcggcatcggctatgcggtaataagaagaacgatttttattgtgtatccacccattctgagtaatggcatgttcaattttattgtcatgcaaacgctattttatttaccgttctttatcctcggcgcactggctttcattttccctcatcttaaagccttgtttaccacgccgtctcgtggctgtaccctcgctgcagcattggcgtttgtcgcttatttactcaaccagcgctatggcagtggcgatgcctggatgtacgaaaccgagtcggtgatcaccatggtcctcggcctgtggatggtgaatgtggtcttctcctttggccaccgtttgcttaacttccagtcagcgcgggtgacttattttgttaacgcatcgctgtttatctatctggttcaccacccgttaacgctgtttttcggcgcatacattacaccgcacatcacctccaactggcttggttttctctgtggcctgatattcgtagtagggattgcgataattctgtatgaaattcatttacgcatcccgttactgaagtttttgttctctggtaaaccggttgttaagcgtgagaacgataaagcaccagcccgttaa

SEQ ID NO: 473891 - DNA, 1503 bp, Shigella flexneri
atgttaaccctgtatacatcttcaagctgggctttcagtattgatgatgtcgcaaagcaagctcaatccttagccgggaaaggctatgaggcgcctaaaagcaacttgccctccgttttccgcgacatgaaatacgcggactatcagcagatccagtttaatcatgacaaagcgtactggaacaatctgaagaccccattcaaactcgagttctaccatcagggtatgtacttcgataccccggtcaaaataaatgaagtgactgccaccgcagtcaaacgaatcaaatacagcccggattatttcactttcggcgatgttcagcatgacaaagacacggtaaaagaccttggttttgccggttttaaagtgctttacccgatcaacagcaaagataaaaacgatgaaatcgtcagcatgctcggggccagctatttccgcgtgattggtgcaggtcaggtttatggcctttctgcccgcggcctagcaattgataccgctttgccatcgggtgaagaatttccacgcttcaaagagttctggatcgagcgtccaaaaccgactgataaacgtttaaccatttatgcattgcttgactcgccgcgtgcgacaggtgcttacaaattcgtggttatgccagggcgtgacacggttgtggatgtgcagtcgaaaatctatctgcgcgataaagtcggcaaactgggggttgcaccgttaaccagtatgttcctgtttgggccgaaccaaccgtcgcctgcaaataactatcgtccggagttgcacgactctaacggtctgtctatccatgctggtaatggcgaatggatctggcgtccgttgaataacccgaaacatttagcggtcagcagcttctccatggaaaacccgcgaggctttggtctgttgcaacgaggtcgtgatttctcccgctttgaagatctcgatgatcgttacgatctccgtccaagcgcatgggtgactccgaaaggggagtggggcaaaggcagcgttgagctggtggaaattccaaccaacgatgaaaccaacgataacatcgtcgcttactggacgccggatcagctgccggagccgggtaaagagatgaactttaaatacaccatcaccttcagccgtgatgaagacaaactgcatgcgccagataacgcatgggtgcaacaaacgcgtcgttcaacgggggatgtgaagcagtcgaacctgattcgccagcctgacggtactatcgcctttgtggtcgattttaccggcgcagagatgaaaaaactgccagaggataccccggtcacagcgcaaaccagcattggtgataatggtgagatagttgaaagcacggtgcgctataacccggttaccaaaggctggcgtctggtgatgcgtgtgaaagtgaaagatgccaagaaaatcactgaaatgcgtgctgcgctggtgaatgccgatcagacgttgagtgaaacctggagctaccagttacctgccaatgaataa

SEQ ID NO: 473892 - DNA, 2514 bp, Shigella flexneri
atgcccatcgccgcaagcgagaaagcagcattgccgaagactgatatccgcgccgttcatcaggcgctggatgccgaacaccgcacctgggcgcgggaggatgattccccgcaaggctcggtaaaggcgcgtctggaacaagcctggccagattcacttgctgatggacagttaattaaagacgacgaagggcgcgatcagcttaaggcgatgccagaagcaaaacgctcctcgatgtttcccgacccgtggcgtaccaacccggtaggccgtttctgggatcgcctgcgtggacgcgatgtcacgccgcgctatctggctcgtttgaccaaagaagagcaggagagcgagcaaaagtggcgtaccgttggtaccatccgccgttacattctgttgatcctgacgctcgcgcaaactgttgtcgcgacctggtatatgaagaccattcttccttatcagggttgggcgctgattaatcctatggatatggttggtcaggatttgtgggtttcctttatgcagcttctgccttatatgctgcaaaccggtatcctgatcctttttgcggtactgttctgttgggtgtccgccggattctggacggcgttgatgggcttcctgcaactgcttattggtcgcgataaatacagtatatctgcgtcaacagttggcgatgaaccattaaacccggagcatcgcacggcgttgatcatgcctatctgtaacgaagacgtgaaccgtgtttttgctggcttgcgtgcaacgtgggaatcagtaaaagccaccgggaatgccaaacactttgatgtctacattctgagtgacagttataacccggatatctgcgtcgcagagcaaaaagcctggatggagcttatcgctgaagtcggtggcgaaggtcagattttctatcgccgccgccgtcgccgcgtgaagcgtaaaagcggtaatatcgatgacttctgccgtcgctggggcagccagtacagctacatggtggtgctggatgctgactcggtaatgaccggtgattgtttatgcggcctggtgcgcttgatggaagccaacccgaacgccgggatcattcagtcgtcgccgaaagcgtccggtatggatacgctgtatgcgcgctgtcagcagttcgcgacccgcgtgtatgggccactgtttacagccggtttgcacttctggcaacttggcgagtcgcactactggggacataacgcgattatccgcgtgaaaccatttatcgagcactgcgcactggctccgctgccgggcgaaggttcctttgccggttcaatcctgtcacatgacttcgtagaagcggcgttgatgcgccgtgcaggttggggggtctggattgcttacgatctcccgggttcttatgaagaattgccgcctaacttgcttgatgagctaaaacgtgaccgccgctggtgccacggtaacctgatgaacttccgtctgttcctggttaagggtatgcacccggttcaccgtgcggtgttcctgacgggcgtgatgtcttatctctccgctccgctgtggtttatgttcctcgcgctctctactgcattgcaggtagtgcatgcgttgaccgaaccgcaatacttcctgcaaccacggcagttgttcccggtgtggccgcagtggcgtcctgagctggcgattgcactttttgcttcgaccatggtgctgttgttcctgccgaagttattgagcattttgcttatctggtgcaaaggaacgaaagaatacggcggcttctggcgcgttacattatcgttgctgctggaagtgctgttttccgtgctgctggctccggtacgcatgctgttccatacggtcttcgttgtcagcgcgttccttggctgggaagtggtgtggaattcaccgcagcgtgatgatgactccacttcatggggcgaagcgttcaaacgccacggctcacagctgctgttggggttagtgtgggctgttgggatggcgtggctggatctgcgtttcctgttctggctggcaccgattgtcttctcgttgatcctgtcaccgtttgtttcggtgatttccagccgtgccaccgttggtctgcgcaccaaacgctggaaactgttcctgatcccggaagagtattcaccgccgcaggtgctggttgataccgatcggttccttgagatgaatcgccaacgctcccttgacgatggctttatgcacgcagtgtttaacccgtcatttaacgctctcgcaaccgcaatggcgacagcgcgtcaccgcgccagtaaggtgctggaaatcgcccgtgaccgccacgttgaacaggcgcttaacgagacgccagagaagctgaatcgcgatcgtcgcctggtgctgctaagcgatccggtgacgatggcccgtctgcatttccgcgtctggaattcccctgaaagatattcttcatgggtgagttattacgaagggataaagctcaatccactggcattgcgtaaaccggatgcggcttcgcaataa

SEQ ID NO: 473893 - DNA, 1197 bp, Shigella flexneri
atgctaaaagtgttattactctttgttttgctgattgcggggatagtggttggcccgatgattgccggtcatcagggttatgtgctgatccagaccgacaactacaatatcgaaaccagcgtcacgggcctggcgatcatattgattctggcgatggtagtgctgtttgccattgagtggctactacggcggatcttccgcactggcgcgcacacccgtggatggtttgtcggacgtaagcgtcgccgtgcgcgtaagcagaccgaacaggcgctgctgaaactggcggaaggtgattatcagcaagttgaaaagctgatggcgaaaaatgccgatcacgctgaacaaccggtggtgaactatctactggctgccgaagccgcgcaacaacgtggtgatgaagcacgcgccaaccaacatctggaacgcgcagcggagctggccggcaatgacaccattccggtagaaatcacccgtgtacgtctgcaactggcccgtaatgaaaaccatgctgcacgccacggcgtggataagctgctggaagttacgccacgccatcctgaagtattacgtctggcggaacaggcgtatatccgcacaggggcatggagttctctgctggatatcatcccatcaatggcgaaagcccatgttggtgatgaagaacatcgtgcaatgctggaacaacaggcatggattggcctgatggatcaggcgcgtgccgataacggtagtgaaggtttgcgtaactggtggaaaaaccaaagccggaaaacgcgtcatcaggtagcgttgcaggtggcaatggcggaacatcttattgaatgtgacgatcatgatactgcccagcaaattatcatcgacggcctgaaacgccagtatgacgatcgcctactgctgccgatcccgcgtctgaaaaccaataacccggaacagctggaaaaagtgctacgccagcaaatcaaaaacgtcggtgatcgcccgctgttgtggagcacattgggtcagtcactgatgaagcacggtgaatggcaggaagcatcgctcgccttccgcgcggcgctgaaacaacgtccggacgcctacgattacgcatggcttgccgacgcgctggacagactgcacaagccggaagaagctgcagcgatgcgtcgcgacggtttgatgttaacgttgcagaataacccgccacagtag

SEQ ID NO: 473894 - DNA, 1200 bp, Shigella flexneri
atgacggaacaagaaaaaacctccgccgtggttgaagagaccagggaggccgtggacaccacgtcacaacctgtcgcaacagaaaaaaagagtaagaacaatactgcattgattctcagcgcggtggctatcgctattgctctggcggcgggtgtcggtttgtatggctggggtaaacaacaggccgtcaatcagaccgccaccagcgatgccctggctaaccaactgacggcattgcaaaaagcccaggagagccaaaaagccgagctggaaggcattattaagcaacaagctgcgcagcttaagcaggcgaatcgtcagcaagaaacgctggcaaaacagttggatgaagtccaacaaaagatcgccaccatttccggcagcgatgctaaaacctggctgctggctcaggccgattttctggtgaaactcgccggacggaagctgtggagcgatcaggacgtcacgacctctgcagcgttgctgaaaagtgcagacgccagcctggcggatatgaatgacccgagtctgattaccgttcgtcgggcaattaccgatgatatcgccagcctttctgcagtatcgcaggtggattatgacggcatcatccttaagcttaatcagctttcaaatcaggtagataacctgcgtctggccgataatgacagcgatggttcgccgatggattcagacggtgaagagctttccagttccatcagcgaatggcgtatcaatctgcaaaaaagctggcagaactttatggacaacttcattacgattcgccgtcgtgatgacaccgccgtaccgctgttagcgccaaatcaggatatctatctgcgcgaaaatattcgctctcgcctgctggtcgcagcacaagctgtaccgcgtcatcaggaagagacttatcgccaggcgctggagaacgtctccacctgggtacgtgcttactacgatactgatgatgccaccaccaaagcgttcctcgacgaggtggaccagttaagccagcaaaatatctcgatggatcttccggaaaccctgcaaagccaggcgatgctggaaaaactgatgcagactcgcgtgcgtaacctgctggcacaaccggcagcggggacaacggaagctaaacctgcacctgcacctgcacctgcacctgcaccgcaaggtgatactccggcagccgcgccgcaaggagaataa

SEQ ID NO: 473895 - DNA, 741 bp, Shigella flexneri
atgagtatcctggtcacccgcccgtctcccgctggagaagagttagtgagccgtctgcgcacactggggcaggtggcctggcattttccgctgattgagttttctccgggtcgacaattaccgcaacttgctgatcaactggcagcgctgggggagagcgatctgttgtttgccctctcgcaacacgcggttgcttttgcccaatcacagctgcatcagcaagatcgtaaatggccccaactacctacttatttcgccattggacgcaccaccgcactggcgctacataccgtaagcggacagaagattctctacccacaggatcgggaaatcagcgaagtcttgctacaattacctgaattacaaaatattgcgggcaaacgtgcgctgatattacgtggcaatggcggtcgtgagctaattggggataccctgacggtgcgcggtgctgaggtcactttttgtgaatgttatcaacgatgcgcaatccattacgatggtgcagaagaagcgatgcgctggcaatcccgcgaggtgacgatggtcgttgttaccagcggtgaaatgttgcagcaactctggtcgctgatcccacaatggtatcgtgagcactggttactacactgtcgactattggtcgtcagtgagcgtttggcgaaactcgcccgggaactgggctggcaagacattaaggtcgccgataacgctgacaacgatgcgcttttacgggcattacaataa

SEQ ID NO: 473896 - DNA, 963 bp, Shigella flexneri
atgataatgacggtaacaagcatgttagacaatgttttaagaattgccacacgccaaagcccacttgcactctggcaggcacactatgtcaaagacaagttgatggcgagccatccgggcctggtcgttgaactggtaccgatggtgacgcgcggcgatgtgattcttgatacgccgctggcgaaagtaggcggaaaaggcttatttgtaaaagagctggaagtcgcgctcctggagaatcgcgctgatatcgccgtacattcaatgaaagatgtgccggttgaattcccgcaaggtctggggctggtcactatttgcgagcgtgaagatcctcgcgatgcctttgtgtccaataactatgacagtctggatgcgttaccagcaggcagtatcgtcgggacgtccagtttacgtcgccagtgccaactggctgaacgccgcccggatctgattatccgctccctgcgcggcaacgtcggcactcgcctgagcaaactagataacggcgaatacgatgccatcattcttgccgtagccggactaaaacgtttaggtctggagtcccgcattcgcgccgcgttaccacccgagatttctcttccggcggtaggacaaggtgcagtcggtattgaatgccgccttgatgatacacgcactcgcgagctgcttgccgcgctgaatcaccacgaaactgcactgcgcgttaccgcagaacgcgccatgaatacccgtctcgaaggcggatgtcaggtgccaattggtagctacgccgagcttattgatggcgaaatctggctatgtgcgctggtcggcgcgccggacggttcgcagattattcgcggtgaacgccgcggtgcgccgcaagatgccgaacaaatggggatttcgctggcagaagagctactgaataacggcgcgcgcgagatcctcgctgaagtctataacggagaggccccggcatga

SEQ ID NO: 473897 - DNA, 2547 bp, Shigella flexneri
ttgtacctctatattgagactctgaaacagagactggatgccataaatcaattgcgtgtggatcgcgcgcttgctgctatggggcctgcattccaacaggtctacagtctactgccgacattgttgcactatcaccatccgctaatgccgggttaccttgatggtaacgttcccaaaggcatttgcctttacacgcctgatgaaactcaacgccactacctgaacgagcttgaactgtatcgtggaatgtcagtacaggatccaccgaaaggtgagcttccaattactggtgtatacaccatgggcagcacctcgtccgtagggcaaagttgttcctctgacctggatatctgggtctgtcatcaatcctggctcgatagcgaagagcgccagttactacaacgtaaatgcagcctgctggaaagctgggccgcctcgctgggtgtggaagtcagcttcttcctgattgatgaaaaccgcttccgtcataatgaaagcggcagcctggggggcgaagattgtggctccacccagcatatactgctgcttgacgaattttatcgtactgccgtgcgtctcgccggtaagcgtattctgtggaatatggtgccgtgcgacgaagaagagcattacgacgactatgtgatgacgctttacgcgcagggcgtgctgacgccaaatgaatggctggatctcggtggcttaagctcgctttctgctgaagagtactttggtgccagcctttggcagctctacaagagtatcgattccccatacaaagcggtgctgaaaacactgctgctggaagcctattcctgggaatacccgaacccacgtctgctggcgaaagatatcaaacagcgtttgcacgacggcgagattgtatcgtttggcctcgatccatactgcatgatgctggagcgtgttactgaatacctgacggcgattgaagatttcacccgtctggatttagtacgtcgctgcttctatttaaaagtgtgcgaaaaactcagccgtgaacgcgcctgtgtaggctggcgtcgcgcagtgttgagccagttagtgagcgagtggggttgggacgaagctcgtctggcaatgctcgataaccgtgctaactggaagattgatcaggtgcgtgaggcgcacaacgagctgctcgacgcgatgatgcagagctaccgtaatctgatccgctttgcgcgtcgcaataaccttagcgtctccgccagtccgcaggatatcggcgtactgacgcgtaaactgtatgccgcgtttgaagcattgccaggtaaagtgacgctggtaaacccgcagatttcacccgatctctcggaaccgaatctgacctttatttatgtgccgccgggccgggctaaccgttcaggttggtatctgtataaccgcgcgccaaatattgagtcgatcatcagccatcagccgctggaatataaccgttacctgaataaactggtggcgtgggcatggtttaacggcctgctgacctcgcgcacccgtttgtatattaaaggtaacggcattgtcgatttgcctaagttgcaggagatggtcgccgacgtgtcgcaccatttcccgctgcgcttacctgcaccgacaccgaaggcgctctacagcccgtgtgagattcgccatctggcgattatcgttaacctggaatatgacccgacagctgcgttccgcaatcaggtggtgcattttgatttccgtaagctggatgtcttcagctttggcgagaatcaaaattgcctggtaggtagcgttgacctgctgtaccgcaactcgtggaacgaagtgcgtacgctgcacttcaacggcgagcaatcgatgatcgaagccctgaaaactattctcggcaaaatgcatcaggacgccgcaccgccagatagcgtggaagtcttctgttatagccagcatctgcgcggcttaatccgtactcgcgtgcagcaactggtttctgagtgtattgaactgcgcctttccagcacccgccaggaaaccgggcgtttcaaggcgctgcgcgtttctggtcaaacctggggcttgttcttcgaacgcctgaatgtatcggtacagaagctggagaacgccatcgagttttatggcgctatttcgcataacaaactgcacggcttgtcagtgcaggttgaaaccaatcacgtcaaattaccggcggtggtggacggctttgccagcgaagggatcatccagttctttttcgaagaaacgcaagacgagaatggctttaatatctacattctcgacgaaagcaaccgggttgaggtgtatcaccactgcgaaggcagcaaagaggagctggtacgtgacgtcagtcgcttctactcgtcatcgcacgaccgcttcacctacggctcaagcttcatcaacttcaacctgccgcagttctatcagattgtgaaggttgatggtcgcgaacaggtgattccgttccgaacaaaatcgattggcaacctgccgcccgccaatcaggatcacgatacgccgctattacagcagtatttttcgtga

SEQ ID NO: 473898 - DNA, 321 bp, Shigella flexneri
atgaacgacagtgaatttcatcgcctggctgatcaactgtggctgaccattgaagagcgtctggacgacagggatggcgacagcgatatcgactgcgaaatcaacggcggcgtactgaccattacctttgaaaacggcagcaaaatcattattaaccgccaggagccgctgcaccaggtgtggctggcaaccaaacagggcggctaccattttgacctgaaaggcgatgaatggatttgcgatcgcagcggcgaaaccttctgggatttgctggaacaggcggcgacgcaacaggcgggtgaaacagtcagtttccgctaa

SEQ ID NO: 473899 - DNA, 858 bp, Shigella flexneri
atggctaccaaactgcaggacgggaatacaccttgtctggcagctacaccttctgaaccacgtcccaccgtgctggtgtttgactccggcgtcggtgggttgtcggtctatgacgagatccggcatctcttaccggatctccattacatttatgctttcgataacgtcgctttcccgtatggcgaaaaaagcgaagcgtttattgttgagcgagtggtggcaattgtcaccgcggtgcaagaacgttatccccttgcgctggctgtggtcgcttgcaacaccgccagtaccgtttcacttcctgcattacgcgaaaagttcgacttcccggttgttggtgtcgtgccggcgattaaacctgctgcacgtctgacggcaaatggcattgtcggattactggcaacccgcggaacagttaaacgttcttatactcatgagctgatcgcgcgtttcgctaatgaatgccagatagaaatgctgggctcggcagagatggttgagttggctgaagcgaagctgcatggcgaagatgtttctctggatgcactaaaacgtatcctacgcccgtggttaagaatgaaagagccgccagataccgttgtattgggttgcacccatttccctctactacaagaagaactgttacaagtgctgccagagggaacccggctggtggattctggcgcagcgattgctcgccgaacggcctggttgttagaacatgaagccccggatgcaaaatctgccgatgcgaatattgccttttgtatggcaatgacgccagaagctgaacaattattgcccgttttacagcgttacggcttcgaaacgctcgaaaaactggcagttttaggctga

SEQ ID NO: 473900 - DNA, 1845 bp, Shigella flexneri
atgattaaaaaagcttcgctgctgacggcgtgttccgtcacggcattttccgcttgggcacaggataccagcccggatactctcgtcgttactgctatccgttttgaacagccgcgcagcactgtgcttgcaccaaccaccgttgtgacccgtcaggatatcgaccgctggcagtcgacctcggtcaatgatgtgctgcgccgtcttccgggcgtcgatatcacccaaaacggcggttcaggtcagctctcatctatttttattcgcggtacaaatgccagtcatgtgctggtgttaattgatggcgtccgcctgaatctggcgggggtgagtggttctgccgaccttagccagttccctattgcgcttgtccagcgtattgaatatatccgtggaccgcgctccgctgtttatggttccgatgcaataggcggggtggtgaatatcatcacgacgcgcgatgaacccggaacggaaatttcagcagggtggggaagcaatagttatcagaactatgatgtctctacgcagcaacaactgggggataaaacacgggtaacgctgttgggcgattatgcccatactcatggttatgatgttgttgcctatggtaataccggaacgcaagcgcagacagataacgatggttttttaagtaaaacgctttatggggcgctggagcataactttactgatgcctggagcggctttgttcgcggctatggctatgataaccgtaccaattatgacgcgtattattctcccggttcaccgttgctcgatacccgtaaactctatagccaaagttgggacgccgggctgcgctataacggcgaactgattaaatcacaactcattaccagctatagccatagcaaagattacaactacgatccccattatggtcgttatgattcgtcggcgacgctcgatgagatgaagcaatacaccgtccagtgggcaaacaatgtcatcgttggtcacggtagtattggtgcgggtgtcgactggcagaaacagactacgacgccgggtacaggttatgttgaggatggatatgatcaacgtaataccggcatctatctgaccgggctgcaacaagtcggcgattttacctttgaaggcgcagcacgcagcgacgataactcacagtttggtcgtcatggaacctggcaaaccagcgccggttgggaattcatcgaaggttatcgcttcattgcttcctacgggacatcttataaggcaccaaatctggggcaactgtatggcttctacggaaatccgaatctggacccggagaaaagcaaacagtgggaaggcgcgtttgaaggcttaaccgctggggtgaactggcgtatttccggatatcgtaacgatgtcagtgacttgatcgattatgatgatcacaccctgaaatattacaacgaagggaaagcgcggattaagggcgtcgaggcgacagccaattttgataccggaccactgacgcatactgtgagttatgattatgtcgatgcgcgcaatgcgattaccgacacgccgttgttacgccgtgctaaacagcaggtgaaataccagctcgactggcagttgtatgacttcgactggggtattacttatcagtatttaggcactcgctatgataaggattactcatcttatccttatcaaaccgttaaaatgggcggtgtgagcttgtgggatcttgcggttgcgtatccggtcacctctcacctgacagttcgtggtaaaatagccaacctgttcgacaaagattatgagacagtctatggctaccaaactgcaggacgggaatacaccttgtctggcagctacaccttctga

SEQ ID NO: 473901 - DNA, 1101 bp, Shigella flexneri
atgacccccgaacaccttccaacagaacagtatgaagcgcagttagccgaaaaagtggtacgtttgcaaagtatgatggcaccgttttctgacctggttccggaagtgtttcgctcgccggtcagtcattaccggatgcgcgcggagttccgcatctggcacgatggcgatgacctgtatcacatcattttcgatcaacaaaccaaaagccgcatccgcgtggatagcttccccgccgccagtgaactcatcaaccagttgatgacggcgatgattgcgggtgtgcgtaataatcccgttctgcgccacaagttgttccagattgattacctcaccacgctgagtaatcaggcggtggtttccctgctgtaccataaaaagctggatgatgagtggcgtcaggaagcggaagcactgcgcgatgcactgcgcgcgcagaatctgaatgtgcatctgattggtcgggcaacgaaaaccaaaatcgcgctggatcaagattacatcgacgagcgtctgccggtcgcagggaaagagatgatctatcgtcaggtagaaaacagctttacccagccgaacgcggcgatgaatattcagatgctggaatgggcgctggacgtaaccaaaggctcaaaaggcgatttactggagctgtactgcggcaacggtaacttttcattagcgctggcgcgcaattttgatcgggtattagccaccgaaatcgccaaaccgtcagtcgctgccgcgcaatacaacattgccgctaaccatattgataacgtacaaattattcgtatggcggcagaagaatttactcaggcgatgaatggtgtgcgcgagtttaaccgcctgcaagggatcgacttaaagagctatcagttcgaaaccatttttgtcgacccaccgcgcagcggtctggacagtgaaaccgagaaaatggtgcaggcgtatccacgtattctgtatatctcctgcaatccggaaacgttatgcaaaaatctggaaacattaagccagacgcacaaggtcgaacgtctggctctgtttgatcagttcccctacacgcaccatatggagtgcggcgtattactgaccgcgaagtaa

SEQ ID NO: 473902 - DNA, 360 bp, Shigella flexneri
atgaaacaagcaaatcaagatagaggtacgctgctgctggcgttggttgctggtttatcgattaatggtactttcgcagcgctgtttagctccattgtgccattttctgtattcccgattatttccctggtgctgacggtttactgcctgcatcaacgttatcttaatcgcaccatgtcggtaggcttgccgggtctggcagctgcctgttttattctcggcgtactgctgtacagcacggtagttcgtgcggaatatccggatatcggctctaacttcttcccggcagtactctccgtcattatggtgttctggattggcgcgaagatgcgtaaccgtaagcaggaagttgctgagtaa

SEQ ID NO: 473903 - DNA, 705 bp, Shigella flexneri
atgttcattctctggtatagtgccagcagtacttttggcaaggattcagacatcgtgatgggcgtaagagcgcaacaaaaagaaaaaacccgccgttcgctggtggaagccgcatttagccaattaagtgctgaacgcagcttcgccagcctgagtttgcgtgaagtggcgcgtgaagcgggcattgctcccacctctttttatcggcatttccgcgacgtagacgaactgggtctgaccatggttgatgagagcggtttaatgctacgccaactcatgcgccaggcgcgtcagcgtatcgccaaaggcgggagtgtgatccgtacctcggtctccacatttatggagttcatcggtaataatcctaacgccttccggttattattgcgggaacgctccggcacctccgctgcgtttcgtgccgccgttgcgcgtgaaattcagcacttcattgcggaacttgcggactatctggaactcgaaaaccatatgccgcgtgcgtttactgaagcgcaagccgaagcaatggtgacaattgtcttcagtgcgggtgccgaggcgttggacgtcggcgtcgaacaacgtcggcaattagaagagcgactggtactgcaactgcgaatgatttcgaaaggggcttattactggtatcgccgtgaacaagagaaaaccgcaattattccgggaaatgtgaaggacgagtaa

SEQ ID NO: 473904 - DNA, 1401 bp, Shigella flexneri
atgccacattcctacgattacgatgccatagtaataggttccggccccggcggcgaaggcgctgcaatgggcctagttaagcaaggtgcgcgcgtcgcagttatcgagcgttatcaaaatgttggcggcggttgcacccactggggcaccatcccgtcgaaagctctccgtcacgccgtcagccgcattatagaattcaatcaaaacccactatacagcgaccattcccgactgctccgctcttcttttgccgatatccttaaccatgccgataacgtgattaatcaacaaacgcgcatgcgtcagggattttacgaacgtaatcactgtgaaatattgcaggggaacgctcgctttgttgacgagcatacgttggcgctggattgcccggacggcagcgttgaaacactaaccgctgaaaaatttgttattgcctgcggctctcgtccatatcatccaacagatgttgatttcacccatccacgcatttacgacagcgactcaattcttagcatgcaccacgaaccgcgccatgtacttatctatggtgctggagtgatcggctgtgaatatgcgtcgatcttccgcggtatggatgtaaaagtggatctgatcaacacccgcgatcgcctgctggcatttctcgatcaagagatgtcagattctctctcctaccacttctggaacagtggcgtagtgattcgtcacaacgaagagtacgagaagatcgaaagctgtgacgacggtgtgatcatgcatctgaagtcgggtaaaaaactgaaagctgactgcctgctctatgccaacggtcgtaccggtaataccgattcgctggcgttacagaacattgggctggaaactgacagtcgcggacagctgaaggtcaacagcatgtatcagaccgcacagccgcacgtttacgcggtgggcgacgtgattggttatccgagcctggcatcagcggcctatgaccaggggcgcattgccgcgcaggcgctggtaaaaggcgaagccaccgcacatctgattgaagatatccctaccggcatttacaccatcccggaaatcagctctgtgggcaaaaccgaacagcagctgaccgcgatgaaagtgccgtatgaagtgggccgcgcccagttcaaacatctggcacgtgcacaaatcgtcggcatgaacgtgggcacgctgaaaattttgttccatcgggaaacaaaagagattctgggtattcactgctttggcgagcgcgctgccgaaattattcatatcggtcaggcgattatggaacagaaaggtggcggcaacactattgagtacttcgtcaacaccacctttaactacccgacgatggcggaagcctatcgggtagctgcgttaaacggtttaaaccgcctgttttaa

SEQ ID NO: 473905 - DNA, 918 bp, Shigella flexneri
atgaatattcgtgatcttgagtacctggtggcattggctgaacaccgccattttcggcgtgcggcagattcctgccacgttagccagccgacgcttagcggccaaattcgtaagctggaagatgagctgggcgtgatgttgctggagcggaccagccgtaaagtgttgttcacccaggcgggaatgctgctggtggatcaggcgcgtaccgtgctgcgtgaggtgaaagtccttaaagagatggcaagccagcagggtgagacgatgtccggaccgctgcatattggtttgattcctacggttggaccatacctgctaccgcatattatcccgatgctgcaccagacatttccaaagctggaaatgtatctgcatgaagcacagacccaccagttactggcgcaactggacagcggcaaactcgattgcgtgatcctcgcgctggtgaaagagagcgaagcattcattgaagtgccgttgtttgatgagccaatgttgctggctatctatgaagatcacccgtgggcgaaccgcgaatgcgtactgatggccgatctggcaggggaaaaactgctgatgctggaagatggtcactgtttgcgcgatcaggcaatgggtttctgctttgaagccggggcggatgaagatacacacttccgcgcgaccagcctggaaactctgcgcaacatggtggcggcaggtagcgggatcactttattgccagcgctggctgtgccgccggagcgcaaacgcgatggggttgtttatctgccatgcattaagccggaaccacgccgcactattggcctggtttatcgtcctggctcaccgctgcgcagccgctatgagcagctggcagaggccatccgcgcaagaatggatggccatttcgataaagtgttaaaacaggcggtttaa

SEQ ID NO: 473906 - DNA, 900 bp, Shigella flexneri
atgcctgcgggagtaaagtcgatcaccgactggtatgcacaaaaagaacgcggcacggcgctggggatttttaactcatctaccgttatcggtcaggctatcgcacctcctgctcttgtattgatgcagctggcatggggctggcggacgatgttcgttatcatcggcgtggcagggattctggttgggatctgttggtacgcgtggtatcgcaaccgggcgcagtttgtcctgactgacgaagaacggacgtatctctccgcgtcggttaaaccgcgtccacagctgcaatttagcgagtggctggcgctgtttaagcatcggacaacctgggggatgattttaggtttctctggcgtcaattataccggttggctttacattgcgtggttacccggttatttgcaagccgaacaaggtttcagtctggcgaaaaccggttgggtagcggcgattcctttcctcgcggcggcggtcgggatgtgggttaacggtattgtggtcgatcggctggcgaaaaaaggctacgacctggcgaagacgcgtaaaacggctattgtctgcggtttgatgatgtcggcattaggcacgttgctggtcgtgcaatcttcctcgccagctcaggcggtagcgtttatctcaatggcgctgttctgcgtgcatttcgcgggaacgtctgcatggggactggtgcaggtgatggtgtcagaaacaaaagtggcttccatcgccgggattcaaaactttggcagttttgtttttgcttcctttgctccgatcgtaaccggttgggtagtggataccacacactcgtttaatctggcgctggttatcgcggcctgtgtgacgttcaccggggcgctgtgttacttctttattgtcaaagatcgcattgagtaa

SEQ ID NO: 473907 - DNA, 1536 bp, Shigella flexneri
atggctacatcagtacagacaggtaaagctaagcagctcacattactcggattctttgccataacggcatcgatggtaatggctgtttatgaataccctaccttcgcaacatcgggcttttcattagtcttcttcctgctattaggcgggattttatggtttattcccgtgggactttgtgctgcggaaatggccaccgtcgacggctgggaagaaggtggtgtcttcgcctgggtatcaaatactctgggtccgagatggggatttgcagcgatctcatttggctatctgcaaatcgccattggttttattccgatgctctatttcgtgttaggggcactctcctacatcctgaaatggccagcgctgaatgaagaccccattaccaaaactattgcagcactcatcattctttgggcgctggcattaacgcagtttggtggcacgaaatacacggcgcgaattgctaaagttggcttcttcgccggtatcctgttacctgcatttattttgatcgcattagcggctatttacctgcactccggtgcccccgttgctatcgaaatggattcgaagaccttcttccctgacttctctaaagtgggcacactggttgtatttgttgccttcattttgagttatatgggcgtagaagcttccgcaactcacgtcaatgaaatgagcaaccccgggcgcgactatccactggctatgttactgctgatggtggcggcaatctgcttaagctctgttggcggtttgtctattgcgatggtcattccggataatgaaatcaacctctccgcaggggtaatgcaaacctttaccgttctgatgtcccatgtggcaccggaaattgagtggacggttcgcgtgatctccgcactgctgttgctgggtgttctggcggaaatcgcctcctggattgttggtccttctcgcgggatgtatgtcacagcgcagaaaaacctgctgccagcggcattcgctaaaatgaacaaaaatggcgtaccggtaacgctggtcatttcgcagctggtgattacttctatcgcgttgatcatcctcaccaataccggtggcggtaacaacatgtccttcctgatcgcactggcgctgacggtggtgatttatctgtgtgcttatttcatgctgtttattggctacattgtgttggttcttaaacatcctgacttaaaacgcacatttaatatccctggtggtaaaggggtgaaactggtcgtggcaattgtcggtctgctgacttcaattatggcgtttattgtttccttcctgccgccggataacatccagggtgattctaccgatatgtatgttgaattactggttgttagtttcctggtggtacttgccctgccctttattctctatgctgttcatgatcgtaaaggcaaagcgaataccggcgtcactctggagccaatcaacagtcagaacgcaccaaaaggtcacttcttcctgcacccgcgtgcacgttcaccacactatattgtgatgaatgacaagaaacactaa

SEQ ID NO: 473908 - DNA, 1155 bp, Shigella flexneri
atgcgtggcatctggctggccacggtttctcgcctcgactggccaccggtttcctcggttaacattagtaatcccaccagccgagcccgtgtacaacaacaggcgatgatcgacaaactggatcatctccaacgtctcggcataaacacggtctttttccaggtcaagccggacggtaccgccctgtggccatcgaaaattttgccgtggtccgatcttatgaccggtaagattggtgaaaatccgggttacgatccgctgcaattcatgctcgacgaagcccacaagcgtgggatgaaagtacacgcctggtttaacccctatcgcgtatcggttaatacgaagcccggtactatcagggaactgaatagcactctgtctcaacaaccggcgagcgtctatgtgcaacaccgtgactggatcagaacgtctggcgatcgctttgtcctcgacccgggcatccctgaggttcaggactggatcacatcaatagtcgctgaagtggtttcccgctatccggtagatggcgtgcagtttgacgactatttctatactgaatcaccgggttcacggctaaatgataacgaaacgtaccgtaaatacggaggcgcatttgcgtcaaaagcagactggcggcgcaacaatactcagcagttaattgcaaaggtatcacacaccattaaaagcattaagccgggagtcgaatttggcgttagcccggcaggcgtgtggcgtaaccgatcacacgatccgctcggttccgatacccgaggcgcggcagcctatgacgaatcctacgcagacacccgtcgatgggtggaacaaggattgctggattacattgctccccaaatttactggccgttctcacggagtgccgcgcgttatgacgtgttggcaaaatggtgggcggatgtcgttaaaccaaccaggacccgcctgtatatcggtatcgccttctataaagtgggtgaaccttcaaagatagagccagactggatgattaacggcggcgtaccggaactgaaaaagcagctcgatcttaacgatgcggtaccagaaattagcggcaccatcttgttccgtgaggactatctgaataaaccgcagactcaacaagcggtcagctatctgcaaagtcgttggggcagttaa

SEQ ID NO: 473909 - DNA, 714 bp, Shigella flexneri
atggagatgtattttaaaagaatgaaagatgagtggaccggacttgtcgaacaggcagatcctctcattcgtgctaaagccgcagaaattgcccttgcgcatgctcattatctgagtatcgagttttatcgaattgtccgcatcgacccgcatgccgaagaattcttgagtaatgaacaagttgagcggcagttgaaaagtgcgatggaacgctggattattaacgtgctttctgcccaggttgacgatgtcgaaaggctaatacaaatccagcataccgtcgcggaagtgcatgcccgcataggaattccggtagaaattgtcgagatggggtttcgggtgctgaaaaaaatcctctatccggtaatcttctcttcggattattccgccgcagaaaaacttcaggtctaccatttctcgattaacagtattgatatcgcgatggaagtgatgacccgcgcgtttacctttagtgacagtagtgcctcaaaggaagatgaaaactatcgtatcttctcgttactggaaaacgccgaagaagaaaaagaacggcaaatagcctcaatactttcatgggaaatagatattatctataaagtcctgctggattctgatttaggcagcagtttgcctttaagccaggctgattttggcctgtggtttaacgacattattttagcggcattgccgaagtgggccatatctcccgtctga

SEQ ID NO: 473910 - DNA, 444 bp, Shigella flexneri
gtgggccatatctcccgtctgattcaggatttcgacggtattttcaatcaaaccatgcgtaacaccaggattttgaataacagaagtttgcgggtgaaatttctattacagataagaaataccgtatcgcagattattaccttgctgcgtgaattgtttgaagaagtatcgcgccacgaagtcggtatggatgtactgacgaaattacttaaccgccgtttcctgccgactatcttcaaacgcgaaattgcccatgccaaccggaccggtacaccgctgtcagtgctgattattgacgttgataaattcaaagagatcaacgatacgtggggccataacactggcgatgaaattctgcgtaaagtctcattcctctcgcagaagagattggtgaaatcgaaaatattgggcgctgggtcatcgcggaagcttgccgtcagttag

SEQ ID NO: 473911 - DNA, 441 bp, Shigella flexneri
atgcaagcctggggtattgacggccaccagctgacggtggaaatcacggaaagcatgatgatggaacacgataccgaaatctttaagcgcattcagatcctgcgtgatatgggcgtgggtttatcggtagatgattttggcacgggcttttccggattatcccgcttagtcagtcttccggtaacggaaatcaaaattgacaaaagctttgtcgatcgttgtctgacggaaaaacgcatcctggccttacttgaagccattaccagcattgggcaaagcctcaatttaaccgtcgtggcggaaggggtcgaaaccaaagagcaatttgagatgctacgtaagatccactgtcgcgttattcagggatatttcttttcccgcccccttcccgccgaagaaattccaggctggatgagcagcgtgttaccgctgaaaatctga

SEQ ID NO: 473912 - DNA, 402 bp, Shigella flexneri
atgtcggataccaccgaactggttgatttagccgtgatcttccctgatctggagatcgaattgaaatatgcctgcgttgataacatcacaggtaaagctatttatcagcaagcgcgttgtctgctacataaagatgcgattaccgcgctggcgaaaagtatcagtatcgcccagctgtcaggcttacaactggtgatttacgatgcgtatcgcccacaacaagcacaggcgatgttgtggcaagcctgcccagacccgcaatatgttgttgatgtgacggtcggttctaatcacagccgtggcacggcgctcgacctgacgcttcgtgatgacgtggaggtggtgaatgatgctaagcgaggaaacgtccgccgtacgcccacaaaaacaaacgcgatttaa

SEQ ID NO: 473913 - DNA, 897 bp, Shigella flexneri
atgatgctaagcgaggaaacgtccgccgtacgcccacaaaaacaaacgcgatttaacggtgcaaaactggtatggatgctgaaaggcagtccgctcaccgtgaccggcgcagtcatcattgtattaatgcgactgatgatgattttttcaccgtggctggcgacgcatgatcccaacgccattgatttaaccgcccgccttttgccgccttctgcggcgcactggtttggcaccgatgaagtgggacgcgatctgtttagccgcgtactggtcggcagtcagcaatcaattctcgccggattagtggtggtcgccattgcgggtatgattggttcgctactcggatgtctatccggtgtgcttggcggacgcgcagacgccatcatcatgcgcatcatggacattatgctgtcgattccttcgttggtactgacaatggcactggctgccgctctcgggccgagtttatttaacgccatgctggcgattgctattgtgcgaattcccttttatgtgcgcttggcgcgggggcaagcattagttgtacgccagtatacctatgttcaggcggcgaaaacctttggcgcgtctcgttggcatctgatcaactggcatattttacgtaactccctaccgccgctgatcgtgcaggcatcgctggatatcggtagcgcgattttaatggccgccacgttgggatttattggcctaggtgctcaacaaccgagtgctgaatggggcgcgatggtagcgaatggtcgcaactatgtactcgatcagtggtggtattgcgcatttccgggggcagcgattttgcttacctccgtcgggtttaatctctttggtgatggtattcgcgatctgcttgacccgaaagcaggaggaaagcagtcatga

SEQ ID NO: 473914 - DNA, 987 bp, Shigella flexneri
atgacccaacccgttctggacattcaacagctgcatttgagtttccccggttttaacggtgatgttcacgcgctcaacaatgtgtccttgcagattaaccgcggcgaaattgtcggtctggtgggagaatccggctcaggtaaatcagtcaccgcaatgctgattatgcgtctgctaccgacgggcagttattgcgtacatcgggggcagatttcactgctgggagaagatgttcttaacgctcgggaaaaacagcttcgtcagtggcgcggcgcacgagtggcgatgatctttcaggaaccgatgaccgcccttaatccgacacgtcgaataggtcttcagatgatggacgtaatccgccatcatcaaccaataagtcgtcgggaagccagagctaaagcgattgccctgctggaagagatgcaaatcccggatgccgtggaagttatgtcgcgctatccgtttgagctttcaggtggtatgcgccagcgggtaatgattgcgctggcattctcctgcgagccgcaattgattattgccggcgaaccgacgacggcgctggacgtcacagtacagttgcaggtactgcgtttgcttaaacataaagcacgcgccagtggaactgcggtactgttcatcagccatgatatggccgtggtgtcgcaactgtgcgatagcgtttacgtgatgtatgccggaagcgtaattgaaagcggcgggacggcagacgttatccatcatccccggcatccgtataccattggtttgctgcaatgcgcaccagaacatggagtaccacgccagccattacccgccattccagggacggtaccaaacctcacccatttgcctgacggctgcgcttttcgcgatcgttgctatgcggcaggtgcacagtgtgaaaacgtcccggcgctgacagcgtgtggtgacaacaaccagcactgcgcctgttggtatccgcagcaggaggtcataagtgtctga

SEQ ID NO: 473915 - DNA, 771 bp, Shigella flexneri
gtgtctgacacgttattaacgttacgcgacgtccatatcaattttccggcccgtaaaaactggcttggtaaatctacggaacatgttcatgccattaatggtattgatttacagatccgccgtggtgaaaccttagggatcgtcggcgagtcaggctgcggcaaaagccccctcgcacagcttttaatgggcatgctgcaaccgagccacgggcagtacatccgttcaggctcacaacgcattatgcagatggtgtttcaggacccgctctcttcgcttaatccgcgcttaccggtgtggcgcatcatcacagaatcgctctggatagctaagcgtagtagtgaacaacagcggcgagcgttggcagaggagttggctgtgcaggtgggtattcgtccggagtatctcgaccgcctgcctcatgcgttctccggcgggcagcggcaacgcatcgccattgccagagcactctcttcgcagcctgacgtgattgtgcttgatgagccaacctcggcgctggatatctccgtgcaggcgcagatcctcaatttgctggtaacgctacaggaaaatcacgggctgacttatgtgctgatttcacacaatgtctcggtgatacgtcatatgagcgatcgggtggcggtgatgtatctcgggcagattgtagaactgggcgacgcgcaacaggtgttgactgcttcggcacatccatacacccgattattgctggattccctccccgccattgataaaccgctggaggaagaatga

SEQ ID NO: 473916 - DNA, 432 bp, Shigella flexneri
atgacaatccataagaaaggtcaggcacactgggaaggcgatatcaaacgcgggaagggaacagtatccaccgagagcggcgtgctgaaccaacagccgtatggatttaacacgcgttttgaaggcgaaaaaggaaccaaccctgaagaactgattggcgcagcgcatgccgcatgtttctcaatggcgctttcattaatgctgggggaagcgggattcacgccaacatcaattgataccaccgccgatgtgtcgctggataaagtggatgccggttttgcgattacgaaaatcgcactgaagagtgaagttgcggtgccgggtattgatgcctctacctttgacggcatcatccagaaagcaaaagcaggatgcccggtctctcaggtactgaaagcggaaattacgctggattaccagttgaaatcgtaa

SEQ ID NO: 473917 - DNA, 279 bp, Shigella flexneri
atggctatgccttatatggaaggtgtcgcagaaaaatcggctgaccaatggttaatacaattgaccaatcaaattaaaaacatccctcaggctaaagacaaatctattttagaattacaggcacaaaactggcagaaaaatggtcagcatcaggctattccttcgcaacaactcgctcactggatgagcctattacaactgaatggagtgaaaaactatggttattatcccgacaattttctgcataaccaaggtaatgctgccaacttactgatttag

SEQ ID NO: 473918 - DNA, 1494 bp, Shigella flexneri
atgttacgtaatggaaataaatatctcctgatgctggtgagtataattatgctcaccgcgtgcatcagccagtcaagaacatcatttataccgccacaggatcgcgaatctttactcgccgagcaaccgtggccgcataatggttttgtggcgatttcatggcataacgttgaagacgaagctgccgaccagcgttttatgtcagtgcggacatcagcactgcgtgaacaatttgcctggctgcgcgagaacggttatcaaccggtcagtattgctcaaattcgtgaagcacatcgaggaggaaaaccgctaccggaaaaagcagtagtgctgacttttgatgacggctacctgagtttttatacccgcgtcttcccaattcttcaggccttccagtggcctgctgtatgggcccccgtcggcagttgggtcgatacgccagtggatgaacaagtaaaatttggcgatgagatggtcgatcgagaatattttgccacgtggcaacaagtgcgagaagttgcgcgttcccggctcgttgaggtcgcttctcatacatggaattctcactacggtattcaggctaattccaccggcagcttaatgcctgtatatgtaaatcgtgcatattttactgaccacgcacggtatgaaaccgcagcagaataccgggaaagaattcgtctggatgctgtaaaaatgacggaatacctgcgtacaaaggctgaggtaaatccacacgtttttgtttggccttatggcgaagcgaatggcatagcgatagaggaattaaaaaaactcggttatgacatgtttttcacccttgaatcaggtttggcaaatgcgtcacaattggattccattccgcgagtattaatcgccaataatccctcattaaaagagtttgcccagaaaattattaccgtacaggaaaaatcaccacaacggataatgcatatcgatcttgattacgtttatgacgaaaaccgccagcaaatggatcgcaatattgatgtgctaattcagcgggtgaaagatatgcaaatatcaaccgtgtatttgcaggcatttgctgatcccgatggtgatgggctggtcaaagaggtctggtttccaaatcatttgctaccaatgaaagcagatatttttagtcgggttgcctggcaattacgtacccgctcaggtgtaaacatctatgcgtggatgccggtattaagctgggatttagatcccacattaacgcgagtaaaatacttaccaacaggggagaaaaaagcacaaattcatcctgaacaatatcaccgtctctctcctttcgatgacagagtcagagcacaagttggcatgttatatgaagatcttgccggacatgctgcttttgatggcatattgttccacgatgatgctttgctttcagattatgaagatgccagtgcaccggctatcacggcttatcagcaagcaggctttagcgggagtctgagcgaaattcgataa

SEQ ID NO: 473919 - DNA, 513 bp, Shigella flexneri
atgaaaaatggtgttacaggcaacagtgctcaggcttatgttcgctggtatcaaaatgagcggcgtaagtacggtgtctcctgggctttcactgatttttccgacagtaaccagcgtcatgaagtctcaattgagggtcaggaacgcatctggtcttcaccatatttgattgtcgatttcctacccagtctgtattacgaacaaaatacagaacacgataccccatactacaaccctataaaaacgttcgatattgttccggcatttgaggcaagtcatttgttatggcgaagctatgaaaatagctgggagcaaatcttcagcgcaggtgttggtgcctcctggcaaaaacattatggcacggatgtcgtcacccaactcggctacgggcaacgcattagctggaatgacgtgattgatgctggcgcaacgctacgctgggaaaaacgaccttatgacggtgacagagaacacaacttatacgttgaattcgatatgacattcagattttaa

SEQ ID NO: 473920 - DNA, 168 bp, Shigella flexneri
atgacagccagagagcttgcttataacgcaccaggaaatcagggactgcgcattgattacgcgagtgtgttacaagcccgcggttggcctcgtgcagcagaaaatgaattaaaaaaagcagaagtgatcgagccacgtaatattaatctggaggttgaacaagcctag

SEQ ID NO: 473921 - DNA, 195 bp, Shigella flexneri
atgaccgagctcttttatcacaaggagaccattgccccggatttatccgatgaagaacttgcggatctcttttacagccacctagagagtgaaaattatccgggcgcgctaactgtcacccaacataccattaatacttcgccgcctttccttcggttaatgggcacgcctacgagcatcccgaatgatacctag

SEQ ID NO: 473922 - DNA, 942 bp, Shigella flexneri
atgtattcaagtagcagaaaaaggtgcccgaaaaccaaatgggctttgaaacttcttactgccgcatttttagcagcgagtcccgcggcgaagagtgctgttaataacgcctatgatgcattgattattgaagctcgcaagggtaatactcagccagctttgtcatggtttgcactaaaatcagcactcagcaataaccaaattgctgactggttacagattgccttatgggccgggcaagataaacaggttattaccgtttacaaccgctaccgtcatcagcaattaccagcgcgtggttatgcagctgtcgccgtcgcttatcgtaacctgcaacaatggcaaaactcgcttacactgtggcaaaaggcgctctctctggagccgcaaaataaggattatcaacggggacaaattttaaccctggcagatgcgggtcactatgatactgcgctggttaaacttaagcagcttaactctggagcaccggacaaagccaatttactcacagaagcctatatctataaactggcggggcgtcatcaggatgaattacgggcgatgacagagtcattacctgaaaatgcatctacgcaacaatatcccacagaatacgtgcaggcattacgtaataatcaacttgctgccgcgattgacgatgccaatttaacgccagatattcgcgctgatattcatgccgaactggtcagactgtcgtttatgcctacgcgcagtgaaagtgaacgttatgccattgccaatcgcgccctcgcccaatacgctgcattagaaattctgtggcacgataacccagaccgcactgcccagtaccagcgtattcaggttgatcatcttggcgcgttattaactcgcgatcgttataaagacgtcatttctcactatcagcgattaaaaaagacggggcaaattattccgccctag

SEQ ID NO: 473923 - DNA, 504 bp, Shigella flexneri
  misc_feature (11)..(20): n is a, c, g, or t
gtgcatattannnnnnnnnnttctagtcattatgagagctacaatttacacattgccgagttaaccaatgaaaatggtcaggtggtttggaaagcctcatatgttaccataatgattttcatgtggttaaccttgctttcggttaatctatactttaatggtttacgctatgatatctggaatggagtgacggtgattgctttttgtgccgtactgtacaatatctctctgttatttatgagcaggtatagcgtgtccacttggtatattagtcgcactattgaagtagtcagtaagttaaccgttatggtaatatttatgtgccatatattcagtgcgctacgagtaacaaagaacattgcacatcgcgatcccttaaccaatatatttaacagaaattatttttttaatgaactgacagttcaatcagcatcagccaaaaaaacgccttattgtgtcatgattatggatatcgaccacttcaaagaagtcaacgacacctga

SEQ ID NO: 473924 - DNA, 339 bp, Shigella flexneri
gtggtgaatatcattgggaaaagcatacgaccagatgaccttttagcgcgcgtcggcggcgaagagtttggcgtcttgctgacggacatcgatactgaacgtgcgaaagctttagcggaaaggattcgggaaaatgttgagcgtttaactggcgataatcctgaatacgctataccacaaaaagtgacgattagtattggcgctgttgtgactcaggaaaatgcgttaaacccgaatgagatctatcgactggctgataacgcactatacgaggcgaaagagaccgggcgtaataaggtggttgtgagggatgtggtgagtttttgtgagtcaccataa

SEQ ID NO: 473925 - DNA, 1536 bp, Shigella flexneri
atgcttatcattgatcaatctgctatcacccgcttttactggcaattgtactataatttcttaggttgcatcaccctgatgcgtggggaaacatgtatggtattcaacaaaaaaatgtttgtactcattataataccaggcattctgggggtgttactatcgtttgctatgtcaatatttcaaatgaatagagatacgacaattaccgccggtattctgttaaaacagcttgataatgttacgcaaattgtccagcatacgacaaagcttacctctattctggtgatgaagccctgcaaagacattcttgaacagttgattgctaacggagcattgactccctatgttcgaacaacgggtcttatagaaaataatttccaaatatgttcttcagttagcggtttcaaaaaaatgaatgttaacgatgtttacggtacgagctttcacaataaaaataaagaatcacgtatagtatcaattagcggtacaagttttgtgccaggtaaaacagcaatagtgttccttatgccaatagggaatgatatgacagcttttagtattgtagagtcacgatatatctatgatctaatggatgttcttgatgatgagaatgatgattcattttctcttcgttttactgaagggcctgcaattattagcggtgtaaataataatgacaggttatatatgttaaaaagagattttaattctgcgatcagtcaggctcgtcttacagttactacgccgatgatatcgttatatccctatatcattagcaatgtgctttatattttgccgttatctattattctctcttttattctctatttcttatggcagcactggatgtcacggaaaatgtcgctggcagaagaaattaaaaaaggaatgtcatccggagaattttctgtgcattatcaaccagtgtgcgacacgacaaccaaagcgtgtctgggggttgaagcgttaatgcgctggcaacgcgaagatggtaaaaatatatctccggtagtttttatccgcgctgcagaagaggaaaatttaataataccgttaactaaacatctctttgaactgattattcaggatgtacaaagctggaaagtgaaaaagccgtttcaccttgggataaatattgccgcggaacatcttgcacatcctgactttgttggtgatgttttacatattaaaaatgcaatatctgataaatttaatattgtccttgagattaccgaacgcaatctggttgaagacactgatcttgcattacagaaaataaatgaattaaggatccatggctgtgaatttgcagtcgatgattttggcacgggatattgttcccttggccttctgcaaaagttgtctgttgattatcttaaaatagataaaagctttatagacacacttactacagcggaagacgaaacgccagttttagatattattattaagctgagtaatcggctcaatttgataacgattgcagaaggtgtcagtactcctcaccagcagaatatcttattcataataacgtga

SEQ ID NO: 473926 - DNA, 492 bp, Shigella flexneri
atgactcaaagatattttctgttttcgggaataattttatgtgcttttattgcagcaattctgagccatattgcgtttcatcattccaatgaaccagcagagcaaaacatatcatgtaatgcccatgttattaatttcaccgatcatacaaaaatggatcaatatttttcgttaaatatgatttctgaaaataacacaggaaacatgtatctcacgggcgcatacacggtagatggaaaaaaaatgggcttcatccgccgatatgtgagttttacatacaagaaattccgtgataccgtttatctcaccacagttaaaatccaaaaaatacaaaaagatgataacatcagcgatgaaatccttgaaaatatcacttctgatttcttcataaaagcagacacttcaattaattattatgttacgcgtcaaaatgattataactacatattctctacaggcaggacaccacgattcatatgtattactcactaa

SEQ ID NO: 473927 - DNA, 321 bp, Shigella flexneri
atgtcttcttattttttcgatatggcttttcaaagcaaatctcacactataaaaaaaatagatgctttctcaaattatgctcaacaccctactcaggaaggatgcagttatttctatgataataattactttaattccgtagacatgctatcaccaattattgaaaaattgcagaaaatggaagtcaactgcaaaatacatccttacatttacattgcaacaaatgatagcatgagcgggttttatgctttcacctgtagtcaaatgttaaactctgaatcaccaaataattgcaactctctctattataaagcggagtaa

SEQ ID NO: 473928 - DNA, 1053 bp, Shigella flexneri
ttgatatgggtactgtcagaatccatcggcgctctggcactggtgccgctgggattgttatttaaaccacactatctgctgcgccatcgcaacccacggttgctttttgagtcgctgctcacgttagccatcacactgacgttaagctggctttcgatgctgtatctgccgtggccttttactttcattattgtgctgttgatgtggagcgccgtgcgcctgccacgaatggaagcctttttgatcttccttaccacggtgatgatggtgtcgctgatgatggccgcggatccctccctgcttgctacgccgcgtacgtacctgatgagccatatgccgtggctaccgtttttgctgatcctgctgcccgccaacatcatgaccatggtgatgtatgcctttcgtgcggaacgcaaacacatttccgaaagcgaaacccgctttcggaacgcgatggaatattccgctatcggtatggcgttagtgggcaccgagggacaatggctgcaatccaacaaagcactctgccagtttctcggttacagtcaggaagagctgcgcggactcacctttcagcaactgacctggccggaggatctcaataaagatctccaacaggttgaaaagctgataagcggtgaaataaacacctattcaatggaaaaacgctactacaaccgcaatggcgatgttgtctgggcgttgcttgccgtctcactggtgcgccacacggatggcacgccgctctattttatcgctcagattgaagacattaacgagctaaaacgcaccgaacaggtgaatcagcaactgatggagcgcatcacgctggctaacgaagcgggcgggattggcatctgggagtgggagctgaagccgaatatttttagctgggataagcggatgttcgagctgtatgaaattcctccgcatatcaaaccgaactggcaggtgtggtacgagtgcgtgctgccggaagatcgccagcatgccgaaaaagtgattcgttgcaatcacgctcgccctttaagctggaatttcgcattgccgtga

SEQ ID NO: 473929 - DNA, 1794 bp, Shigella flexneri
gtgaaagatggcatccgccatatccgcgccctcgccaaccgggtactgaataaagaaggcgaagtcgaacgcctgctcggcattaatatggatatgaccgaggttaaacagcttaacgaggcattgtttcaggaaaaagagcgcctgcacattacgctggattccatcggtgaagccgtagtctgtattgatatggcgatgaaaattacctttatgaatccagcggcggagaagatgagcggctggacgcaggaagaagcattaggtgttccgctcctgacggtgttgcatattacttttggcgacaacggaccattaatggagaacatttacagtgccgacacctcacgttccgcgattgaacaagatgtggtgttgcactgccggaacggcggcagttacgacgtgcattacagtattacgccgttaagtactctggacggcagcaatataggctcggtactggtgattcaggacgtcaccgaatcacgcaaaatgctgcgccagctgagctacagcgcctcccatgatgcactgacgcatctcgccaatcgcgccagttttgagaagcaactgcgtatcctgctgcaaacggtaaacagtacacatcagcgacatgccctggtgtttatcgatcttgatcgctttaaagcggtgaatgacagcgccgggcatgcggcgggtgacgctttactgcgcgaactggcgtcgttgatgctgagtatgctgcgctccagcgacgtgctggcgcgactcggtggtgatgaatttggtctactgttgccagactgtaatatcgaaagtgcgcgttttatcgctacacgcattatcagtgccgtgaatgattatcactttatatgggaaggccgtgtgcatcgggtaggtgccagtgccgggattaccttgattgatgacaacaatcatcaggcggcagaagtgatgtcgcaggctgatatcgcctgttatgcctccaaaaatggtggacggggccgggtgacggtttacgaaccacagcaagctgccgcacatagcgaacgggcggcgatgtcgcttgatgaacagtggcggatgattaaagagaatcagttgatgatgatcgcccacggtgtcgcttcgccgcggatcccggaagcgcgtaatttgtggctgatttcacttaagctctggagttgcgaaggcgagattattgatgaacaaaaatttcgtcgtagcttcagcgatccggcacttagccatgctcttgaccgacgggtattccacgaatttttccagcaggccgcaaaagcggttgccagtaaaggcataagcatcgccctccccctttccgttgccggtttgagtagcgccacgctggtgaatgatctgcttgagcagctggaaaatagccctctaccaccacggttattacatctgattattccggctgaagcgattttagatcacgcagaaagcgtgcaaaaactgcggctggcgggatgtcggatagtgctcagccaggtgggccgcgatctgcaaatcttcaactcgctgaaagcgaatatggcagattacctgctacttgatggtgagttatgcgccaacgtgcagggtaatttgatggatgagatgctgattacgattattcaggggcacgctcagcgactcgggatgaaaaccatcgccgggccagtcgttttacccttagtgatggatacgctttctggcatcggcgtcgatctgatttatggtgatgtgattgccgatgcccaaccgctggatttgctggtgaatagcagttatttcgcgattaactga

SEQ ID NO: 473930 - DNA, 849 bp, Shigella flexneri
atgtatatcctgaactggcagccgccgtatgactggtcgtggatgttgggatttctcgccgcccgtgcggtgagtggtgtggaaacggtcgcggacagttattatgcccgtagtctggcagtgggcgaatatcgcggcgtggtgactgctattccggatatagcccgccatactctgcacataaatttaagtgcaggtttagaacccgttgccgctgagtgtctggcgaaaatgagccgcctgcttgatctgcaatgtaacccgcagattgttaacggtgcgttgggcaagttaggcgcggcgcggcccggattgcgtttacccggcagtgttgatgcttttgagcagggcgtgcgggcgattttaggccaactggtgagcgtggcgatggcggcaaaattgaccgccagagtggcacagctttatggcgaacggctggatgattttccggagtatatctgcttccccacgcctcagcggctggcagcagccgacccgcaggcattaaaagcgttaggtatgccgttgaaacgggcagaggcgctgattcatctggcaaatgcggcgctggagggcaccttaccaatgacaataccgggcgatgtggagcaggcgatgaaaacgctgcaaacttttccgggtatcgggcgctggacggcgaattatttcgccttgcgcggctggcaggcgaaagatgtttttctgccggatgattatctgattaaacagcgatttctggggatgacaccggcacaaatccgccgttatgccgagcgctggaagccctggcgttcttatgcgctgttgcatatctggtatacggaaggctggcaaccagacgaagcatga

SEQ ID NO: 473931 - DNA, 858 bp, Shigella flexneri
gtgtttattggttttgattacggtacagcaaactgttcagtggcggtcatgcgtgacggtaaaccgcatttgctaaaaatggaaaacgacagcacgctgctgccttcaatgctttgcgcgccaacgcgtgaagcggtaagcgaatggctgtaccgccatcatgacgttccggcagacgacgatgaaacgcaggcgttgttacgacgggcgattcgttataaccgcgaagaagatatcgatgttacagcgaaaagcgtgcagttcggtctttcctcactggcacagtacattgatgatccagaagaagtgtggtttgtgaaatcaccaaaatcgttcctcggtgccagcggcttaaaaccgcagcaggtagcgctgtttgaggatctggtctgcgcaatgatgttgcacattcgccagcaggcgcaggcgcagctgccagaagcgattactcaggcggtgattggtcgcccgatcaacttccaggggctgggcggcgatgaagcaaacgcccaggcgcaggggattctggaacgcgcggcgaagcgtgccgggtttaaggatgtggtattccagtacgagccggtagcggctgggctggattacgaagccaccttgcaggaagaaaaacgggtgctggtggtggatatcggcggtggtacgactgactgttcattgctgctgatggggccgcagtggcgttcgcgtctcgatcgtgaagccagtctgctgggtcacagtggttatcgtattggcggtaacgatctggatatcgccctagcgtttaaaaacctgatgccactgctgggtatgggtggcgaaaccgaaaaaggcatcgccctgccgatcctgccgtggtag

SEQ ID NO: 473932 - DNA, 390 bp, Shigella flexneri
gtggccctgttacagaaagtctggcgtcagcgtttaagctatcgcctggtgcgtagcgcagaagagtgcaaaattgctctttcaagcgtagcggaaacccgcgcctcactgccgtttatcagcaatgaactggctacgctgattagccagcgagggctggaaagcgccctcagccagccactggcgcggattctggaacaggtgcaactggccctggataacgcccaggaaaaaccggacgttatctacctgaccggcggtagcgcccgttctccgctgattaaaaaagcgctggcagaacagttgccgggcattccgattgcaggcggcgatgactttggctccgtcaccgccgggctggcacgctgggcggaagtggtatttcgttaa

SEQ ID NO: 473933 - DNA, 174 bp, Shigella flexneri
atggcgaaaatggccgccaaacgacatcggctggaatcgacgttgactgtcggcgcgacagagttgcagcgattccgccttcatgctccagcacggaccatgccgttgatggaaccgttacgtcaggcggcagaaaaactggctcaggcgcaggctgatttaagccgctgctga

SEQ ID NO: 473934 - DNA, 126 bp, Shigella flexneri
atgttgcctctattcccggcgttggccctgcgcgtaaagcggcgttatggtcttttggtattgaaacagcagcaggtgttacccgtcgtggcgttaagcaagttaaagggtttggtgatcatctga

SEQ ID NO: 473935 - DNA, 681 bp, Shigella flexneri
atgcaggttgcctggctaaatgaccagcagccattactggtgatgttccttgctgatggcgcaggtagcgtttcgcaggggggcgaaggcgcgatgctcgccgtcaatgaagcgatggcttatatgtcgcaaaaagtgcagggtggggaattggggcttaatgatatcctcgccacggatattgtgctgaccgttcgtcagcgactttttgccgaggcggaagccaaagaattagcagttcgcgattttgcctgcacgtttctgggattgatttcatcggctaatggcaccttgattatgcagattggcgatggcggcgtggtggtggattttggtcacggtctgcaattgccgcttacgccgatggtgggtgaatatgccaatatgacgcacttcattaccgatgaagatgccgtttccagactggaaactttcaccagcactgagcgtgtgcataaagttgcagcatttacggatggtatccagcgactggcgttaaatatgttggataattctccgcatgtgcctttctttaccccgtttttcaatggactggcgtcagcaacgcaggaacaactcgatttattacctgaattgttaaagcagtttttgtccagcccggcggtaaacgagcgtacggatgatgataaaacgttggcactggcgctgtggttaccatga

SEQ ID NO: 473936 - DNA, 660 bp, Shigella flexneri
atgagcgaacaaatcacgtttgccaccagcgattttgccagtaacccggaaccacgttgcccctgcattctgctgctggatgtttctggctcgatgagtggcagacctattaatgaacttaacaccggattggttacctttcgcgatgagctgcttgccgattcgctggctttaaaaagagtggaactcggcattgtgacgttcggcccggtgcatgtggaacaaccctttaccagcgccgctaatttttttccgcccatcctgtttgcccagggcgatacaccaatgggtgcggccattaccaaagccctggatatggtagaggagcggaaacgtgagtatcgtgcaaatggtatttcgtattatcgcccgtggattttcctgattaccgatggtgcaccaatcgatgagtggcaggctgcagccaacaaagtgtttcggggggaagaagataaaaggtttgctttcttttccatcggtgttcagggggcggatatgaagactctggcacaaatcagcgttcgtcagcctttgcctctgcaaggattacaattccgtgaactgtttagctggttatccagttcgctgcgttcggtttcccgctccacgccgggaacggaagttgtgctggaagcgccaaaaggctggacgtcagtgtga

SEQ ID NO: 473937 - DNA, 486 bp, Shigella flexneri
atgaggggatctctcagcgcccagcgcgtgttgctggacgcattaaaactggcgaatcgcaccggatttatcagtcattttgtcatcgaaggcgaagcgatggcgcaacaactgcgccagctgattcaacttaatacgctgccggaactggaacagcatcgcgcgcagcgtattctgcgagaaatcaatcaacatcatcggcataaattcgcccatttcgatgagaatttcgttgaacgtctgctaaatcatccggaagtgccagaactaatccgcaccagcccgttgacccaacgtgaatggcaggtcctggggctgatctactccggttacagcaatgaacaaattgcgggcgaactggaagtggcggcaaccaccatcaagacgcatatccgcaatctgtaccaaaaactcggcgtcgcccaccgtcaggctgccgtgcagcacgcgcagaaactgctgaagatgatgggttatggggtgtga

SEQ ID NO: 473938 - DNA, 1017 bp, Shigella flexneri
atgaaaaggatgattgcgctggatggcgcacagggcgaaggcggcgggcagatcctgcgctcggcgctgagcctgtcgatgataaccggccagccatttaccatcactggcattcgagccggacgggcgaaaccggggctgctgcgccagcatctgaccgcggtaaaagcggctgcggaaatttgtagggcaacggtggaaggcgcggagctgggatcgcagcgtctggtcttccggcctggcaccgtgcgcggcggcgattaccgctttgctatcggtagcgccggaagttgtacgctggtgctgcaaacggtgctgcccgcgctgtggtttgccgatggaccttcgcgtgttgaagtgagcggcggcaccgataacccgtcggcgccgcctgcggattttatccgccgggtgctggagccgctgctggcgaaaataggaattcatcagcaaaccacgctgttacgtcacggtttttatcctgccggaggcggtgtggtggcaacggaagtctcgcccgtggcatcgtttagcaccttgcaacttggcgagcgcgggaacattgtgcagatgcgtggagaagttctattagctggtgtgccgcgccatgttgctgagcgtgaaatcgctacactggcggggattttttccctgcatgaacagaatattcataacctgccgcgcgaccaggggccgggtaataccgtctcgctggaagtcgaaagtgaaaatatcactgaacgctttttcgtcgtcggtgaaaagcgcgtcagtgccgaggtggtagccgcgcagttagtgaaagaggtgaaacgctacctggcaagcccagcggcggtgggggaatatctcgccgaccaactggtactgccgatggcgctggcgggcgcgggagaatttacggtcgcccatccttcatgccatctgctgaccaatatcgcggtggtggagcgtttcttgccggtgcggtttggtttgatagaaacagatggcgtaacgcgggtgagtattgaatga

SEQ ID NO: 473939 - DNA, 1227 bp, Shigella flexneri
atgaattacgaattactgaccactgaaaatgccccggtaaaaatgtggaccaaaggcgtgccggtagaagccgatgcgcgtcagcaacttattaatacggcgaagatgccgtttattttcaaacatattgcggtaatgcctgatgtacacctgggtaaaggttccaccattggtagcgtgatcccgaccaaaggggcgattattccggcggcggtgggcgtggatattggctgtggaatgaacgcgctgcgtaccgcgttaacggcggcagacctgcctgaaaacctggcggagctgcgtcaagcgattgaaacggccgtaccacacgggcgtactaccgggcgttgtaaacgtgataaaggcgcatgggaaaagccgccttttaacgtcgatgcgaaatgggctgagctggaggccggttatcagtggttaacgcaaaaatatccgcgtttccttaacactaacaactataaacacctgggaacgctgggaacgggtaaccactttattgaaatctgccttgatgagtcggagcaggtgtggattatgctgcactccggttcacgcggaattggtaacgccatcgggacttactttatcgatctggcgcaaaaagagatgcaggaccaacttgagacgttgccgtcgcgtgatctggcgtactttatggaaggtacggaatactttgatgattacctaagagccgtggcctgggcgcagcttttcgccagccttaaccgcgatgcgatgatggaaaatgtggtaacggcgttgcagagcattacgcagaaaacggtcagacagccacaaacgctggcgatggaagagatcaactgtcaccacaactatgtgcaaaaagaacagctctttggtgaagagatctacgtgacgcgtaaaggtgcggtgtctgcgcgtgctggtcaatatggaattattcccggttcgatgggagcaaaaagctttatcgtccgtgggctgggaaatgaagagtcgttctgttcgtgcagccacggtgccgggcgggtaatgagccgaactaaagcgaaaaaactgttcagcgtggaagaccaaattcgtgccaccgcgcatgtggaatgccgtaaagatgccgaagtgatcgacgaaatcccgatggcgtataaagatattgatgcggtgatggcggcacaaagcgatctggtggaagttatctacaccctgcgtcaggtggtgtgcgtaaaaggataa

SEQ ID NO: 473940 - DNA, 1599 bp, Shigella flexneri
atgcgtaaaacagtggcttttggctttgtcggtaccgtgctggattatgccggacgcggcagtcagcgctggtcaaaatggcgtccgtcactctgtatataccagcaagaatcgttggtcatcgatcgactggaattattgcacgatgcccgctcgcgctcgctatttgaaacgcttaaacgcgatatcgccagcgtttcgccagaaacagaagtggtgggcgttgagattgaactgcataacccgtgggatttcgaagaggtttacgcctgcctgcatgatttcgcccgtggttacgagtttcagccagaaaaagaagactatttaattcacatcaccaccggcacccacgtcgcgcagatttgctggtttctgctggcggaagcgcgttatctacccgcccggttgatacaatcttcaactccgcgcaaaaaagaacagccgcgcggcccaggtgaagtgacgattatcgatctcgatttaagccgttataacgccatcgccagccgctttgccgaggaacggcagcaaacgctcgatttcctcaaatccggtattgccacgcgtaacccccacttcaaccgcatgattgagcagatcgaaaaagtggcgattaaatcccgcgcgccgattctgcttaacggcccgaccggcgcaggtaagtcatttctggcgcgacgcatcttcgagttaaaacaggcacggcatcagtttagcggcgcgtttgtggaagtgaactgcgccaccctgcgcggcgataccgcgatgtcgacgctgtttggtcatgtgaaaggcgcgtttaccggggcgcgggaatctcgtgaaggattattacgcagcgccaacggcggaatgttgtttcttgatgagattggcgaactgggcgcagacgaacaggcaatgctgctgaaagctattgaagagaaaaccttttacccgtttggcagcgatcgccaggtgagcagtgattttcagcttatcgccggaacggtgcgcgatttgcgccagctggttgccgaaggcaaattccgcgaagatctgtacgcgcggatcaatctctggaccttcaccctgccgggtctacgccagcgccaggaagatattgaaccgaacctggattatgaagtggagcgccacgccacactcactggtgacagcgtgcgttttaacaccgaagcgcggcgtgcctggctggcctttgcaacatctccccaggcaacatggcgcggtaactttcgcgaactttctgccagcgtcacgcggatggccacctttgccactagcggacgcatcactctggacgtggtggaagatgagataaaccgtctgcgctataactggcaggagagccgcccctccgcgcttacggcgttgctgggcgcagaggcagaaaacatcgatctcttcgaccgtatgcaactggaacacgttatcgctatctgccgccaggcaaagtcgctttctgctgccggacgacagctttttgatgtttcgcgccagggcaaagccagcgtcaatgacgcggatcggctacgcaaatacctggcgcgttttggtctgacgtgggaagccgtgcaggatcagcacagctccagttga

SEQ ID NO: 473941 - DNA, 759 bp, Shigella flexneri
atgaaacaaacacaacgtcacaacggtattatcgaactggttaaacagcagggttatgtcagtaccgaggaactggtggagcacttctccgtcagcccgcagactattcgccgcgacctcaacgagctggcagagcaaaacctgatcctgcgccatcatggcggcgcggcgctgccttccagttcggttaacacgccgtggcacgatcgtaaagccacccagaccgaagaaaaagagcgcatcgcccgcaaagtggcggagcaaatccccaatggctcgacgctgtttatcgatatcggcaccacgccggaagcggtggcgcacgcgctgctcaatcacagcaatttgcgcattgtcaccaacaatctcaacgttgctaacacgttgatggtaaaagaagatttccgcattattctcgccggtggcgaattacgtagccgcgatggcgggatcattggcgaagcgacgctcgattttatctcccagttccgccttgatttcggcattctggggatcagcggcatcgacagcgacggctcgctgctggagttcgattaccacgaagttcgtaccaagcgcgccattattgagaactcgcgccacgttatgctggtggttgaccattcaaaatttggccgtaatgcgatggtcaatatggggagcatcagcatggttgatgccgtctacaccgacgccccgccgccagtaagcgtgatgcaggtgctgacggaccaccatattcaactggagctgtgctga

SEQ ID NO: 473942 - DNA, 831 bp, Shigella flexneri
atgttgatgattacctcttttgctaacccccgcgtggcgcaggcgtttgttgattacatggcgacgcagggtgttatcctcacgattcaacaacataaccaaagcgatgtctggctggcggatgagtcccaggccgagcgcgtgcgggcggagctggcgcgttttctcgaaaacccggcagatccgcgttatctggcggccagctggctggcaggccataccggcagtggcctgcattatcgccgttatcctttctttgctgccttgcgtgaacgcgcaggtccggtgacctgggtgatgatgatcgcctgcgtggtggtgtttattgccatgcaaattctcggcgatcaggaagtgatgttatggctggcctggccattcgatccaacactgaaatttgagttctggcgttacttcacccacgcgttaatgcacttctcgctgatgcatatcctctttaacctgctttggtggtggtatctcggcggcgcggtggaaaaacgcctcggtagcggtaagctaattgtcattacgcttatcagcgccctgttaagcggctatatgcagcaaaaattcagcgggccgtggtttggcgggctttctggcgtggtgtatgcgctgatgggctacgtctggctacgtggcgaacgcgatccgcaaagtggcatttacctgcaacgtgggttaattatctttgcgctgatctggattgtcgccggatggtttgatttgtttgggatgtcgatggcgaacggagcacacatcgccggattagccgtgggtttagcgatggcttttgttgattcgctcaatgcgcgaaaacgaaaataa

SEQ ID NO: 473943 - DNA, 327 bp, Shigella flexneri
atggatcagttcgaatgtattaacgttgccgacgcgcaccagaagttgcaggaaaaagaggcggtgctggtcgatattcgcgatccacagagtttcgctatggggcatgcggtgcaggctttccatttaaccaacgacacgctgggcgcgtttatgcgtgataacgactttgacactccggtgatggtgatgtgttatcacggcaatagcagcaaaggggcggcgcagtatctgctgcaacagggctacgatgtggtctatagcattgacggcggctttgaagcctggcagcgacagtttcccgcagaggtggcgtacggcgcgtaa

SEQ ID NO: 473944 - DNA, 1506 bp, Shigella flexneri
atggaaaccaaagatctgattgtgataggtggcggcatcaatggtgctggtatcgcggcagacgccgctggacgcggtttatccgtgctgatgctggaggcgcaggatctcgcttgcgcgacctcttccgccagttcaaaactcattcacggtggcctgcgctaccttgagcactatgaattccgcctagtcagcgaggcgctggctgaacgtgaagtgctgctgaaaatggctccgcatatcgccttcccgatgcgttttcgcctgccacatcgtccgcatctgcgcccggcgtggatgattcgcattggtctgtttatgtacgatcatctgggtaaacgcaccagcctgccgggatcaactggtttgcgttttggcgcaaattcagtgttaaaaccggaaattaagcgcggattcgaatattctgactgttgggtagacgacgcccgtctggtactcgccaacgcccagatggtggtgcgtaaaggcggcgaagtgcttactcggactcgcgccacctctgctcgccgcgaaaacggcctgtggattgtggaagcggaagatatcgataccggcaaaaaatatagctggcaagcgcgcggcctggttaacgccaccggcccgtgggtgaaacagttcttcgacgaggggatgcatctgccttcgccttatggcattcgcctgatcaaaggcagccatattgtggtgccgcgcgtgcatacccaaaagcaggcctacattctgcaaaacgaagataaacgcattgtgttcgtgatcccgtggatggacgagttttccatcatcggcaccaccgatgtggaatacaaaggtgatccgaaagcagtgaagattgaagagagtgaaatcaattacctgctgaaagtgtataacgcgcactttaaaaagcagctaagccgtgacgatatcgtctggacctactccggtgtgcgtccgctgtgtgatgatgagtccgactcgccgcaagccattacccgtgattacacccttgatatccatgatgaaaacggcaaagcaccgctgctgtcggtattcggcggtaagctgaccacctaccgaaaactggcagaacatgcgctggaaaaactgacgccgtattatcagggtattggcccggcgtggacgaaagagagcgtgctgccgggtggtgccattgaaggcgaccgcgacgattacgccgctcgcctgcgccgccgttacccgttcctgactgaatcgctggcacgtcactacacgcgcacttacggcagcaacagcgagctgctgctcggcaatgcgggaacggtaagcgatctcggggaagatttcggtcatgagttctacgaagcggaactgaaatacctggtggatcacgaatgggtccgccgcaccgacgatgccctgtggcgtcgcacaaaacaaggcatgtggctgaatgcggatcaacaatctcgtgtgagtcagtggctggtggaatatacgcagcagaagttgtcgctggcgtcgtaa

SEQ ID NO: 473945 - DNA, 282 bp, Shigella flexneri
atgcaaaatagaaaatggattttgacctcgctggtaatgacttttttcggcatcccaatactgacgcaattttttgcagcggttattgccatgctgggggctgggcttgccgctattcctgaggtttgcaatttactctttacgccaacaatttaccttctgctcaatatttttatgctgacgctgggcgcattaatgctatttttctcggggcgagtggggaacgtgcctgagttttgttacgttgggtatgatggcgtgggctttgcggtaattccctga

SEQ ID NO: 473946 - DNA, 432 bp, Shigella flexneri
gtggcgttaaatctcgcttcaggtgaagggaatttctttatccgtcctggcggcgtgttttatgtcgcgggagataaagtcggcatcgttcgtctggatgcttttaaagccagtaaagatattcagtttgcggtgcagtcaggaccaatgttgatggaaaacggtgtaattaatccgcgtattcatcccaacgtcgcctcacgtaaaattcgtaacggtgttgggattaataaacatgggaatgccgtgtttttgttgagccagcaggcgacaaatttttatgattttgcctgttatgccaaagcgaaactgaacgttgagcagctgctttatcttggtggcacgatttcacatatgtatatgaaaggcggggcaatcccgtggcaacgctatccttttgtcaccatgatttccgtcgagcggaaaggttag

SEQ ID NO: 473947 - DNA, 2163 bp, Shigella flexneri
atggacgtttcttacctgctcgacagccttaatgacaaacaacgcgaagcggtggccgcgccacgcagcaaccttctggtgctggcgggcgcgggcagtggtaagacgcgcgtactggtgcatcgtatcgcctggctgatgagcgtggaaaactgctcgccatactcgattatggctgtgacgtttaccaacaaagcggcggcggagatgcgtcatcgtatcggacaactgatgggcaccagccagggcggcatgtgggtaggcaccttccacgggctggcgcaccgcctgctgcgtgcgcaccatatggacgccaatctgccgcaggatttccagatcctcgatagcgaagaccagctacgcctgcttaagcgtctgatcaaagccatgaacctcgacgagaagcagtggccgccgcgccaggcaatgtggtacatcaacagccagaaagatgaaggcctgcgtccgcatcatattcaaagctacggtaatccggtggagcagacctggcagaaggtgtatcaggcgtatcaggaagcgtgcgatcgcgcgggcctggtggacttcgccgagctgctgctgcgcgctcacgaactgtggcttaacaagccgcatatcctacaacactaccgcgaacgttttaccaatatcctggtggacgaattccaggataccaacaacattcagtacgcgtggatccgcctgctggcgggcgacaccggcaaagtgatgatcgtcggtgatgacgaccagtcaatctacggctggcgcggggcgcaggtggagaatattcagcgtttccttaatgatttccccggtgccgaaattattcgtctggagcaaaactaccgctctaccagcaatattctgagcgccgctaacgccctgattgaaaacaataacgggcgtctgggtaaaaaactgtggaccgatggcgcggacggtgagcctatttccctctattgcgcttttaacgaactcgatgaagcgcgttttgtggttaaccgcatcaaaacctggcaggacaacggcggggcgcttgccgagtgcgccattctctaccgcagtaacgcccagtcgcgtgtgctggaagaagcactgttgcaggcgagtatgccgtaccgtatttacggcgggatgcgcttcttcgaacgccaggaaatcaaagatgcgctctcgtatctgcgcctgattgccaaccgtaacgacgacgcggcctttgagcgtgtggtgaatacgccaacgcggggtattggtgaccggacgctggacgtggtacgtcagacatcgcgcgatcgccagttaacactctggcaggcatgtcgtgaactgttgcaggaaaaagccctcgccggacgtgctgccagcgccttacagcggtttatggaactgatcgacgccttagcgcaggaaactgccgatatgccgctgcatgtacagactgaccgggtaattaaagactccggcctgcgtaccatgtacgagcaggagaagggcgaaaaaggtcagacgcgtatcgaaaacttagaggaactggtgacggcaacgcgccagttcagctacaacgaagaagacgaagatttaatgccgctgcaggcgttcctatcccatgcggcgctggaagcaggcgaagggcaggcggatacctggcaggatgcggtacaactgatgaccatgcactcggcgaaaggtctggagttcccgcaggtgtttatcgtcggtatggaagagggcatgttcccaagccagatgtcgctggatgaaggcgggcgtctggaagaagaacgccgtctggcctacgttggcgtaacccgcgcgatgcagaaactgacgctgacctacgcggaaactcgccgtctgtatggcaaagaggtttaccatcgcccgtcgcgctttattggcgagttgccggaagagtgtgtggaagaggtgcgcctgcgcgccacggtaagccgcccggtcagccatcagcggatgggtacgccgatggtcgagaacgacagcggctacaagctcggccagcgtgtacgccacgctaagtttggtgaaggcaccatcgtcaatatggaaggcagcggtgaacatagccgtttgcaggtggcattccagggccagggaatcaaatggctggtggcagcttacgcccggctggagtcggtgtaa

SEQ ID NO: 473948 - DNA, 717 bp, Shigella flexneri
atgcgtttttaccggcctttggggcgcatctcggcgctcacctttgacctggatgataccctttacgataaccgtccggtgattttgcgcaccgagcgagaggcgcttacctttgtgcaaaattatcatccggcgctgcgcagcttccagaatgaagatctgcaacgcctgcgccaggcggtacgggaagcggaacccgagatttatcacgacgtgacacgttggcgttttcgttcgattgaacaagcgatgctcgacgccgggctgagtgccgaagaagccagtgcaggcgcacacgcagcaatgattaactttgccaaatggcgcagccgaatcgacgtcccgcagcaaactcacgacaccttaaaacagctggcgaagaaatggccgctggtggcgatcaccaacggtaacgcccagccggaactgtttggtttgggggattattttgagtttgtgctgcgcgctggcccgcacgggcgctcaaaaccgttcagcgatatgtactttttggctgcggaaaaactcaacgtgccgatcggcgagatcttacatgttggggacgatctcaccactgacgtgggtggggcaattcgcagcggaatgcaggcttgttggatcagaccggaaaatggcgatctgatgcaaacctgggacagccgtttactgccacatctggaaatttcccggttggcatctctgacctcgctgatataa

SEQ ID NO: 473949 - DNA, 897 bp, Shigella flexneri
atgaccgatttacacaccgatgtagaacgctacctacgttatctgagcgtggagcgtcagcttagcccgataaccctacttaactaccagcgtcagcttgaggcgatcatcaattttgccagcgaaaacggcctgcaaagctggcaacaatgcgatgcagcgatggtacgcaattttgctgtacgcagtcgccgtaaagggctgggagcagcaagtctggcgttacggctttctgcgctacgtagcttttttgactggctggtcagccagaacgaactcaaagctaacccggcgaaaggagtttcggcaccgaaagcgccgcgtcatctgccgaaaaatatcgacgtcgacgatatgaatcggctgctggatattgatatcaacgatcccctcgctgtacgcgaccgtgcaatgctggaagtgatgtacggcgcgggtctgcgtctttccgagctggtggggctggatatcaaacacctcgacctggagtccggcgaagtgtgggtgatggggaaaggcagcaaagagcgccgcctgccgattggtcgcaacgctgtggcgtggattgagcactggcttgatttgcgcgacctgtttggtagcgaagacgacgcgctttttctgtcgaaactgggcaagcgtatctccgcgcgtaatgtgcagaaacgctttgccgaatggggcataaaacaagggctgaataatcacgttcacccacataaattacgtcactcgttcgctacgcatatgctggagtcgagcggcgatcttcgtggtgtgcaggagctactgggtcatgccaacctctccaccacgcaaatctatactcatcttgattttcaacaccttgcctcggtgtacgatgcggcgcatccacgcgccaaacgggggaaataa

SEQ ID NO: 473950 - DNA, 708 bp, Shigella flexneri
atgaagcaaccaggggaagaactgcaggaaacactcacggagcttgatgaccgggcggttgtcgattatctgattaaaaatcctgagttttttatccgcaatgcgcgcgcagtagaagcgatacgtgtgccgcatccggtacgcggcaccgtttcgttggtcgagtggcacatggcccgcgcacgtaatcacattcatgttctggaagagaacatggcgttgttgatggagcaggctatcgccaacgaagggctgttttatcgcctactctacctgcagcgcagtctcaccgccgccagcagtctcgacgatatgctgatgcgctttcaccgctgggcgcgcgatctcggcctagctggtgcgagtctgcgcctgtttccagatcgctggcgcttaggtgcgccgtcgaaccacactcatctggcattaagccgtcagtctttcgaaccgctgcgtattcagcgtttggggcaggaacagcactatcttgggccgcttaacggaccggagctgctggtggtgctaccggaagcgaaagcggtgggatcggtggcgatgtcgatgctgggaagcgatgctgatttgggtgttgtgctgtttaccagtcgcgatgccagtcactatcaacaagggcagggaacgcagttacttcatgaaattgcgctgatgttgccggagcttctggagcgttggattgaacgcgtatga

SEQ ID NO: 473951 - DNA, 825 bp, Shigella flexneri
atgcagttctcgaaaatgcatggccttggcaacgattttatggtcgtcgacgcggtaacgcagaatgtctttttttcaccggagctgattcgtcgcctggcggatcggcacctgggggtagggtttgaccagctgctggtggttgagccgccgtatgatcctgaactggattttcactatcgcattttcaatgctgatggcagtgaagtggcgcagtgcggtaacggtgcgcgctgctttgcccgttttgtgcgtctgaaaggactgaccaataagcgtgatatccgcgtcagcaccgccaacgggcggatggttctgaccgtcaccgatgatgatctggtccgcgtaaatatgggcgaacccaacttcgaaccttccgccgtgccgtttcgcgctaacaaagcggaaaagacctatattatgcgcgccgccgagcagacaatcttatgcggcgtggtgtcgatgggaaatccgcattgcgtgattcaggtcgatgatgtcgataccgcggcggtagaaacgcttggtcctgttctggaaagtcacgagcgttttccggagcgcgccaatatcggttttatgcaagtggttaagcgcgagcatattcgtttacgcgtttatgagcgtggggcaggagaaacccaggcctgcggcagcggcgcgtgtgcggcggtggcggtagggattcagcaaggtttgctggacgaagaagtacgcgtggaactccccggcggtcgtcttgatatcgcctggaaaggtccgggtcacccgttatatatgactggcccggcggtacatgtctacgatggatttattcatctatga

SEQ ID NO: 473952 - DNA, 204 bp, Shigella flexneri
atgaaaaacgtgtttaaggcactcactgtattacttactctcttcagcctgacgggctgcggtctgaaaggtccgctctatttcccgcctgcagataaaaacgcaccgccgccgaccaaaccggtagagacgcaaacgcaatccacggtgccggataaaaacgatcgcgccactggcgatggtccatcccaggtgaattactaa

SEQ ID NO: 473953 - DNA, 630 bp, Shigella flexneri
atgcactatcgcaatgtggtttgtttgttgtcttgttcattgtttttatcgtcggcatggggatgtcggctttccgcacctgaacataatatttaccagaaacagggaaaaggcgtggtgtacctgcgcccttataaagaaacaaatctttctctacctgacgtgaattacaagagtttgcgtcggttacccaatttattaatagacccgacaacactagacgaatgggataaagaaccgcctctgactgatttgacaaccgactacctctatgagggcgcacaggcctggtatcctcattattcatggcatagcgatggtcgcaatatcctctacgcgggtgaagttgtgcaaaaccctcccggcacacctcccgtcgatgtcgcctcgttcaaggcatggggtgattttgccgcagataaacacagtctctattttgaaggcaagcgcaccgatgacaatggtggtggaaatagcttggatatcaaaacgctgcatcaggtggaattccggcctccctgggatcctgacttactggggctgatattacgtgacgctaatttcttgtatatcaatgggcatcgcctcgctgaccccgagagtttccgtgtgctggcgcagaagtcctag

SEQ ID NO: 473954 - DNA, 627 bp, Shigella flexneri
atgggccgcttcgcggtcgataaatatagcctctattttgacggacagcgcaccgaaagtaatagcggcgcgtcacgtgttgagctggcgacactaaaagctatcgaaggtaactctaccacgctggtggatagtaaaaatctctacttgtccggtcgacgtcaggggagcagcagtgatgttactgtattagaaaaaagatggtggggtattaatccacgtcttatgagtgtaaacagaaattcatattccaatgatctgcttatccgcagtgggcagaatatttatttaaatggcgttcaccttacggcgaatgcagactcatttgagataattcgctggatacctcattcactgctggtttttcgcgacaataagggtctgcatcgttatccctttggtcaattatcaggcaaagcgatacccgtagatgatgacgtctcttttgaagtaggggaaagtcgcgttcgctggcgtaaacagctcacgcccgaccgtcagtggagcaagtggatagacctaccaggtattgaacctgaacaattcggtaatgactccaacttactgatagtgttttatgttcagataatgcccgatgaccttgtcatgcagctccaccgattttga

SEQ ID NO: 473955 - DNA, 825 bp, Shigella flexneri
atgaaaaaggtcgcaattgtcgggttagggtggttaggtatgccgctggcgatgtcactttcagcgcgaggctggcaagtcaccgggagtaaaaccacacaagatggtgtcgaagcggcccgaatgagtggcattgatagctatctgcttcgcatggagcctgagttagtttgcgattctgacgatctggatgcccttatggatgccgatgcgctggtcattacgcttccggcacgtcgtagcggccccggcgatgagttctatttacaagcggtacaagagttagtggatagcgcgctggcccatcgtattccccgaattatttttaccagctcaacatctgtctatggcgacgcgcaaggcacggttaaagaaactaccccgcgtaatccggtaaccaacagtggacgagtattagaagaactcgaagactggctgcacaatttacccggtacttcggtcgatattctgcgtcttgcgggcctggtcggaccgggacgtcatccgggacgcttctttgccggaaaaaccgcccctgatggtgaacatggtgttaatttagtccatttagaagatgttattggcgctatcactctgttgttacaggcacctaaaggcggacacatctataatatatgtgcgccagctcaccctgcgcgtaatgttttctatccgcagatggcccgtttactggggctgcaacctccgcagttcagaaatagtctggacagcggcaaaggtaagattattgatggcagtcggatttgtaatgaactgggatttgaataccagtatcccgatccgctggtaatgccgttggagtaa

SEQ ID NO: 473956 - DNA, 1005 bp, Shigella flexneri
atgcactgcaagggggcgtgtatgaaaccactgctggatgtgttgatgatcctcgatgccatagaaaaagagggcagttttgcggcggcgtcagccaaactctacaagacgccgtccgctctgagttacaccgttcacaagctggaaagcgacctaaatattcaattgcttgatcgtagcggacaccgcgctaaattcacccgcaccggaaaaatgttattagagaaagggcgggaagttctgcataccgtgcgagaactggaaaagcaggcgatcaaactgcatgaaggctgggaaaacgagctggtgattggcgtggacgacacgtttcctttttctctgcttgcgcctctcattgaagctttttatcaacatcatagcgtgacgcgcctgaagtttatcaatggcgtactcggtggttcctgggatgccctgactcaggggcgagcggatattatcgttggcgcgatgcatgagccaccatcttccagtgagtttggtttctcgcggttgggcgatcttgaacaagtctttgcggtcgcgcctcatcatccgttagcccaggaagaagaaccgttaaaccgtcgtatcattaaacgatatcgggcgattgtggtgggggacactgcgcaggcaggcgcttctacggcctcacaacttctcgacgaacaagaagccattaccgttttcgattttaaaaccaaactggagctgcaaattagcggccttggctgcggctatttaccacggtatctggcgcaacgttttctcgatagtggcgcgttaatcgagaagaaagtggtcgcccaaactctctttgaacctgtctggattggctggaatgaacagaccgcagggcttgccagcggctggtggcgagatgaaattttagcaaatagtgcgatcgccggtgtttatgcaaaatctgatgacggaaaatcagccattcaaagaaaaattattatgacaagcctctcattctcttgtcatttcccccccatttag

SEQ ID NO: 473957 - DNA, 1359 bp, Shigella flexneri
atgtcgcataacgttactccaaacacctctcgcgtggaattgcgtaaaacgcttacgttagttccggttgtaatgatgggtctagcctatatgcagccgatgacgctgtttgatacatttggtatcgtttcaggcctcacggatggtcatgtgccgacagcctatgcgttcgcattgattgcgatcctgtttacggctctgagctacgggaagctggttcgccgctatccttctgctggctctgcatacacttacgcccagaaatccattagcccgactgtcggctttatggtgggttggtcttctctgctcgactatctgttcgcgccgatgatcaacattctgctggcgaaaatctattttgaagctctggtgccttccattccatcgtggatgtttgtggtggcgctggtggcctttatgaccgcctttaacctgcgtagtctgaaatccgtagcgaacgtcaacactgtaatcgtcgtgttgcaggtagtgctgatcgcggtgattctgggcatggttgtttatggcgtatttgaaggtgaaggcgctggtacgctggcgagcacgcgtccgttctggtctggcgatgcgcatgttatcccgatgattaccggggcgacaatcctgtgcttctcctttaccggctttgacggcatcagcaatctgtcggaagaaaccaaagatgcagagcgcgtgatcccgcgtgcgattttcctgaccgcgctgattggcggcatgatcttcatctttgcaacttacttcctgcagctgtacttcccggatatctctcgctttaaagatccggatgcgtcacagcctgaaatcatgctgtacgttgcgggtaaagcgttccaggttggcgcgctgatcttctccaccattaccgtactggcgtccggtatggcggcgcacgcaggcgtagcgcgtctgatgtacgtaatgggtcgtgacggcgtgttcccgaaaagcttcttcggttatgtacacccgaaatggcgtactccggcgatgaacatcatcctggttggcgcgattgccctgctggcaatcaacttcgacctggtaatggcaacggcgctgattaactttggtgcgctggtggcgttcacctttgttaacctgtcggtcatctcgcagttctggatccgtgagaagcgtaacaagacgctgaaagatcacttccagtatctgttcctgccgatgtgtggtgcgctgaccgttggtgcgctgtgggttaacctggaagaaagctcaatggttctgggtctgatctgggctgctatcggtctgatttacctggcttgcgtcaccaagagcttccgtaatccggttccgcagtacgaagacgtagcataa

SEQ ID NO: 473958 - DNA, 1005 bp, Shigella flexneri
atgcagcgtgggcgtttttgcctgactggtggttttcgcgatatgtatatcgcgaaaaataatcgcatgttttacgccttgctgattgcaatttcggcacaaagcgtgggggtttttgcgttaattcaggcgggcctactgacttacgaagccggggcgttcccgtggcttggtactgttataggtgggtatcttttcgggctgggaattgttctggcgggtggatgtgccaccgggacctggtatcgcgcgggtgagggattgatcggcagttggatcgcgcttttcacttatatggtgatgagtgcggtgatgcgttctccacacgccagtggtttaaatcaaaccttgcagcactacactactgaacataactctattgctgagacttttaatttgtctgtgtggccgttggttaccgttttgctggtgataacgctctgggtggtgatgaaagagttgaagaagccaaaactcaaagtcgcgaccttaccgccgcgccgaaccgggatcgctcatattctgtttgaaaaacgctggcatccctttgtcactgctgtactcatcggtttgattgcgcttttagcctggcccctgagtgaagcaaccggacgcatgtttgggttaggagtcacttccccaacggccaatattcttcaatttctggtcgcgggtgacgtgaaatacattaactggggcgttttcctggtgttagggatcttcgtggaggcatttattgcagccaaagcgagccgtgagttccgcgttcgcgcagctgatgcacaaacaacattacgtagcgggttaggtggtgtactgatgggcttcggtgccagtattgcaggtggttgctctatcggtaatggactggttatgactgcaatgatgacctggcagggctggattggccttgtatttatgattctcggagtctggactgcgtcctggcttgtgtatgttcgaccgcagcgtaaggcgcgactggcaactgctgcggcaaattaa

SEQ ID NO: 473959 - DNA, 228 bp, Shigella flexneri; identical to SEQ ID NO: 6976

SEQ ID NO: 473960 - DNA, 1425 bp, Shigella flexneri
atgacagacacagataaacaacctaccttcctctttcacgattacgaaacctttggcacgcaccccgcgttagatcgccctgcacagttcgcagccattcgcaccgatgacgaattcaatgtcatcggcgaacccgaagtcttttactgcaagcccgcggatgactatttaccccggcctggagcagtattaattaccggtattaccccgcaggaggcacgggcgaaaggagaaaacgaagccgcgtttgccgcccgtattcactcgctttttaccgtaccgaagacctgtattctgggctacaacaatgtgcgtttcgacgacgaagtcacacgcaacgttttttatcgtaatttctacgatccttacgcctggagctggcagcatgataactcgcgctgggatttactggatgttatgcgtgcctgttatgccctgcgcccggaaggaataaactggcctgaaaatgatgacggtctaccgagctttcgccttgagcatttaaccaaagcgaatggtattgaacatagcaacgcccacgatgcgatggctgatgtgtacgccactattgcgatggcgaaactggtaaaaacgcgtcagccacgcctgtttgattatctctttacccatcgtaataaacacaaactgatggcgttgattgatgttccgcagatgaaacccctggctcacgtttccggaatgtttggggcatggcgtggcaataccagctgggtggcaccgctggcgtggcatcctgaaaatcgcaatgccgtaattatggcggatttggcaggagacatttcgccattactggagctggatatcgacacattgcgcgagcgtttatataccgcaaaagccgatcttggcgataacgccgccgttccggttaagctggtgcatatcaataaatgtccggtactggcccaggcgaatacgctacgcccggaagatgccgaccgactgggaattaatcgtcagcattgcctcgataacctaaaaattctgcgtgaaaatccgcaagtgcgtgaaaaagtggtagcgatattcgcggaagccgaaccgtttacaccttcagataatgtggatgcacagctttataatggctttttcagtgacgccgatcgtgcagcaatgaaaattgtgctggaaaccgagccgcgtaatttaccggcactggatatcacttttgttgataaacgaattgaaaagttgttgttcaattatcgggcacgcaacttcccggggacgctggattatgccgagcagcaacgctggctggagcaccgccaccaggtcttcacgccagagtttttgcagggttatgctgatgaattgcagatgctggtacaacaatatgccgatgacaaagagaaagtggcgctgttaaaagcactttggcagtacgcggaagagatcgtctaa

SEQ ID NO: 473961 - DNA, 558 bp, Shigella flexneri
atgacggtcgcccagtgtctcgactactggttcgacaactacgtctctacaactctcagagaaaagacccaggcactttatcgatcaacggttatgaagcgcatgcatgacgccttccctaatcgtccggcatcttctatcacggttaagcaatgggttgacctgcttaccgaagaagaaaaagataatccacgccgagcaaggcaggtgctaagtcaactaagatcagcaattagttggtgcatgcggcgtcagttgatagatagttgcgcaattatgagcatccagccaagggacttcggctcccgcgctgaggtaggggatcgggtactgtcgtatcacgaactggctaagatttggcttgctattgaaagaagccgtgcgtctacgtcaaataagctccttcatcagatgcttatgctgtggggggcgaggctctcagagcttaggctggcaacaaagacagaatttgacctgctggacaacgtatggaccgtaccgaaagagcatagcaagatgggtaatgttatccgccgtccaatcttcgaacaaatgtaa

SEQ ID NO: 473962 - DNA, 675 bp, Shigella flexneri; identical to SEQ ID NO: 472105

SEQ ID NO: 473963 - DNA, 378 bp, Shigella flexneri
gtggacggtttcgataatctgtttgatgctgcgcttgccggtgtcaatgaagtcattctccgtgatatggggatcagcgccgtcattacgtccggagaacttgaggggacacacctgacaggggtttttgatgatcccgaaagtatttcttttgttgccggggggatccggcttgaggattcctcaccgtgcctgtttgtgaaaacggcagatatatcgcagttacgccgtcaggatacgttaactatcggggatgattctttctttgtggatcgtattactccggatgacgggggatgctgttatatccggttaaggcggggcagtcctgccccacagaataatgccagaatgaggcgatatgatgaagggacttga

SEQ ID NO: 473964 - DNA, 387 bp, Shigella flexneri
atggctacgaaagaagaaaacctgaaacgtctttgtgagctggctgagaggctggggcgtgaaccggatgtctccggtagtgcggcagatattgcgcagcgagtggcggaactggaggaagagcttggagatgcgggggaggtcgcagagccggatacgtactcaccatcgaaagatgatccgaccgcgcataaaggcgagtcagttcctgaacagccaggcattgttaccggagacgaaacggggcaggttacggtggtggcactggcgacactgcatacaaaatgtaatggttcagtgatatttgtttcaccgggaacgtcgtttcgtgtttctgctgaggtggctgccagcatggcggcaggtggtctggcaaaaaggcagtaa

SEQ ID NO: 473965 - DNA, 1029 bp, Shigella flexneri
atgggattgtttacgacccgccagttactcggttataccgaacaaaaagttaaatttcgtgcgctgtttctggagctgtttttccgccgtacggtgaatttccataccgaagaggtaatgctggacaaaattaccggaaaaacgccggtggcggcctatgtctccccggttgttgaaggaaaggtgttgcgtcaccgtggcggtgaaactcgtgtactgcgcccgggctacgttaagccgaaacacgaatttaattaccagcaggcggtggagcgtcttcccggtgaagatccggcccagctgaacgacccggcttaccgtcgcctgcgtatcatcaccgataacctcaaacaggaagagcacgccattgtccaggtggaagagatgcaggcggtgaatgccgtgctgtatggcaaatacaccatggaaggagagcagtttgaaactgttgaggtcgattttggccggtcggtgggaaataacattacgcaggcaggagggacggagtggagcgctcaggaccgcgatacctttgatccgacgcatgatctggatgcgtactgtgattttgcttccggcaccatcaatattgccattatggatggtaaggtctggcgtctgctgaatggctttaagctgttccgcgaaaaactggatacccgtcgtggctcaaattcacagctggaaacggcagtgaaagacctgggggcggtggtgtccttcaaagggtattatggtgatctggcaatcgtggtggcaaaaacgtcctatgtggcagaggacggtaccgaaaaacgttatctgccggacggcacactggtactgggaaatacggccgcagagggtattcgttgctacggtgccattcaggatgcgcaggcattgtctgaaggcgtggtggcgtcttcccgttatccgaaacactggctgaccgtgggtgatccggcgcgtgaattcaccatgacgcagtccgcgccgctgatggtgctgccggatccggatgagtttgtggtggtgcaggtgaaataa

SEQ ID NO: 473966 - DNA, 348 bp, Shigella flexneri
atggtaacgaaaaccatcactgaacagcgtgcggaagtacgtatttttgccggtaatgatccggcccataccgccacaggcagcagcgggatttcctcggcaacaccggctctgacgcccctgatgctggatgaggataccgggaaactggtggtctgggacggacagaaggcaggccatgtggttggcatactggtactgccgcttgaaggtacagagacggtgctgacgtattacaagtcggggacctttgcgacggaggccatccactggcctgagagagtggatacacacaaaaaggcgaatgcctttgccggcagtgccctgagtcacgcagcgctgccgtaa

SEQ ID NO: 473967 - DNA, 1506 bp, Shigella flexneri
gtgagacgtaatctttcacatattatcgctgcggcattcaatgagccgctgcttctggagcccgcctatgcgcgggttttcttttgcgcgctcgggcgtgagatgggcgcagcaagcctttcggtaccgcaacagcaggtacagcttgacgctcccgggatgctggctgaaacggacgagtacatggccggaggcaaacgacctgcccgtgtttaccgggtggtgaacggtattgctgtactgccggtgaccggcacgctggtacaccggctgggtggcatgcggccattttccggaatgactggctatgacggcattgtcgcctgtcttcagcaggcaatggcggacactcaggtacggggcgtactgctggacattgacagtcctggcgggcaggccaccggcgcgtttgactgcgctgacatgatttaccgtctccggcagctgaagcctgtctgggcactgtgcaatgacacggcctgttcagccgccatgttactggcatcggcctgctcccgacggctggttacccagacatcccgtatcggctccattggggtgatgatgggccatgtcagctatgccggtcatctggcacaggccggtgtggatatcacgctgatttacgccggatcgcacaaggtggatggcaatcagtttgaatccctgccagcaaaggttcgccaggacatgcagcagcgcattgatgcggcgcgccggatgtttgctgaaaaagtggcgatgtataccggtttatctgtggatgcggttatgggaacagaggccgccgtttttgaaggtcagtccggtattgaggccgaactggcggatgaattaatcaatgcgtcggacgccatcagcgtgatggctgcgacgctgaacacacacgatacaggaggcactatgccgcaattaactgcaacggaggctgccgcgcaggagaaccagcgagtgatggggatcctgacgtgtcaggaagcgaaaggacgtgaacaactggccacgatgctggcagggcaacagggtatgagcgttgagcaggcccgggcgattctggccgtggcggcaccgcaacaatctggtgtatctgcgcagagtgaagccgatcgcattatggcatgtgaagaggcgaaaggacgtgaacaactggcggcaacgctggcggcgatgccggagatgacggtggaaaaagcccgtccgattctggctgcttcaccgcaggcgaatgccggaccctcacttcgtgatcagattatggccctggatgaggcaaaaggggcagaggcgcaggctgaaaaactggcggcctgtccggggatgaccgtggagaatgcccgggctgtactggcggcagcctcagacagggcagaaccggtttctgcatccacaaccgccatgtttgaacatttcatggcgaaccattcaccggcagcggtacagggtggcgtgccacagacgtcagcagacggtgatgcggacgtgaaaatgctcatggccatgccatga

SEQ ID NO: 473968 - DNA, 414 bp, Shigella flexneri
atggggcggcgaaaatttattgcggcccggctggccacgcagatgttttcctgctggctggaagaggcgcttcttcgggggattattcgtccgccacgggcgcgttttgatttttaccaggcgcgttcagcctggtcacgggcagagtggattggctccggaagaatggccattgacgggctcaaggaggtccaggaatcggtgatgcgcattgaggccggactgagcacgtatgagaaagaactggcactgatgggcgaagattatcaggacattttccgccagcaggtcagggaatccgcagagcgcgaaaaagccggactctcacgtccggtgtggatagcccaggcgtatcagcagcagatagcggagagtcgcaggccggaagaggagacaacatcacgtgagacgtaa

SEQ ID NO: 473969 - DNA, 204 bp, Shigella flexneri
atggttacagtcgctgaactgcaggcgctgcgtcaggcgcgccttgatttattaaccggtaaacgggttgtgtcggtacagaaagacggtcgcaggatcgaatatacggcagcgtccctgaatgagcttaaccgtgcgatcaacgatgcggagtcggttctgggtacgacccgacgccgccgaccgctgggagtgaggttatga

SEQ ID NO: 473970 - DNA, 1929 bp, Shigella flexneri
atgaatatatcagaacaacaactgagtaatatgatggtggcagtcactatcgcactgcagccactggtcagggtattgccggtgacggctgtagaatgggccgatcaaaattattacctgcctaaagaatcgtcatacggtgagggggaatggaaaacgctgccgtttcaggtcgccatcatgaactgcatgggcaatgacgagattcgtacagttaacctgattaaatctgctcgtgttggttatacaaaaatggtgcttggtgtgatcgggtattttattgagcacaaatcccgcaacactcttctttttcagccgacggactcagctgctgaagattttatgaagtctcacgtggaagcaacaattcgtgatgttccttgcctgaaaaaactttctccctggctgggccggaaacaccgggataatacgctcacactgaagcgtttttcctctggtgtggggttctggtgtttgggtggtgctgctgccaaaaactaccgtgaaaaatctgtcgatgtggtctgctatgacgaactctcctcgtttgaaccggatgtggaaaaagaaggttcgccaacactgcttggcgataaacgtattgaaggttcggtatggccaaaatccatacgcggttcaacgccaaaaattaaaggctcctgtcagattgaaaaagctgcgaatgaatctgcgcatttcatgcggttttatgtcccttgccctcattgcggggaggagcagtatctgaagtttggcgatgatgcgacgtcgtttggcctgaaatgggagaagggtaaaccggaaacggtgtattacctgtgtgaacataatggctgcgtgatccgtcagtctgaacttgatcagaccggggggcgctggatttgtgacaataccgggatgtggacgcgtgacggtctgacgtttttcagtgcttcgggtaatgaaattccgccgccgcgctccatcactttccatatatggacggcgtacagtccgttcaccacctgggtacagatagtctgtgactggctggatgcactgaaagatcccaacggcgtgaaaacttttgtgaacaccacgctgggcgagacctgggaagaggccgtgggcgaaaaactcgatcaccaggtactgatggataaggttgtgccttacacggcaacggtgcctgtccgggtggtttatctgacggcgggcattgactcgcagcgaaaccgttttgagatgtatgtctgggggtgggctccgggagaggaagcctttctggtggataaaatcatcatcatgggacgtcctgatgaggaagagacgctgttacgtgtggatgcggcgatcaataaaaaataccgccatgcagacggtaccgaaatgaccatttcccgtgtctgctgggatatcggggggatcgatggcgaaatcgtgtatcagaggtcaaaaaaacacggtgttttccgggtactgccggtaaaaggtgcctctgtctatggcaagccggtgatcaccatgccgaaaacccgcaatcagcggggtgtgtatctgtgtgaggtggggacggataccgcaaaagaaattctctatgcccgaatgaaggccgatcccacccctgtgaatgaggccacatcgtatgccatccgctttcctgataatccggagattttttcgcagacagaggcacaacaactggtggcggaggaactggtggaaaagtgggaaaaaggaaagatgcgtctgttgtgggataacaaaaagcggcgtaacgaagcgctggactgcctggtgtatgcctatgcggcattacgtgtgtccgtgcaacgctggcaacttgatctggctgtgctggcggcatcccgcaaggatgcaactgcacaaccgacccttgaagaactggcagcgaagctgtccggaggagtgaatggttacagtcgctga

SEQ ID NO: 473971 - DNA, 324 bp, Shigella flexneri
ttgccagtacacctcaaactactcattgccagatgggaactgaccgcagaacaggctgtcgcacagcagttaaaaaatcaggtgtcaaaaggaaatcttatcgataccggattttgtatttttgcccttagtaagctggcgatggctttatccagtacgcttgactccattcctttgtccatgcaacgacagttcccggatttaacgccgcgtcatattgatcatctgaaaatccttattgctaagggagcgaatcagtgcgcgcgtgcgggggataaattaccggatttactcgatgaatatatcagaacaacaactgagtaa

SEQ ID NO: 473972 - DNA, 225 bp, Shigella flexneri; identical to SEQ ID NO: 133446

SEQ ID NO: 473973 - DNA, 243 bp, Shigella flexneri; identical to SEQ ID NO: 462679

SEQ ID NO: 473974 - DNA, 354 bp, Shigella flexneri
atgccactgctggataagctgcgtgagcagtacggggtcggaccggtatgcagtgaactgcatattgccccgtcaacgtattaccactgtcagcaacagcgacatcatcatgataaacgcagtgcccgtgcgcagcgcgatgactggctgaagaaagagatactgcgcgtatacgatgagaatcatcaggtatacgctgtaaagtctggcatcagttgttacgggaaggtatcagagtggccagatgcactgtggcacgtctcatggcggttatggggcttgccggtgttctccggggtaaaaaggtccacactaccgtcagccggaaagccgttgccgcaggcgaccgcgtaa

SEQ ID NO: 473975 - DNA, 219 bp, Shigella flexneri
atgactaaaaatacacgtttttcccctgaagtccgtcaacgggcagttcgtatggttctggaaagtcagggcgaatatgactcacaatgggcagcgatttgttccattgccccaaagattggctgtatactggaaactctgcgtgtctgggtacgccagcatgagcgggataccgggggcggtgaggtgggctcaccaccgctgaacgtcagcgtctga

SEQ ID NO: 473976 - DNA, 1203 bp, Shigella flexneri
atgcagacatcaaacataactaaccatgaaagaaatgactcatcatggatgtcaactgtcaaatcaactacagaagtaagttggaataaattgagtttttgtgacattttactgaaaataataactttcggcatatattctccacacgaaactctagccgaaaaacatagcgaaaaaaaactaatggatagtttctcaccatcactatcacaagataaaatggacggagagtttgcccacgcaaacatagatggcatttcaatacggctatgccttaacaaaggcatatgttcggttttttatcttgatggagataaaatacaatccactcaactttcatcaaaagaatataataacttgttaagttcactcccccccaaacaattcaacttaggaaaagtacatactattacagctccggtatcagggaattttaaaactcacaagcctgcaccagaagttattgaaacagccattaattgctgtacatcgataataccaaacgatgattacttccacgttaaagacactgattttaatagtgtttggcatgatatttacagagatattcgagcatctgacagcaatagtacaaaaatatatttcaacaatattgaaataccactaaaattaattgcagatctaattaatgagttaggaattaatgaattcattgatagcaaaaaagagcttcaaatgctaagttacaaccaagtaaataaaataatcaattcaaacttcccccaacaagacctatgttttcaaacagaaaaacttttgtttacttcactctttcaagaccctgcatttatatctgcactaacatctgcattctggcaatctcttcacatcacgtcttcctctgtggaacacatatatgcccaaattatgtccgaaaacatagaaaacaggcttaatttcatgcctgaacaacgagttattaacaattgtggacatattataaaaatcaacgcagttgtccctaaaaacgacactgcaatctctgcctctggggggagggcttacgaagttagctcatcaatattaccatcgcacataacatgtaatggtgttggtattaataaaatagaaacaagctatctcgttcatgctggaacacttccaagcagtgaagggcttcgcaatgctatccctccagaaagtcgtcaagtatcatttgccatcatatctcctgatgtttaa

SEQ ID NO: 473977 - DNA, 3279 bp, Shigella flexneri
atgacccaatgttcacaggggggggccggagaattacctacggtaaaggaaaaaacatgcaaattgtctttttctccttttgttgttggtgcatccctgttgctcggggggccaatagcttttgctactcctctttcgggtactcaagaacttcatttttcagaggacaattatgaaaaattattaacacctgttgatggactttctcccttgggagctggtgaagatggaatggatgcgtggtatataacttcttccaacccctatcatgcatctagaactaagctacggattaactctgatattatgattagcgcaggtcatggtggtgctggtgataataatgatggtaatagttgtggcggtaatggtggtgactctattaccggatctgacttgtctataatcaatcaaggcatgattcttggtggtagcggcggtagcggtgctgaccataacggtgatggtggtgaggctgttacaggagacaatctgtttataataaatggagaaattatttcaggtggacatggtggcgatagttatagtgatagtgatggggggaatggaggtgatgccgtcacaggagtcaatctacccataatcaacaaagggactatttccggtggtaatggaggtaacaattatggtgagggtgatggcggtaatggaggtgatgccatcacaggaagcagcctctctgtaatcaataagggcacgttcgctggaggcaacggaggtgctgcttacggttatggttatgatggctacggtggtaatgctatcacaggagataacctgtctgtaatcaacaatggagctattttaggcggtaatggtggacattggggggatgctataaatggtagcaatatgaccattgctaatagcggatatataatttcaggtaaagaagatgatggaacacaaaatgtagcaggtaatgctatccacatcactggtggaaacaattcattaatactccatgaaggttctgtcattactggtgatgtacaggttaacaattcatccattctgaaaattatcaacaatgattacactgggaccacaccaactattgaaggtgatttatgtgctggtgattgtacaactgtttcactatcaggtaacaaattcactgtttcaggtgacgtttcttttggtgagaacagttctttaaatttagctggaatcagtagtctggaagcttctggaaatatgtcatttggtaacaatgtaaaagtggaggctattataaataactgggcgcagaaggactataaactgctaagtgcagataaagggataacaggtttcagtgtttctaatatatctatcatcaatccgttactcactactggtgctattgactatacaaaaagctatatcagtgaccagaataaattgatctacggtttgagctggaatgatacagatggcgacagtcatggagagttcaatctgaaagaaaacgctgaacttactgttagtactattctggcagataatctcagccatcataatataaatagctgggacggaaaatccctaacaaaatcaggggagggaactctcattttggcggaaaaaaatacctactctggtttcaccaacatcaatgcaggcattctaaaaatggggacagttgaagctatgacacgtaccgctggtgttattgttaataaaggtgctaccttgaatttttcaggcatgaaccaaactgttaacactttattaaatagtgggactgtgctaatcaataatattaatgccccttttttgcctgaccccgtcattgtcacaggtaacatgactctggagaaaaacggtcatgttattctcaataatagttcgtcaaatgtcggtcagacctatgttcagaaaggtaattggcatggaaagggcggaatattatctttgggcgcggttctcggcaatgacaacagtaaaactgaccggctggaaattgcaggccatgcgtctggtattacctatgttgcagtgacaaatgagggaggctctggagataaaactcttgaaggtgttcaaattatttcgacagattcttctgataagaatgcttttattcagaaaggccgtattgttgctggtagttatgactatcgcctgaaacagggcactgtatctggactgaataccaataagtggtatctaactagtcagatggataatcaagaatcaaaacagatgagcaatcaagagtctactcaaatgagtagtcgccgagctagttcacagcttgtatcttcacttaatttgggtgaaggtagtattcacacatggcgccctgaagctggcagttatattgctaacctgatagcaatgaacacgatgtttagtccttctctctatgaccgacacggtagcactattgttgatcctactacaggtcagctcagcgaaaccaccatgtggattcgtactgttggtggacataatgagcataatttagctgatagacaattaaaaaccacagctaacaggatggtttatcagattggtggagatattttgaagacaaacttcactgatcatgatggcttgcatgtgggtattatgggagcttatggatatcaggatagcaaaactcataataagtatactagttatagttcacgaggaactgtgagcggttatactgccggtttgtacagttcttggtttcaggatgaaaaagaacgaacaggtctatatatggatgcttggttgcagtacagttggtttaataatacagtcaaaggagatgggttaactggtgagaaatattccagcaaaggaataacaggagctttggaagctggctatatctacccaaccatacgctggactgctcataataatattgacaacgcattgtatctcaatccacaagtccagataactaggcatggggtaaaagcaaacgactatattgaacacaatggcactatggtcacatcctctgggggcaataatattcaagcaaaattgggattgcgtacatccttaattagtcagagttgtatcgataaggagactcttcgtaagttcgaaccatttttggaagtgaattggaaatggagctcaaagcaatatggtgtaattatgaatggcatgtcaaatcaccagataggcaaccgtaatgtgattgaactcaaaactggtgtggggggacgtcttgcagataacctaagcatctggggaaacgtatctcagcaattgggtaataacagttacagagacacccaaggtattttgggtgtgaaatataccttctga

SEQ ID NO: 473978 - DNA, 480 bp, Shigella flexneri
atgagtcgttcacaaaatttacgccacaatgtgattaaccaggtcattgatgatatggcgcggggtcatatcccttccccacttccatcgcaaagtgcgctggcggaaatgtacaacatcagccgcactacagtgcgtcatattctcagccaattacgcgaatgcggcgtcttaacgcaggttggaaacgactatgttattgcgcgtaaacctgaccatgatgacggtttcgcctgtactaccgcttcaatgagtgaacaaaacaaagtgtttgagcaggcttttttcacgatgataaaccagcgtcagttacgccctagggaaactttttctgaactgcaactggctcgggccgcgggtgtcagcccggtggttgtaagagaatatcttttaaaattcggccgttataatcttattcaaagcgaaaagcgcggccagtggagcatgaagcaattcgatcaatcctacgccgagcactga

SEQ ID NO: 473979 - DNA, 156 bp, Shigella flexneri
atggatagccgaatcatgtctacgatgaatgttttaatttgccagcagccgaaagaattagtctggaaacaacgcgagatacctattccgggtgacaatgaagcattaataaaaattaagtctgtcgggatttgcggtaccgatattcatgcctag

SEQ ID NO: 473980 - DNA, 768 bp, Shigella flexneri
gtgatcccttatgttgcctgtcagcaatgcccggcgtgtaaaagcgggcgtaccaactgctgtgaaaaaatttcagtcattggcgtgcatcaggatggcggttttagtgagtatttgagcgtgccggtggcgaacattttgcccgcagacggtattgacccgcaggcggccgcattgattgaacctttcgctattagcgctcatgcggtgcgtcgcgcagccattgctcccggcgagcaggtgctggtggtcggggcggggccaatcggtctgggcgcggcggcaatcgctaaagccgatggcgcacaggtggtggtggcggataccagtccggcgcgccgtgaacatgtggcaacgcgtctggagttgcccgtgctggacccgtcagccgaagattttgacgctcagctgcgggcgcagtttggtggttcgctggcgcagaaagtgatcgacgcgacaggtaatcaacatgcgatgaataataccgtgaatctgattcgtcacggcggcacggtggtatttgtcggtctgtttaaaggtgagttgcagttctccgatccggaattccataaaaaagaaacgacgatgatgggcagccgcaacgccacgccggaagatttcgctaaagtcggtcgactgatggcggaagggaaaatcactgccgacatgatgttaacccatcgctatccgttcgccacgctggcagaaacctacgagcgcgatgtgattaacaatcgtgagttgattaagggtgtaattactttctga

SEQ ID NO: 473981 - DNA, 2292 bp, Shigella flexneri
ttgtcagaactactctctttcgccctttttctcgcctctgtgctgatttacgcatggaaagcgggacgtaacacctggtggtttgcagccacgttaacggtgctggggctatttgtcgttttaaatatcaccctgtttgccagcgactattttactggcgatggtattaacgacgcggttctctataccttaaccaacagcctgaccggtgctggcgtcagcaaatacatcctgccgggtatcggcattgtgctggggctgacggcggtgttcggtgcgctgggctggatcctgcgccgtcgtcgtcatcatccgcaccattttggttacagcctgctggcgctcttactggcgctgggttcggtggacgccagcccggcatttcgtcagataacggaactggtgaaatcccagtcacgcgatggcgacccggactttgcggcttattataaagagccgtcgaaaactatccctgacccgaaactcaacctggtttatatctacggcgaaagtctcgagcggacctattttgataacgaagctttcccggatctcacgcctgaactgggcgcgttgaaaaatgaaggcctggatttcagccacacgcagcagctgccaggaacggattacacgattgcgggcatggtggcttctcagtgcggcataccgctgttcgccccctttgaaggcaacgcctccgcctctgtttccagcttcctcccgcagaacatctgtctgggcgatatcctgaaaaactcgggttatcagaactatttcgtgcagggcgcaaatctgcgttttgccggtaaagatgtgttcctgaaatcgcacggcttcgaccacttatacggctcagaagagctgaaaagcgtggtagccgacccgcactatcgcaacgactggggattctacgacgataccgttctcgatgaagcgtggaaaaagtttgaagagctttcccgctcaggtcagcgattctcactgtttaccctgacagtcgatacccatcacccggatggttttatctcgcgcacctgtaaccgcaaaaaatatgattttaacggtaagccgaatcagtcattcagcgcggtaagttgcagccaggagaatatcgcgacgtttatcaacaaaatcaaagcgtcaccgtggtttaaagatactgtcatcgtcgtctcttctgaccatttagcgatgaacaacacggcgtggaaatacctcaataagcaggatcgcaataacctgttttttgtcattcgtggcgacaagccgcagcaaaagacgctggcagtgaagcgtaacacgatggataacggcgcgacggtgctggacattctcggtggcgataactatctcggacttggtcgtagcagtttatccgggcagtcgatgtcggaaatcttcctcaatatcaaagagaaaacattggcgtggaagccagatatcatccgcctgtggaaattccctaaagagatgaaagagttcaccatcgaccagcagaaaaacatgattgccttctcgggtagccatttccgtttgccgctgctgttgcgggtttcagacaaacgcgtggaaccgctgccggaaagcgaatactcagcaccgctgcgtttccagctggccgatttcgctccacgcgacaatttcgtctgggttgacagttgctacaagatggcacaactctgggctccggaactggcactttccaccgactggtgtgtctcgcaggggcagcttggcggtcagcaaattgttcagcatgttgacaaaacaacatggaagagcaagacggcatttaaagatacggtcatcgacatggcgcgttacaaaggcaatgtcgatacgctgaagattgttgataacgatattcgctacaaagccgacagtttcatctttaacgtcgccggtgcgccagaagaggtgaaacagtttagcgggatttcccgtccggagtcgtggggccgctggtccaacgcgcagctgggcgatgaagtaaaaatcgagtacaagcatccgctgccgaagaaatttgacctggtgattaccgccaaagcatacggcaataacgccagccgtcctattccggtacgcgtaggcaatgaagaacaaactcttgtgctgggcaatgaagtgaccaccaccacactgcatttcgataacccaaccgatgccgacacactggtaattgtgccgccggaacctgtctcaaccaacgaagggaatatcctcggacactcgccgcgtaagctcgggatcggcatggtggaaattaaagtggtagaacgtgaagggtaa

SEQ ID NO: 473982 - DNA, 495 bp, Shigella flexneri
atgatgaaaactattaaacatcttctgtgctgtgccattgccgccagcgcattaatttccaccggggtgcatgctgcgtcctggaaagatgcgctctccagcgccgccagcgaacttggcaaccaaaacagcacgacacaggaaggcggttggtcgctcgcgtcattaactaacttgcttagcagcggaaaccaagccttaagcgcagataacatgaacaatgccgcaggcattctgcaatactgcgcgaagcaaaagctggcttcggtaaccgatgccgaaaacatcaagaaccaggtgctggaaaagctgggcctgaacagtgaagagcaaaaagaagacaccaactatctggacggtattcagggtttgctgaaaacaaaagatggtcagcaactcaatctggataacatcggaacgactccgctggcagaaaaggtgaaaaccaaagcctgcgatctggtgttaaagcaggggctgaacttcatttcctga

SEQ ID NO: 473983 - DNA, 738 bp, Shigella flexneri
atgaaaaacgttggcgacctgatgcaacgcctgcaaaaaatgatgcctgcccatatcaaacctgcattcaaaacgggtgaagagctactggcctggcagaaagaacaaggggcgatccgctccgccgctctcgaacgtgaaaatcgggcgatgaaaatgcagcgcacctttaaccgctccggtattcgtccactgcatcagaactgctcctttgagaactatcgcgttgagtgtgaagggcagatgaatgcgttaagcaaagcgcgccagtatgtcgaagagtttgacggcaacatcgccagcttcatcttttctggtaagccaggaaccggcaaaaaccatctggcggcggcaatctgcaacgagctgctgctacgcggtaaatccgtattgatcatcaccgtggccgatattatgtcggcgatgaaagataccttcaggaatagcggtaccagcgaagaacaactgcttaacgatctgagcaacgttgatctgctggtgatcgatgagatcggcgtgcagaccgaatcgaaatacgaaaaagtgatcatcaaccagatcgtcgatcgccgctcttcttccaaacgcccaaccgggatgctgaccaacagtaatatggaagagatgaccaagttgctgggcgaacgcgtgatggaccgtatgcgcctgggtaacagtttatgggtgatcttcaactgggatagctaccgtagccgggtaacgggtaaagagtattaa

SEQ ID NO: 473984 - DNA, 540 bp, Shigella flexneri
atgtcttccagagttttgaccccggacgtcgttggtattgacgccctggtacacgatcaccaaaccgttctggcaaaagctgaaggcggtgtggttgccgtatttgctaacaatgccccggcgttttatgccgtcacgcctgcacgcctggctgaactgctggcgctggaagaaaagctagcgcgtccgggaagcgatgtcgctctggacgaccaactctatcaggaaccgcaagccgctcccgttgctgtacccatggggaaattcgccatgtatccggactggcaacccgatgccgattttatccgcctggcggcgctatggggcgtggcgctaagagagccggtgaccaccgaagaactggcctcattcattgcctactggcaggcggaaggtaaagtctttcaccatgtgcagtggcaacaaaaactggcgcgcagcctgcaaatcggtcgtgccagcaacggcggactgccgaaacgagatgtgaatacggtcagtgaacctgacagccaaattccaccaggattcagagggtaa

SEQ ID NO: 473985 - DNA, 474 bp, Shigella flexneri
atgggtgtgatcgaatttctgttagcgttggcgcaggatatgatcctcgccgccattcctgcggtcggctttgcgatggtgttcaacgttcccgtgcgggcgttacgctggtgtgcgctgcttggctcgataggtcatggttcccgaatgatcttgatgaccagcgggttgaatattgagtggtcaacctttatggcttctatgctggtcggtaccattggtattcaatggtcgcgctggtatctggcgcatccgaaagtgtttaccgtggcggccgttatccctatgttcccgggcatatcggcttataccgcaatgatttcgtcggtaaaaatcagccagttaggttacagcgaaccgttgatgattaccctgttaaccaactttcttacagcttcatcgattgttggtgcgttatccatcggtctttccattcctggattatggttgtaccgcaagcgccctcgcgtataa

SEQ ID NO: 473986 - DNA, 834 bp, Shigella flexneri
atgatacaaatggattctcattatctgaacaatacgcagcacgtctatgacaaagggcgagttatgcaaactgagcaacagcgagccgtaacgcggctttgtatccagtgtggattatttcttttgcaacatggtgcggaaagcgcgttggttgatgagctttcctcacgactgggtcgggcgctgggaatggacagcgtcgaaagttctatctcttcgaacgccatagtgctgacaactattaaagatgggcaatgcctgacatcgacacgtaaaaatcacgatcgcggcattaatatgcatgtggtgactgaagtccagcacattgtgattcttgcggagcatcatctgctggattacaaaggcgtagagaaacgatttagccaaattcaaccattacgttacccaagatggctggtagccttaatggttggcctttcttgcgcctgtttctgtaaactcaataacggtggctgggatggtgccgtcatcaccttctttgccagtacgaccgcgatgtatatccgccagctgctggcacaacgtcatcttcatccacagatcaacttttgccttaccgctttcgccgccaccaccatttccggattgcttttgcaactccccactttcagcaatacccccaccattgcgatggccgccagcgttctgctgctagtgccgggctttccgttgattaatgccgtcgccgatatgtttaaaggccacatcaataccggactggcacgctgggcgatcgccagtctgctgacactggctacctgcgtcggcgtagtgatggcactgacgatttgggggctacgcggatgggtgtga

SEQ ID NO: 473987 - DNA, 1005 bp, Shigella flexneri
gtgacgctgcgtattattcagggattgggtgcaggtgcggaaatttccggtgccggtacgatgctggcggaatatgcgccaaaaggtaagcgcggaattatctcctcatttgtggctatgggaactaactgcggcaccttaagcgcaacggcaatctgggcctttatgttcttcattctcagtaaagaggaactgctggcgtggggatggcgtataccgttcctggcgagcgttgtcgtgatggtctttgctatctggttgcgtatgaatctgaaagaaagcccggtctttgagaaggttaacgacagcaaccaaccgacagcaaaacctgcacctgctggtagcatgttccagagcaaatccttctggctggcaacagggctgcgttttggtcaggcgggtaactccggtttaattcagactttccttgcaggctatttagtacagacgttattgtttaacaaagcaattccaacagatgcattgatgatcagttcgattctcggctttatgaccattccgttccttggttggttatccgataaaattggtcgccggatcccgtatattattatgaatacctctgcgattgtgctggcgtggccaatgctttctatcatcgtagataaaagctatgccccgagcaccattatggttgcactgattgtgattcataactgtgcggtgctgggattatttgctctggaaaacattaccatggcagaaatgttcggctgtaaaaaccgcttcacccggatggctatttcaaaagaaattggtggtcttatcgcttccggttttggtcctatcctggcgggtattttctgcaccatgacggaatcctggtatccgatcgccattatgatcatggcatattcagtgattggtttaatctctgcgctgaaaatgctagaggtgaaagaccgtgatttaagtgcgctggaagacgctgcggaagatcaaccgcgtgttgtaagagctgcgcaaccttccagaagtctgtaa

SEQ ID NO: 473988 - DNA, 1461 bp, Shigella flexneri
atgggaaataatttgttatcagcaaaagcgacactccctgtttatgatcgtaataacctggccccaagaattgttcatttaggctttggtgcatttcaccgtgcgcatcagggcgtgtatgccgatattcttgctacagaacatttcagtgactggggatattatgaggtcaacttaatcggcggcgaacagcaaattgccgatttacaacagcaagataatctttataccgttgcggaaatgtcggctgatgcgtggacggctcgcgtcgttggcgtcgttaaaaaagccttgcacgtacagatggatggcttagaaaccgtgttggctgcgatgtgtgaaccgcaaatcgcgattgtctctctgacaatcaccgaaaaagggtatttccactctccggcgaccggacagttaatgctcgagcacccgatggtcgctgccgacgtgcaaaatccccaccagccgaaaacagcaacaggggtgattgttgaggcgctggctcgccgtaaagcggcaggacttcccgcatttaccgtcatgtcatgtgacaacatgccagaaaacggtcatgttatgcgtgacgttgtcacttcctacgcgcaagccgttgatgtaaaactggcacaatggatcgaagataacgtgactttcccatcaacaatggtggaccgtattgtgcccgcagtgacagaggatacgctggcgaaaatcgaacaacttaccggtgtgcgcgatcctgctggcgttgcctgtgaacctttccgccagtgggttatcgaagataactttgtagccggacgtccggaatgggaaaaagcgggagccgaactggttagtgatgtgctgccttatgaagagatgaagttgcgcatgctcaacggcagtcattcattcctggcatatctgggttatcttgctggatatcagcacattaatgactgtatggaagatgaacattatcgtcatgcggcgtatggcatgatgttgcaggaacaagcgccgacgctgaaagtgcagggcgttgatttgcaagattacgctaaccgattaattgcacgctatagcaacccggcgttacgtcatcgaacctggcagattgcgatggatggcagccagaaattgccacagcggatgttggattctgttcgctggcatctggcgcatgacagcaagttcgatctgctggcgctgggcgtcgcgggttggatgcgttatgtcggtggtgttgatgaacagggaaatccgatagaaatcagtgacccactgttacctgttattcagaaggctgtacaaagtagtgccgaagggaaagcgcgcgtccagtcatggctggcgattaaggcaatctttggtgatgatttgccagacaatagcttgtttactgcaaaagtgacggaagcgtacttgtctttattagcgcatggcgcgaaagcgaccgtggcgaaatattccgtgaagtaa

SEQ ID NO: 473989 - DNA, 204 bp, Shigella flexneri; identical to SEQ ID NO: 260735

SEQ ID NO: 473990 - DNA, 687 bp, Shigella flexneri
atgaccgtcgaaacgcaacttaatcccacacagcctgtcaatcagcagatttatcgtattcttcgtcgcgacattgtccattgcctgattgcaccaggcacaccgttgtcggaaaaagaagtttctgttcgtttcaatgtgtcacgccagccggttcgtgaagcctttattaaactggcggaaaacggcctgattcaaattcgtccgcagcgtggcagctacgtcaacaaaatttccatggcccaggtgcgcaacggcagttttatccgtcaggccattgagtgcgcggtggcgcgtcgggcggcgagcatgattaccgaaagccagtgctaccaactggaacaaaatcttcaccagcaacgcattgccattgagcgcaagcaactggatgatttttttgaacttgatgacaacttccatcaactcctgacgcagattgccgactgtcaactggcgtgggataccattgagaacctgaaagcgaccgttgatcgcgtgcgctatatgagtttcgaccatgtttctccaccagaaatgctgttacgccagcatcttgatattttctctgccctgcaaaaacgtgatgccgatgcggtagaacgtgcaatgacgcaacatttgcaggaaatcagcgaatccgtgcgccagatccgccaggaaaacagcgactggtttagcgaagagtaa

SEQ ID NO: 473991 - DNA, 747 bp, Shigella flexneri
atgatcgttttagtaactggagcaacggcaggttttggtgaatgcattactcgtcgttttattcaacaagggcataaagttatcgccactggccgtcgccaggagcggttgcaggagttaacagacgaactgggagataatctgtatatcgcccaactggacgttcgcaaccgcgccgctattgaagagatgctggcatcgctccctgccgagtggagcaatattgatatcctggtaaataatgccggcctggcgttgggcatggagcctgcgcataaagccagcgttgaagactgggaaacgatgattgataccaacaacaaaggcctagtatatatgacgcgcgccgtcttaccgggtatggttgaacgtaatcatggtcatattattaacattggctcaacggcaggcagctggccgtatgccggtggtaacgtttacggtgcgacgaaagcgtttgttcgtcagtttagcctgaatctgcgtacggatctgcatggtacggcggtgcgcgtcaccgacatcgaaccgggtctggtgggtggcaccgagttttccaatgtccgctttaaaggcgatgacggtaaagcggaaaaaacctatcaaaataccgttgcattgacgccagaagatgtcagcgaagccgtctggtgggtgtcaacgctgcctgctcacgtcaatatcaataccctggaaatgatgccggttacccaaagctatgccggactgaatgtccaccgtcagtaa

SEQ ID NO: 473992 - DNA, 2046 bp, Shigella flexneri
atgacaacaatgaatcctttccttgtgcaaagcacactgccgtatctggctcctcattttgatcaaattgccaatcatcactatcgcccggcattcgatgagggaatgcaacaaaagcgggcagaaattgctgccatcgcgcttaacccgcaaacgcctgatttcaacaatactattctggcactggaacaaagcggagaattaattacccgcgttaccagcgtcttttttgcgatgactgcggcgcataccaatgatgaattacagcgtcttgatgaacagttttccgctgaactggcggaactggctaatgatatctatctgaacggtgaattattcgcgcgggtagatgctgtctggcagcgccgtgaatccctggggcttgatagtgaatccatccgcctggtggaggttattcatcaacgctttgtccttgccggagccaaacttgcacaagctgataaagcaaaattaaaagtactgaatacagaagctgcgaccctgaccagccagtttaaccagcggttacttgcagcaaataaatccggcggtctggttgtgaacgatatcgcgcagctggcaggaatgagtgagcaagagattgcgctggcggcagaggcggctcgcgagaaaggtctggataacaaatggctgattccgctgctgaataccacccaacaaccggcgcttgcagaaatgcgcgatcgtgcgacgcgtgaaaaactgtttattgcgggctggacgcgagcggaaaaaaatgatgccaatgatacccgcgctatcattcaacgtctggtagagattcgcgcacagcaggcgaaactgcttggttttcctcattatgccgcatggaaaatcgccgatcagatggcaaaaacgccagaagcagcactcaactttatgcgggaaattgttccagcggcgcgtcaacgtgcgagcgatgaattagcctccatacaggcggttatcgataagcagcagggcgggtttagcgcgcagccgtgggactgggcattttatgcggaacaggtacggcgggagaaatttgatcttgatgaggcgcagctcaagccatattttgaattaaacacggtgttaaatgaaggtgtattctggaccgcgaatcagctcttcggtattaagtttgtcgaacgttttgatattccggtctaccatcctgacgttcgtgtgtgggaaatttttgatcataatggcgtgggactggcgttattttacggtgatttcttcgcccgtgattcaaaaagcggcggtgcatggatgggcaattttgttgagcaatcaacgcttaatgaaacgcatccggtaatttataacgtctgcaattatcagaaacccgctgccggtgagcctgcgttgttactctgggatgatgtaataaccttattccatgaatttggtcatacgctgcacggcctttttgcccgccagcgttatgccacgctttccggcaccaacacgccgcgtgattttgtcgaatttccgtcgcaaatcaacgaacactgggcaacgcatccgcaggtattcgctcgctacgcccggcattatcagagcggggcagcaatgcctgacgaactgcaacagaaaatgcgtaatgccagcctgttcaacaaagggtatgagatgagcgaactgcttagcgccgcacttctcgatatgcgctggcattgcctggaagaaaacgaagcaatgcaggatgtcgatgattttgaattgcgggcgctggtggcggaaaatatggatcttcctgctataccgccacgctatcgcagcagttatttcgcccatatttttggtggcggatatgctgcaggttattacgcttatctgtggacgcaaatgttggccgatgatggttaccagtggtttgttgagcagggcggattaacgcgtgaaaatgggcagcgttttcgcgaggcgatcctttccagaggtaacagcgaagatctggaacgcctgcatcgacaatggcgtggtaaggctcctcagattatgccgatgctgcaacatcgtggcttgaacatataa

SEQ ID NO: 473993 - DNA, 519 bp, Shigella flexneri
gtgaacattaataaagataaaattgtacaactcgcagataccgacactattgaaaacctgacatccgcgttgagtcaaagacttatcgcggatcaattacgcttaactaccgccgaatcatgcaccggcggtaagttggctagcgccctgtgtgcagctgaagatacacccaaattttacggtgcaggctttgttactttcaccgatcaggcaaagatgaaaatcctcagcgtaagccagcagtctcttgaacgatattctgcggtgagtgagaaagtggcagcagaaatggcaacaggtgccatagagcgtgcggatgctgatgtcagtattgccattaccggctacggcggaccggagggcggtgaagatggtacgccagcgggtaccgtctggttcgcgtggcatattaaaggccagaactacactgcggttatgcattttgctggcgactgcgaaacggtattagctttagcggtgaggtttgccctcgcccagctgctgcaattactgctataa

SEQ ID NO: 473994 - DNA, 234 bp, Shigella flexneri
atgaaatttcagtccattgtattagcaagttttcttgtcatgccttatgcgttggcagatgaccagggcggtttaaaacaggatgcagcgccaccgccgcctcatgcaatagaagatggctatcgcggaaccgatgatgcaaaaaaaatgaccgttgatttcgcaaaaaacatgcacgatggcgcttcggtttcactacgcggtaatttgatttctcacaaaggagtgaggtag

SEQ ID NO: 473995 - DNA, 657 bp, Shigella flexneri
atgaaaaaaaacacagatgatggggctaaaatttacacaccacttaccctaaagctttatgactggtgggttttgggagtatcaaatcggcttgcatggggatgtcctacaaaggaacaccttcttccacactttctggaacatttaggtaacaaccatctggatattggtgttggaactgggttttaccttactcacgtacctgagagtagtctgatatctttaatggatttgaacgaagctagcctgaacgcggcatctacaagggctggggaatcaaaaattaaacataaaattagccatgatgtttttgaaccttatcctgcggcgttacatggtcaatttgattccatttccatgttttaccttcttcactgcctgcctggaaatatatctacaaaaagctgtgtaatacgcaatgcggcgcaggccttaactgatgatggaactctatacggagccacaattcttggcgatggagttgtgcacaatagcttcggtcaaaaactgatgcgcatttacaatcagaaaggcatcttttcaaacacaaaagattccgaagaaggcttaacacatatactctcagagcatttcgagaatgttaaaaccaaggttcaaggtactgtagtaatgttttccgcttcagggaaaaaatag

SEQ ID NO: 473996 - DNA, 270 bp, Shigella flexneri
atgctgccgcagcatagcgatattgaaatagcctggtatgcttcgatacagcaggagccgaatggctggaagaccgtcaccacacagttctacatccagggattcagtgagcatattgcgccacttcaggatgctgtagatctggagatcgcaacggaggaagaaaactcgttgctggaagcctggaagaagtatcgggtgttgctgaaccgtgttgatacatcaactgcacctgatattgagtggccggaagaaccagacacaatgtaa

SEQ ID NO: 473997 - DNA, 651 bp, Shigella flexneri
ttggcgattcgtcttcataaactggctgttgctttaggtgtctttattgttagcgctcctgccttttcgcatggtcatcattctcatggcaaacccttaacagaggtcgaacaaaaagctgctaatggtgtttttgatgataccaatgtacaaaaccgaacgctcagtgactgggatggagtctggcaatccgtttaccctttactgcaaagtggcaaacttgatcccgtctttcagaagaaagcggatgcagataaaaccaaaacatttgctgaaattaaagattattatcgcaaaggttatccgacagatatcgaaatgattggcattgaggacggcattgtcgaattccatagaaataatgaaacaacatcctgtaaatatgattacgatggatacaaaatactcacctataaatcaggcaagaaaggcgttcgttacttattcgaatgtaaagatcctgaaagcaaagcccctaaatatatacaatttagcgatcatataattgcaccacgaaaatcatctcattttcacatttttatgggtaatgattcccagcaatctttattgaatgaaatggaaaactggccaacgtattatccctatcagttgagtagcgaagaagtggtcgaggagatgatgtctcattga

SEQ ID NO: 473998 - DNA, 636 bp, Shigella flexneri
atgcgtctgacagcaaaacaagtgatatggctgaaagtttgcctgcatcttgccggattgttgccgtttctctggctggtctgggcgatcaatcacggtggactgggtgccgatccggtgaaagatattcagcattttaccggtcgcactgcactgaaatttttgcttgcggccttgttaatcacacctctggcacgctacgcaaaacagccgttattgatacgcactcgccgcctgttaggcttatggtgctttgcctgggcgacactgcatttaaccagttacgcattgctggagttgggcgtgaataatctggcgttattaggtaaggagttaattacccggccttatttaacgttaggaattatcagctgggttattttgcttgctttagcgttcacttcaacccagtcgatgcagcgaaaactcggcaaacactggcaacagttgcataacttcgtctatcttgtcgcgatcctggccccaatacattatctgtggtcagtgaagattatttcaccgcagccactcatctacgctgggctggctgtactgcttttagccttacggtataagaagttgctttcccttttcaaccggttacgcaagcaggcccacaacaaattatctctataa

SEQ ID NO: 473999 - DNA, 648 bp, Shigella flexneri
gtggcaaaaccattgaccctcgatcatgatgatttaacccgtcgcttcccgctggaagagcgtatttatcgtatgcgctacgtggaagcgtggtcgatggtggtgccgtggattggttttccgctacacaaattgctggcgcttgccgaacccaccagcaatgcgaagtatgtcgctttcgaaacgatttatgcgccggaacagatgcctggccagcaggaccgctttatcggcggcgggctgaaatatccttatgtcgaaggattgcgtctcgacgaagcaatgcatccgctcacactgatgaccgtaggtgtttatggcaaggcgttaccaccgcaaaatggcgcgccggtgcgactgattgtgccgtggaaatatggctttaaagggattaaatcgatcgtcagtattaagctgacccgcgagcgtccgccaaccacctggaatctggcagcgcctgacgaatacggtttttacgccaacgttaatccgcatgttgatcacccgcgctggtcacaggctaccgaacgatttattggttcaggcggcattctcgatgttcagcgccagccaacactactgtttaatggttacgccgaccaggtggcatcgctgtatcgtggcctggatttgcgggagaatttctaa

SEQ ID NO: 474000 - DNA, 216 bp, Shigella flexneri
atgaaaaagaagcaatttttaaaagaatcagatgttacggccgagtcggtattctttatgaagcgtcggcaggtgttaaaagcactgggcatcagcgcagctgcattttctttgcctcacgctgcgcatgccgatctgcttagctggtttaaagggaacgatcgtccgcccgcccccgccggaaaaccgctggagttcagcaagcctgccgcctag

SEQ ID NO: 474001 - DNA, 414 bp, Shigella flexneri
atgttaaagcgttatttagtactctcggtagcaacggcagcattttcattaccttctttggtttatgccgcacaacaaaacattcttagcgtgcacattttgaaccagcaaacaggaaaacccgctgccgacgtgacagtcactcttgaaaagaaagcggataacggctggttacaacttaataccgccaaaacagataaggatggacgaattaaggcactgtggcccgagcaaactgcgactactggcgattaccgtgtcgtatttaaaaccggggactatttcaagaaacaaaatcttgaaagtttcttccctgagattcccgttgaatttcatattaataaagtgaacgagcattatcatgtgcctttgttactcagccaatatgggtattcaacctatcgtggcagttaa

SEQ ID NO: 474002 - DNA, 783 bp, Shigella flexneri
atgagttttgaggatagcgaaaaaacgtccagggtaaccttacagcagcattacaattttgtaatgaaccaggttgtttctataacatatgatttatggcatattattttcatgaagattctacttattgaagataatcaaaggacccaggaatgggtaacgcaggggctttccgaagcgggttatgtcattgatgccgtttctgatggcagagatgggctttatcttgcgctgaaggatgattatgcattgatcattctggatattatgcttccgggtatggatggctggcagatcttacaaacgttaagaacggcaaagcaaacccctgttatttgccttactgcaagggattctgtcgatgacagagtcagagggttggacagtggggcaaatgattatctggtaaaacctttttcattttctgagttgctagcaagggttcgggcacaattaaggcaacatcacgctctgaattcaacattagaaatcagtggcttaaaaatggactctgtcagtcaaagtgtcagcagggacaatatcagtattacactgacgcgcaaggagtttcagttactttggctactggcctccagagctggcgagattatacccagaacggttattgcgagtgaaatttggggaatcaactttgatagtgataccaatacggtggatgtcgccattcgcaggctccgcgcaaaagttgatgatccttttcctgaaaagctaatcgccacaatccgggggatgggctattcattcgtagcggtaaaaaaataa

SEQ ID NO: 474003 - DNA, 843 bp, Shigella flexneri
atgaaaagattatctataaccgtccgtttaaccttgctttttatatttctgcagtctgttgctggcgctggaattgtatggactctctataatggcctggcaagtgagttgaaatggcgcgatgatacaacactcattaaccggacagcgcagatcaagcagttgttaattgatggggtaaatccagatacgttacctgtgtactttaaccggatgatggatgttagtcaggatattttgatcattcatagtgatggcatcaataaaattgttaaccggacaaatgtcagtgatgacatgttaaataacatacctgctagtgagacaatcagcgcagcaggcatttacagaagcattattaatgatacagagatagatgctttacgaattaacattgatgaagtttcgccatcattaacggttactgtggctaaattggcttcagccagacataatatgcttgaacagtataaaattaatagcattataatttgcattgtcgccattatactgtgctcagtattaagtccgttgttaatcaggacggggttgcgagagatcaaaaagttgagtggcgtaacggaagcgctgaattataacgatagccgagtgccggttgaggttaacgcattaccgagagaactaaaacctcttgggcaggcgttgaataaaatgcatcatgctttagtcaaagattttgagcgccttagtcaatttgctgacgatctcgctcatgaacttagaacgccaattaatgcattactgggtcagaatcaggttacgctcagtcaaatcagaagtatcgctgaatatcaaaaaacaattgccggaaacattgaatag

SEQ ID NO: 474004 - DNA, 147 bp, Shigella flexneri
atggcagatttagacgatattaaagatggtaaagattttcgtaccgatcaaccgcaacaaaatatcccttttaccctgaaaggttgcggtgcgctggtagactggccccctgaatctccagacaaccagtatcacttatttaagtga

SEQ ID NO: 474005 - DNA, 708 bp, Shigella flexneri
atgcaacgtggtgtgagagtgctgacctgggactctgatactaaaccggagtgccgctcttactacattaatcagggaacgcccgcccagttgggaggtatgttggtggatatggcggcgcgtcaggtgaataaagacaaagccaaagtcgcgtttttctactcaagccccaccgttacggaccaaaaccagtgggtgaaagaagcgaaagcgaaaatcgccaaagagcatccaggctgggaaattgtcactacgcagtttggctataacgatgccactaaatcgttacaaaccgcagaaggaatattaaaagcgtatagcgatctcgacgccattatcgcccccgatgccaacgccctgcccgctgccgcacaagccgcagaaaacctgaaaaatgacaaagtagcgattgtcggattcagtacgccaaatgtgatgcgcccgtatgtagagcgcggcacggtgaaagaatttggactgtgggatgtggttcagcaaggcaaaatttcagtgtatgtcgcggatgcattattgaaaaaaggatcaatgaaaacgggcgacaagctggatatccagggcgtaggtcaggttgaagtctcgccaaacagcgttcagggctatgactacgaagcggatggtaatggcatcgtactgttaccggagcgcgtgatattcaacaaagagaatatcggcaaatacgatttctga

SEQ ID NO: 474006 - DNA, 288 bp, Shigella flexneri
atgacacttcatcgctttaagaaaatcgccttacttagcgctcttggcattgccgcaatctctatgaatgtgcaggccgcagagcgtattgcatttattcccaaactggttggcgtgggattttttaccagcggtggcaacggcgcacaacaagcgggtaaagagctgagcgttgatgtgacctacgacgggccgacagaacccagtgtttctggtcaggtacagttgattaataacttcgtcaatcaaggttataacgccattattcgtttctgcggtttcgcctga

SEQ ID NO: 474007 - DNA, 993 bp, Shigella flexneri
atgcgtattcgctacggttgggaactggctcttgccgcactgctcgttattgagattgtcgcatttggtgcaattaacccgcgaatgttagatctcaatatgttgctgttcagcaccagtgactttatctgcattggcattgtcgctctaccgctgacgatggtgattgtcagtggcgggatcgatatttcgtttggttcgaccatcggcctctgcgccattgcattgggcgtactgtttcaaagtggtgtgccgatgccgctggcgatactcctgaccttactgctcggcgcattgtgcgggctgatcaacgccggattaattatctataccaaagttaacccgctggtgattacgcttggcacgctgtatctgtttgccggaagcgctctgctgctttccggtatggccggagcgacggggtacgaaggtattggtggattcccgatggcgtttacagatttcgctaacctggatgtgctgggactccccgttccgctgattatcttcctgatatgtctcctcgttttctggctctggctgcataaaacccatgccggacgtaatgtgtttttgattgggcaaagcccgcgcgtggcgctttatagcgcgattccagttaaccgcaccttatgtgcgctctatgccatgacggggctggcgtctgcggtcgccgctgtgctgctggtatcgtattttggttcagcacgttccgatctcggtgcgtcgtttctgatgcccgccatcaccgccgtggtgcttggcggggccaatatttatggtggttccggttccattatcggcaccgccattgcggttttattagtgggatatttgcagcaaggtttgcaaatggcaggagtgccaaatcaggtgtccagcgccctttccggtgcgctgcttatcgtcgttgtcgtaggtcgttccgttagcctgcatcgccagcaaattaaagagttgctggcgcgtcgggccaataacccattgccataa

SEQ ID NO: 474008 - DNA, 1029 bp, Shigella flexneri
atgctgaagtttattcagaacaaccgtgaaatcacggcattgctggcggtggtgctgctgtttgtattacccggttttctcgaccgccagtatttaagtgtgcaaacgctgaccatggtttatagcagcgcgcaaatcctgatcctgctggcaatgggcgcgacgctggtaatgcttacgcgcaatattgatgtttcagtgggttcgattaccggaatgtgcgcggtgctgttggggatgttactgaacgcaggatattcactacctgttgcctgtgtcgcgactttactgcttggtttgctcgcgggatttttcaacggtgccctggtcgcgtggctaaagatccctgccattgttgccacccttggcacgttagggttgtacagaggcatcatgttgctgtggactggcggtaaatggattgaagggttacccgccgaactgaaacagctctccgccccgctgctgcttggcatttcagcaattggttggttgacgataattctggtggcatttatggcctggctgctggcgaagacggcgtttggacgcagtttttatgccacgggcgataatttacagggcgctcgtcaactgggcgttcgtacggaagccattcgcattgtggcattttcgttgaacggctgcatggcggcactggcgggaattgtgtttgcttcgcagattggttttatcctcaaccagaccggtaccgggctggagatgaaagcaattgcagcctgcgtgctgggcggcattagtttgctcggtggttccggtgcgttcatcggtgcggtactcggcgcatggttcctgacgcagatcgatagcgtactggtgctgttgcgcattccggcatggtggaatgattttatcgcgggtctggttctgctggcggtgctggtgtttgatggacgcctgcgttgtgcgctggaacgtaatctacggcggcaaaaatatgcccgctttatgacgccaccgccatccgttaaacccgcttcgtcaggtaaaaaacgggaggccgcataa

SEQ ID NO: 474009 - DNA, 1536 bp, Shigella flexneri
atgcaaacgagtgatacccgcgcgttaccgctactttgcgcccgctcggtttataaacagtattcaggggtcaatgtcctgaaaggcatcgattttacgttgcatcagggggaggtccacgccctgctcggcggcaatggtgccggtaaatcgacgttaatgaagattattgccggtattacccctgctgatagcggtacgctggagattgggggcaacaactacgccagattaacgccagttcatgctcatcagctgggcatttatctcgttccccaggaaccgctgcttttcccaagcctgtcgataaaagaaaacatcctgtttgggctggcaaaaaaacagctctccatgcagaaaatgaagaacttgctggcggcgctgggctgccagtttgatctgcatagtctggcaggatcgctggatgtcgccgatcgccaaatggtggaaatcctccgcgggctgatgcgcgactcgcggattctgatcctcgatgaacctaccgcctcgcttacccctgcggaaaccgaacgcttgtttagtcgcttgcaagagctgcttgctactggcgtgggtattgtttttatctcgcataagctgccggaaattcgccagattgccgatcgaattagcgtgatgcgcgacggaaccatcgccttaagcggcaaaaccagcgaactgtctaccgacgacattattcaggccatcaccccagcggtacgggaaaaatcgctctctgccagccaaaaattatggctggagttacctggtaaccgcccacaacatgccgtcggaacgccggtgctgacactggaaaatctgactggcgaaggcttcaggaatgtcagcctgacgctcaatgccggagaaattctgggcctggctgggctggtgggagccggacgcacagaactggccgagacgctctatggtctgcgtactttgcgtggcggacgcattatgctgaatggtaaagagatcaataaattatccactggagaacgtttactgcgcggtctggtttatctgccggaagatcgccagtcatccggactgaatctcgatgcttcgctggcctggaacgtctgcgcccttactcataaccttcgtggattctgggcgaaaaccgcgaaagataatgccaccctggaacgttatcgtcgggcgctgaatattaaatttaaccaaccggaacaagctgcacggacattatccggtagcaaccagcaaaaaatcctcattgccaaatgcctggaagcttcgccgcaagcattgattgtcgatgaaccgacgcgcggcgtggatgtctcggcccgtaatgatatctaccagctgttgcgcagcatcgccgcacagaatgtggctgtgctgtttatctcctctgatatggaagagatcgaactgatggcagatcgtgtgtatgtgatgcatcagggcgaaattacccactctgcactgaccgggcgcgatattaatgtcgagactattatgcgcgttgccttcggcgatagtcagcgtcaggaggcatcatgctga

SEQ ID NO: 474010 - DNA, 954 bp, Shigella flexneri
atgacaatcaacgattcggcaatttcagaacagggaatgtgtgaagaagaacaggtcgcgcggatcgcgtggttttactatcacgacgggctgacccagagcgagatcagcgatcgtctcggcctgacccgtttgaaagtgtcgcgcttgctggagaaagggcatcagtccggcattattcgcgtacagattaattctcgctttgaaggctgtctggaatatgaaactcaattacgtcgtcagttttcgctgcaacatgtccgggtgatccctgggcttgcggatgctgatgtcggcgggcgactagggataggcgcggcgcatatgttgatgagtttacttcaaccacaacagatgctggcgattggttttggcgaggcaaccatgaatacgctgcaacgcttaagtggttttatttcgtcacagcaaattcgcctggtcacgctctccggtggcgtcggttcttatatgacgggtatcgggcagcttaacgcggcgtgcagtgtgaatattattccggctccgttgcgggcatcctccgctgacattgcccgtacgctaaaaaatgaaaattgcgtcaaagatgttctgctagccgcgcaagcagcggatgtggcgattgtcggcattggagccgtgagtcaacaagacgacgcgacaatcattcgctccggttatatcagccagggcgaacagttaatgattggccgaaaaggggcggttggcgacattttaggctacttttttgatgcaaaaggtgacgttgtcacggatatcaaaatacataacgaactgattggcttacctttaagcgcgctgaagaccatacccgtccgggttggtgtggcagggggagaaaataaagccgaagcaattgccgctgcaatgaaaggcggttatatcaacgcactggttaccgatcaggacacagcagcggcgattttacgtagttaa

SEQ ID NO: 474011 - DNA, 903 bp, Shigella flexneri
atggctcgactctttaccccttcagaatcaaagtactacctgatggcgctggatgcaggcaccggaagtattcgggctgtgatattcgacctggaaggcaatcaaatagcagtgggacaggcggagtggcggcatctggcagtaccggacgttcctggttctatggaatttgatctcaacaaaaactggcaactggcgtgtgagtgtatgcgccaggcgctgcacaacgccggcatagacccggagtatatcgctgccgtttcggcatgttctatgcgtgaaggcattgttttatataacaatgaaggaacaccgatctgggcctgcgccaatgtggatgccagagcggcacgcgaagttagcgaacttaaagaactgcacaacaatacctttgaaaacgaagtttatcgagcgaccggacaaacactggctttaagtgccatccccagattactttggctggcgcaccatcgttccgatatttaccgtcaggcatcaaccatcaccatgatcagcgactggctggcctatatgctcagcggcgaactggcggtggatccctctaacgctggcaccacgggacttcttgatctaaccacccgtgcctggaaacctgcattgctggatatggctggcctgcgtgccgatattctttctcctgtcaaagaaaccggcacattgctgggcatggtaagttcacaagcggcggaactctgcggtctgaaggcgggcactccggtggtcgttggaggaggcgacgtgcagcttggttgccttgggttaggcgttgtgcgtccggcacaaaccgcggttcttggcggcacgttcacggataataagcagtgcacgctcagcgaggcccggcatcagttgccgattactccgttccgtatgccgtcatga

SEQ ID NO: 474012 - DNA, 186 bp, Shigella flexneri; identical to SEQ ID NO: 462789

SEQ ID NO: 474013 - DNA, 900 bp, Shigella flexneri
atgtatgtcgaagcggataaattgctggctaaacttaacctgcgctttaaaagcgacaagttagtgggcgatctttccatcggtgaccagcaaatggttgaaatcgccaaagtgctgagctttgagtcgaaagtcatcattatggatgaaccgaccgatgcgctgaccgataccgaaaccgaatccctgttccgcgtcatccgcgagctgaaatcgcaaggccactgtattgtctatatctcccaccgcatgaaagaaatcttcgagatttgcgatgacgttaccgtttttcgtgatgggcaatttattgctgagcgcgaagtggcatcactgaccgaagattcgctgattgagatgatggtgggccgcaagctggaagatcaatatccacacctggacaaagcgccaggagatatccgcctgaaagtcgataatctctgcggacctggcgttaacgatgtctcttttactttacgcaaaggcgaaattcttggcgtctctggtttgatggacgcaggtcgtaccgaactgatgaaagtgctctacggcgcactgccgcgcaccagcggttacgtcaccctggatgggcatgaagtcgttacccgttcaccgcaggatggcctggcaaacggcattgtgtatatctccgaagaccgtaaacgtgacggtttagtgctgggcatgtcagtaaaagagaacatgtcgctgacagcgctgcgctacttcagccgcgctggcggcagtttgaagcatgccgatgaacagcaggctgtgagtgatttcattcgtctgtttaatgtgaaaacgccgtcgatggaacaggcaattggtctgctttccggtggcaatcagcaaaaagtggcgattgcccgcggtctgatgacacccccaaagtattga

SEQ ID NO: 474014 - DNA, 258 bp, Shigella flexneri
ttgatccttgatgagcctacccgtggcgtagatgtcggcgcgaaaaaagagatctatcaactgattaaccagttcaaagccgatggcttgagtatcattctggtgtcatcggagatgccagaagtattaggcatgagcgatcgcatcatcgtcatgcatgaagggcatctcagcggggaatttactcgtgagcaggccacccaggaagtgttaatggctgtcgctgtgggcaagcttaatcgcgtgaatcaggagtaa

SEQ ID NO: 474015 - DNA, 966 bp, Shigella flexneri
atgataacccagactgtctctggtcgccgttatttcacgaaagcgtggctgatggagcagaaatcgcttatcgctctgctggtgctgatcgcgattgtctcgacgttaagcccgaactttttcaccatcaataacttattcaatattctccagcaaacttcggtgaacgccattatggcggtcgggatgacgctggtgatcctgacgtcgggcatagacttgtcggtaggttctctgttggcgctaaccggcgcagttgctgcatctatcgtcggcattgaagtcaatgcgctggtggctgtcgctgctgctctcacgttaggtgccgcaattggtgcggtaaccggggtgattgtagcgaaaggtcgcgtccaggcgtttatcgctacgctggttatgatgcttttactgcgcggcgtgaccatggtttataccaacggtagcccagtgaataccggctttactgagaacgccgatctgtttggctggtttggtattggtcgtccgctgggcgtaccgacgccagtctggatcatggggattgtcttcctcgcggcctggtacatgctgcatcacacgcgtctggggcgttacatctacgcgctgggcggcaacgaagcggcaacgcgtctttctggtatcaacgtcaataaaatcaaaatcatcgtctattctctttgtggtctgctggcatcgctggccgggatcattgaagtggcgcgtctctcctctgcacaacccacggcggggactggctatgagctggatgctattgctgcggtggttctgggcggtacgagtctggcgggcggaaaaggtcgcattgttgggacgttgatcggcgcattaattcttggcttccttaataatggattgaatttgttaggtgtttcctcctattaccagatgatcgtcaaagcggtggtgattttgctggcggtgctggtagacaacaaaaagcagtaa

SEQ ID NO: 474016 - DNA, 315 bp, Shigella flexneri
atgaacatgaaaaaactggctaccctggtttccgctgttgcgctaagcgccaccgtcagtgcgaatgcgatggcaaaagacaccatcgcgctggtggtctccacgcttaacaacccgttctttgtatcgctgaaagatggcgcgcagaaagaggcggataaacttggctataacctggtggtgctggactcccagaacaacccggcgaaagagctggcgaacgtgcaggacttaaccgttcgcggcaccaaaattctgctgattaacccgaccgactccgacgcagtgggtaatgctgtgaagatggctaactag

SEQ ID NO: 474017 - DNA, 930 bp, Shigella flexneri
atgcaaaacgcaggcagcctcgttgttcttggcagcattaatgctgaccacattcttaatcttcaatcttttcctactccaggcgaaaccgtaaccggtaaccactatcaggttgcatttggcggcaaaggcgcgaatcaggctgtggctgctgggcgtagcggtgcgaatatctcgtttattgcctgtactggcgatgacagcattggcgagagcgttcgccagcagctcgccactgataacatcgatattactccggtcagcgtgatcaaaggcgaatcaacaggtgtggcgctgatttttgttaatggcgaaggtgagaatgtcatcggtattcatgccggcgctaatgctgctctttccccatcgctggtggaagcgcaacgtgagcgtattgccaacgcgtcagcgttattaatgcagctggaatcaccactcgaaagtgtgatggcagcggcgaaaatcgcccatcaaaataagactatcgttgcgcttaacccggctccggctcgcgaacttcctgacgaactgctggcgctggtggacattattacgccaaacgaaacggaagcagaaaagctcaccggtattcgtgttgaaaatgatgaagatgcagcgaaggcggcgcaggtactgcatgaaaagggtatccgtactgtactgattactttaggaagtcgtggtgtatgggctagcgtgaatggtgaaggtcagcgcgttcctggattccgggtgcaggctgtcgataccattgctgccggagatacctttaacggcgcgttaatcacggcgttgctggaagaaaaaccattgccagaggcgattcggtttgcccatgctgccgctgcgattgccgtaacacgtaaaggcgcacaaccttccgtaccgtggcgtgaagagatcgacgcatttttagacaggcagaggtga

SEQ ID NO: 474018 - DNA, 993 bp, Shigella flexneri
ttggctacaatgaaagatgttgcccgtttggcgggcgtttctacctcaacagtttctcacgttatcaataaagatcgcttcgtcagtgaagcgattaccgccaaagttgaagcggcgattaaagaactcaattacgcgccatcagctctggcgcgtagcctcaaactcaatcaaacacataccattggcatgttgatcactgccagtaccaatcctttctattcagaactggtgcgtggcgttgaacgcagctgcttcgaacgcggttatagtctcgtcctttgcaataccgaaggcgatgaacagcggatgaatcgcaatctggaaacgctgatgcaaaaacgcgttgatggcttactgttactgtgtaccgaaacgcatcagccttcgcgtgaaatcatgcaacgttatccgacagtgcctaccgtgatgatggactgggctccgttcgatggcgacagcgatcttattcaggataactcgttgctgggcggagacttagcaacgcaatatctgatcgataaaggtcatacccgtatcgcctgtattaccggtccgctggataaaactccggcgcgcctgcggttggaaggttatcgggcggcgatgaaacgtgcgggtctcaacattcctgatggctatgaagtcactggtgattttgaatttaacggcgggtttgacgccatgcgccaactgttatcacatccgctgcgtcctcaggccgtctttaccggaaatgacgctatggctgttggcgtttaccaggcgttatatcaggcagagttacaggttccgcaggatatcgcggtgattggctatgacgatatcgaactggcaagctttatgacgccaccattaaccactatccaccaaccgaaagatgaactgggggagctggcgattgatgtactcatccatcggataacccagccgacccttcagcaacaacgattacaacttactccgattctgatggaacgcggttcggcatag

SEQ ID NO: 474019 - DNA, 1428 bp, Shigella flexneri
atgagcgataaaaagaagcgtagtatgtcgggtttgccgtggatcgcggcgatggccttcttcatgcaggcacttgatgccactattctgaataccgccttacccgcaatcgctcatagccttaatcgttctcctctcgcgatgcaatcagccatcatcagttatacgctgacggtggcgatgcttattccggtaagcggatggctagccgatcgcttcggtacgcgtcgcatttttacccttgccgtgagtctgttcacgttgggttctctggcctgcgcactttctaattcgctaccacagctggttgtcttccgggttattcaagggataggcgacgcaatgatgatgcctgttgctcggccggccttactgcgtgcttatcctcgtaatgaacttcttccggtattgaattttgtcgccatgccgggtctggtggggccaattttaggccccgttcttggcggcgtgctggtcacctgggcaacctggcactggatatttttaattaatatccccataggtattgcgggccttctttacgcgcgcaaacatatgcccaatttcaccaccgcacgacgcagattcgatatcactggctttttgctgtttggcctcagccttgttctcttttcaagcggaatagagctattcggggaaaagattgtcgccagctggattgccttgacggtaattgtcaccagcatcgggttactgcttctctatattctccatgcgcgacgtacgccaaacccattaatttcattagatttatttaaaacccgcactttctcgatcggtatcgtaggcaatattgcaacccgtctggggaccggctgtgtaccgttccttatgccattgatgttacaggtaggatttggttatcaggcgtttattgccggctgtatgatggcaccgacagcgttaggttccattattgcaaaatcgatggttacccaagtcttacgtcgtctgggctatcgccatacattagtggggatcacggtgattattgggctaatgatcgctcagttctctttgcaatcaccggcaatggcgatatggatgctgatcttgccgttgtttatattagggatggctatgtcgacgcagtttaccgcgatgaataccatcacacttgccgatctgaccgatgacaacgccagcagcggtaacagtgttctggcggtcacgcagcaactgtcgattagtttaggcgttgctgtaagtgcggccgtccttcgcatttatgaagggatggaaggcacaacgactgtcgaacaattccactatacgtttatcacgatgggcattattactgttgcttcagcagcaatgttcatgcttctgaaaacaaccgatggtaataatttgatcaaaagacagcgtaaatctatgccgaaccgcgttccatcagaatcggagtaa

SEQ ID NO: 474020 - DNA, 693 bp, Shigella flexneri
atgcctttaagcgcacaacagttagctgcacagaaaaacctttcgtatgttctggctgagaagctggcgcaacggatcttaaaaggtgaatatgaacccggcaccattttgcccggtgagattgagctgggcgagcaatttggagtgagtcgtacagcggtacgcgaagcggtcaaaacgttaacggcaaaagggatggttttaccgcgaccgcgaattggtactcgggtcatgccacaatcgaactggaattttcttgatcaggaattgcttacttggtggataacagaagagaactttcatcaggtcatcgatcactttctggttatgcgtatctgtctggagccgcaagcctgcctactggcagcaacggttggcaccgcggaacagaaggcgcatctcaatacgttaatggccgaaatggcggcattaaaagagaactttcgccgtgaacgctggatcgaagtcgatatggcctggcatgagcatatctatgaaatgagcgccaatccgtttttgacctcattcgcctcgctattccattcggtttatcacacttacttcacgtcaattaccagcgacacagtgataaagctggatctgcaccaggcgattgtcgatgcgattatccaaagcgatggcgacgcggcatttaaagcttgtcaggcgctgctacgctcacctgataagtga

SEQ ID NO: 474021 - DNA, 249 bp, Shigella flexneri; identical to SEQ ID NO: 381166

SEQ ID NO: 474022 - DNA, 438 bp, Shigella flexneri; identical to SEQ ID NO: 381165

SEQ ID NO: 474023 - DNA, 1272 bp, Shigella flexneri; identical to SEQ ID NO: 14939

SEQ ID NO: 474024 - DNA, 627 bp, Shigella flexneri; identical to SEQ ID NO: 9357

SEQ ID NO: 474025 - DNA, 303 bp, Shigella flexneri; identical to SEQ ID NO: 9358

SEQ ID NO: 474026 - DNA, 1347 bp, Shigella flexneri; identical to SEQ ID NO: 19197

SEQ ID NO: 474027 - DNA, 603 bp, Shigella flexneri; identical to SEQ ID NO: 236359

SEQ ID NO: 474028 - DNA, 267 bp, Shigella flexneri; identical to SEQ ID NO: 80745

SEQ ID NO: 474029 - DNA, 282 bp, Shigella flexneri; identical to SEQ ID NO: 19345

SEQ ID NO: 474030 - DNA, 1104 bp, Shigella flexneri
gtgtccgttaaactcaggctacctcacgctgctgagcagtcggaagtgtcgccagaacagcggcgcgccatctgcgaggcttttgagtctgccaataatacccatggcttaaacctgactgcccataaatacccgggcttacgcggcacactacaaaccgcatccactgactgcgacacaattgtggaagctgcagcactattacccgcttttgatcaggcagtggaaggcaaccgccaccaggatgattacggttcaggtcttgggatggccgaagagaaatttcactattatctcgatctcaatgaccgctatgtctatttttatgagccggttaatgttgaatactttgcgatgaataactggtccttcctgcagtcaggaagtattggcatcgatcgcaaagatattgaaaaggtatttaccgggcgtaccgtattgtcgagcatttaccaggatcagcgtactaaacagaacgtgatgagtttgctgacgccggtatatgtcgcagggcagctaaaagggattgtgctgctggatattaacaaaaacaatttgcggaatatcttttacactcatgaccgccctctcctctggcgttttctcaatgtcacgctaaccgataccgattcggggcgcgacattatcatcaaccagagcgaagataatctgttccagtatgtcagttacgtccatgacttaccgggcggcattcgtgtctcgttatccattgatattctttactttatcacgtcttcgaggaaaagcgttctgttctggattttgacggcgttaattttgctgaatatggtccggatgcacttccgtttataccaaaatgtgtcgcgagaaaatattagtgatgcgatgactggactgtataatcgcaaaattttaacccctgaactggagcagcggttgcagaaactggtgcaatccggttcttcggtgatgtttattgcaattgacatggacaagttaaagcaaataaatgacaccctcggtcatcaggagggggatttagcgattacgttacatgatgcgtataaagcttccgatgagcgtttatatgtcaataagcagaacaaaaacagccgttcatga

SEQ ID NO: 474031 - DNA, 504 bp, Shigella flexneri
atgactgaaatggctaaaggaagcgtgacgcatcagcagttaatcgctttattatcacaagaaggtgctaacttccgcgtcgttacccatgaagcggtaggtaaatgtgaagcggtgtcagaaattcgtggtaccgctctaggccagggtactaaggcactggtatgtaaagtcaaaggcaatggcgtaaatcaacatgttctggcgatcctcgcagccgatcaacaggccgatctgagccaactcgccagccatataggcggattacgcgcttcgttggccagcccggcggaagttgatgaactcacaggctgtgtcttcggcgcgatcccccctttcagcttccatccaaaactcaaactggttgccgaccctctactcttcgaacgatttgatgaaatcgccttcaatgcagggatgctggataaatccgttattttgaaaaccgcggattatttgcgcattgcgcaaccagaactggtcaatttccgccgcactgcgtag

SEQ ID NO: 474032 - DNA, 447 bp, Shigella flexneri
atgtttgatgtcactttgctgatcctgctcgggttagctgcgctgggctttatcagtcataacaccactgtcgccgtttcaattctggtgttgatcattgtccgcgtcacaccgttaagcacctttttcccgtggattgaaaaacaggggctaagtatcgggataatcattctgacgattggcgttatggcccccatcgccagcgggacgctaccgccctcaaccttgattcactcgtttctgaactggaaatcgctggtggcaattgcagtaggcgttattgtctcctggctgggtgggcgcggcgtgacgttaatgggcagccagccgcaactggttgctgggctgctggtgggcactgttttaggcgtagcgctgtttcgcggcgtaccggttggcccgcttattgccgcgggtctggtttcgctgattgtggggaaacagtag

SEQ ID NO: 474033 - DNA, 435 bp, Shigella flexneri
atgacccgcagattaattcaggtcctgtttgatgaactccctcagcagccacaacaacagctgcacctgcccgtttcttctcatcctaaaatccgcacgatggtggagatgatggcgaaagggcccgtcgagtggggggcattggggcaatgggctggcttttttgcgatgagtgaacgcaatcttgcccgactgatagtgaaagagacggggttgagttttcgccagtggcgtcagcagttacagctgattatggcgcttcagggattagtgaaaggcgatactgtacagaaagttgctcatacgctggggtatgattcaacaacggcctttattactatgtttaagaaaggcttggggcaaacgccaggccgatatattgcgggattaactactgtttccccacaatcagcgaaaccagacccgcggcaataa

SEQ ID NO: 474034 - DNA, 1062 bp, Shigella flexneri
atgacctgttcaacttcattaagcggcaaaaacaggattgtccttatcgctggcattctgatgattgccacaacattacgcgtcacctttaccggcgcagcgccgttactggatacgattcgttccgcttactcgctgacgacagcgcaaaccggcttattaaccaccctgccattattggcctttgcgctaatctcacctctggctgccccggtggcgcgacgttttggtatggaacgtagcctgtttgccgcgttacttttgatctgtgcaggtatcgcaattcgttctctcccttcgccttacttattatttggcggtacagcggtcattggcggtgggattgcattaggcaatgtcttactgccaggattaattaaacgcgatttccctcattccgtcgccagacttaccggcgcatattccctgacaatgggagctgcagcggcactgggatctgctatggtcgtgccgctggctttgaacggttttggctggcaaggcgcgttgttcatgctgatgtgttttcctctgctggctctttttttatggctgccacagtggcgaagtcagcaacatgcaaatttgagtacctcacgcgccttacatactcggggtatctggcgttcgccacttgcctggcaggtaacattgtttcttgggatcaactcactggtctattacgtgattattggctggcttccggcgatcctcatcagtcacggctatagcgaagcacaggcgggttcactgcatggtttgctgcaactagccacagcagctcccggtttgctgatcccacttttcttacatcatgtgaaagaccagcgtggtattgcagcgttcgttgccttgatgtgcgcagtgggcgcggttgggctctgctttatgccagcgcacgcgatcacctggactctgcttttcggttttggttccggcgcaacaatgatactggggttgacgttcattggtcttcggcaagttctgcgcatcaggcggcggcactctcggggatggcacaatccgtcgggtatttgctggcagcctgtgggccgccgctaa

SEQ ID NO: 474035 - DNA, 348 bp, Shigella flexneri
atgaatattcagtgcaaacgcgtttatgatccggctgaacagagcgatggttatcgcgtactggtcgaccgcctctggccgcgcggtatcaaaaaaaccgatttagcccttgatgagtgggataaagaaatcacgccgtcaacggaactgcgcaaagcctttcacggcgaagtcgtcgattttgcaacctttcgcgagcaatatcgcgcagaactggcgcaacacgagcaagaaggaaagcggctggcggacatcgccaaaaaacagccgctgaccctgctctacgcagcaaaaaacaccacgcagaaccatgcgctggtgctggccgactggctacgtagcttgtga

SEQ ID NO: 474036 - DNA, 255 bp, Shigella flexneri
atgaaaattatcagttttgttctgccttgcttgctggtcctggctggttgttcaaccccttctcagccagaagcacctaaaccgccgcagattggtatggcaaatccggcgtcggtctattgccagcagaagggcgggacgctcattccagtgcagacagcgcaaggggtcagcaacaattgcaaattaccgggcggtgaaacgattgatgaatgggcattgtggcgacgggaccatccggctggtgaaaaataa

SEQ ID NO: 474037 - DNA, 1026 bp, Shigella flexneri
gtgtcagatcagattatcgcccgcgtctcgcaatcccttgccaaagaacagtcactggaaagtctggtccgacagcttctggagatgctggaaatggtcactgatatggaatcaacctacctgaccaaagtggatgtcgaagcgcgcctgcagcatattatgtttgcccgtaacagccagaaaatgcacatcccggagaattttaccgtcttgtgggattactcgttatgcaaacgcgccattgatgaaaactgctttttcagcgatgaagtccctgaccgttggggcgactgtattgcggcacgcaatcttggcatcaccacatttctgagcacgccaattcacttaccggatggatcattctatggcacgctttgcgccgccagcagtgagaagcgccagtggagtgaacgcgcggaacaggttttacagttattcgccggactgattgcacaatatattcaaaaagaggcactggttgaacagctgcacgaagccaatgctgcgctgattgcgcaatcgtataccgactcgttaaccgggctaccgaatcggcgggcgatttttgaaaatctgacgacgctgttttccctcgcccggcatcttaaccataagataatgatcgcgtttatcgatctggataacttcaaattaatcaatgatcgttttggtcataatagtggcgatctgtttctcattcaggttggcgagcgccttaatacgctccagcaaaatggcgaagttattggtcgtctcggtggtgatgagtttttggttgtttcactaaacaacgagaatgcggatatttcgtcgctgcgagaacgtattcaacagcaaatacgtggagaatatcacttaggtgatgttgatttgtattatcccggtgccagtcttggcatagtagaagtcgatcctgaaacaaccgatgcagacagtgccctgcatgctgccgatattgcgatgtatcaggagaaaaaacacaaacagaaaacaccttttgtcgcgcatccagcgctacattcctga

SEQ ID NO: 474038 - DNA, 222 bp, Shigella flexneri
atgttaacccattgggtaacagcgcaagaatgcgtaggaatgtcatgctttcctaaacatgaggtgagtattcgccgcaatcttgaaaagcttgcagccaatcatccagaactacgtcgcaagcgtacgggttcaaaggctttggaatttcatatatcagttctaccagcggcagcacgtgctgagttgttattaaaatctgagcaaatagaaacaagctag

SEQ ID NO: 474039 - DNA, 933 bp, Shigella flexneri
atgaaaatacgttcgcaagtcggcatggtgcttaacctcgataaatgtatcggctgccatacctgttcggtgacctgtaacaacgtctggaccggacgcgaaggcatggagtacgcatggtttaacaacgtcgaaaccaaaccgggcattggttatccgaaaaactgggaagatcaggaagagtggcaaggcggctgggtccgcgatgtgaatggcaagatccgtccgcgtctgggcagcaagatgggcgtaataaccaaaatcttcgccaacccggtggtgccgcagcagattgatgattactacgaacctttcaccttcgactacgaacatttgcatagcacaccggaaggcaaacatatccctactgctcgcccgcgttcactgattgacggcaaacggatggacaaagtgatctggggcccaagctgggaagaactgctgggcggcgagtttgaaaaacgtgcccgcgaccgcaacttcgaggccatgcaaaaggagatgtacgggcagtttgaaaacaccttcatgatgtacctgccgcgcctgtgcgaacactgcctcaatcccagctgcgtggcgacctgcccaagcggcgctatctacaaacgcgaagaagacggcattgtgctgattgatcaggataaatgccgtggctggcgtttgtgcattagcggttgtccgtacaaaaaaatctacttcaactggaaaagcggcaagtcagaaaaatgtatcttctgttatccgcgaattgagtcaggccaacccaccgtgtgctcagaaacctgcgtgggtcgcatccggtatctgggcgtgctgctttacgacgccgaccgcatcgaggaagcgtcgagcaccgagcgcgaagttgacctctatcgagtaggcagcctgacggctgcggcttgtcatggtctgcaattaccgttataa

SEQ ID NO: 474040 - DNA, 3054 bp, Shigella flexneri
atgacctggggcgagcaaaccgacgtaccggaatctgccgactggtataactccagctacatcatcgcttgggggtctaacgtaccgcagacacgtacgccggacgcccacttctttaccgaagtacgctacaaaggcactaaaaccatcgccattacccctgactactctgaagtggccaaattgtgcgaccagtggctggcaccgaaacaaggcactgatagcgccctggcgatggcaatggggcatgtgattttaaaagagtttcatctcgataatcccagcgactactttatcaactactgccgccgctacagcgacatgccgatgctggtaatgctggagcctcgcgacgatggtagctacgttcccgggcgcatgatccgcgcatctgacctggtggatggactgggcgaaagcaacaatccgcagtggaaaaccgtagcagttaataccgcaggtgaattggtagtgccgaacggttcgattggtttccgctggggagaaaaaggcaaatggaatctggaatccattgccgccggtacggaaaccgaattgtcgttaaccctgctcggtcaacatgacgctgttgcaggcgtggccttcccctactttggcggcattgaaaatccgcattttcgcagcgtaaaacacaatccggtgctggtgcgccaattgcccgttaaaaacctgacgttagtcgatggcaacacctgtccggtggtcagcgtttatgatttggtactggcgaattacggcctcgatcgcgggctggaagatgaaaacagcgcgaaagattacgctgaaatcaaaccgtacaccccagcctggggtgagcaaattaccggcgtaccgcgccagtatattgaaaccatcgcccgcgaatttgccgatatcgcccataaaacgcatgggcgctcaatgattatcctcggcgcaggtgttaaccactggtatcacatggacatgaactaccgcgggatgatcaatatgctgatcttctgcggttgtgtcgggcaaagcggtggcggctgggcacactatgtcggccaggaaaaactgcgcccacaaaccggctggttgccactggcctttgcgctcgactggaaccgaccaccgcgccagatgaacagcacctcgtttttctacaatcattccagccaatggcgctatgaaaaagtctctgctcaggagttactttcaccgctcgccgatgccagtaagtacagcggtcatctgattgatttcaacgttcgcgccgaacgtatgggctggctaccttctgcgccgcagctggggcgtaacccgctcgggattaaagctgaagccaacaaggccggattatcccccacagaatttaccgcccaggcgctgaaatcgggcgatttacgtatggcctgcgaacaaccagatagcggcagcaatcatccgcgtaatttgtttgtctggcgctctaacctgcttggctcctccggcaaaggccacgagtatatgcagaagtatctgctggggaccgaaagcgggattcagggcgaggaactcggtgccagcgacgggatcaaaccggaagaagtcgagtggcaaactgcggcgattgaaggcaagctcgacctgctggtgacgctcgacttccgcatgtccagtacctgcctgttctccgatatcgttctgcccaccgccacctggtatgaaaaagacgatatgaacacctcggatatgcatccatttattcatccgctttctgcggcggtcgatccggcctgggaatcacgcagcgactgggaaatctacaaaggtattgccaaagcattttcgcaagtgtgcgtgggccatcttggcaaagaaaccgacgtggtattacaaccactgctgcatgactctccggcagagctctcacagccgtgtgaagtgctcgactggcgcaaaggcgaatgcgatctgatcccgggtaaaaccgcgccgaatattgtggcggtggagcgcgactaccctgctacgtatgaacgctttacctcgctcgggccattgatggacaaacttggcaatggcggtaaagggatttcgtggaatacccaggatgaaatcgatttcctcggcaaactcaattacaccaagcgtgatggcccggcacaggggcgtccgctgattgacaccgccattgacgcttcagaagtgattctggcactggcaccggaaaccaacggtcatgttgcagtcaaagcgtggcaggcgctgggcgagatcaccgggcgcgaacatacccatctggcgctgcacaaagaggacgagaagattcgctttcgcgatattcaggcgcagccgcgtaaaattatctccagccccacatggtccggtctggaaagcgatcacgtatcctataacgcgggatacaccaacgttcatgagttaattccgtggcgcacgctgtcgggacgccagcagctctatcaggatcatccgtggatgcgtgcttttggtgaaagcctggtggcttatcgcccgcctatcgacacccgtagcgtcagtgagatgcgccagataccgccaaacggcttccaggaaaaagcacttaacttcctgacgccgcaccagaaatggggcattcactcaacctacagtgaaaacctgctaatgctgacgctctctcgcggtggaccgattgtctggatcagcgaaacagatgcccgagaactgaccattgtcgataacgactgggtggaagtatttaacgccaacggcgcgctgactgcccgcgcggtggtcagccaacgtgtaccgccgggcatgaccatgatgtatcacgcccaggaacgcattatgaatattcctggttcggaagtaactggcatgcgcggcggcattcataactcggtcacccgcgtttgcccgaaaccgacgcatatgattggcggttacgcgcagctggtctggggctttaactactacggcaccgtcggctcgaaccgcgacgaattcatcatgatccgcaagatgaagaacgttaactggctggatgatgaaggtcgcgatcaggtacaggaggcgaaaaaatga

SEQ ID NO: 474041 - DNA, 696 bp, Shigella flexneri
atgaatgatatcgccagttcacgcgcctcaattgccgaccagctccctgtcttacaacgcctgcatctctggctgctgagcctgctttaccttgccaccttcggttcgtttatcggtttttctgcgggttttgccatgctggcaaaaacccagttcccggatgtgaatattctgcgcctggcgttctttggcccatttattggtgccatcgcgcggtcggttggtggtgctatttccgataaattcggcggcgtgcgggtgacgttgatcaactttatttttatggcgattttcagtgccctgctgttccttaccttaccgggcacaggctccggtaatttcatcgccttttacgccgtatttatggggctgtttctgaccgcgggtctgggaagtggttctactttccagatgatcgccgccatctttcgccagataaccatttatcgggtgaagatgaaaggcggtagtgatgagcaagctcagagagaagccgtcaccgaaacggcggcaacgctgggctttatctcagccattggcgcagtgggcggcttttttattccgcaggcatttggcatgtcgctcaatatgaccggctctccggtcggcgcgatgaaagtgtttttaatcttctacatcgtttgtgtgctgctgacctggctggtttatggtcggcggaagttcagccaaaaataa

SEQ ID NO: 474042 - DNA, 645 bp, Shigella flexneri
atggcactgcaaaatgagaaaaatagtcgttatcttttacgcgactggaaaccagaaaatccggccttctgggaaaataaaggaaaacatattgctcgaagaaacctctggatatcagtcagttgtctacttcttgccttctgtgtctggatgctatttagcgcagttaccgttaatctcaataaaatcggttttaattttactaccgatcaactctttttattaaccgcattaccctccgtttctggcgcattattgcgtgttccctactcctttatggtgcctatattcggtggacgccgatggccggtttttagtactgcaatcctgattattccttgcgtctggctcggaattgccgtgcaaaatccgaatactccttttgggatatttatcgttatcgctttgctatgcggttttgcaggtgcaaactttgcttcgagcatgggcaatatcagtttcttctttccaaaagccaaacaagggagcgctcttgggattaatggcggattaggaaacttaggtgtaagtgtaatgcagctggttgcaccgctggtcatttttgtacctgtatttgcctttctcggcgtcaatggcgtaccgcaggccgacggttcggtgatgtcgctggcgaatgccgcatag

SEQ ID NO: 474043 - DNA, 2433 bp, Shigella flexneri
atggcggaactgaacctaagtaacctgacggaagcagacatcattaccaaatgcgttatgccagccattctcaatgcaggctgggacaacacaacgcaaatcagacaggaggtcaaactccgggacggtaaagtcatcgtacgtggtaaagttgcggcacgcagaacggtaaaatctgctgacatcgtgctgtaccacaagccaggcattcccttagccgtgattgaagcaaaagccaacaaacatgaaattggcaaagggatgcaacagggcattgaatatgcgcgcctgctggacgttccttttgtttttgccaccaacggtgatggctttatcttccgcgatgccaccgcagccgaaggtgaatgccttgaaaagcaaataacgctggatgacttcccctcccccgctgaactctggcaaaaattctgcctctggaaaggatacacacaagctcagcttccggtgattactcaggactattacgacgatggcagcggcaaatcgcctcgttattatcaacttcaggcaatcaacaaaaccattgaagccgtctccaacgggcaaaaccgcgttctgctggtcatggcgaccggaacagggaaaacctataccgcattccagatcatctggcgcctgtggaaatcaaaaaataaaaaacgcattttgttccttgccgatcgcaacattctggtcgaccaaaccaaaaataatgatttccagccatttggtacggcaatgaccaaagtcagcggacgcaccattgatcccgcttatgaaattcacctcgcgctctatcaggctataactggcccggaggaagaccaaaaagcgtttaaacaagtcgcaccagatttcttcgatctgatcgtgatcgacgaatgccatcgcggcagcgcatccgaagacagcgcctggcgagagatccttgattatttcagttccgccacccaaattggcttaaccgccacgccaaaagagacgcatgaagtctccagcacggattacttcggcgatccggtttacgtctactcactaaaagaagggatcgaagacggcttcctcgctccttataaagttgtccgtgttgatattgatgtcgacctgcaaggctggcgcccaaccaaagggcaaactgacttaaacggcgaagtgattgacgatcgtatctataaccagaaagatttcgatcgcacgatggtgatcgacgaacgcacagaactggttgccagaaccattaccgactacctcaagcgcaccaatccgatggataaaaccatcgtcttctgtaacgacatcgatcatgcagaacgtatgcgccgcgccctggttaatctcaacccgcagcaggtgaaaaagaacgacaaatacgtcatgaaaatcaccggcgatgatgaaattggcaaagctcagttggataacttcatcaacccgaaaaaaccgtacccggttatcgcgaccacttcagagctgatgaccactggtgtggatgctaaaacctgcaaactggtagtactagaccagaacatccagtcgatgaccaaattcaagcaaattatcggtcgtggtacacgcatcgacgaacgttacggcaaactctggtttaccatcctcgactttaaaaaagccaccgaactgtttgccgatgagcgtttcgatggcattcccgaaaaagtcatggataccacaccagaggatatcgccgatccagaatctgattttgaagagaaactcgaagaaatcagcgaacatgacgacgaacaggtaacaggcgttgatgaaccgcctgcgccaccataccaggttaccgataccgatgatgtcggcccatttccggaagaagacgagaagaaaatccgcaagtttcacgtcaacggtgtagcggtgggcgttattgcacagcgcgttcagtattacgacgccgacggtaaactggttaccgaatcctttaaagattacacccgcaaaacactgctcaaagaatatgcctcgctggatgactttacccgcaagtggcaggacgccgatcgcaaagaagcgatcattcacgagctggagcaacaggggatcatctgggaagtactggcagaagaagtcggtaaagatctcgacccgttcgacatgctttgccacgtagtgtatggtcagccgccgttaacccgcaaagagcgcgccgagaacgtgcacaagcggaactacttcacaaaatactctgaagcagcgcaagccgtgctcgataatctgctggataaatacgccgatgcgggcgtacaggagatcgaaagtattcaggtgctgaaacttaaaccattcgacagcatgggcaccttaccggagattattaaaaccggatttggcgaccgtaacgggtataatcaggcgctcagcgagctggaaaacgaaatctaccaattaccgccccgctctgcttaa

SEQ ID NO: 474044 - DNA, 1470 bp, Shigella flexneri
atgtctatcagctcagtaatcaaatcattacaagatattatgcgcaaagatgccggtgtggacggcgatgcgcagcgtctcggtcagctctcctggctgctgtttttgaaaatcttcgatgcccaggaagaggcgctggaactggagcaggataactatcaatatccgatcccacagcgttatttgtggcgcagttgggccgccaacgcgcagggcattaccggtgattccctgctggaattcgttaatgatgatctgtttccggcgttgaaaaacctcactgcgcctatcgataaaaacccacgcggctacgtggtgaagcaggcgttcagcgatgcctataactatatgaaaaacggtacgctactgcgccaggtgatcaacaagctgaacgaaattgactttaccagcgccagcgaacgccatctgtttggtgatatttacgaacagatccttaaagatctgcaatctgcgggcaatgcgggcgaattctatactccacgcgccgtcactcgctttatggtggatcgcgttgatccgaaactcggcgaatccattatggacccggcctgcggtacgggcggttttcttgcctgcgcgttcgatcatgtaaagaacaaatacgtgaagagcgtcgccgatcatcagacactgcaacaacagatccacggtgttgagaaaaaacagcttccgcacctgctggcgaccaccaatatgctgctgcacggcattgaagtaccggtacaaattcgtcacgacaacaccctgaataaaccgctttcctcctgggatgagcaactggatgtcattgttaccaacccgccgtttggtggcacggaagaagacggtattgagaagaactttccggcagagatgcaaacccgcgaaacggcggatctgtttctgcaactgattgtggaagtactggcgaaaaacggtcgtgcggcggtggtattgccggatggcacactatttggcgaaggtgttaaaaccaaaatcaaaaagctacttaccgaagagtgcaacctgcataccatcgtgcgtttaccgaatggtgtgtttaatccctataccggcattaaaaccaacctgttgttctttaccaaaggtcagccaaccaaagagatttggttctatgaacatccgtatccggcgggcgtgaaaaactacagcaaaaccaagccgatgaagtttgaagagtttcaggcggagatcgactggtggggtaacgaggccgatggttttgccagccgcgtcgagaatgagcaagcgtggaaagtcagcattgatgacgtgattgcgcgcaacttcaatctggatattaaaaacccacatcaggcggaaaccgtcagccatgatccggacgaactgttagcgcagtatgcaaaacagcaggcggagatccagacgctgcgtaatcaactgcgcgatattcttggcgctgcgctgtctggcaaggaggttaactaa

SEQ ID NO: 474045 - DNA, 1662 bp, Shigella flexneri
atgagtgtggaaaagctgatcgttgatcatatggaaacctggacctcggcgttgcaaacccgttccaccgccgggcgcggcagctccggtaagattgatttgtatggtattaagaaattgcgtgagctgattctggaactggcggtgcgcggtaaactggtgccgcaggatccgaatgatgaaccggcgtcggacctgctgaagcgtattgcggcggaaaaagcagagctggtgaagcaaggcaaaattaaaaagcaaaaaccactgccagaaattagtgaggaagagaagccgtttgaattgccggagggatgggagtgggtgcacctccctgatatttattgctcaatttctgagtcatctagaaaaataaaatcctccgaaatactacctgagggaaaatatcctgttatcgagcaaagtcaagaatttatttctggttattgcaacaatgaatgtctgttaataaagttaaataatccagttatagtttttggtgatcacacaaggaatattaaatttattgattttgattttgttgtcggcgctgacggtgtgaagattttatcacctatattaatttgtgagcgtttctttttttggcagttacgatcatttaaattagatgtaagaggatacgcgagacattttaaagtattaaatagctgcttatttgcattaccccccattgcagaacaagagcgaatagttgaaaaagttagctctttgatgtccctctgcgaccaactagaacagcaatccctgaccagtctggacgcacatcagcaactggttgaaaccctgttgggaacgcttacagacagccaaaacaccgcggaactggctgaaaactgggcgcgtattagcgagcatttcgacaccctatttaccaccgaagccagcgtggatgcgttaaaacagaccattctgcaactggccgtaatgggcaaacttgtgccgcaggatccgaatgacgaacccgcctctgaactgctcaaacgtattgcgcaggaaaaagctcaattggtgaaagaagggaaaataaaaaaacaaaaaccactgccgccaattagcgatgaggaaaaaccgtttgaacttccggaagggtgggaatggtgtcgtattggtaatatagttaatattaaatctgaattagtatcaccaaaagattatttaaatttatatcaagtagcacctgatattattgaaaagggcactgggagagtgatatcaaagagaacagtgaaagaatcaggagtcaaagggccaaatagtcgcttttataaaggacaaattgtttattctaaaatccgcccgtcattatccaaagtttttttagcagagtataatggtctttgcagtgctgatatgtatccattagactgttacattaatccaaattacttattgaaatatatcctttccattccatttcttatgcaagtcaaaaaagcagagaacagaataaaaatgccaaaacttaattctgacagtttttacaatattattgttgcgattcccccctataatgaacaacaagcaatatttgataagataaattctattgaagcagtatgcaatggtcttatttcttatattgggatttatcataaaacccaactgcatcttgcagacgcactcactgacgcagcgataaactaa

SEQ ID NO: 474046 - DNA, 342 bp, Shigella flexneri
atgactgacacgcattctattgcacaaccgttagaagcagaagtctccccggcaaataatcgtcaattaaccgtgagttatgcgagtcgttacccggattacagccgtattcccgccatcaccctgaaaggtcagtggctggaagccgccggttttgccaccggcacggcggtagatgtcaaagtgatggaaggctgtattgtcctcaccgcccaacccgccgccgccgaagagagcgaactgatgcagtcactacgcaaggtgtgtaagctgtcggcgcgtaaacaaaggcaggtacaggaatttattggggtaattacaggtaaacagaaagtcgcctga

SEQ ID NO: 474047 - DNA, 321 bp, Shigella flexneri
gtgttattcgatcatcttcgcgatgaagttatgcgcctggacgcagggatcacgcaggaagtattgaagctatatattgcgtttaaagcggaaacgaattttgttgatgttgtgccgcaaaaaagccgactgcgattgtcgcttaatatgcagtttcatgaactggtcgatccgaaaggtattgccaaagatgtgacaaatgttgggcgctggggtaatggcgatgtagaaattggtttcagcgacctcgcacaacttccttacattatgggattaattcgtcaggcatttgaaaaacagatggagagcgcgttggtataa

SEQ ID NO: 474048 - DNA, 279 bp, Shigella flexneri; identical to SEQ ID NO: 127146

SEQ ID NO: 474049 - DNA, 1215 bp, Shigella flexneri
atgaagatcgtaaaggctgaagtttttgttacctgtccggggcgtaatttcgtcacattaaaaatcaccactgaggacggtattacgggccttggggatgccaccctcaatggacgtgagctttccgtggcctcttatttgcaggatcatctttgtccgcggcttattggtcgcgatgcgcaccgtatcgaagatatctggcagtttttctataaaggtgcttactggcgtcgcggtccggttacgatgtcggccatttcagcggttgatatggcgctgtgggatattaaagccaaagctgccaacatgccgctttaccagttactcggcggcgcgtctcgtgaaggggtgatggtttattgccataccaccggtcacagtattgatgaagctctggatgattatgcccgtcatcaggagctgggattcaaagccatccgcgtgcagtgcggaatccctggtatgaaaaccacctacggcatgtcgaaaggtaaaggtctggcttatgaacccgcaaccaaaggacagtggccggaagagcagctgtggtcgacggagaaatacctcgatttcatgccgaaattgtttgacgcggtacgtaacaagtttggttttaatgaacatttgctgcatgacatgcaccatcgcttaacgcctattgaagcggcgcgctttggtaaaagcattgaagattatcgcatgttctggatggaagacccgacgccagcggaaaaccaagaatgcttccgtctcattcgccaacataccgtcacacccatcgcagtgggtgaagtcttcaacagcatctgggactgcaaacaactgattgaagagcaactcatcgattatatccgcaccacgctgacccatgcaggcggaattaccggtatgcgccggattgccgattttgcttcgctgtatcaggtacgtactggctcacacggtccttccgatttgtcaccagtctgcatggctgcggcgctgcactttgatctgtgggtccccaatttcggtgtccaggaatacatgggttattccgaacaaatgctcgaagtcttcccgcacaactggactttcgataacggctatatgcatccgggagacaaaccgggtcttggtatcgaattcgatgaaaagctggcggcgaaatatccctatgaacctgcttatctaccagtcgcacgtctggaagatggcacgctgtggaacaggtaa

SEQ ID NO: 474050 - DNA, 342 bp, Shigella flexneri
atgaaaatcactctcagcaaacgaatcggcctgctcgcttttctgctgccttgcgcactggcattgagcacaactgttcatgccgaaactaacaaactggtgattgagtctggcgacagtgcacaaagccgccagcacgccgctatggaaaaagagcaatggaatgacacgcgcaatctgcgccagaaagtgaataaacgcactgaaaaagagtgggataaagccgacgccgcttttgataaccgcgataaatgtgagcaaagcgccaacatcaatgcctactgggagcccaatactttgcgctgcctggaccgtcgaactggccgcgttattaccccctaa

SEQ ID NO: 474051 - DNA, 381 bp, Shigella flexneri
gtggtggaatgtgacggcgaaaaagccggtctggtggagctggtggaaattaaccatgttcatcgccgggcagaatttcagataattatctccccggagtatcaggggaaaggtctggcaacccgtgccgccaaattagcaatggactatggcttcaccgttctcaatctctataagctgtatctgatcgtcgataaagagaatgaaaaagcgattcacatttaccgcaagcttggctttacggttgaaggtgaattgatgcatgagttttttattaatggtcaatatcgtaatgccattcgcatgtgtatattccagcatcagtatctggcagagcacaaaacaccgggtcagactctcctgaagccgaccgcacaatag

SEQ ID NO: 474052 - DNA, 747 bp, Shigella flexneri
atgattgagaatcatctctactctctggtgactgttgtgaaatacaaattactaccatgcttactcgcgatattcctcacaggatgtgaccgcacagaggtaacactttcatttacccctgagatggccagtttctctaatgaattcgattttgatccgctgcgtggtccggtaaaagatttcactcagacattaatggatgagcaaggtgaagtgacgaaacgtgtttctgggactttgtcggaagaaggctgttttgattcactcgaattactggatctggaaaataataccgtggtcgctctggtactggacgccaattattaccgtgatgccgagacgctggagaagagagtacgtttacagggaaaatgccagctagcagaattaccttctgccggggtgagttgggaaaccgatgataatggcttcgtgattaaagccagcagcaaacaaatgcagatggaatatcgctatgatgatcaggggtatccgctgggtaaaaccacgaaaagtaacgacaaaacattatctgtcagcgccacgccatcaacggatccgatcaaaaaattagattacacagcggttactttactaaataatcaacgagttggtaatgtaaaacagagctgtgaatatgacagtcacgccaatccagtggactgtcagctgatcattgttgatgaaggagtaaaacccgccgtcgaacgggtttacaccatcaaaaatacgatcgattattattaa

SEQ ID NO: 474053 - DNA, 306 bp, Shigella flexneri
atgaaactctcaacctgctgtgccgcgcttctgctcgccctcgcctcacccgcggtactcgccgcgccgggatcttgtgagcgcatacagagcgatatatcacagcgcattatcaataatggcgtacccgaaagcagcttcacgttaagtattgtacccaatgaccaggttgatcagcctgattcccaggtcgtcgggcattgcgctaatgatacgcataaaattctctacaaccgcaccaccagcggtaacgtctctgctcccgcgcagtctacccaggatggcgcgcctgccgaaccgcagtaa

SEQ ID NO: 474054 - DNA, 1122 bp, Shigella flexneri
atgtccaaaaatgaccgaatggtgggcatcagccgcagaacactcgttaaatcaaccgcgataggttctctggcgctggctgcaggcggtttttctttaccgttcaccctgcgcagtgcagcggcagcggtacaacaggccagcgaaaaagtgatctggggttcctgttccgtcaactgtggtagccgctgtgcacttcgtctacatgttaaagataatgaagtgacctgggtggaaactgacaataccggcagcgatgagtacggcaaccatcaggtacgcgcctgtttgcgcggtcgctccatccgccggcgtattaatcatcccgatcgcttgaatgacccaatgaaacgcgtgggtaaacgcggtgaaggcaaattcgaacggattagctgggatgaagccctggatactatcgccagtagcctgaaaaaaaccgtcgaacaatatggcaatgaagctgtatatattcagtactcttcggggattgttggcggcaatatgacccgctcttcgccatcagcctcggcggtcaaacgcctgatgaactgctacggcggttcactcaatcagtatggctcctacagcaccgcgcaaatttcctgtgccatgccctacacctacggcagtaatgatggcaacagcaccacggatattgaaaacagcaagctggtcgtgatgtttggtaacaacccggcagaaacccgcatgagcggtggtggcatcacttatcttcttgaaaaagcgcgcgagaaatcgaacgccaaaatgattgttatcgatccgcgatataccgatacggctgccggtcgtgaagaggaatggctccctattcgcccgggcaccgatgccgcgctggttgcgggtattgcctgggtattgattaacgaaaatctcgttgatcaaccttttctcgataaatactgcgtcggctatgacgaaaaaaccttacccgcagatgcacccaaaaatggtcactataaagcctatattcttggtgaaggtgacgataaaacagcaaaaacgccgcagtgggcttcgcaaattaccggtatcccggtagaccgtatcatcaaactggcgcgtgaaattggcacaacaaaacccgcttatatctgctag

SEQ ID NO: 474055 - DNA, 156 bp, Shigella flexneri; identical to SEQ ID NO: 11296

SEQ ID NO: 474056 - DNA, 417 bp, Shigella flexneri; identical to SEQ ID NO: 10349

SEQ ID NO: 474057 - DNA, 594 bp, Shigella flexneri; identical to SEQ ID NO: 10350

SEQ ID NO: 474058 - DNA, 1206 bp, Shigella flexneri; identical to SEQ ID NO: 10351

SEQ ID NO: 474059 - DNA, 624 bp, Shigella flexneri; identical to SEQ ID NO: 10352

SEQ ID NO: 474060 - DNA, 624 bp, Shigella flexneri; identical to SEQ ID NO: 10353

SEQ ID NO: 474061 - DNA, 387 bp, Shigella flexneri; identical to SEQ ID NO: 10354

SEQ ID NO: 474062 - DNA, 321 bp, Shigella flexneri; identical to SEQ ID NO: 67344

SEQ ID NO: 474063 - DNA, 1206 bp, Shigella flexneri; identical to SEQ ID NO: 19666

SEQ ID NO: 474064 - DNA, 126 bp, Shigella flexneri; identical to SEQ ID NO: 19667

SEQ ID NO: 474065 - DNA, 708 bp, Shigella flexneri
atgacaagccgcagccgtcaggctgcctactcggggatcttcattaacgaaaccaccggcgaatttccgcaaaaagagcaggaactgtttgaaggtatcgtggcggtgatcgccgtggtgatccttacctggatggttttctggatgcgcaaagtgtcgcgcaacgtcaaagtgcaactggaacaggcagtcgatagcgcattgcagcgtggaaatcatcatggctgggcgctggtgatgatggtcttttttgccgttgcaagggaagggctggagtcggtctttttcctgctggcggcatttcaacaagatgtcgggatctggccgccgctgggtgcaatgctcggtcttgctactgccgtggtgctcggcttcctgctctactggggcggtattcgcctcaatcttggtgcattttttaaatggaccagcctgtttattctcttcgtcgccgcagggctggcggctggtgccattcgcgcatttcatgaagccggattgtggaaccactttcaggaaatcgccttcgatatgagcgcggtcctctcaactcactcgctgtttggcacgctgatggaagggatttttggctatcaggaagcaccgagcgtcagcgaagtcgccgtctggtttatttatctcatcccggcgctggtggcatttgctctgccaccacgcgcaggggcgacagcgtctcgctccgcgtaa

SEQ ID NO: 474066 - DNA, 1128 bp, Shigella flexneri
atgaccattaacttccgccgtaacgcattgcagttgagcgtggctgcgctgttttcttctgcttttatggctaacgccgctgatgtgccgcaggtcaaagtgaccgtgacggataagcagtgcgaaccgatgaccattacggttaacgccgggaaaacacagttcattattcagaaccatagccagaaggcgctggagtgggagatcctcaaaggcgtgatggtggtggaagagcgggaaaatatcgcccctggttttagccagaaaatgacggcgaatttacagcctggcgaatacgatatgacctgcggtctgctgactaacccgaaagggaagttgatcgtcaaaggtgaggcaacggcggatgcggcgcaaagtgatgcgctgttaagtcttggtggtgcaattactgcatataaagcgtatgtcatggcggaaaccacgcagctggtgaccgacaccaaagcctttaccgacgcgattaaagcaggcgatatcgaaaaagcgaaagcactgtatgcgccgacgcgccagcactatgagcgtattgaaccgattgctgaactgttctccgatctggatggcagcattgacgcccgtgaagatgattacgagcaaaaagccgccgacccaaaattcactggtttccaccgtctggaaaaagcattgtttggcgacaacaccaccaaagggatggatcagtacgctgagcagctttataccgatgtggtcgatttgcaaaaacgcatcagtgaactggctttcccaccttcaaaagtggtcggcggcgcagccggactgattgaggaagtggcagccagcaaaatcagcggtgaagaagatcgctacagccacaccgatctgtgggatttccaggctaacgttgaaggctcgcagaaaattgtcgatctgctgcgtccacaactgcaaaaagccaacccggaactgttggcaaaagtcgatgccaactttaaaaaggtcgataccattctggcgaaataccgtactaaagacggttttgaaacctacgacaaattgaccgatgccgaccggaatgcgctgaaagggccgattactgcgctggcggaagatctggcgcaacttcgcggtgtgctgggactggattaa

SEQ ID NO: 474067 - DNA, 1266 bp, Shigella flexneri
atgcagtataaagatgaaaacggcgtgaatgaaccgtcacgccgacgtttactgaaagggattggtgcgctggcgggaagttgtccggtcgctcatgcacaaaaaacgcaaagtgcaccgggcacgctttcaccggatgcacgcaatgagaaacagccgttttatggtgagcatcaggcagggatcctgacgccacaacaggccgcaatgatgctggtggcgtttgatgtgcttgccagcgataaagccgatcttgagcggttgtttcgcttgttgactcagcgttttgcttttctgagtcagggcggagcagcaccagaaacgccaaatccgcgcctgccaccactcgattccggcattcttggcggctacattgcgcccgataatctcaccatcacgttatcggtgggtcactcattgtttgatgagcgctttggccttgcgccacagatgccaaaaaagctgcagaagatgacgcgtttccccaacgactcgctggatgcggcgttatgtcatggtgatgtgttgctacagatttgcgccaacacccaggacacggtgaaccatgcgctgcgcgatatcatcaaacacacgccggatttgctcagtgtgcgctggaagcgggaagggtttatttccgatcacgcggcgcgtagtaaaggcaaagagacgccgattaatttgctgggtttcaaagacggcactgccaatcccgatagccagaatgataagttgatgcaaaaagtggtgtgggtaacggcagatcagcaggagcctgcgtggacaatcggtggcagctatcaggcagtacgcttgattcagtttcgagtggaattttgggacagaacgccgctgaaagaacagcagacgatttttggccgtgataagcaaaccggtgcgccgctgggaatgcagcatgagcatgatgtgcctgattacgccagcgacccggaagggaaggtgatcgcgctggacagccatatccggctggcgaatccccgcacggcggagagtgagtccagcctgatgctgcgtcgcggctacagttattcgttgggggtcaccaactccggacaactggatatggggttgctgtttgtctgctaccaacacgatctggaaaaaggcttcctgacagtacaaaaaaggctcaatggcgaagcgctggaggaatacgttaaacctatcggcggcggttattttttttcgctgccgggagtgaaggacgcgaacgattatctgggaagggcgctattgcaggtttga

SEQ ID NO: 474068 - DNA, 297 bp, Shigella flexneri
atggtaacgtcctgttctggacaatgttttgttaagcaacgctccaccactcgcggagatttctcctccggtagcaacttcgtcactctgtatttttctcacttcctttctttactcgtgttaccgacgccgcaaacggtgtgcgtagccgtttttcggcattttatccaaaagcaaactatggcttacaaggaagccaaccctctgatgttcgtgcgcataatcgcgctgccaacggcgcgtgtgatgaatacaaacaactcaaggtgctctccatgggaagacaaaaagcagtga

SEQ ID NO: 474069 - DNA, 789 bp, Shigella flexneri
atgggaagacaaaaagcagtgatcaaagctcgtcgcgaggcaaaacgtgtgctgagacgggattcgcgcagccataagcagcgtgaagaagaatcggtcacctcgcttgtgcagatgagcggcgtagaagccattggtatggcccgcgacagtcgcgatacctcgcccatccttgcgcgaaatgaagcgcaattgcactatctgcaggctattgagagtaagcagctgatattcgccacgggcgaagccgggtgcggaaaaacctggatcagcgcagcaaaagcggcagaggccctgatacataaggatgtcgacaggattatcgtcacccgtccagttctgcaagccgatgaagatcttggcttcttacctggtgatatcgcagaaaagtttgctccctattttcgcccggtctacgacttgctggtccggcgcttaggggcttcctttatgcagtactgcctgcgaccggaaatagggaaggtggaaaccgcgccgttcgcctatatgcgtggacgtacctttgaaaatgcagttgtcattcttgacgaggcgcagaatgtgactgccgcgcaaatgaaaatgtttttaacccgcctcggggagaacgtgacggttatcgtcaacggtgatatcacgcaatgcgatttgcctcgcggcgtgtgctccggattaagtgacgcgctggaacgtttcgaagaagatgaaatggttgggatcgtccggttcggaaaagaggattgcgtacgttcggcactttgccaacgtacgctgcatgcatacagttaa

SEQ ID NO: 474070 - DNA, 414 bp, Shigella flexneri
atgaacaatttaattattacgacccgacaatcaccagtacgtttactggttgattatgttgccacaaccatcttgtggacattatttgctttgttcatattcttattcgccatggatctgctgacgggttattactggcaaagcgaggccagaagccgacttcagttctattttttgctggcagtggcgaatgccgtcgtgttaattgtctgggcgctgtacaataagctgcgttttcaaaaacagcagcatcatgcagcctaccaatatacgccgcaagaatatgcagagagcttagcaatacctgatgagctctatcagcaactacaaaaaagccacaggatgagcgtacacttcaccagccaggggcaaataaaaatggttgtttcagaaaaagcgctagtccgggcataa

SEQ ID NO: 474071 - DNA, 483 bp, Shigella flexneri
atgcctgaaacgttaaaagggctgtggaaacagcgcctgcgctgggctcagggcggtgcagaagtattcctcaaaaatatgacaaggttgtggcgcaaagaaaactttcgaatgtggccgctgttttttgaatactgcctgacgacaatatgggccttcacctgcctggtcggtttcattatttacgcagtccaacttgccggtgtaccgttaaatattgaattgacacatatcgctgcgacacatactgccggaatattattgtgtacgttatgtttactgcaatttattgtcagcctgatgatcgagaatcgctatgagcataatctgacttcatcgcttttctggattatttggttcccggttattttctggatgctgagcctggcaacgacattggtatcatttacacgagtcatgttgatgcctaaaaagcaacgcgcccgttgggtaagtcctgatcgcgggattctgagaggttaa

SEQ ID NO: 474072 - DNA, 852 bp, Shigella flexneri
atgattaatcgcatcgtatcgttttttatattatgtctggtgttatgcatacccctatgcgtagcgtactttcactctggtgaactgatgatgaggttcgttttcttctggccgttttttatgtccattatgtggattgttggcggcgtctatttctgggtctatcgtgaacgccactggccgtggggagaaaacgcaccagctccccagttgaaagataatccgtctatctccattatcattccctgttttaatgaggagaaaaacgttgaggaaaccatacacgccgctttagcacagcgttatgagaacattgaagttattgccgtaaatgacggttcaacagataaaacccgtgccatcctggatcgcatggctgcacaaattccccatttgcgggtcattcatctggcgcaaaaacaggggaaagccattgcgcttaaaaccggagctgccgcggcgaaaagtgaatatctggtgtgcattgatggcgatgcgttattagaccgcgatgcggcggcatatattgtggaaccgatgttgtacaacccgcgtgtgggtgccgtaaccggtaatcctcgtattcgaacacgttctaccctggtgggtaaaattcaggttggcgagtattcctcaattattggtttgatcaagcgaacccagcgtatctatggaaacgtatttaccgtttccggtgttattgccgcatttcgtcgcagcgccctggcagaagtgggttactggagtgacgatatgatcaccgaagatattgatattagctggaagctgcagttgaatcagtggacgatttttttacgagccacaggcgctgtgctggatattaatgcctga

SEQ ID NO: 474073 - DNA, 465 bp, Shigella flexneri
atgatgatgggtgaagtacagtcattaccgtctgctgggttacatcctgcgttacaggacgcgttaacgctggccttagctgccagaccgcaagaaaaagcgccgggtcgttacgaattacagggcgacaatatttttatgaatgtcatgacgtttaacactcaatcgcccgtcgagaaaaaagcggaattgcacgagcaatacattgatatccagctgttattaaacggtgaggaacggattctgtttggcatggcaggcactgcgcgccaatgtgaagagttccaccatgaagatgattaccagctttgtagcgccattgaaaacgagcaaaccatcatcctgaaaccgggaatgttcgccgtgtttatgccaggagagccgcataagccgggatgcgttgttggcgagccgggtgagattaaaaaggtggtggtgaaggttaaggctgatttaatggcttaa

SEQ ID NO: 474074 - DNA, 876 bp, Shigella flexneri
atgaccatactggcgattgatatcggcggtactaaacttgccgccgcgctgattggcgctgacgggcagatccgcgatcgtcgtgaacttcctacgccagccagccagacaccagaagccttgcgtgatgccttatccgcattagtctctccgttgcaagctcatgcgcagcgggttgccatcgcttcaaccggaattattcgcgacggcagtttgctggcgctgaatccgcataatctcggtggattgctacactttccgttagtcaaaacgctggaacaacttaccaatttgccgaccattgccattaacgacgcgcaggccgcagcatgggcagagtatcaggcgctggaaggcgatataaccgatatggtctttatcaccgtttccactggcgtcggcggcggtgtagtgagcggcggcaaactgcttaccggccctggcggtctggcggggcacatcgggcatacgcttgccgatccacacggcccagtctgcggctgtggacgcacaggttgcgtggaagcaattgcttctggtcgcggcattgcggcggcagcgcagggcgagctggctggcgcggatgcgagaactattttcacacgcgccgggcagggcgatgagcaggcgcagcaactgattcatcgctccgcacgtacgcttgcaaggctgatcgctgatattaaagccacaactgattgccagtgcgtggtggttggtggcagcgttggtctggcagaagggtatctggcgttggtggaaatgtatctggcgcaggagccagcggcatttcatgttgatttactggcggcgcattaccgccatgatgcaggtttacttggggctgcgctgttggcccagggagaaaaattatga

SEQ ID NO: 474075 - DNA, 690 bp, Shigella flexneri
atgtcgttacttgcacaactggatcaaaaaatcgctgctaacggtggcctgattgtctcctgccagccggttcctgacagcccgctcgataaacccgaaatcgtcgcagccatggcattagcggcagagcaggcgggcgcggttgccattcgcatcgaaggtgtggcaaatctgcaagccacgcgtgcggtggtgagcgtgccgattattggaattgtgaaacgcgatctggaggattctccggtacgcatcacggcctatattgaagatgtcgatgcgctggcgcaggcgggcgcggacattatcgccattgacggcaccgaccgcccgcgtccggtgcctgttgaaacgctgctggcacgtatccatcatcacggtttactggcgatgaccgactgctcaacgccggaagacggcctggcatgccaaaagctgggagccgaaattattggcactacgctttctggctataccacgcctgaaacgccagaagagccggatctggcgctggtgaaaacgttgagcgaagccggatgtcgggtgattgccgaagggcgttacaacacgcctgctcaggcggcagatgcgatgcgccacggcgcgtgggcggtgacggtcggttctgccattacgcgtcttgaacacatttgtcagtggtacaacacagcgatgaaaaaggcggtgctatga

SEQ ID NO: 474076 - DNA, 1491 bp, Shigella flexneri
atgagtactacaacccagaatatcccgtggtatcgccatctcaaccgtgcacaatggcgcgcattttccgctgcctggttgggatatctgcttgacggttttgatttcgttttaatcgccctggtactcaccgaagtacagggtgaattcgggctgacgacggtgcaggcggcaagtctgatctccgcagcctttatctctcgctggttcggcggcctgatgctcggcgctatgggtgaccgctacgggcgtcgtctggcaatggtcaccagcatcgttctcttctcggccgggacgctggcctgcggctttgcgccaggctacatcaccatgtttatcgctcgtctggtcatcggcatggggatggcgggtgaatacggttccagcgccacctatgtcattgaaagctggccaaaacatctgcgtaacaaagccagtggttttttgatttcaggcttctctgtgggggccgtcgttgccgctcaggtctatagcctggtggttccggtctggggttggcgtgcgctgttctttatcggcattttgccaatcatctttgctctctggctgcgtaaaaacatcccggaagcggaagactggaaagagaaacacgcaggtaaagcaccagtacgcacaatggtggatattctctaccgtggtgaacatcgcattgccaatatcgtaatgacactggcggcggctactgcgctgtggttctgcttcgccggtaacctgcaaaatgctgcaatcgtcgctgttctcgggctgttatgcgccgcaatctttatcagctttatggtgcaaagtacgggtaaacgctggccaacgggcgtaatgctgatggtggtcgtgttgtttgctttcctctactcatggccgattcaggcgctgctgccaacgtatctgaaaaccgatctggcttataacccgcatactgtcgccaatgtgctgttctttagtggctttggcgcggccgtgggatgctgcgtaggtggcttcctcggtgactggctgggaacccgcaaagcgtacgtttgtagcctgctggcctcgcagctgctgattattccggtatttgcgattggcggcgcaaacgtctgggtgctcggtctgttactgttcttccagcaaatgcttggacaagggatcgccgggatcttaccgaaactgattggcggttatttcgataccgaccagcgtgcagcgggcctgggctttacctacaacgttggcgcattgggtggcgcactggccccaatcatcggcgcgttgatcgctcaacgtctggatctgggtactgcgctggcatcgctctcgttcagcctgacatttgtggtgatcctgctgattggtctggatatgccttcccgcgttcagcgttggctgcgcccggaagcattgcgtactcatgacgctatcgacggcaaaccatttagcggtgccgtgccatttggcagcgccaaaaacgatttagtcaaaaccaaaagttaa

SEQ ID NO: 474077 - DNA, 894 bp, Shigella flexneri
atggcaacgaatttacgtggcgtaatggctgcactcctgactccttttgatcaacaacaagcactggataaagcgagtctgcgccgcctggttcagttcaatattcagcagggcatcgacggtttatacgtgggtggttcgaccggcgaagcctttgtacaaagcctttccgagcgtgaacaggtactggaaatcgtcgccgaagaggcgaaaggtaagattaaactcatcgcccacgtcggttgcgtcagcaccgccgaaagccaacaacttgcggcatcggctaaacgttatggcttcgatgccgtctccgccgtcacgccgttctactatcctttcagctttgaagaacactgcgatcactatcgggcaattattgattcagcggatggtttgccgatggtggtgtacaacattccagccctgagtggggtaaaactgaccctggatcagatcaacaccctggttacgttgcctggcgtcggtgcgctgaaacagacttctggcgatctctatcagatggaacagatccgtcgtgaacatcctgatctggtgctctataacggttacgacgaaatcttcgcttccggcttgctggcaggcgctgatggtggtatcggcagtacttacaacatcatgggctggcgatatcaggggatcgtgaaggcgctgaaagaaggcgatatccagaccgcgcagaaactgcaaactgagtgcaacaaagtcattgatttactgatcaaaacgggcgtattccgcggcctgaaaactgtcctgcattatatggatgtcgtttctgtgccgctgtgccgcaaaccgtttggaccggtagatgaaaaatatctgccagaactgaaggcgctggcccagcagttgatgcaagagcgcgggtga

SEQ ID NO: 474078 - DNA, 792 bp, Shigella flexneri
atgggccttatgaacgcatttgattcgcaaaccgaagattcttcacctgcaattggtcgcaacttgcgtagccgcccgctggcgcgtaaaaaactctccgaaatggtggaagaagagctggaacagatgatccgccgtcgtgaatttggcgaaggtgaacaattaccgtctgaacgcgaactgatggcgttctttaacgtcgggcgtccttctgtgcgtgaagcgctggcagcgttaaaacgcaaaggtctggtgcaaataaacaacggcgaacgcgctcgtgtctctcgaccttctgcggacactatcatcggcgagctttccggcatggcgaaagatttcctttctcatcctggtgggattgcccatttcgaacaattacgtctgttctttgaatccagcctggtgcgctatgcggctgaacacgccaccgatgagcaaatcgatttgctggcaaaagcactggaaatcaacagtcagtcgctggataacaacgcggcattcattcgttcagacgttgatttccaccgcgtgctggcggagatccccggtaacccaatcttcatggcgatccacgttgccctgctcgactggcttattgccgcacgcccaacggttaccgatcaggcactgcacgaacataacaacgttagttatcaacagcatattgcgatcgttgatgcgatccgccgtcatgatcctgacgaagccgatcgtgcgttgcaatcgcatctcaacagcgtctctgctacctggcacgctttcggtcagaccaccaacaaaaagaaataa

SEQ ID NO: 474079 - DNA, 2094 bp, Shigella flexneri
gtgcatcgtggcgatttagtggtagaaggtaatatagagagtaatcaaaaattgattgttcttggcaatttgacagtcaaaggtaatatttccactttctctctttctaatccatgggttattctcggtaacgtgacggcaacgaatatagttacggattcaccactgttaattaccggttcgataaatgcaagtggactggtatttatcgactcatattacgataatccgtctacgattaaggggagtattaatgcgcgtggggtatttatcaatgacataattgcacctgttgttgcgtcttcgacaaatagtgaattcatggtccgtgcgagtgacaaaaatgacactgaaaatgtcaaaaaagcgctgatgataataaatcctgatgcatattattggggtctaataaatgatgaagatgctctgaaagaaatttttaagcgaagcaatattcgcatggcagggaatgtctgtaatcagatgaaaaaagaagcgctgtttcgccctaagccttctcctgagttagtgcaggaattgcaaatgctggatgaaggcaacgttgctgcatttgaaggacgagatattgcgacatttgatcttgccataatgcgaactctcccaaggcttaaaggaatttcagctaacctacgcaaacaacttattaatagcaatgatgaacaaacgattgaaagtatggcgagatatatgcctgacaatgagattctggagttgaccgatcagcaattgggttaccagcctgttgttctggggttgctcgaccgtgaaccgctctctgtcgaaataatgacgcgaatgagtcgtctacctgatggtgtcggtccgttgaatcttgcgctacgtgaaaatctccctctggatatcgtcatgactctggcgaaaagagattgggatatgatcattcaggagctttataaagatgcgtggttattgcccgaatccattattgatggctatatccgcagtgatgattcctctattcgtcaggtcggtgctggaggacaactcacttacaatcaggcaatgcagttggcgaacgattcatcaaacaatgttgtcacaagcttagcgttcaagctggcagagatgaaacaccatggtcaattattgcggatgacgccacaagagagtgacaaagttgcagcctatttataccaaaaattcgagaatgacgatgatctaatacgtgtgttatttttagcattgccagataacttacagtttaattttgttaaaaggatggagaaaaaatcccctgcctacttttgctgtcgggatatgcaggtaattcactctgacgctgctttacaacggttattgacacgtttcaacgatcctgaggggtggagtaatctggcgaaaaatcagtatctgagcacgtcgatgaaacaaaaaatttggcaacgtgctttatcgcatcggaaaaataatccgaaagcagattcagatgcatatgaaaccagcgctgatatgattttgtctgagctgattagccacggcgaagttgatgaccagatgctattaaatgccgccgccctgatacgtttggaagactgggactttttagagagtgcattagttagttgggataatttacccgctgttgttctcaaggaattacagcaaaacacgccacgcaatgatatttgggcgaagttttttctgaggcaggaaaatagctcccgtgcgcaggttgatgaagcattacgtgtttattatgcactcgaccccgatgcgttagcacaactggatgtactggcaaaacaaccggatcgtatatggtggagtacactggcgaaaagcaatctcacatttttcaagttcggcgcacttagcaaccgccacaccccctctgcggcactggcggcagaaattgatcccgagtggtggattgtggcgatgaataatccccgctttccagttgatgtattgaaggcgaggctgaaacgtgatcctttgctggcgttagagcttgttaaccctgaactggatttagtccgccagctggcgcttaacggtaagacgcgcgcaatacgggaacaagcgatgaggaaacttgatgagttgtattga

SEQ ID NO: 474080 - DNA, 606 bp, Shigella flexneri
atgacgctctaccagataaaaccgctctttcagtcgctgttaaggccgacgatgttttggctttataagcaccacgttacagcgaatcacatcactcttacggcactggcgctttctctttttaccggattgctgttggtgttggtggcacaacccatcctctttttgctattgcccatcgtgctttttatccgtatggcgctcaatgcgctggatggcatgttggcgcgtgagtgcaatcagcaaacacgtctgggggcgattttgaatgagactggcgatgttatttccgatattgcgctctatttaccgtttttatttttaccggaaagtaacgcatcactcgtgatactcatgttattttgcaccatattgaccgagttttgcggtttactcgcgcagacgattaacggtgttcgcagttatgccggtccatttggcaaaagtgatcgcgcgttaatatttggtctgtggggtctggccgttgccatttatccacagtggatgcaatggaataatcttttatggagcattgcttcaattctgcttatctgtactgcgattaatcgttgtcggagtgtgcttcttatgagcgctgaaagataa

SEQ ID NO: 474081 - DNA, 723 bp, Shigella flexneri
atgacgttgacgttttttacgctgataagttttctggcattgaaagaatattgtacgcttatatccgtacatttttcgcgttggttatattgggttattcctcttaactatttgcttatcggttttaattgctttgagctgtttctgttatttatacctttgactgggtttctgatattagccacctggcgagtttttgtgggtgacccctccggttttcagcataccgtgagcgccattttttggggatggataatgaccgtttttgccttgagtcatgccgcctggctattaatgttgccaaccataaatatccagggcggggcgttactggtgttatttcttttggcgttaaccgagtcaaacgatattgcacagtatttatgggggaaatcctgcggcagaagaaaagtggtccccaaagtcagcccgggaaaaacgctggaaggtctgctggggggcgtaatcaccaccatgattgcgtcactgattattggaccgttgctgacaccgctaaatacattacaggcattattagcgggtttgttaattggtattagtggtttttgcggcgatgtagtgatgtcagccatcaaacgagatattggtgttaaagatagtggaaaactattactaggacatggcggactccttgacaggattgactcattaattttcaccgctccggtatttttttattttattcgctactgctgttactga

SEQ ID NO: 474082 - DNA, 1758 bp, Shigella flexneri
atggaaaattcacgcatccctggggaacatttttttaccaccagtgataatacagcgttgtattatcggcactggcccactttacagccaggggcgaaaaaggtcatcgtcttatttcatcgcgggcatgaacattctggtcgtctacaacatctcgttgatgaactggcgatgcctgatactgctttttatgcctgggatgcccgggggcatggaaaaaattcggggccgcgtggttatagcccgtctcttatgcgctcagtgcaggatgtcgatgaatttgtccgttttgctgtcagcgacagccaggtcggactggaagaggtggtagtgatcgcgcaaagtgtcggcgcagtgcttgttgccacatgggttcatgattatgcacctgcaattcgtgggctggtgctggcttctccggcctttaaggttaaattgtatgtgccgctggcacgtcctgcgctggcgttatggcatcgtctgcgtggtctattttttattaattcctatgtgaaagggcgctatttgacccacgatcggcaacgggtggcgagtttcaataatgatccgctgatcacacgggcgattgccgtcaatatcttgctcgatctctataaaacgtctgaacgtattgttagcgatgcggcggcgattacgctccccacgcaacttctgatatcaggtgatgactatgtggtgcatcgccaaccgcagattgatttttatcagagattacgtagccctctgaaagagctgcatctgctgccaggcttttatcacgacacattgggtgaagagaacagggcgcaggcatttgaaaaaatgcaaagctttatctgccgcttatatgctaacaaatcgcaaaaatttgattatcagcatgaagaccgcacaggaccatcagcggatcgatggcggctcctttctggtggacccgtgccattatcgccggttgatttagcgtatcgctttatgcgaaaggcgatgaaattgttcggtgcgcactctgcgggcctgcatctcggaatgagtaccggctttgattcaggcagttctctggattatgtctatcaaaatcaaccgcaaggcagtaacgcattcgggcgtttaatcgacaaaatctacctgaacagtgttggatggcgcggtattcgccagcgcaaaacccatttgcaaatattgattaaacaagccgttgccgatctccacgccaaaggtttagccgtccgcgtggttgacattgccgcagggcatggacgctatgtactggatgcgctggcaaacgagcctgccgtaagcgatattttgttacgtgattacagtgagttaaatgttgcacaggggcaagagatgattgcccaacggggaatgtctgggcgggtgcgttttgaacagggcgatgcgtttaacccggaggaactcagcgcgttaactccgcggcctacgctggcgattgtctctggcctatatgagctttttcccgaaaatgagcaggtaaaaaactcactcgcaggtctagccaatgccatcgaaccgggtggcattctcatctacaccgggcagccgtggcacccacaactggagctgattgccggggtgttaaccagtcataaagatggtaaaccgtgggtaatgcgcgtgcgttcgcaaggggagatggattcgctcgtgcgtaatgccggatttgataaatgcactcaacggattgatgtgtggggcatttttacggtttcgatggcggtgcgtcgtgataactga

SEQ ID NO: 474083 - DNA, 672 bp, Shigella flexneri
gtgataactgaacgtcggaacgtattgctacaaggcgctggctggttattgttgctggccccgtttttcttcttcacctatggatctcttaatcagttcaccgcggttcaggaccttaacagccatgatatccccagtcaggtattcggttgggaaacggcgatcccttttcttccctggactattgttccttactggagtctggatcttttatatggattttcgctgttcgtttgtagctcgacattcgaacaacgccgacttgtccaccggcttattctggcaacggtaatggcctgctgcggtttttttctctacccgctgaagtttagttttatccgtcctgaagtgagtggggtgacaggatggctattttcgcaacttgaactgtttgatctgccttataaccagtctccttcgctgcatattattctctgctggctactttggcgtcactttcgtcagcatctggctgtgaggtggcgtaaagtctgtggcggatggtttttactcatcgccatttcgacgctgacgacatggcagcatcattttattgatgtcatcacagggctggcggtaggtatgttgattgactggatggtgcccgtcgaccgtcgttggaattatcagaaacttgatcaacgtcgaatcaaaatagcactgccatattga

SEQ ID NO: 474084 - DNA, 825 bp, Shigella flexneri
atgcaatcattacatgggaattgtctaattgcgtacgcaagacataaatatattctcaccatggttaatggtgaatatcgctattttaatggcggtgacctggtttttgcggatgcaagccaaattcgagtagataagtgtgttgaaaattttgtattagtatcaagggatacgctttcattatttctgccgatgctcaaggaggaggcattaaatcttcatgcacataaaaaaatttcttcattactcgttcatcactgtagcagagatattcctgtttttcaggaagttgcgcaactatcgcagaataagaatcttcgctatgcagaaatgctacgtaaaagagcattaatctttgcgttgttatctgtttttcttgaggatgagcactttataccgctgcttttgaacgttttgcaaccgaacatgcgaacacgagtttgtacggttatcaataataatatcgcccatgagtggacactagcccgaatcgccagcgagctgttgatgagtccaagcctgttaaagaaaaaattgcgcgaagaagagacatcatattcacagttgcttactgagtgtagaatgcaacgtgctttgcaacttattgttatacatggcttttcaattaagcgagtcgcagtgtcctgtggatatcacagcgtgtcgtatttcatttacgtctttcgaaattattatgggatgacgcccacagagtatcaggagcgatcggcgcagggattgccgaaccgtgactcggcggcaagtattgttgcgcaagggaatttttacggcactaaccgttctgcggaaggaataagattatag

SEQ ID NO: 474085 - DNA, 729 bp, Shigella flexneri
atgactcatgtctgctcggtgatcctcattcgtcgttcattcgatatttatcatgaacagcaaaaaatatcgctgcataacgagagtatcctgctgctggagaaaaatttggcagacgattttgcgttttgttcaccggatacgcgacgactggatatcgatgagctgacagtttgccattacttacaaaatattcgtcagctaccacgcaatttagggttacatagcaaagaccgtctgttaattaaccagtcaccccccatgccgctggtgacggcgatttttgatagcttcaatgaatccggggtaaattcaccgatactgagcaatatgctctacctttcctgtttatcgatgttttctcataagaaagaactgatccccttacttttcaatagcatcagcactgtttcaggaaaagttgaacgccttattagctttgatatcgccaaacgttggtatctgcgcgatatcgcggaaagaatgtataccagcgagagtctcatcaaaaaaaagttgcaggatgaaaatacctgtttcagtaaaatattactcgcttccaggatgtcgatggccagacgattactcgagttacgtcaaattcctctgcatactattgcggaaaaatgtggctatagcagtacgtcgtactttataaacacatttcgacaatattatggtgtaacgccacatcagtttgcgcaacattcgccaggtaccttttcctga

SEQ ID NO: 474086 - DNA, 282 bp, Shigella flexneri
atgtttgggattattaagctgacaattcatacgattacgggaatgtgggtcagtattgtgttgttcaaattgatgacgaatggctggagtggtttctactttcagtgctgtgtactaagcctggtattcctgacggttagctggttgttgagtggtgaatggttagcaggaaagagtaaggctgaaccttcacgttcaaccttactctcatttacacgttacgcttttttaaagcgggcaaagagatgttccactacaacgaaaaagaccggaacgaagtaa

SEQ ID NO: 474087 - DNA, 945 bp, Shigella flexneri
atgttcaaagtgaacgtcaacgccgcgaaagctgaggcaatgggtgtggcgctgtctgatatcaaccagacaatttccaccgccttcggcagcagctacgtgaacgacttcctcaaccaggggcgggtgaaaaaagtgtatgtccaggcaggcacgccgttccgtatgttgccggataacatcaaccaatggtatgtacgcaacgcctctggcacgatggcaccgctttctgcctactcgtctaccgaatggacctatggttcaccgcgattggaacgctacaacggcatcccgtcaatggagattttaggtgaagcggcggccgggaaaagtaccggtgacgctatgaaatttatggcagacctggtcgctaaacttccggcaggcgtcggctactcatggaccggactgtcgtatcaggaagcgttatcctcaaaccaggctcctgcactgtatgccatttcactggtcgtggtgttcctcgccctcgccgcactctatgagagctggtcaattccgttctcggtgatgttggttgttccgttaggcgtcgttggcgcattactggccaccgatctgcgcggcttaagtaatgacgtctacttccaggttggtttgctgaccaccatcgggctttccgccaagaacgccatcctgattgtcgaatttgccgttgagatgatgcagaaagaagggaaaacgccgatagaggcaatcatcgaagcggcgcggatgcgtttacgcccaatcctgatgacctctctggcctttattctcggcgtgctgccgctggttatcagtcatggtgccggttctggcgcgcaaaacgcggtaggtaccggcgtgatgggcgggatgtttgccgcaacagtgctggcaatttacttcgttccggtctttttcgttgtagtggaacatctctttgcccgctttaaaaaagcgtaa

SEQ ID NO: 474088 - DNA, 2085 bp, Shigella flexneri
atggctaactattttattgatcgcccggtttttgcctgggtacttgccattattatgatgcttgcaggtggtctggcgatcatgaacttaccggttgcgcagtatccgcagattgcgccaccgaccattaccgtcagcgctacctatccgggtgccgatgcgcaaacggtagaagactcggtcactcaggtgattgagcaaaatatgaatgggcttgatggcctgatgtacatgtcttcaaccagtgatgcggcgggtaatgcctctatcactctgaccttcgagactgggacatctcctgatatcgcacaggttcaggtgcaaaataaactgcaactcgctatgccttcattacctgaagcggtgcagcaacaggggattagcgtcgataagtcgagcagtaatatcctgatggtagcggcgtttatttctgataacggcagcctcaaccagtacgatatcgcggactatgtagcgtctaatatcaaagacccgctaagccgtaccgcgggcgttggtagcgtacagctctttggttccgagtacgccatgcgtatctggctggacccgcaaaaactcaataaatataacctggtaccttccgatgttatttctcagattaaggtgcaaaacaaccagatttctggtggtcaactgggtggcatgccacaggcggcagaccagcaactaaacgcctcgatcattgtgcagacgcgtctgcaaacgccggaagaatttggcaaaatcctgttgaaagttcagcaagatggttcgcaagtgctgctgcgtgatgtcgcccgcgtcgaacttggggcggaagattattccaccgtggcgcgctataacggcaaacctgctgccgggatcgccatcaaactggctgccggagcaaacgccctggatacctcgcgggcagtcaaagaggagctgaaccgcttatcagcctatttccccgcaagtctgaagacggtttatccttacgacaccacgccgtttatcgaaatttctattcaggaagttttcaaaacactggttgaggctatcatcctcgtcttcctggtcatttatctgtttttgcagaatttccgtgccaccatcatcccgacaattgccgtaccggtggttattctcgggacgtttgcgatcttgtcggcggtcggtttcaccatcaacacgttgactatgttcgggatggtgctggcgatagggttactggtggatgacgccatcgtggtggtggagaacgtcgagcgtgtcattgcggaagataagctaccgccgaaggaagcgacgcataaatcgatggggcagatccaacgtgcgctggtcgggattgccgttgttctttctgcagtgtttatgccgatggcctttatgagcggtgcaaccggggagatctaccgccagttctccatcacgctgatctcctccatgcggctttcagtatttgtggcaatgagcctgacccctgccctgtgcgccaccattctgaaagccacgccggaaggcggtcacaaacctaacgccctgttcgcacgcttcaacacgctgtttgaaaaatcaactcagcactataccgatagcacccgctcgctgttgcgttgtaccggtcgctacatggtggtctacctgctgatttgcgccgggatggcggtgctgttcctgcgtacaccgacctctttcttaccagaagaggatcagggggtatttatgaccaccgcgcagttaccttccggtgccaccatggttaacaccacgaaagtactgcaacaggtgacggattattatcttacaaaagagaaagataatgttcagtcggtgtttaccgttggcggctttggcttcagcggccaggggcaaaacaacggcctggcgtttatcagtctcaagccgtggtctgaacgtgtcggtgaggaaaactcggttaccgcgatcattcagcgggcaatgattgcgttaagcagtatcaataaagccgtcgtcttcccgttcaacttacccgcggtggctgaactgggtaccgcgtcaggttttgatatggaactgctggacaacggtaacctggggcacgaaaaactaacctag

SEQ ID NO: 474089 - DNA, 297 bp, Shigella flexneri
atgattttcaaaaatatcttgaataattttgcgcgctttatattactggtgccgcaggaaggcgtcacccacaacgcccagggtaaagcaacggcgctcattctggataaagacgatgtcgtgcagctacgcgaaattgaagccagcaaagccatcggcgaccagtgggttgtcacctctggcttgcaggctggcgatcgggtgatcgtttccggtttgcaacgcattcgtccgggtatcaaagcacgagcaatttcctccagccaggaaaacgccagcaccgaatcgaaacaataa

SEQ ID NO: 474090 - DNA, 306 bp, Shigella flexneri; identical to SEQ ID NO: 460748

SEQ ID NO: 474091 - DNA, 348 bp, Shigella flexneri
atgatatctttccctgcaggttcgcgtatctggctggttgcaggtatcaccgatatgcgaaatggctttaacggcctggcctcaaaagttcagaacgtcctgaaggatgacccgttctccgggcatctgttcatcttccgcggacgccggggtgaccagataaaagtgttgtgggctgacagtgacggactgtgcctctttaccagacgcctggagcggggccgcttcgtctggccggtcacccgtgacggcaaggtgcaccttactccggcccagttatccatgcttcttgagggcatcgactggaaacacccgaaacgaacggaacgcgctggcatccgcatataa

SEQ ID NO: 474092 - DNA, 1308 bp, Shigella flexneri
atggacacctcacttgctcatgagaatgcccgcctgcgggcactgttgcagacgcaacaggacaccatccgccagatggcgaaatacaaccgcctgctctcacagcgggtggcggcttatgcttccgaaatcaaccggctgaaggtgctggttgcgaaactgcagcgcatgcagttcggtaaaagctcagaaaaacttcgcgcaaaaaccgaacggcagatactggaagcacaggagcgaatcagcgcacttcaggaagaaatggcggaaacgctgggtgagcaatatgacccggtactgccatctcccctgcgccagtcttcagcccgtaaaccgttacctgcctcacttccccgtgaaacccgggtcatccgtccggaagaggaatgctgcccggcctgtggtggcgaactcagttctctgggatgtgatgtgtcagagcagctggagcttatcagcagcgcctttaaggttatcgaaacacaacgtccgaaactggcctgttgccggtgtgaccatatcgtgcaggcaccggtgccttcaaaacccattgcacgcagttatgccggagcggggcttctggcccatgttgttgctggaaaatatgcagactatctgccgttataccgccagtcagaaatataccgtcgtcagggcgtggagctgagccgtgccacactggggcgctggacaggtgctgttgctgaactgctggaaccgctgtatgacatcctgcgccagtatgtgctgatgcccggtaaagtccatgccgatgatatccccgttccggtccaggagccgggcagcggtaaaacaaggactgcccggctgtgggtctacgttcgtgatgaccgtaacgccggttcggaaatgcctccggcggtctggttcgcgtactcaccggaccggaaaggtatccatccacagaatcatctggccggttacagcggagtgcttcaggccgatgcttacggtggttaccgggcgttgtacgaatccggcagaataacggaagccgcatgtatggctcatgtccggagaaaaatccacgatgtgcatgcaagagtgccaaccgacatcaccacggaagccctgcagcgtatcggtgaactgtatgccatcgaggcagaagtccggggatgttcagcagaacagcgtctggcggcaagaaaagccagagccgcgccactgatgcagtcactgtatgactggatacagcaacagatgaaaattcattcgctgaaaatggaatgtctccacggagaacactattatccatcgggaaatagtgcgggcaacagtgtttag

SEQ ID NO: 474093 - DNA, 135 bp, Shigella flexneri; identical to SEQ ID NO: 460745

SEQ ID NO: 474094 - DNA, 678 bp, Shigella flexneri
atgtcaataaataactatggattacatccagcaaacaacaaaaatatgcacctaataataggcagcaatactgctaatgaaaataaaggaatgaaaaataatatcattaacgtgacaaataccgctatatcccacgccatcaatgaagaaaaatcaggggggggatatagtggtgtttctttcagaaaattggccaaaatacagaacatatccattccgacaaagaataataaggagtataaccgccataatttgttttcattgatttggcatggaaatgccgatgcagcgcgtaaatacggtgaatcgctgttggcagccgaaatacccaaagaggaaaaactagaagttcttgcagcacgaaataatgctggggaatctgctttgttcatagctcttcaagaaggtcattccgctgcgattcaagcttatggagattttattaaaacttttgatttatcaccaaaagaaacgattaaactattggatgtaagagataatgaggggttaccaggattatttctggccgcagggaaagggaatatcgaggctatgatggcatatataaatatatgccatcatagtgggataaaacttacagaaatagcagacagacttaacaataatgaacaagacatgtttaatattatttctgacaaaatacaagagttgttttaa

SEQ ID NO: 474095 - DNA, 231 bp, Shigella flexneri; identical to SEQ ID NO: 460743

SEQ ID NO: 474096 - DNA, 225 bp, Shigella flexneri
atgcccggagccactgttgctgatgaattcgataaaaccttggcgtttcttgaagctatcgttaatgcggataatgaaacaacgattggtgagattcgctcttttgccgacgccctggacgctgtccggttcaatcgcaacaaaatcaaccggcagctgagcaaacccaaccttgcctctctggcgctggagcatgaagtgatttggctgggacgtagccgctga

SEQ ID NO: 474097 - DNA, 567 bp, Shigella flexneri
atgcttggaacatcttttaataattttggaatcagtttatctcacaaaagatatttttcaggaaaggtggatgagattatccgctgtacaatggggaaaaggatagtaaaaatatcatcaaccaaaataaatactagtattttgagctctgtttcagaacaaatcggtgaaaatattacagattggaaaaatgatgaaaaaaaagtctacgtatcccgggtggtaaaccaatgtattgataagttttgtgcagaacacagccgaaaaatcggcgataatctccgtaaacagatatttaaacaggttgagaaagattatcgcatttctctagacatcaatgctgcacaaagttccataaatcatcttgtatcaggaagcagttatttcaaaaagaaaatggacgaactttgtgaagggatgaatagaagcgttaaaaatgatacaacaagcaatgttgcaaatcttatttccgatcagttttttgagaaaaatgtgcaatatattgatctaaagaaattacgtgggaatatgagtgactatattacaaatttagaatcgcctttctga

SEQ ID NO: 474098 - DNA, 360 bp, Shigella flexneri
ttgttagaaatcgctgtattaccgttggatagctatgcgaagcctgatattgaagccaactatcagggccgactgctcgccagacaaagcggcttccttgatccagtgaactatcgtaatcactttgttaccatcctcggtaccattcagggtgaacaaccaggctttatcaataaagtcccgtataacttcctggaagtgaatatgcagggcatccaggtgtggcatttgagagaagtggttaataccacctataacctgtgggattacggctatggtgcattctggccggaaccgggctggggtgcgccttactacaccaatgcggtgagtcaggtaacacctgagctggtcaaataa

SEQ ID NO: 474099 - DNA, 531 bp, Shigella flexneri
atgtttcttataattaccagggatacgatgttcttcaccgcgatgaaaaacattctgagtaaaggtaatgtcgttcatatacagaacgaagaagagatcgacgtaatgttgcatcagaatgccttcgtcattattgatacattaatgaataatgtatttcattctaattttctcactcaaattgaacgattaaaacctgtccatgtcattgttttctccccctttaatattaaacgctgtctggggaaagtaccggtgacctttgttccgcggactatcactatcattgattttgtcgcactcatcaatggcagttactgctctgtgcctgaagcgaatgtgtcactttcgcgcaagcaacatcaggttctgagctgcattgcgaatcaaatgacaactgaagatattctggagaaactgaaaatatcgctaaaaacgttctactgccataaacacaatatcatgatgatcctcaatcttaagcggatcaatgagctggtacgccatcagcatattgattatctggtgtga

SEQ ID NO: 474100 - DNA, 324 bp, Shigella flexneri
atggttattggcagcggtatgtacgaactgggtatttatggttcagtgatgaccttgttggtgctggaagtcttccatcaattaaccttccgcctgatgaacaaaaattaccatttacagctgacattagtgaacggtaatacggtatcaatgctcgactggtttaagcagcaaaaaataaaaactgatttagtttcgttgcaggaaaatgaagatcatgaagtggtcgccattgatatccagcttcatgccacaacgttgatagaagacctgttgcgattattaaaaggtatggcaggggtgaaaggcgtttcaattagctaa

SEQ ID NO: 474101 - DNA, 321 bp, Shigella flexneri
atgacagcagaatttattatacgtcttatactcgcggcaattgcctgtggcgctattggcatggaaaggcaaatgcgcggcaaaggagcagggttacgcacacatgtattaattggcatgggaagcgccctgtttatgattgtttcgaaatatggttttgctgacgtgctgtctttagatcacgtcggactcgaccccagccgtattgctgctcaggtggtgacgggcgtcgggtttatcggtgcaggtaacattctcgttcgtaaccaaaatattgtaggtctgacgaccgcagcggatatctgggtgaccgccgcatag

SEQ ID NO: 474102 - DNA, 339 bp, Shigella flexneri
atgggttacaaaatgaatatttcatctctccgtaaagcgtttatttttatgggcgctgtagcggctttgtcactggtgaacgcacaatctgcgctggcagccaatgaatctgctaaagatatgacctgccaggaatttattgatctgaatccaaaagcaatgaccccggttgcatggtggatgctgcatgaagaaacagtatataaaggtggcgataccgttactttaaatgaaaccgatctcactcaaattcctaaagtgatcgaatactgtaagaaaaacccgcagaaaaatttgtataccttcaaaaatcaagcatctaatgacttgccgaattaa

SEQ ID NO: 474103 - DNA, 333 bp, Shigella flexneri
atgaaaaaagtattaggcgttattcttggtggtctgcttcttctgccagttgtgagcaatgcagcggatgcgcaaaaagcagctgataacaaaaaaccggtcaactcatggacctgtgaagatttcctggctgtggacgaatccttccagccaactgcagttggttttgctgaagcgctgaacaacaaagataaaccagaagatgcggttttagatgttcagggtattgcaaccgtaaccccagctatcgttcaggcttgtactcaggataaacaagccaactttaaagataaagttaaaggcgaatgggacaaaattaagaaagatatgtaa

SEQ ID NO: 474104 - DNA, 573 bp, Shigella flexneri
atgttatatatagataaggcaacaattttgaagtttgatctggagatgctgaaaaagcatcgcagagcaatccagtttattgccgtgctgctgtttatcgtcgggttgctgtgtatcagtttcccgttcgtctctggcgatattttaagcacagtagtgggtgcattattaatctgctcgggtattgcgcttattgtcgggttattcagcaaccgcagtcataatttctggccggtattatccggtttcctcgtcgcagtcgcctatttattgatcggctatttcttcatccgtgcaccggagctgggcatttttgccattgcggcatttattgccggtttgttctgtgttgcaggggttattcgcctgatgagttggtatcgtcagcgttcaatgaaaggcagctggctacagctcgttattggtgtgctggatatcgtcattgcctggatattccttggtgcaacgccgatggtgtctgtaacgctggtttccacactggtgggaattgaactgatatttagcgccgccagcctgttcagcttcgccagtttgttcgttaagcagcaataa

SEQ ID NO: 474105 - DNA, 528 bp, Shigella flexneri
atgatttttctcatgacgaaagattcttttcttttacagggcttttggcagttgaaagataatcacgaaatgataaaaatcaattccctgtcagagatcaaaaaagtaggcaataaacccttcaaggttatcattgatacctatcacaatcatatccttgatgaagaagcgattaaatttctggagaaattagatgccgagagaattattgttttggcaccttatcacatcagtaaactaaaagctaaagcgcctatttattttgttagccgcaaagaaagtatcaaaaatcttcttgagattacttatggtaaacacttgccccataagaattcacaattatgtttttcacataatcagttcaaaattatgcaactgattctgaaaaataaaaatgaaagcaatatcacgtcgacgctcaatatttcgcaacaaacattaaagattcagaaattcaacattatgtacaagctgaaactaagacgtatgagcgacatcgtcaccctgggtatcacatcttatttttag

SEQ ID NO: 474106 - DNA, 279 bp, Shigella flexneri
atgagggatttacagaccagcggcatagtggggttgtcagccagtaaggtgggatacaggcacagtgatcgacatggtgaggtcaacgacaaaaaaaatgttgccgttctgccaacagttcctgccagcattcgggcaacgaagggttctactggtggatacacataccaggggaatcaagtcgttttagcctctcctttagtaatcaccgggggtaatgaaatcagcatctgcatccctcgtcatgccagccatcaatttcagttgcttatgtcctga

SEQ ID NO: 474107 - DNA, 213 bp, Shigella flexneri
atgaccacgctgacagcacaacagattgcctgtgtttacgcctggctggcgcagttgttctcccgtgaactggacgatgaacaactgacgcaaatcgccagtgcgcagatggctgaatggttttcgttgctgaaaagcgaaccgccgctcactgcggcggtgaatgatctggaaaacagtattgccacgctggtaatgactccaacttactga

SEQ ID NO: 474108 - DNA, 2541 bp, Shigella flexneri
atgaacaataacgatctctttcaggcatcacgtcggcgttttctggcacaactcggcggcttaaccgtcgccgggatgctggggccgtcattgttaacgccgcgccgtgcaactgcggcgcaagcggcgactgaggctgtcatctcgaaagagggcattcttaccgggtcgcactggggggctatccgcgcgatggtgaaggatggtcgctttgtggcggcaaaaccgttcgaactggataaatatccgtcgaaaatgatcgccggattgccggatcacgtacacaacgcggcacgtattcgttatccgatggtacgcgtggactggctgcgtaagcgccatctgagcgacacctcccagcgcggtgataaccgttttgtgcgcgtgagctgggatgaagccctcgacatgttctatgaagaactggaacgcgtacagaaaactcacgggccgagtgccttgctgaccgccagtggttggcaatcgacggggatgttccataacgcttcggggatgctggcgaaagctattgccttgcatggtaatagcgttggtacgggcggagattactctaccggtgctgcgcaggtgatcctgccgcgcgtagtcggttcaatggaagtgtatgaacagcaaacctcctggccgctggtattgcagaacagcaaaaccattgtgctgtggggctccgatttgctgaaaaaccagcaagcgaactggtggtgcccggatcacgatgtttatgaatattacgagcagctaaaagcgaaagtcgccgccggtgaagttgaggtcatcagcatcgatccggttgtcacatccacccatgagtatctggggcgcgagcatgtgaagcacattgcggttaacccgcaaactgacgtgccgctgcaactggcgctggcacatacgctgtacagtgaaaacctgtacgacaaaaacttcctcgctaactactgtgtgggttttgagcagttcctgccgtatctgctgggtgagaaagacggtcagccgaaagatgccgcatgggctgaaaaactgaccggcattgatgccgaaaccattcgtgggctggcgcggcagatggcggcgaacagaacgcaaattattgctggctggtgcgtgcagcgtatgcagcacggtgaacagtgggcgtggatgattgtggttctggcggcgatgctggggcaaattggcctgccaggtggtggttttggctggcactacaacggcgcaggcacgccggggcgtaaaggcgttattctgagtggtttctccggctctacgtcgattccgcctgttcacgacaacagtgactacaaaggctacagcagcactattccgattgcccgttttatcgatgcgatcctcgaaccggggaaagtgatcaactggaacggtaaatcggtaaaactgccgccgctgaaaatgtgtatttttgccggaactaacccattccatcgccatcagcagatcaaccgcattattgaaggctggcgcaagctggaaacggttatcgccatagataaccagtggacctcaacctgccgctttgccgatatcgtgctgcctgcgaccacgcagtttgagcgtaacgatctcgaccagtacggcaaccactccaaccgtggcattatcgccatgaaacaggtggtgccgccgcagttcgaggcgcgcaacgactttgatattttccgcgagctgtgccgtcgctttaatcgtgaagaagcctttaccgaagggctggacgaaatgggctggctgaaacgcatctggcaggaaggtgtacaacaaggcaaaggacgcggcgttcatctgccagcgtttgatgacttctggaataacaaagagtacgtcgagtttgaccatccgcagatgtttgttcgccaccaggcattccgcgaagatccggatctcgaaccgctgggcacgccgagtggcctgattgagatctactcgaaaaccatcgccgatatgaactacgacgattgtcaggggcatccgatgtggtttgagaaaatcgaacgctcccacggtgggcccggctcgcagaagtatccgttgcatctgcaatctgtgcatccggatttccgacttcactcgcagctatgtgagtcggaaacgctgcgtcagcaatatacggtagcgggtaaagagccagtgttcattaacccgcaggatgccagcgcgcgcggtattcgtaacggtgatgtggtacgcgtctttaacgctcgcggtcaggtgttggcaggagcagtagtttctgaccgctatgcacccggcgtggcgcgaattcacgaaggggcatggtacgatccagataaaggcggcgagcctggtgcgctgtgcaaatacggtaaccccaacgtgctgaccatcgacatcgggacttcgcagctggcgcaggcgaccagtgcgcacactacgctggtggaaattgagaagtacaatggaacagtggagcaggtgacggcgtttaacggccccgtggagatggtggcgcagtgcgaatatgttcccgcgtcgcaggtgaaatcatga

SEQ ID NO: 474109 - DNA, 1173 bp, Shigella flexneri
atgcggaaactctggaacgcgctacgccgacccagtgctcgttggtcggtactggcgctggtcgcaattgggattgtgattggcattgcgctgattgtattgccacacgttgggatcaaagtcaccagcacaaccgaattttgtgtcagttgccacagtatgcaaccggtgtatgaagaatataaacagtcggtgcatttccagaacgcctccggcgtgcgagctgaatgccatgactgtcatatcccgccggatattccaggcatggtgaagcgcaaactggaagcgagcaacgacatttaccagacctttattgcccactccattgatacacttgaaaaattcgaagccaaacgcgcggaacttgccgagcgtgaatgggcgcgaatgaaagaaaacaactcggcaacctgtcgctcctgccataactacgatgcgatggatcatgccaggcagcatcctgaagcggcacgtcagatgaaggtggcagcgaaagataatcaatcctgcatcgactgtcataaaggtattgcccaccagttaccggatatgagtagcggcttccgtaagcagttcgatgagctgcgcgccagtgctaatgacagtggtgacacgctgtactctattgatattaagccaatttatgcggcgaaaggcgataaagaagcctctggttctctgctgcctgcttcggaagtgaaagtccttaaacgtgacggcgactggctgcaaattgaaattaccggctggacggaaagcgccggacgtcagcgtgtactcacccaattcccaggtaaacgcatctttgttgcctcgattcgtggtgatgtgcagcagcaggtgaaaacgctggagaaaaccaccgttgccgacaccaataccgagtggagcaagttgcaggccaccgcgtggatgaagaaaggcgacatggtgaacgatatcaaaccgatctgggcctatgcggattcgttgtacaacggcacctgtaaccagtgccacggcgcaccggaaatcgcccactttgacgctaacggttggatcggcacgctcaacggcatgattggctttaccagtctcgataaacgtgaagaacgcactttgttgaaatatctgcaaatgaatgcgtctgacaccgcaggtaaggctcacggcgataagaaggaagaaaaataa

SEQ ID NO: 474110 - DNA, 693 bp, Shigella flexneri
atgccacatcacattgttattgttgaagataagccggttacccaggcgcgattacaatcctacttcactcaggaggggtataccgtttccgttacggcgagcggtgccgggctacgggaaattatgcagaatcagccggtagatttaattctgctggatatcaacttacccgatgaaaatggcctgatgttaacccgcgccctgcgagaacgctcaacggtggggattattctggttaccggacgcagcgatcggattgaccgtattgttgggctggaaatgggcgcagacgattacgtcaccaaaccgctggaactgcgcgaactggtagtacgggtgaaaaatctgctctggcgaatcgacctcgcgcgacaagctcaaccgcacactcaggactactgctatcgctttgcgggttattgcctgaatgtgtcgcgccatacgctggagcgggatggcgagccgattaaactgacccgcgcagagtatgaaatgttggtggcatttgtgactaatccgggcgaaattctcagccgtgagcgtctgctgcgtatgctttctgcgcgtcgggtggaaaaccctgacctgcgcaccgtcgatgtgttaattcgtcgtttacgtcataaactcagcgcggatttactggtgacgcaacatggtgaaggttatttcttagccgctgatgtgtgctga

SEQ ID NO: 474111 - DNA, 1029 bp, Shigella flexneri
atgcgcgtactgctatttttacttctttcccttttcatgttgtcggcattttcggctgataacctgttgcgctggcatgatgcgcagcatttcacggtgcaagcctctatgccgcttaaagccaaacgcgtatggaaactgtgcgcgctttatcccagcctgaaagattcatactggttatcgttgaactatggtatgcaggaggctgctcgccgctacggtgtggatttaaaagtgctggaggcaggcggctacagccagttggctacccagcaagcacaaatcgaccagtgtaaacagtggggcgcagaggccattttgctcggtagtagcacgacgtcatttcccgacctgcaaaagcaggtagcaaatctgccggtgatcgaactggtaaatgctcttgatgatccccaggtgaaaagccgcgttggtgtaccctggtttcagatgggctatcaacctgggcgatatttggtgcaatgggcgcacggtaaaccactgaacgtgctgctgatgcccggacccgataacgccgggggcagtaaggagatggtcgagggttttcgcgcagccattgccggaagcccggtgcgtattgttgatattgcgcttggtgataacgatattgaaatccagcgcaacctgttgcaggagatgctggaacgccacccagaaatcgacgtcgttgccggaacggccattgcggcagaggcggcaatgggtgaagggcgtaacctgaaaacgccgcttaccgtggtgtcgttttatctttcacatcaggtgtatcgcgggctgaagcggggaagagtgattatggctgccagcgatcaaatggtctggcagggggaactggcagttgagcaggccatcaggcaattacaggggcaatcggtgtctgataatgtcagcccaccgattttagttctgacgccgaaaaatgccgaccgagaacatatccgccgctcgctgtcaccggggggatttcgtccggtctatttttatcagcacacatcagcggctaagaaataa

SEQ ID NO: 474112 - DNA, 375 bp, Shigella flexneri
atgaattatcaattatatgtccgtaattacagtcgtaacaccaactacgagatcgttgctacggctgatggcctggatgtgctgaacggcaagcaaggttcgctgaataacaacggctatattgtgaatgccggagattcgttagtgattaaaggattccgcaaagataaacatactgaagcggcttttcagttcgccaacgttgctgattcctacgcagccaattcggcgcaaggcgatgtgcgtaataccggggtaatcggctttgccgcctttgaattacaaggcccggcgcaaaacgcgctgccgccgtgctctggacaagcctttccggcagataacaatggctatgcgccgccaccgtgtcggaaatag

SEQ ID NO: 474113 - DNA, 921 bp, Shigella flexneri
atgagcaccttaggtcatcaatacgataactcactggtttccaatgcctttggttttttacgcctgccgatgaacttccagccgtatgacagcgatgcagactgggtgattactggcgtgccgttcgatatggccacttctggtcgtgcgggtggtcgccacggtccggcagcgatccgtcaggtttcgacgaatctggcctgggaacacaaccgcttcccgtggagtttcgacatgcgtgagcgtctgaacgtcgtggactgcggcgatctggtatatgcctttggcgatgcccgtgagatgagcgaaaagctgcaggcgcacgccgagaagctgctggctgccggtaagcgtatgctctccttcggtggtgaccactttgttacgctgccgctgctgcgtgctcatgcgaagcatttcggcaaaatggcgctggtacactttgacgcccacaccgatacctatgcgaacggttgtgaatttgaccacggcactatgttctataccgcgccgaaagaaggtctgatcgacccgaatcattccgtgcagattggtattcgtaccgagtttgataaagacaacggctttaccgtgctggacgcctgccaggtgaacgatcgcagcgtggatgacgttatcgcccaggtgaaacagattgtgggtgatatgccggtttacctgacttttgatatcgactgcctggatcctgctttcgcgccgggaaccggtacgccagtgattggcggcctgacctccgatcgcgccattaaactggtacgcggcctgaaagatctcaacatcgttgggatggacgtagtggaagtggctccggcatacgatcagtcggaaatcaccgctctggctgcggcgacgctggcgctggagatgctgtatattcaggcggcgaaaaagggcgagtaa

SEQ ID NO: 474114 - DNA, 759 bp, Shigella flexneri
atgaaaattcgcgccttattggtagcaatgagcgtggcaacggtactgaccggttgccagaatatggactccaacggactgctctcatcaggagcggaagcttttcaggcttacagtttgagtgatgcgcaggtgaaaaccctgagcgatcaggcatgtcaggagatggacagcaaggcgacgattgcgccagccaatagcgaatacgctaaacgtctgacaactattgccaatgcgctaggcaacaatatcaacggtcagccggtgaattacaaagtgtatatggcgaaggatgtgaacgcctttgcaatggctaacggctgtatccgcgtctatagcgggctgatggatatgatgacagataacgaagtcgaagcggtgatcggtcacgagatggggcacgtggcgttaggccatgtgaagaaagggatgcaggtggcgcttggtacaaatgccgtgcgagtagctgcggcctctgcgggcgggattgtcggcagtttatctcaatcacaacttggtgatctgggcgagaaattagtcaattcgcaattctcccagcgccaggaagcagaagccgatgattattcttacgatcttctgcaccaacgcggcatcagcccggcaggtcttgccaccagctttgaaaaactggcgaagctggaagaaggccgtcaaagctcaatgtttgacgaccatcctgcatccgccgaacgtgcccagcatattcgcgatcgcatcagcgcggatgggattaagtaa

SEQ ID NO: 474115 - DNA, 1992 bp, Shigella flexneri
atgtcctcacgtaaagagcttgccaatgctattcgtgcgctgagcatggacgcagtacagaaagccaaatccggtcacccgggtgcccctatgggtatggctgacattgccgaagtcctgtggcgtgatttcctgaaacacaacccgcagaatccgtcctgggctgaccgtgaccgcttcgtgctgtccaacggccacggctccatgctgatctacagcctgctgcacctcaccggttacgatctgccgatggaagaactgaaaaacttccgtcagctgcactctaaaactccgggccacccggaagtaggttataccgctggtgtggaaaccaccaccggtccgctgggtcagggtattgccaacgcagtcggtatggcgattgcagaaaaaacgctggcggcgcagtttaaccgtccgggccacgacattgtcgaccactacacctacgccttcatgggcgacggctgcatgatggaaggcatctcccacgaagtttgctctctggcgggtacgctgaagctgggtaaactgattgcgttctacgatgacaacggtatttctatcgatggtcacgttgaaggctggttcaccgacgacacagcaatgcgtttcgaagcttacggctggcacgttattcgcgacatcgacggtcatgacgcggcatccatcaaacgcgcagttgaagaagcgcgcgcagtgactgacaaaccgtccctgctgatgtgcaaaaccatcatcggtttcggttccccgaacaaagccggtactcacgactcccacggtgcgccgctgggcgacgctgaaattgccctgacccgcgaacagctgggctggaaatatgcaccgttcgaaatcccgtctgaaatctatgctcagtgggatgcgaaacaagcaggccaggcgaaagaatctgcatggaatgagaagtttgcggcttacgcgaaagcttatccgcaggaagcggctgaatttacccgccgtatgaaaggcgaaatgccgtctgacttcgacgccaaagcgaaagagtttatcgctaaactgcaggctaatccggcgaaaatcgccagccgtaaagcgtcgcagaatgctatcgaagcgttcggcccgctgttgcctgaattcctcggcggctctgctgacctggcaccgtctaacctgaccctgtggtctggttctaaagcaatcaacgaagatgctgcaggtaactacatccactacggtgttcgcgagttcggtatgaccgcgattgctaacggtatctccctgcacggtggcttcctgccgtacacctccaccttcctgatgttcgtggaatacgcacgtaacgccgtacgtatggctgcgctgatgaaacagcgtcaggtgatggtttacacccacgactccatcggtctgggcgaagatggcccgactcaccagccggtagagcaggtcgcttctctgcgcgtgaccccgaacatgtctacatggcgtccgtgtgaccaggttgaatccgcggtcgcgtggaaatacggcgttgagcgtcaggacggcccgactgcgcttatcctctcccgtcagaacctggcgcagcaggaacgtactgaagagcagctggcaaacatcgcgcgcggtggttatgtgctgaaagactgtgctggtcagccggaactgatcttcatcgccaccggttctgaagttgaactggcggttgctgcctacgaaaaactgactgccgaaggcgtgaaagcgcgcgtggtgtccatgccgtctaccgacgcatttgacaagcaggatgcggcttaccgtgaatccgtactgccgaaagcggttactgcacgcgttgcggtagaagcgggtattgctgactactggtacaagtatgttggcctgaacggcgctatcgtcggcatgaccaccttcggtgaatctgctccggcagagctgctgtttgaagagttcggcttcactgttgataacgttgttgcgaaagcaaaagcgctgctgtaa

SEQ ID NO: 474116 - DNA, 909 bp, Shigella flexneri
atgaaagcacctgtttcattaacctcatttcgcccacaaaaatctcttgctatcgccattggcgtgcttgccgtggttgtgctgccatttctctcgtattacaccgttaatgaaggtgaacgcggcattttgctgcgctacggaaaaatcgtaaaagttgccgaaccggggctgggttttaagatcccttttatggaaagcgtggagaaaatttccacgcgtaatcaggctgtggtctatcagggattacaggcctacagccgcgaccagcaaccggcacaaatgacagtatcagtcagcttccacattaaaccttcagaagcaggcgcggtttataccacctacaacactattgaagcattaaaagatcgtctaattgtccgtcagttgccaactcagctggagaacattttcggccaatataccgccatcagcgccgtacaggatcgtacaaaattggttcaggatctgcaaaatgccatgcgcaaagccgttgttgggccagtggtaattgacggggtccagattgaaaatattgatttttctgacgcttatgaaaagtcgattgaaaaccgaatgaaagcagaagtcgccattgccacgcgtaagcaaaatctggaaacagagaaaatccaggcgcaaatagcggtaactcaggcccaggcagaagcagacagtaaactggcggcagccaaagcagaagcggaaactattcgcgtaagaggcgcggcagaggctgaaactattcgtttaaaaagtgcggctgaagcagaagcaatccgcctgcgcggtgaagctctgcgggataatcccggacttgtagccctcaccactgccgaacgttgggacggtaaactgcccgataccatgatccccggcagcacagttccgtttatctctactaagtaa

SEQ ID NO: 474117 - DNA, 240 bp, Shigella flexneri
atgttgtcgtttcttaccagtgaggaacgagaagcccttacaaacatgctcgcaaggaaaggtgttgagactgtgctacgcttgttagataaggaaactcaagagctactgcaactagagggccgtaaacgcctggcagcgttgatgctcgttgatatgcccgacgagcaagtcagagagattttggaagagattgaagctagtattctctcagagagtgtaaacgcgaaggcgggttaa

SEQ ID NO: 474118 - DNA, 897 bp, Shigella flexneri
gtgaacgtcaccgtggcgtatcaaacctcagccgaaccggcgaaagtggctcaggccgacaacacctttgctaaagagagcggggcgagcgtggactggcgtaagtttgacagcggagccagcatcgtgcgggcgctggcttctggcgacgtgcaaatcggcaacctcggttccagcccattagcggttgcagccagccaacaggtgccgattgaagtcttcttgctggcgtcaaaactgggtaactccgaagcgctggtggtaaagaaaactatcagcaaacccgaagatttgattggtaaacgcattgccgtaccgtttatctccaccacccactacagcctgctggcggcgctgaaacactgggggattaaaccagggctagtggagattgtgaacctgcagccgcccgcgattatcgccgcatggcagcggggtgatattgatggtgcttatgtctgggcaccggcggttaacgccctggaaaaagacggcaaggtgctgaccgattctgaacaggtcgggcagtggggtgcgccaacgctggacgtctgggtggtgcgcaaagattttgccgagaaacatcctgaggtcgtgaaagcgttcgccaaaagcgccatcgatgcacagcaaccgtacattgctaaccctgacgcgtggctgaaacagccggaaaacatcagcaaactggcgcgtttaagcggcgtgcctgaaggtgacgttccggggctggtgaagggaaatacctatctgacgccgcagcaacaaacggcagaactgaccggaccggtgaacaaagcaatcatcgacaccgcgcagtttttgaaagagcagggcaaggtcccggctgtagcgaatgattacagccagtacgttacctcgcgcttcgtgcaataa

SEQ ID NO: 474119 - DNA, 768 bp, Shigella flexneri
atgctgcaaatctctcatctctatgccgattatggcggcaaaccggcactggaagatatcaacctgacgctggaaagcggcgagctactggtggtgctggggccgtccggctgcggtaaaaccaccctgctgaatctgattgccggttttgtgccttatcagcatggcagcattcaactggcgggtaagcgtattgagggaccgggagcagagcgtggcgtagtttttcagaatgaagggctgctaccgtggcgcaatgtacaggacaacgtggcgttcggcctgcaattggcaggtatagagaaaatgcagcgactggaaatcgcgcaccagatgctgaaaaaagtggggctggaaggcgcagaaaaacgctatatctggcagctttccgatggtcaacgtcagcgggtggggattgcccgcgcgctggcggcgaatccccagctgttattactcgacgaaccgtttggtgcgctggacgccttcacccgcgaccagatgcaaactctgctgctgaaactctggcaggagacgggcaagcaggtgctgttgattacccacgatatagaagaagcggtgtttatggcgactgaactggttctgctttcatccggccctggccgtgtgctggagcggctgcggctcaactttgctcgccgctttgttgcgggagagtcgagccgcagcatcaagtccgatccacaattcatcgccatgcgcgaatatgttttaagccgcgtatttgagcaacgggaggcgttctcatga

SEQ ID NO: 474120 - DNA, 828 bp, Shigella flexneri
atgagtgtgctcattaatgaaaaactgcattcgcggcggctgaaatggcgctggccgctctcgcgtcaggtgaccttaagcattggcacgttagcggttttactcactgtatggtggacggtggcggcgctgcaactgattagcccgctgtttttgccgccgccgcaacaagtactggcaaaactgctcaccattgccggaccgcagggatttatggacgccacgctgtggcagcatctggcagccagcctgacgcgcattgtgctggcgctactcgcggcggtggtgatcggtattccggtcgggatcgccatggggctaagcccgacggtgcgcggcattctggatccggtaatcgaactttatcgtccggtgccaccgctggcttatttgccgctgatggtgatctggtttggtattggtgaaacctcgaagatcttactgatctatttagcgatttttgcgccggtggcgatgtcggcgctggcaggggtgaaaagcgcgcagcaggttcgcattcgtgccgcccagtcgctgggtgccagccgtgcgcaggtgctgtggtttgtcattttgcccggcgcgctgccggaaatcctcaccggattacgcattggtctgggtgtgggctggtctacgctggtagcggcggagctgattgccgcgacacgcggtttaggatttatggttcagtcagcgggtgaatttctcgcgactgacgtggtactggcggggatcgcggtgattgcgattatcgcctttcttttagaactgggtctgcgcgcgttacagcgccgtctgacgccctggcatggagaagtacaatga

SEQ ID NO: 474121 - DNA, 852 bp, Shigella flexneri
atgagtgaacgtctgagcattaccccgctggggccgtatatcggcgcacaaatttcgggtgccgacctgacgcgcccgttaagcgataatcagtttgaacagctttaccatgcggtgctgcgccatcaggtggtatttctgcgcgatcaagctattacgccgcagcagcaacgcgcgctggcccagcgttttggcgaactgcatattcaccctgtttaccctcatgccgaaggggttgacgagatcatcgtgctggatacccataacgataatccgccggataacgacaactggcataccgatgtgacatttattgaaacgccacccgcaggggcgattctggcagctaaagagttaccttcgaccggcggtgatacgctctggaccagcggtattgcggcctatgaggcgctctctgttcccttccgccagctgctgagctggctgcgtgcggagcatgatttccgtaaatcattcccggaatacaaataccgcaaaaccgaggaggaacatcaacgctggcgcgaggcggtcgcgaaaaatcctccgttgctacatccggtggtgcgaacgcatccggtgagcggtaaacaggcgctgtttgtgaatgaaggctttactacgcgaattgtcgatgtcagcgagaaagagagcgaagccttgttaggcttcttattcgcccatatcactaaaccggagtttcaggtgcgttggcgctggcaaccgaatgatattgcgatttgggataaccgcgtgactcagcactatgccaatgccgattacctgccacagcggcggattatgcatcgggcgacgatccttggggataaaccgttttatcgggcggggtga

SEQ ID NO: 474122 - DNA, 975 bp, Shigella flexneri
atgacagacttaatccaacgccctcgtcgcctgcgcaaatctcctgcgctgcgcgctatgtttgaagagacaacacttagccttaacgacctggtgttgccgatctttgttgaagaagaaattgacgactacaaagccgttgaagccatgccaggcgtgatgcgcattccagagaaacatctggcacgcgaaattgaacgcatcgccaacgccggtatccgttccgtaatgacttttggcatctctcaccataccgatgaaaccggcagcgacgcctggcgggaagatggactggtggcgcgtatgtcgcgcatctgcaagcagactgtgccagaaatgatcgtcatgtcagacacttgtttctgtgaatacacttctcacggtcactgcggtgtgctgtgcgagcatggcgtcgacaacgacgcgactctggaaaatttaggcaagcaagccgtggttgcagctgctgcaggcgcagacttcatcgccccttccgccgcgatggacggccaggtacaggcgattcgtcaggcgctggacgctgcaggctttaaagatacggcgattatgtcgtattcgaccaagttcgcctcttccttttatggcccgttccgtgaagctgcaggaagcgcattaaaaggcgaccgcaaaagctatcagatgaacccaatgaaccgtcgcgaggcgattcgtgagtcactgctggatgaagcccagggcgcagactgcctgatggttaaacctgctggagcgtacctcgacatcgtgcgtgagctgcgtgaacgtactgaattgccgattggcgcgtatcaggtgagcggtgagtacgcgatgattaagttcgccgcgctggcgggtgctatagatgaagagaaagtcgtgctcgaaagcttaggttcaattaagcgtgcgggtgcggatctgattttcagctactttgcgctggatttggctgagaagaagattctgcgttaa

SEQ ID NO: 474123 - DNA, 372 bp, Shigella flexneri
atgcactcctggaaaaagaaacttgtagtatcacaattagcattggcttgcactctggctatcacctctcaggctaatgcagcgaccaacgatatttctggtcaaacttacaatactttccatcactacaacgacgccacctatgctgatgacgtttactatgatggttatgtaggctggaacaactatgccgctgatagctattacaacggcgatatctacccggtcattaataacgctaccgttaacggcgtgatttctacctactatctggacgacggtatttctaccaataccaacgccaatagtctgacaatcaaaaacagcactattcacggtatgatttattccgagtgcatgacaactgattag

SEQ ID NO: 474124 - DNA, 519 bp, Shigella flexneri
atgtccatccgttttgcccgcaaagccgactgtgctgccattgcggaaatttataaccacgccgtgttgtatacggcggctatctggaatgaccaaacggtggatgcagataaccgcattgcctggtttgaagcgcggaccatagcaggttatccggtgctggtaagtgaagaagatggcgtagttacgggatatgcctcgtttggcgactggcgtagtttcgatggttttcgccataccgtggaacattcggtttatgtccatcccgatcatcagggcaaaggtctggggcgtaaattgttaagtcgattgattgatgaagcgcgggattgcgggaagcatgtcatggtcgccgggatcgaatcgcaaaatcaggcttcgctgcatctgcaccagtcgctgggatttgtcgtcaccgcacaaatgccgcaggtaggcactaaatttggtcattggctggatctgacatttatgcagttgcaactcgacgagcgcactgaaccggacgcgattggatga

SEQ ID NO: 474125 - DNA, 450 bp, Shigella flexneri
atgaatcagtcgctcacccttgcttttttgattgccgccggaattggtctggtagtccagaacacgctgatggcacgcatcacccagacctcctctaccattctcatcgccatgttgctgaactcactggtggggattgtgctctttgtttctattttatggtttaaacaaggcatggcggggtttggcgaactggtgtccagcgtgcgctggtggacacttatacctggcttgctgggttcgttttttgtcttcgccagtatcagcggatatcagaatgtgggagcggcgacaactattgcggtactggtcgccagccagctgattggcggtctggtgctggatatcttccgcagtcatggcgtaccactacgggcgttgttcggcccaatatgtggcgcaattttacttgtggttggcgcctggttggtggccagacgctcattttaa

SEQ ID NO: 474126 - DNA, 234 bp, Shigella flexneri; identical to SEQ ID NO: 461251

SEQ ID NO: 474127 - DNA, 174 bp, Shigella flexneri
atgtctctctatcaacatatgcttgttttttatgcggttatggcagcaatcgcatttcttatcacctggtttctttctcacgataagaaacgcatccgtttcttaagcgcctttctggtgggggccacatggccgatgagtttcccggtggcgctgttgttttcactgttttaa

SEQ ID NO: 474128 - DNA, 810 bp, Shigella flexneri
atgaaagttcaattgtacaaattcacggaagataaaaataaaacccttaccttcagatggacgaaaaaacactttgagttttgtatggataataaaatctttttaaatcataaggggaagaagtcgtataaagaaaggaatttatttcttttctcaaaaggtgacaagataacaattgaagataatgttattgctgaagaatattcaacaatgcctgtgaaaaatttctccagtgtcggcgctttttcatttccgacctgccatttttcagggaatatacgtataggtcgattttgtagtattgcatcaaatgtaaaaataatgggtggaaatcatcctttgaatcgttttactactcacatgatgacttataacggtgaatttgataagtttgctatgagtgaatttgaacgtagctggacattgaaaccattcattaccaaacctgaaaatccgattataggaaatgatgtctggataggaaatgatgttgtattgaaaggtggcatcgcaataggtgatggtgctgttattgctgccaattccgttgttaccaaagatgtgcccccatatgccatagttgcaggagttcctgcaaaaataatcagatttaggtttgattcaaatgttattgatgaactgttgagaataaaatggtggaattataactactcagatcttccggataataataagtgtgatgatataaattattttgttgaagagatgaatcgattgatatcaaatggaaatattcaagagagggactataaaaaattcaatctttctgaggtattcagaggcctataa

SEQ ID NO: 474129 - DNA, 1425 bp, Shigella flexneri
atgcaacataagttactgattaacggagaacgggttagcggcgaaggggaaaaacagcctgtctataatccggcaacgggggacgttttactggagattgccgaggtatccgcagagcaggtcgatgctgctgtgcgtgcggcagatgcagcatttgctgaatgggggcaaaccacaccgaaagcgcgtgcggaatgcctgctgaaactggcggatgttatcgaagaaaatggtcaggtttttgccgaactggaatcccgtaattgtggcaaaccgctgcatagtgcgttcaatgatgaaatcccggcgattgtcgatgtttttcgctttttcgcgggtgcggcgcgctgtctgaatggtctggcggcaggtgaatatcttgaaggtcatacttcgatgatccgtcgcgatccgttgggggtcgtggcttctatcgcaccgtggaattatccgctgatgatggccgcgtggaaacttgctccggcgctggcggcagggaactgcgtagtgcttaaaccatcagaaattaccccgctgaccgcgttgaagttggcagagctggcgaaagatatcttcccggcaggcgtgattaacatactgtttggcagaggcaaaacggtgggtgatccgctgaccggtcatcccaaagtgcggatggtgtcgctgacgggctctatcgccaccggcgagcacatcatcagccataccgcgtcgtccattaagcgtactcatatggaacttggtggcaaagcgccagtgattgtttttgatgatgcggatattgaagcagtggtcgaaggtgtacgtacatttggctattacaatgctggacaggattgtactgcggcttgtcggatctacgcgcaaaaaggcatttacgatacgctggtggaaaaactgggtgctgcggtggcaacgttaaaatctggtgcgccggatgacgagtctacggagcttggacctttaagctcgctggcgcatctcgaacgcgtcagcaaggcagtagaagaggcgaaagcgacagggcacatcaaagtgatcactggcggtgaaaagcgcaagggtaatggctattactatgcgccgacgctgctggctggcgcattacaggacgatgccatcgtgcaaaaagaggtatttggtccagtagtgagtgttacgcccttcgacaacgaagaacaggtggtgaactgggcgaatgacagccagtacggacttgcatcttcggtatggacgaaagatgtgggcagggcgcatcgcgtcagcgcacggctgcaatatggttgtacctgggtcaatacccatttcatgctggtaagtgaaatgccgcacggtgggcagaaactttctggttacggcaaggatatgtcactttatgggctggaggattacaccgtcgtccgccacgtcatggttaaacattaa

SEQ ID NO: 474130 - DNA, 795 bp, Shigella flexneri
atgcactctgaacgcgcaccgtttttcctcaaactggcggcctggggcggcgttgttttcctacattttcccatcctgataatcgccgcctatgcgtttaacactgaagatgcggcgtttagttttccaccgcagggcctgacgctgcgctggtttagcgtggcagcacagcgtagtgatattcttgatgccgtgacgctgtcacttaaagtggcggcgctggcgacattaattgcgctggtgttagggacgctggcagctgccgcgctgtggagacgagactttttcggcaaaaacgccatttcgctgttattgctgctgcccattgcgctgccgggcattgtcactggtctggcgctattaaccgcctttaaaaccatcaatctggagccgggatttttcaccatcgtggtcggtcatgcgactttttgcgtagtggtggtgtttaacaatgtcatcgcccgttttcgccgcacctcgtggagtctggttgaggcgtcaatggatcttggggccaatggctggcaaaccttccgctacgtagtgttgccgaatctcagttcggcgttactggcaggaggaatgctggcgtttgccttgtcgttcgatgaaatcatcgttacgacctttacggcaggtcatgaacgaacgttaccgttgtggttgctcaatcagcttgggcgaccgcgtgatgtaccggtaaccaacgtggtggcactgctggttatgttggtaacaaccttgccgatcctgggggcctggtggctaacccgcgaaggcgacaatggtcaataa

SEQ ID NO: 474131 - DNA, 381 bp, Shigella flexneri
atgacaagccgcagccgtcaggctgcctactcgatgatcctgcccgttcaggcggcgcttgagcgtttgccgccgtcattgttgcaggcgtcggctgatctcggcgcacgtccacgacaaacctttcgctatgtggtgctgccgctggcaatcccgggtattgccgctggctctatctttaccttctcactcacactgggcgattttatcgtcccgcagctggttggtcctccaggatattttatcggcaatatggtttattcccagcagggggcgattggcaatatgccgatggcggcggcattcaccctggtgccgattattctcatcgcactgtacctggcgttcgtgaaacgtctgggagcgttcgatgcactctga

SEQ ID NO: 474132 - DNA, 951 bp, Shigella flexneri
gtgaatttccaacaactaaagataatccgcgaggctgcacgtcaggattacaacctgacagaggttgcgaatatgctttttacctcacagtcaggcgttagccgtcatattcgggaactggaggatgaatttggcatcgaaatatttgttcgacgaggtaagcgactgctggggatgactgaaccgggcaaagcattactggtcattgcagaacgtattctgaatgaagccagtaatgttcgtcggcttgcagacctgtttaccaacgatacgtctggtgttctcactattgcaacgacgcatactcaggcacgttatagcttgccagaggtcattaaagcttttcgcgaacttttcccggaggttcggctcgagctaatccagggttcgccacaggaaattgcgacgttgttgcaaaatggcgaagctgatattggtatcgccagcgagcgtttgagtaatgacccgcagctcgtcgccttcccgtggttttgttggcaccatagtttgcttgttccactcgatcatcccttaacgcaaattacaccattgacgctggaatcaatagcgaagtggccgttaattacttaccgacagggaattacggggcgctcacgcactgatgacgcatttacccgcaaaggtttgccggcagatattgtattaagtgcacaggattctgatgtcattaaaacctatgttgctcttgggcttgggatcggattagttgccgaacaatccagcggcgaacaagaggaagagaatttaatccgcctggatacgcggcatcttttcgatgctaatactgtctggttgggactgaagcgaggacaacttcagcgtaactatgtttggcgctttctggaactttgtaatgcaggactgtcagttgaggatatcaagcgccaggtgatggaaaacagtgaagaggaaattgattatcagatatag

SEQ ID NO: 474133 - DNA, 918 bp, Shigella flexneri
atgaacttcagacgcctgaaatacttcgtaaaaattgtagatattggtagcctgacccaggctgctgaagtattgcatatcgcacaaccagcgctcagccagcaggttgccatactggaaggtgagttaaatcaacagcttttgattcgcacaaaacggggcgttacgccaacagacgccggaaaaattctctatacccatgcacgggccattttacgtcagtgtgagcaggcccaactggcggtgcataacgttggtcagtcattatcggggcaagtctcgattggctttgcgccaggaaccgctgcgtcatccatcaccatgcccttattacaggcggttcgcgctgaattcccggaggtcgttatctatcttcatgaaaatagtggtgcagtgcttaacgaaaaactgataaatcaccaactcgatatggcggtgatttatgagcattcccctgtggctggggtatccagtcaggctttgctgaaagaagatcttttcctggtaggaactcaagattgcccggggcaaaacgttgatgttaatgctattgcgcaaatgaacctttttctccccagtgattacagcgctgttagacttcgtgttgatgaggctttttccctacggcggctcacggcaaaagtcattggtgaaattgagtctattgccacgcttaccgcagcgattgccagcggcatgggcgttgcagtattacctgaatcggctgcgcgttcgttatgtggcgcagtaaatgggtggatgtcacgcattaccactccttcaatgagtctctctttgtccttaaatttacccgccagagcaaacttgtcaccacaggcacaggcagtgaaagagttgttaatgtcagtgattagttctccagtgatggaaaaaaggcagtggcaattggtgagctaa

SEQ ID NO: 474134 - DNA, 936 bp, Shigella flexneri
atgatgcgtcgtgtaaatattctttgctcatttgctctgctttttgccagccaaaatagcctggcggtaacttatccattacctccagagggtagccgtttagtggggcagtcgcttactgtaactgttcctgatcacaatactcagccgctggagacttttgccgcacaatacgggcaagggttaagtaatatgctggaagcgaatccgggcgctgatgtttttttgccgaagcctggctcacaactcaccattccgcagcaactgattttgcccgccactgttcgtaaagggattgtggttaacgtcgctgaaatgcgtctttattactatccgccagacagtaatacagtggaagtctttcctattggtatcggccaggctgggcgagaaaccccgcgtaactgggtgactaccgttgaacgtaaacaagaagcaccaacctggacgccaacgccgaacacccggcgcgaatatgcgaaacgaggggagagtttgcccgcatttgttcctgcggggcccgataaccccatggggctgtacgcgatttatattggcaggttgtatgccatccacggtaccaatgccaattttggtattgggctccgtgtaagtcagggctgtattcgtctgcgtaatgacgatatcaaatatctgtttgataatgttcctgtaggcactcgtgtacaaattattgatcagccagtgaaatacacaacggaaccggatggttcaaagtggctggaagttcatgagccgctgtcgcgcaatcgtgcagaatatgagtctgaccgaaaagtgccattgccggtaaccccatctttgcgggcgtttatcaacgggcaagaagttgatgtaaatcgcgcaaatgctgcgttgcaacatcgatcgggaatgcctgtgcaaattagttctggttcaagacagatgttttaa

SEQ ID NO: 474135 - DNA, 1080 bp, Shigella flexneri
atgcaaataattgccgatttactgaatacgatcccagccatcaattctgccgctatgtcgcgtgcacaacggcatgttgacgggttattcaaacctgttggtagcctaggaaagctggaggcgcttgccatacaactggcaggaatgccgggggtgaatggcataccgcatgtgggcaaaaaagcggtactggttatgtgtgccgatcacggcgtctgggaggaaggggtcgctatttctccaaaagaagtgacagccatacaggctgaaaatatgacccgtggaacaaccggcgtgtgtgtgctggcagcacaagcgggcgctaacgtccacgtaattgatgttggtattgatactgctgagcctatccccgggcttatcaacatgcgtgtcgcacgaggtagcggcaatattgcttcagctccggcaatgagtcgccgtcaggctgaaaagttgcttttggacgtcatatgttatacgcgggagctggcgaaaaacggtgtcacgctgtttggtgtaggtgaactggggatggcaaacacgacaccggcagcggcaatagtcagcacaatcactggccgggatcctgaagaagtggttgggattggcgcaaacctgccgacagataaactggctaataaaattgatgttgtgcgtcgggcgattacgttgaatcaaccaaatcctcaggatggtgttgatgtcctggcaaaagtgggtggatttgatttggtcggaatagctggagtgatgttaggtgctgcttcctgcggtttacccgtgttgctggatggatttctttcttatgctgctgcgctcgcagcctgccagatgtctcctgcaatcaaaccgtatctcattccttctcacttgtcggcagaaaaaggcgcgcgtatagcgctctcgcatttggggctggagccttatctcaatatggatatgcgtttaggtgaggggagtggtgcagctctggcgatgtccatcatcgaagctgcttgtgcgatatacaacaacatgggcgaacttgctgccagtaatattgttctaccggggaatacgacttctgatttgaacagctaa

SEQ ID NO: 474136 - DNA, 744 bp, Shigella flexneri
atgagcaaattattttgggcgatgctctcatttattacgcgtctgcctgtaccgcgtcgctggtcccagggactggatttcgagcattattctcgcggtattattacttttcctttgattggattattgcttggcgcgattagcgggctggtcttcatggtgctgcaggcatggtgtggcgcaccactggcggcactgtttagcgtacttgtgctggcgctgatgaccggggaattccatctggacggcctcgctgatacctgtgatggcgtattttctgcacgtagtcgcgatcgcatgttggaaatcatgcgtgatagccgtttaggcacccacggcggtctggcattgatttttgtggtactggcaaagattctggtgttaagcgagttggctctgcgtggcgaaccgatccttgcatcgctggcggcagcatgtgcggtcagccgcgggactgccgcattattgatgtatcgtcatcgttatgcgcgggaagaagggcttggcaatgtgttcattggcaaaattgatgggcgacaaacctgcgtcacactcggcttagccgctatttttgctgccgtattattgctgggtatgcatggtgtggctgctatggtggtgacgatggtggcgattttcatcctcggtcagcttctcaaacgtacgctgggcgggcaaacgggcgatacgctgggagcagccatagagcttggtgaactggtcttcctgctggcactgctataa

SEQ ID NO: 474137 - DNA, 510 bp, Shigella flexneri
atggtagtgtccgctattgccagtacacctcactcttcacaggttctgtatatcgctacctcgcaaatccttgatgatgagatggctgcacggatagaacatcatcggcaaagccgcccggagcactggcgcacagtggagcgctggcaacatcttgatgaattaattcatgcagacattaacccgaatgaggctgtgttgctggaatgcgttaccacaatggtgactaatctgttgtttgattatggcggcgataaagaccctgatgaatgggattatcaggcgatggaacaggcgattaatgctgagattcagtcgttgattgctgcctgccaacgttgccccgcaaaggttgtattagtgactaacgaagtgggaatggggattgtgccggagagtcgtctggcacgacattttcgtgatattgccgggcgggtaaatcagcagttggccgctgcggcaaatgaagtatggctggtggtttcgggtattggagtaaaaatcaaatga

SEQ ID NO: 474138 - DNA, 195 bp, Shigella flexneri
atgataccggagttaatcatttcaggggaagaagcgaacggcgagttcttgatgctggttccgggaaagatgctgttttgcagcttttgcgtgatgcttatgaagcaagtacgcaaaattgtatcgattggcgaacccttcttctttagagtcatagtgccctttaagattaaggtaatgctgccaacttactga

SEQ ID NO: 474139 - DNA, 2562 bp, Shigella flexneri
atgagtgcaatagaaaatttcgacgcccatacgcccatgatgcagcagtatctcaagctgaaagcccagcatcccgagatcctgctgttttaccggatgggtgatttttatgaactgttttatgacgacgcaaaacgcgcgtcgcaactgctggatatttcactgaccaaacgcggtgcttcggcgggagagccgatcccgatggcggggattccctaccatgcggtggaaaactatctcgccaaactggtgaatcagggagagtccgttgccatctgcgaacaaattggcgatccggcgaccagcaaaggtccggttgagcgcaaagttgtgcgtatcgttacgccaggcaccatcagcgatgaagccctgttacaggagcgtcaggacaacctgctggcggctatctggcaggacagcaaaggtttcggctacgcgacgctggatatcagctccgggcgttttcgcctgagcgaaccggccgaccgcgaaacgatggcggcagagctgcaacgctctaatccggcggaactgctgtatgcagaagatttcgccgagatgtcgctgattgaaggccgtcgcggcctgcgccgtcgcccgctgtgggagtttgaaatcgacaccgcgcgccagcagttgaatctgcaatttggcacccgcgatctggtcggttttggcgtcgagaacgcgccgcgcggactttgtgctgccggttgtctgttgcagtatgcgaaagatacccaacgcacgaccctgccgcatattcgttctatcaccatggaacgtgagcaggacagcatcattatggatgccgcgacacgtcgtaacctggaaattactcagaacctggcgggcggtgcggaaaatacgctggcttctgtgctcgactgcaccgtcacgccgatgggtagtcgtatgctgaaacgctggctgcatatgccagtgcgcgatacccgcgtgttgcttgagcgccagcaaactattggcgcattgcaggatttcaccgccgagttgcagccggtactgcgtcaggtcggcgacctggaacgtattctggcacgtctggctttacgaactgctcgcccacgcgatctggcccgtatgcgccacgctttccagcaactgccggagctgcgtgcgcagttagaaactgtcgatagtgcaccggtacaggcgctacgtgagaagatgggcgagtttgccgagctgcgcgatctgctggagcgagcaatcatcgacacaccgccggtgctggtacgcgacggtggtgttatcgcatcgggctataacgaagagctggatgagtggcgcgcgctggctgacggcgcgaccgattatctggagcgtctggaagtccgcgagcgtgaacgtaccggcctggacacgctaaaagttggctttaatgcggtgcacggctactacattcaaatcagccgtgggcaaagccatctggcacccatcaactacatgcgtcgccagacgctgaaaaacgccgagcgctacatcattccagagctaaaagagtacgaagataaagttctcacctcaaaaggcaaagcactggcactggaaaaacagctttatgaagagctgttcgacctgctgttgccgcatctggaagcgttgcaacagagcgcgagcgcgctggcggaactcgacgtgctggttaacctggcggaacgggcctataccctgaactacacctgcccgaccttcattgataaaccgggcattcgcattaccgaaggtcgccatccggtagttgaacaagtactgaatgagccatttatcgctaacccgctgaatctgtcgccgcagcgccgtatgttgattattaccggcccgaacatgggcggtaaaagtacctatatgcgccagaccgcactgattgcgctgatggcctacatcggcagctatgtaccggcacaaaaagtcgagattggacctatcgatcgcatctttacccgcgtaggcgcggcagatgacctggcttccgggcgctcaacctttatggtggagatgactgaaaccgccaatattttacataacgccaccgaatacagtctggtgttaatggatgagatcgggcgtggaacgtccacctacgatggtctgtcgctggcgtgggcgtgcgcagaaaatctggcgaataagattaaggcattgacgctgtttgccacccactatttcgagctgacccagctaccggagaaaatggaaggcgtcgccaacgtacatctcgatgcgctggagcacggcgacactatcgcctttatgcacagcgtgcaggacggcgcggcgagcaaaagctacggtctggcggttgctgctctggcgggcgtaccgaaagaggttattaagcgcgcacggcaaaaactgcgtgagctggaaagcatttcgccgaacgccgccgcgacgcaagtggatggtacgcagatgtctttgctgtcagtgccagaagaaacttcgcctgcggtcgaagcactggaaaatctcgacccggattcactgactccgcgtcaggcgctggagtggatttatcgcttgaagagtctggtgtaa

SEQ ID NO: 474140 - DNA, 339 bp, Shigella flexneri
atgccatctacacgctaccaaaaaatcaatgcccatcactatcgccatatatgggtcgttggtgatattcatggtgaatatcagttattacaatcccgcttacatcaactctcttttttccccgaaaccgacttacttatttctgtcggcgataatattgatcgtgggccggagagtcttgacgtcctgcgcctgctaaaccagccctggtttatctccgttaaaggcaaccacgaagcaatggcgctggatgcgttcgcgaccggcgatggcaatatgtggcttgccagcggtggtgactggtttttcgatttaaatgattgcaacaagaggcaatag

SEQ ID NO: 474141 - DNA, 309 bp, Shigella flexneri
ttgctgaaattccatcaccttccacatattattgaaatcactaacgacataataaaatatgtcatcgcacatgcagattatccgggtgatgaatatctctttggcaaagaaatagcggagagcgaattactctggcctgtttatcgtgtgcagaaatcgcttaatggcgagttacaacaaataaacggcgctgattattttatatttggacatatgatgtttgataacattcagacgttcgctaaccagatttatattgataccggattgccgaaaagtgggcggctgtcattttataaaataaggtag

SEQ ID NO: 474142 - DNA, 768 bp, Shigella flexneri
ttgatacccgtagagcgtcgccaaatcatccttgagatggtagctgaaaaaggcattgtcagtattgctgaactaacggacagaattaatgtgtcacatatgaccattcgtcgggatttacaaaaactggagcagcagggagccgttgtgctggtgtccggaggcgtccagtctccgggacgcgtggcgcatgaaccttctcatcaggtaaaaactgcgctggcaatgacgcaaaaagcggctattggcaagctggcggcaagtcttgttctgccgggaagttgtatctatctggatgcgggaacgaccacgttagcgatagcacagcatctgattcacatggagtcactgactgtggtcacaaacgatttcgttattgcgaactacttgctcgacaacagtaattgcacaattattcacactggcggtgcagtgtgtcgggaaaaccgttcctgtgtcggggaagccgctgcgaccatgctgtgcagcctgatgattgatcaggcttttatttctgcatcgtcatggagtgtgcgggggatttctacgccagcggaagataaagtcacggtgaaacgggcgattgccagtgccagccgccagcgagttttggtctgtgatgcgacgaaatatggtcaggtggcgacatggctggcgttaccattaagcgagtttgatcagattattacagacgacggtttgccggagagtgccagtcgcgcgctggcgaagcaggatctctctttgctggtagcgaaaaatgaataa

SEQ ID NO: 474143 - DNA, 909 bp, Shigella flexneri
atgaaaacgggatctgagtttcatgtcggtatcgttggcttagggtcaatgggaatgggagcagcactgtcatgtgtccgcgcaggtttttctacctggggcgcagacctgaacagcaatgcctgcgctacgttgaaagaggcaggtgcttgcggggtttctgataacgccgcgacgtttgccgaaaaactggacgctctgctggtgctggtggtcaatgcggcccaggttaaacaggtgctgtttggtgaaacaggcgttgcacaacatctgaaacccggtacggcagtaatggtttcttccactatcgctagtgctgatgcgcaagaaattgctaccgctctggctggattcgatctggaaatgctggatgcgccagtttctggtggtgcagtaaaagccgctaacggtgaaatgactgtcatggcctccggtagcgatattgcctttgaacgactggcacccgtgctggaagccgttgccggaaaagtttatcgcataggtgcagaaccgggactaggttcgaccgtaaaaattattcaccagttgttagcgggcgtacatattgctgccggagccgaagcgatggcacttgcagcccgtgcggggatcccgctggatgtgatgtatgacgtcgtgaccaatgccgccggaaattcctggatgttcgaaaaccggatgcgtcatgtggtggatggcgattacaccccgcattcagccgtcgatatttttgttaaggatcttggtctggttgccgatacagccaaagccctgcacttcccgctgccattggcctcaacagcattgaatatgttcaccagcgccagtaacgcgggttacgggaaagaagacgatagcgcagttatcaagattttctctggcatcactctaccgggagcgaaatcatga

SEQ ID NO: 474144 - DNA, 234 bp, Shigella flexneri
atgatcaagattggcgttatcgccgatgattttaccggcgcgacggatatcgccagttttctggtggaaaacggtctaccaacggtacaaattaacggtgttccaacaggtaaaatgccggaagcaatcgacgcactggtgatcagcctgaaaacgcgctcctgtccggtggttgaagccacacagcaatcgctggcggctctgagctggttgcaacagcatgaggtagcctga

SEQ ID NO: 474145 - DNA, 786 bp, Shigella flexneri
atgaaatcggtacgttaccttatcggcatcttcgcgtttattgcctgctattacctgttaccgatcagcacgcgtctgctctggcaacccgatgaaacgcgttatgcggaaatcagtcgagaaatgctggcatccggcgactggattgtgccccatctgttagggctacgttatttcgaaaaacccattgccggatactggattaacagcattgggcaatggctatttggcgcgaataactttggtgtgcgggcaggcgttatctttgcgaccctgttaactgccgcgctggtgacctggtttactctgcgcttatggcgcgataaacgtctggctctactcgccacagtaatttatctctcattgtttattgtctatgccatcggcacttatgccgtgctcgatccgtttattgcattctggctggtggcgggaatgtgcagcttctggctggcaatgcaggcacagacgtggaaaggcaaaagcgcaggatttttactgctgggaatcacctgcggcatgggggtgatgaccaaaggttttctcgcccttgccgtgccggtattaagcgtgctgccatgggtagcgacgcaaaaacgctggaaagatctctttatttacggctggctggcggttatcagttgcgtactgacggttctcccctggggactggcgatagcgcagcgggagcctgacttctggcactattttttctgggttgagcatattcaacgctttgcactgagagatcccctcataatttccccaaagcgtaaccatgtgtga

SEQ ID NO: 474146 - DNA, 891 bp, Shigella flexneri
atgaccaaagtaggcttacgcattgatgtcgatacctttcgtggcacccgtgaaggcgtgccgcgtctgctggaaatcttgagtaagcataatattcaggccagcatttttttcagcgtcggcccggacaatatgggccgccatctctggcgactggtgaagccacagtttttgtggaagatgctgcgctcaaacgcggcatcgctttatggctgggatattttactggcaggtacggcctggccaggtaaagagattggtcatgccaatgccgatatcattcgtgaagcggctaaacatcacgaagtcggtctgcacgcctgggatcaccatgcctggcaagcccgtagcggtaactgggatcggcaaacaatgatcgacgatattgcacgcggtcttcgcactctggaagagattatcggtcaaccggtaacctgttctgccgctgcgggctggcgtgccgaccagaaggtgatcgaagcaaaagaagcgttccatttgcgctacaacagcgattgtcgtggggccataccgttccgtccactgcttgaatcaggaaaccctggcactgcgcaaattccggtgaccttacccacctgggatgaagtgattggtcgggatgtgaaagcagaagattttaacggttggttactcaaccgcatcctgcgagataaaggcacgccggtttataccattcatgcagaagttgaaggctgcgcttatcagcataattttgtggatctcctcaaacgcgcagctcaggaaggcgtgacattttgccctttaagcgaactgttatcagagacgttgccgctcggacaagttgttcgcggaaatattgccggacgtgaaggctggctgggttgccaacaaattgcgggtagtcgctga

SEQ ID NO: 474147 - DNA, 1983 bp, Shigella flexneri
atgaaaaccgtcgtttttgcctaccacgatatgggatgcctcggtattgaagctctgctggctgccggttacgaaattagcgccatttttacccataccgataatcccggtgaaaaagccttttatggttcggtggctcatctggcggcggaaagagacattccggtttatgcgccggataacgttaatcatccgctgtgggtggaacgcattgcccaactgtcaccagaggtgattttctctttttattatcgccatcttatttgcgacgagatttttcagctcgctcccgcaggtgcatttaatctgcacggttcgctgttaccaaaatatcgtggtcgcgcgccgctgaactgggtgctggtgaacggtgaaacggaaacgggcgttacattgcaccgaatggtaaaacgtgccgatgctggggccattgtggcgcaactgcgcgttgccattgcgccagacgatatcgctattacgctgcatcataaattgtgccatgccgcgcgccagctactggaacagacattacccgccattaaacacggtaatattctggaaatcgcccagcgcgaaaacgaagccacctgttttggtcgcagaacgccggatgacagtttccttgaatggcataaaccggcatccgtactgcacaacatggtacgtgccgttgccgatccgtggccgggtgccttcagctatgttggcaatcagaaattcaccgtctggtcgtcgcgtgttcatcctcatgccagcaaagcacagccggggagcgtgatttctgttgcgccactgctgattgcctgtggcgatggcgcgctggaaatcgtcaccggacaggcgggcgacggcattactatgcagggctcgcaattagcgcagatgctgggcctggtgcaaggttcacgcttgaatagccagcctgcctgcaccgcccgacgccgtacccgggtactcatcctcggggtgaatggctttattggcaaccatctgacagaacgcctgctgcgcgaagatcattatgaagtttacggtctggatattggcagcgatgcgataagccgttttctgaatcatccacattttcactttgtcgaaggcgatatcagtattcattccgaatggattgagtatcacgtcaaaaaatgtgatgtcgtcttgccgctggtggcgatagccacgccgattgaatatacccgcaacccgctgcgcgtatttgaactcgattttgaagagaatctgcgcattatccgctactgcgttaagtaccgtaagcgaatcatcttcccgtcaacttcagaagtttatgggatgtgtagcgataaatacttcgatgaggaccattctaatttaatcgtcggcccggtgaataaaccacgctggatttattcggtgtcaaaacaattacttgatcgggtgatctgggcctatggcgaaaaagagggtttacagttcaccctcttcctcccgtttaactggatgggaccacgactggataaccttaatgcagcgcgaattggcagctcccgcgctattacgcaactcattctcaatctggtagaaggttcaccaattaagctaattgatggcggaaaacaaaaacgctgctttactgatatccgggacggtatcgaggcgttgtaccgcattatcgaaaatgcgggaaatcgctgcgacggcgaaattatcaacattggcaatcctgagaacgaagcgagcattgaggaactgggcgagatgctgctggcgagcttcgaaaaacatccgctgcgccatcatttcccaccgtttgcgggctttcgcgttgtcgaaagtagctgctactacggcaaaggatatcaggacgtagagcatcgtaaaccgagcatccgcaatgcccaccgctgcctggactgggagccgaaaattgatatgcaggaaaccatcgacgaaacgctggatttcttcctgcgcaccgttgatcttacggataaaccatcatga

SEQ ID NO: 474148 - DNA, 969 bp, Shigella flexneri
atgtttgaaatccaccctgttaagaaagtctcggtggttattcccgtttataacgagcaggaaagcttaccggaattaatcaggcgcaccaccacagcctgtgaatcgttggggaaagagtatgagatcctgctgattgatgacggcagtagcgataattccgcgcatatgctggtcgaagcctcacaagcggagaacagccatattgtgtctattttgattaaccgcaattacgggcaacattcagcgattatggcgggattcagtcacgttactggcgacttaattattacccttgatgccgatctccagaatccgccagaagaaatcccccgcctggtggcaaaagccgatgaaggttacgacgtggtagggactgtacgccagaaccgccaggacagctggtttcgtaaaacagcttcgaagatgattaaccggcttattcagcgcaccactggcaaagcgatgggtgactacggttgtatgctgcgcgcctatcgccgtcatattgtcgatgcgatgttgcactgccatgaacgcagcacctttatcccgattctggcgaatatcttcgcccgccgtgcaattgaaattccagtacatcatgccgagcgtgagtttggtgaatccaaatacagttttatgcgcctgattaatttgatgtacgacctggtgacctgccttaccacaacgccgctacgtatgctgagtctgctcggcagcattattgcgattggaggttttagcattgcggtgctgctggtgattttacgcctgaccttcggaccacaatgggcggcagaaggcgtctttatgctatttgccgtgctgtttacttttattggcgctcagtttatcggcatgggattactcggtgaatatatcggcaggatctacaccgatgtccgcgcccgcccccgctattttgttcagcaagttatccgtccatccagcaaggaaaatgaataa

SEQ ID NO: 474149 - DNA, 1158 bp, Shigella flexneri
atggcggaaggaaaagcaatgtcagaatttttgcctttttcgcgaccagcaatgggcgtggaggaactcgctgcagttaaagaggttctcgaatccggttggatcacaaccggtccgaagaatcaggcgcttgagcaagccttttgccagttgacgggaaatcagcatgccatcgcggtcagttcagccaccgccggaatgcatatcacgctaatggcgttggaaattggcaagggcgatgaagtgattacgccttccctgacctgggtttcaaccctcaatatgatttccttgctgggtgcaacgccggtaatggtggatgtcgaccgcgatacgctgatggtcacgcctgaagcgatcgaatcagccattacgccacgcactaaagccatcattccggtgcattatgccggtgcgccagcagatattgacgccattcgcgccattggcgaacgttacggcatcgcagttatcgaagatgctgcccatgccgtcggtacgtattacaaagggcgacatattggcgcaaaaggtaccgctattttttcatttcatgccattaaaaatattacctgtgctgaaggtggcctgattgtaactgataatgaaaaccttgcccgccagctacggatgctgaaatttcacggtctgggtgtcgatgcctatgacagacaaacctggggccgtgcaccgcaggctgaagtcttaacaccgggctataagtacaatctgaccgatattaacgccgcgattgccctgacacagttagtcaaattagagcacctcaacacccgtcggcgcgaaattgcccagcaatatcagcaagcactggcagctctcccctttcagccattaagccttcccgcctggccgcacgttcacgcctggcatctgtttattattcgtgtcgatgaacaacgttgtggtatcagtcgcgatgcgttgatggaagcgttaaaagaaagaggcattggtaccgggttacatttccgcgccgctcacacacaaaaatattatcgcgagcgttttcccacgctgtcgttaccgaataccgaatggaatagcgaacgcatctgttcgttgccgctgttcccggatatgactaccgccgatgccgaccgcgtcatcacagcccttcagcaactcgcaggacaataa

SEQ ID NO: 474150 - DNA, 267 bp, Shigella flexneri
atggtgaggtacttcgggttccttgccaaccgggtgtgtggagagaagctgctgcaggtgtaccgtgctctggggatggataaaccggaaccagtggcgaaagtgtgctatgcacaaatggtgaaacagttcctgagtcgtgacccgttcgaatgcgtgctgtgtggcggccggatggtataccgccgggccatcgcgggactgaatgtggaggggctgaagaaaaacgcgcgggatatcagtctgctgaggtatatgccggcctga

SEQ ID NO: 474151 - DNA, 648 bp, Shigella flexneri
atgataatttctaaaaaacagcttattggggtggtagcgatcggtattcttttgactggcgttgtcttttttatctggagggtaagcaaaggaagatttatacagacgacggatgatgcttacattggtggtaatatcaccacggtggcaagtaaagtttctggttatatttctgctatagaggtgcgcgataatcagagcgtaaaaaaaggcgatattatcctgcgtctcgatgatcgggattatcgtgcaaatgtcgccaggcttgaggcaaaaataaaaagtagcaaagccaatctcgaaggcattcaagccactattacgatgcagcagtcgataattcaaagtgccagtgaaacatggcaggcagtaaaacatgaggagcaaaagcgcctgcgagatactgaacgttatgaaaaactcgcacaatcagcggcaatatcgcaacaaattattgataacgccaggtttgactaccagcaggtcgcagcaaaggagcgcaaagccgcgaacgatttcctggtggagaagcaacggctggcagttttatctgctcaggaagaaaacgtacgtgcgagtatcgaagaagttcaggccgctttgactcaggcactactggatctggaatatacccttgttcacgtatag

SEQ ID NO: 474152 - DNA, 816 bp, Shigella flexneri
atgacaattacactgcaacccaaagcatcaccagggcatcacattatcggactggattcggaacatctgaatggaggtacagttccctggcataaacatctctatgcccagttgctttacccggctgaaggagtcgttcgtgtatgggctggagaaagcgtctggctagtccatgccagcagcgcgctttggctgcccccacaaatgccgcataagtttgttgcgacaggcaacgtacttttaaaaaccgtactggtttcagaagcggaaagtgaaacgctgggaacagtttgcttcatgacgggtatttcacccctgttaagggaattactaattgcaattaaccaacttccaccgtcgcaaagtaccacagataaacaacagttacgtttttcagccctcgagacactgatacttcaggaaataaaaatgggggtgaaaatgtcacttgaactcccttggccaaatgatgagcggctacagcagctttgtgagaatttgctaaacaaccaagggtatctgccaacactggataatctagcggataaaattaacgtcagtagccgtacactcatgcgcttatttgttaaagagacgggattaacatttcgccactgggttcagcaaatgcacgttatttctgcagtgacgcttcttgatgatggatattcgttgaccaaaattgcccatcgtctgggctatgcctcagctgaatcgttcggcaatatgtttaagcgtcgaacgggctactcgcccggtaaatttactcgtcgattaacgatgcataattatgcaatcacaagacaaatgatttaa

SEQ ID NO: 474153 - DNA, 516 bp, Shigella flexneri
atgctgagattacttgaagaaaaaattgccacgccactgggtccactgtgggtgatttgcgatgagcaatttcgcctgcgggcggttgaatgggaagagtacagcgaacgcatggtgcagctgctggacatccattatcgcaaagaaggctatgagcgcatttctgccaccaacccaggtggtttaagcgacaagcttcgtgaatattttgccggtaatcttagcattattgatacgcttcccactgccacgggggggacgccatttcagcgcgaagtctggaaaacactacgcactatcccctgcgggcaggtaatgcattacggccaactggctgaacaattgggccgccctggcgcggcgcgtgccgttggtgcggcaaacggatcgaatcccatcagcatcgtcgtaccttgccatcgggttattggccgaaacggcaccatgaccggatatgcaggcggagttcagcgaaaagagtggttattgcgccacgaaggttatcttttgctgtaa

SEQ ID NO: 474154 - DNA, 753 bp, Shigella flexneri
atgatcccggaaaagcgaattatacggcgcattcagtctggcggttgtgctatccattgccaggattgcagcatcagccagctttgcatcccgttcacactcaacgaacatgagcttgatcagcttgataatatcattgagcggaagaagcctattcagaaaggccagacgctgtttaaggctggtgatgaacttaaatcgctttatgccatccgctccggtacgattaaaagttatacaatcactgagcaaggcgacgagcaaatcactggtttccatttagcaggcgacctagtgggatttgacgccatcggcagcggccatcacccgagcttcgctcaggcgctggaaacctcgatggtatgtgaaattccgttcgaaacgctggacgatttgtccggtaaaatgccgaatctgcgtcagcagatgatgcgtctgatgagcggtgaaatcaaaggcgatcaggacatgatcttgctgttgtcgaagaaaaatgccgaggaacgtctggctgcattcatctacaacctgtcccgtcgttttgcccaacgcggcttctcccctcgtgaattccgcctgacgatgactcgtggcgatattggtaactatctgggcctgacggtagaaaccatcagccgtctgctgggtcgcttccagaaaagcggtatgctggcagtcaaaggtaaatacatcaccatcgaaaataacgatgcgctggcccagcttgctggtcatacgcgtaacgttgcctga

SEQ ID NO: 474155 - DNA, 951 bp, Shigella flexneri
atggctatgtatcagaacatgctcgttgttatcgatcctaaccaggacgaccaaccagcattgcggcgagctgtttatttacatcaacggattggtggcaaaattaaagcctttttgccgatctatgacttctcatacgaaatgaccaccctgctctccccggacgaacgtaccgctatgcgtcagggcgtcatcagccagcgtacagcctggatccacgagcaggcaaaatattatctcaatgctggcgttcccattgaaattaaagtggtctggcataaccgtcctttcgaagccatcattcaggaagtgatcagcggcggacacgatttggtgctaaaaatggcgcaccaacatgaccgtctggaagcggtgatttttacgccaacggactggcatctgttacgcaaatgcccaagcccggtgtggatggtgaaagaccagccgtggccggaaggaggcaaggcgctggtggcggtgaatctcgccagtgaagagccgtatcataatgcgctcaatgaaaaactggtcaaagagacgatcgaactggcagaacaagtcaaccataccgaagttcatctggttggcgcttatccggtaacgccaattaatatcgcgattgaactgccggaatttgacccgagcgtttataacgatgccattcgtgggcaacatttgctggcaatgaaagccctgcggcagaaattcggcattaatgaaaacatgacgcacgtagaaaaaggtctgcccgaagaggtgattcctgatttggcggagcatttacaggcgggaattgtggttctgggcacggtcggacgcaccggtatttcagcagcattcctcggcaacacggcggaacaggtgattgatcatcttcgctgcgacctgctggtcattaaacctgaccagtatcagacacccgttgaactggatgacgaagaagacgattaa

SEQ ID NO: 474156 - DNA, 168 bp, Shigella flexneri
atgattatggcgaaactgaagtcagcgaaagggaagaaatttctctttggtttgttggcggttttcattattgcggcgtcggttgtgactcgcgcgaccatcggcggcgttatagaacagtacaatattccgctgtctgagtggacgacatcaatgtatgtgatttag

SEQ ID NO: 474157 - DNA, 3903 bp, Shigella flexneri
atgacagaacaacaaaaattgacctttactgccttgcaacagcggctggattcgctgatgctgcgcgacagactgcgtttttctcgccgtctgcattgtgttaagaaggttaaaaatcctgatgcacaacaggccattttccaggagatggcgaaagagattgaccaggcggcagggaaagtcctgctgcgtgaagcggcacgaccggaaatcacttatcctgacaatttaccggttagtcagaaaaaacaggatatactcgaagcgattcgtgatcaccaggtggtgatcgtcgccggggaaaccggctccggtaaaacgactcagctaccgaaaatctgtatggagctggggcgcggtattaaagggctgatcggtcatacccagccgcgtcgcctggcggcacgaacggtggccaaccgtattgcggaagagctgaaaacggagccgggcggttgcatcggttacaaagtgcgtttcagcgatcacgtaagtgataacacgatggtcaagctgatgaccgacgggatcctgctggcggagatccagcaagaccgcctgctgatgcagtacgacaccatcattattgacgaagcgcacgaacgcagcctgaatatcgattttctgctcggctatttgaaagagttgctgccgcggcgtcctgacctaaaaatcattatcacttccgcgactatcgacccggaacgcttttcgcgccactttaataatgcgccgattattgaagtctccggtcggacctatccggtggaagtgcgctatcgcccgattgttgaagaagccgatgacaccgagcgcgatcagttgcaggcgatttttgacgccgtagacgaactaagccaggaaagccccggcgacattctgatctttatgagcggcgagcgggaaattcgcgataccgccgatgcgctgaacaagctgaacttacgccataccgaaatcttgccgctttatgcgcggctttcgaacagcgaacagaaccgcgtgttccagtcgcacagcggacggcgcattgtgctggcgaccaacgtcgcggaaacctcgctgaccgtaccggggattaaatacgtcatcgaccccggtacagcgcgtatcagccgctacagctatcgcaccaaagtgcagcgtttgccgattgaacccatttcgcaggcgtctgccaatcagcgtaaaggccgctgtggtcgtgtgtccgaagggatctgtattcgtctctattccgaagacgatttcctctcgcgcccggagtttaccgatccggagattctgcgtaccaacctggcctcggttattttgcagatgaccgcgctggggctgggcgatatcgctgcgttcccgtttgtcgaagcaccggataaacgcaatatccaggatggcgtgcgtctgctcgaagaactgggcgcgatcaccacggatgaacaggccagcgcctataaactgacgccgctcggtcgccagctctcgcagttgcctgtcgacccacgtctggcgcgtatggtgctggaagcgcaaaaacatggctgcgtgcgtgaggcgatgattatcacgtccgcgctctccatccaggatccgcgcgaacgtccgatggacaaacagcaggcatcggacgaaaaacatcgtcgcttccacgacaaagaatccgacttcctcgcgtttgtaaatctgtggaattatcttggcgagcagcaaaaggcgctttcttccaacgccttccgtcgcctgtgtcgtaccgattacctcaactatctgcgcgtgcgcgaatggcaggatatctacacccagttgcgccaggtggtgaaagaacttggcattccggtcaacagcgaaccggcggagtatcgtgaaattcacatcgccttactgaccggtttgctttcccatatcggcatgaaagatgccgataaacaggaatataccggtgcacgtaacgcgcgtttctccatcttccccggttctggtttattcaaaaagccgccgaaatgggtaatggtggcggaactggtagaaaccagccgcctgtgggggcgcattgctgcgcgtatcgacccggaatgggtagaacccgttgctcagcatttgattaaacgcacctacagcgaaccgcactgggaacgggcgcagggcgcggtgatggcaacggaaaaagtcactgtttatggtttgccgattgttgctgcgcgcaaggtcaactacagccagatcgattcggcgttatgtcgtgaactctttattcgccacgctctggtggaaggtgactggcagacgcgtcacgcattcttccgtgaaaacctgaaactgcgggccgaagtggaagagctggaacacaaatcacgtcgccgcgatattctggttgatgacgaaacgctgtttgagttctacgaccagcgcatcagccacgatgtaatctccgctcgtcacttcgatagctggtggaaaaaagtcagccgcgaaacgcctgatttgctcaactttgaaaagagcatgttgatcaaagaaggggcggaaaaaatcagcaagctggattacccgaacttctggcatcagggcaatctcaagctgcgtttgagctatcagtttgagccaggcgcggacgcggacggtgtgaccgtacatattccgctgccgttacttaaccaggttgaggaaagcgggtttgaatggcagatccccggtctgcgccgcgaattggtgattgctctgattaaatcgttgccgaaaccggtacgccgtaattttgtgcctgcaccaaactacgccgaagcgtttttaggccgcgtcacaccgctggagttaccgttgctcgacagccttgagcgcgagttacggcggatgaccggcgttaccgttgaccgcgaagactggcactgggatcaggtgcccgatcacctgaaaatcaccttccgcgtggtggatgacaaaaacaagaagctaaaagaagggcgctcgctacaagatctgaaagatgcgctgaaaggcaaagtgcaggaaacgctgtccgcggtggcggatgacggtatcgagcagagcggcttacatatctggagttttggtcagctgccggaaagttacgaacagaagcgtggcaactataaagtgaaggcgtggccggcgctggtggatgaacgcgacagcgtgacgatcaaactgtttgataacccgctggagcaaaaacaggcaatgtggaatggtcttcgccgtctactgctgctaaatatttcctcgccgatcaagtatttacatgagaagttaccaaacaaagccaagctggggctgtactttaacccgtatggcaaagtgctggagctgatcgacgactgtatctcctgcggtgtggatcaactgatcgacgccaatggtggcccggtctggacggaagaaggctttgctgcgctgcatgaaaaagtgcgcgccgaactgaatgacacggtggtggatattgcgaagcaggtcgagcaaatcctcactgcggtgttcaatatcaacaaacgtctgaaagggcgggtggatatgaccatggcactggggctttctgatattaaagcgcagatgggcgggttggtatatcgcggttttgtcactggtaacggcttcaaacggctgggcgacacgctgcgatatttgcaggcgattgaaaaacgactggaaaaactggcggttgatccacatcgcgatcgtgcacagatgctgaaagtcgaaaacgtccagcaggcgtggcagcaatggatcaacaaactgccgcctgcacgtcgtgaggatgaagacgtgaaagagatccgttggatgatagaagagctgcgcgttagttacttcgctcaacaacttggtacgccttatccgatttcagataagcgtattttgcaggcgatggagcagattagcggttaa

SEQ ID NO: 474158 - DNA, 606 bp, Shigella flexneri
atgagcaaggtattagttcttaaatccagcatcctggcagggtactctcagtctaatcagttgtccgattattttgttgaacaatggagcgaaaagcactccgctgatgaaatcaccgttcgcgacctagctgcaaatccgattccggtactggatggcgaactggttggcgctctgcgtccgagcgatgcgccgctgactccgcgtcagcaggaagctctggcgctttccgatgagctgattgccgagctgaaagcccacgacgttatcgttattgcggcaccgatgtataacttcaacatctcaactcagttgaaaaactattttgacctggttgcacgcgcaggcgttactttccgctataccgagaacggtccggaaggtctggtaacgggtaaaaaagccatcgttattaccagccgcggtgggatccacaaagatggaccaacggacctggtgacgccgtatctgtccacgttcctcggctttatcggcattaccgatgtgaaatttgtcttcgccgaagggatcgcatacggtccggaaatggcagcgaaagcacagtctgacgcaaaagcagccatcgacagcattgttgctgcataa

SEQ ID NO: 474159 - DNA, 606 bp, Shigella flexneri
atgatggttcagttatggtggtcagtctggttatgttggccagtattatcgctactcattattggccgtgggtgcggtgggcttggcgcgataacaacagggaaagatagtcaggggaaactcccgcccgccgtttactggctgacattgccctggcgcatcgggatgtggctatctatgcgttggttttgtcgtcgcctggagccggtgagcaaaatgactgctggtgtttatttaagggcgtttccacgacatattccggcacagaatgcggttctggacgtcacctttgaattccctcgtggacgagcgacaaaagatcgactctatttctgtgtaccgatgttggatctggtggttccggaagagggggagctccgacaggccgtggcgatgctggaaacattacgcgaagagcaaggcagcgttctggtccattgcgcattgggattatcgcgcagtgcgctggtagtggcggcatggctgttatgttacggacactgtaaaacagttgatgaagcgattatctttattcgagccagacgctcgcatattgtgcttaaggaagagcacaaagcgatgttgaaattatgggaaaacaggtaa

SEQ ID NO: 474160 - DNA, 750 bp, Shigella flexneri
atgcgccatgcggtccatcaggagttaatcgatacgaaccctgcagcaaaccttggcggcgtgaccacacctcctgtcagacggcactatcctgccctgccgctggagcggctgcctgaactgcttgaacgtattggggcatatcatcagggccgtgaactgacccggcatgccgttctgctgatgctgcatgtgttcattcgctccagtgaactgcgtttcgcccgctggtcagagattgatttcacaaaccgagtctggacgatacccgcgacgcgagaacccattattggcgtgcgttattccggccgcggggcaaaaatgcgaatgccgcatatcgtccccctctcagaacagtccatcgccattctgaaacagattaaggatatcaccggtaataatgaactgatcttccccggcgaccataacccgtataagccaatgtgtgaaaacacggtcaataaggcactgcgggtgatgggttacgacacgaaaaaggatatctgcggtcacggcttccgggcaatggcatgcagtgcgctgatggaatcgggtttatgggcaaaggacgcagtagaacgccagatgagtcatcaggagcgcaataccgtgcgcatggcttatattcataaggcagagcacctggaagcccgcaaagcgatgatgcagtggtggtcggattatctggaagcatgccgagaatcttatgcaccgccttatacaattggtaaaaataagtttatcccatag

SEQ ID NO: 474161 - DNA, 798 bp, Shigella flexneri
atgattaagtggccctggaaagtacaagaatcagcacatcaaactgcccttccctggcaggaagcactatcgatcccccttttaacgtgtctgacagaacaggaacaaagcaaattggtcgctcttgccgaacgttttttacagcaaaaacggcttgttcctttacagggctttgagctgaattcattaagaagctgccggatagcacttctattttgcctgcccgttctggagttaggactggaatggctggatggttttcatgaagtcttaatttatcctgcgccatttgtggtcgatgatgaatgggaagacgatatcggtctggtgcataaccaacgtattgttcagtcaggtcagagctggcagcaagggcctatcgttttgaactggttggatatacaagattcttttgatgcttctggttttaacctgattattcatgaagtcgctcataagctggacacccgtaacggcgatcgcgccagcggagttccctttatttcgttgcgtgaggttgctggctgggaacacgatcttcatgctgcaatgaacaacattcaggaagaaatcgaattagttggtgagaatgcggcgagcattgatgcttatgctgccagtgatcctgctgaatgttttgccgtactttctgaatatttctttagcgccccagaactttttgctcctcgtttcccttcattgtggcaacgtttctgtcaattttatcaacaagatcctttgcagagactgcatcacgctaatgatacagactcgttttcagcgacgaatgttcattaa

SEQ ID NO: 474162 - DNA, 846 bp, Shigella flexneri
atgacattcggtcgcttgtgggaaaaattcctcgccagcgcctattacagtgacctcagtccaagaacacaaaaagattatctgcaacatcaaaaaaagttgcttgccgtattcggtaaggtgccggcagattccataaaaccagaacacatccgtcgatacatggacaagagaggggaacagagtaaaacgcaagccaaccatgaaaaaagcagtatgtcccgcgtttacagttgggggtatgagcgagggtacgtgaaggctaacccatgtgcaggtgtaagtaaattcaaggccaaaaaccgcgaacgatatgtaaccgacaaagaataccaggcagtattaagcgttgcacctcttcctgtttttatcgcaatggaaattgcctatctgtgtgcagcgagggtttccgatgtgttatcgctgaaatgggagcagattggaaacgacgggatctttatccagcaagggaaaacaggaaaaaaacagataaaagcatggagtccacgattacaggcggcgatcgaaaaagcaaaacagttaccaacatccgcctatgtaatcagcaatcaatacggcaaccgatatatgtacaaaggctttaacgaaatgtgggtagaagcaagaaatcgcgcaggcaaaatttcaggtattttaaccgacttcacctttcatgatctgaaggcgaaaggaatttcagactatgaaggaagcagtcgggataagcaacttttctctggtcacaaaaccgaggggcaagtgctaatctatgacaggaaggttaaagtttcaccgacacttgatgtcccgttacctgaaaatattccaagaaaatattccaagtaa

SEQ ID NO: 474163 - DNA, 423 bp, Shigella flexneri
atgaaaatgactgaattaacaaaagaacaattaatcgaagaagccaaattaaaaatagcgattacgaaatgccaccccaattcagggatggcgcgagtagagggcgagttattcaaaattgcacgggcatcgctggaagcagagccgatagcgtggcgatatcgctacgtgaaaaaaggtgttatggactctcagggggagttgtgggttggtgactggaaatatgtaccgaaaaaagaggattgtaacgacaggccgaactatgaaattcaggccttattcactgccccaccagtcccggttacatcagaagaactggttaaagctgtgcacttttatgaacaattaaaacgcgaaaatccaccagcatccggcaaccagattaatgggttaactatgtcggttaaacgaccagccaactga

SEQ ID NO: 474164 - DNA, 180 bp, Shigella flexneri; identical to SEQ ID NO: 18953

SEQ ID NO: 474165 - DNA, 213 bp, Shigella flexneri; identical to SEQ ID NO: 461477

SEQ ID NO: 474166 - DNA, 360 bp, Shigella flexneri
atggtggagaagaatggtacgctgtcgaaaaaatccagactgggcgaagcgttcagctatgtactgaatcagtgggatgccctctgttattacagtgatgacggtctggcggaggcggacaataacacagcagaaagagcgcttcgtaccgtctgtctcgggaaaaagaattacatgttcttcggcagcgatcatggaggcgatcgcggagctctgctgtacggactaatcgggagctgtcggttgaacggtatcgatccagaagcgtatctgcgccatatcctgagcgtactgccggaatggccttccaaccgagttgacgaactgctgccatggaacgtagttctcaccgataaataa

SEQ ID NO: 474167 - DNA, 561 bp, Shigella flexneri
ttgccagttgccaaaacgctaagcgaatacgacttcattcagttgccggaactgaatggagctcagttccagcaactctgtgaaacgacagactgggttgatgctggagaaaacgttctgctgttcggggccagcgggttggggaaaagccatctggcggcagcgatcgtggatggcgtagtaggccagggctaccgggcccggttctacagcgcaggagagctgttgcaggaactacgtaaagccagagctcagttgaaactgaatgagctgctactgaaactggatcgctaccgggtgatagtggtggatgatcttggctatgtcaaacgcgacagcgccgaaacgggtgtgctgttcgagttaatagcgcatcgctatgaacgtgggagcctggtgataaccagtaaccatccgttcagcatgtggggcagcatcttcgtggatgagactatggcggtggcggcagcagaccgactgatccatcacggatatatgttcgaactgaaaggggaaagctacaggaaaaagacagcgaaggcagtaacaagcgtgacttga

SEQ ID NO: 474168 - DNA, 4095 bp, Shigella flexneri
atgaacaaaatatattatcttaagtattgccatataaccaaaagcctgattgctgtctccgaactggcccgcagggttacctgcaaaagccatcgcagactttcacgtcgggttattcttacgtctgttgcagctttatcactttcctcggcatggccagctctgtcagcaacggtcagtgcagagatcccttatcagatattccgcgactttgccgagaataaaggtcagtttacgccggggaccacgaatatttccatttacgacaagcagggcaatctggtcggtaaacttgataaagccccgatggctgatttcagtagtgccactattactaccggtagcctgcctccgggagaccatacactttactcccctcagtatgtggttaccgccaaacatgtcagcggttctgacacgatgagcttcggatacgccaaaaacacctatactgcggttggtacaaataataatagcggtcttgatattaaaacccgccgcctgagtaaactggtgacagaggtggcgccggcagaagtgtctgacatcggggctgtgagcggtgcctatcaggccggcggacgctttactgaattctatcgccttgggggggggatgcagtacgtcaaagacaaaaatggtaatcgcacccaagtgtataccaatggcggatttcttgttgggggaaccgtcagcgcgctgaactcctataacaacggacagatgattacagctcagaccggtgacatttttaatcccgcgaatggacctctggctaattatctgaatatgggggacagcggctcccccctgtttgcttatgattccctgcaaaaaaaatgggtactgattggcgtgctttcctcaggaactaactatggaaataactgggtcgtcaccactcaggatttccttggtcagcaaccgcaaaatgattttgacaaaactatagcctacacctctggtgaaggagtactgcagtggaaatatgatgcggctaatggcaccggcacactgactcagggaaacacgacttgggatatgcatggaaagaaaggaaatgatctgaacgcaggaaaaaacctcctgttcaccggcaataatggcgaggtcgttctgcagaattccgttaatcagggagctgggtatctgcagtttgccggcgattacagggtgtccgccctgaacggccagacatggatggggggcgggattatcaccgataaaggaacccacgttctgtggcaggtgaacggagttgccggtgataacctgcataaaactggcgaaggtaccctgacagtaaacgggaccggtgtgaatgcaggcggactcaaggtgggggacggtaccgttattctcaaccagcaggcggatgctgacggaaaggtacaggctttcagctctgttggtattgccagcggtcgtccgacagttgtgctttctgactcacagcaagttaatccggataatatttcgtggggataccgtggaggacgtctggaactgaatggtaataatctgacctttacccgtcttcaggcggctgactacggggccatcattaccaataacagtgagaaaaaatcaacggtaacactcgaccttcagacattaaaagccagtgacatcaatgtaccggttaatactgtcagtatttttggggggagaggagcgccgggagacctatattatgacagttctaccaagcaatatttcatcctgaaagcgagttcatattccccgttcttctccgatctgaacaacagcagtgtctggcagaatgtcggaaaagatcgtaataaagccattgatactgtgaagcaacaaaaaattgaggccagcagccagccttatatgtatcacggccaactaaacggcaatatggatgtgaatattccgcagctctcaggtaaggatgtactggctcttgatggttcagttaacctgccagaaggttcgataaccaagaagtccggcacgctgatattccagggtcatccagttattcatgctggaacgacgacttcttccagccagagcgactgggaaacccgtcagtttacgctggaaaaactgaaactcgatgcggcaacattccatctgtccagaaacggcaagatgcagggagatattaacgccaccaatggaagtacagtcattctgggaagtagccgtgtctttactgacaggagtgacggaaccggtaatgcggtctcctctgttgaagggagtgccactgcaaccacagttggtgaccagagtgattacagcggaaatgttacgctggaaaataaatcatccctgcaaatcatggagagattcaccggtggtattgaggcttatgatagcaccgtgagtgtgacctctcagaatgctgtttttgaccgtgttggcagctttgtcaacagcagcctgaccctcggaaaaggagcaaaacttacggctcagagcggtattttcagcaccggggctgtggatgtaaaagaaaatgcttctctgaccctgacggggatgccttctgcgcagaaacaggggtattactcacccgtaatttctacaacagaagggattaacctcgaagataacgccagcttttctgttaaaaatatgggctatctgagttcggatattcatgcaggaaccactgcggcaaccattaatctgggagacagtgatgctgatgcagggaagacggactctccgttattcagctccttaatgaagggatataacgctgttctgagaggcagtattacgggggcacagagtacggtaaatatgatcaatgctctgtggtactctgacggaaaatcagaggccggtgcactgaaggctaagggctcgcgaattgaactgggggacgggaaacactttgccactttacaagtaaaagagctttctgcagataataccacgttcctgatgcataccaacaacagccgggctgaccagttgaatgtcacagacaaactgtcaggcagtaataatagcgtcctggttgactttttaaacaaaccagccagtgaaatgagcgtgacgttaattaccgcaccgaaagggagtgatgagaaaacgttcactgccggtacgcagcagattggtttcagtaacgttacgccagtaatcagcacggaaaaaacggatgatgccacaaaatgggtgctgacaggatatcagactaccgctgatgccggagcctcgaaagccgcaaaagactttatggcatcaggttataagtccttccttacagaggtcaataacctgaacaaacgtatgggtgacctgcgggatactcagggggatgccggtgtctgggcacgcataatgaatggtaccggttcggcagatggtgactacagcgataactacactcacgttcagattggtgtcgacagaaagcatgagctggacggtgtggatttatttacgggggcattgctgacctatacggacagcaatgcaagcagccacgcattcagtggaaaaaacaaatccgtgggtggcggtctgtatgcctctgcactctttaattccggagcttattttgacctgattggtaaatatctccatcatgataatcagcacacggcgaattttgcctcactgggaacaaaagactacagctctcattcctggtatgccggtgctgaagttggttatcgttaccacctgacgaaagagtcctgggtggagccacagatagagctggtttacggttctgtatcaggaaaagcttttagctgggaagaccggggaatggctctgagcatgaaagacaaggattataacccactgattggccgtactggtgttgacgtgggaagagccttctccggagacgactggaaaatcacagctcgagccgggctgggttatcagttcgacctgctggcgaacggagaaacggttctgcaggatgcttccggagagaaacgtttcgaaggtgaaaaagatagcaggatgctgatgacggtagggatgaatgcggaaattaaggataatatgcgtttgggactggagctggagaaatcagcgttcgggaaatataatgtggataatgcgataaacgccaacttccgttatgttttctga

SEQ ID NO: 474169 - DNA, 252 bp, Shigella flexneri
atggagcagtccgagattctactaatatcaattattaagcatctgttttttagttggtgtaatataatttttattaaggtaagcggaaaaacaaccaaaaaaaacgcaagatgttatttttttatcattttgagccagtttggctggggggatactcttctcttaagcttcttgctcaactttaaaaatagttatgccagttcggtactgagagatcccctcataatttccccaaagcgtaaccatgtgtga

SEQ ID NO: 474170 - DNA, 132 bp, Shigella flexneri
atggcccgttcagctaaatcccgtaaacgtaaacccgcctctcaaagaagcaaacttccccgctatgtcgtgaagcttcacgaagatgatttttttgacgaagaagacgcagaagttctgcgctttgattga

SEQ ID NO: 474171 - DNA, 234 bp, Shigella flexneri
atgggggcggtgaagaattatctaaccttgtcttgttacatccaaattgccatcgacagttacacagttgtgaagccggctctctcaaaaagggcttataaaggcttgagcggtgtaccgggaaaccggtatgcaccgttcttaggggagggcagtccagcaatgaactgtccttacccgacaaacatccaaaacgaacggaacgtgctggaatccgcatataacccgttgtaa

SEQ ID NO: 474172 - DNA, 300 bp, Shigella flexneri; identical to SEQ ID NO: 461106

SEQ ID NO: 474173 - DNA, 1413 bp, Shigella flexneri
atgaatatatcagaaacactgaactcagcaaatacccaatgcaatatagattctatggataacagattacatacattgtttccaaaagtgacatcagtgcgaaacgctgcacaacaaactatgccagatgaaaaaaatttaaaagatagtgcaaatattattaaagatttctttaggaaaactatagcagcacagagttatagtagaatgttctctcaaggctctaactttaaatctttaaatatagcaattgatgcaccatcagacgctaaagcctcatttaaggctattgagcaccttgacagattatcgaagcattatatatctgaaataagggaaaaacttcatcctctttctgcagaggaactcaatttgctttcgctaattattaattctgatttaatcttcagacatcaaagtaattctgatttgtctgataaaattttaaacattaagtcattcaataaaattcagtctgaaggaatatgcacaaaacgaaacacatacgctgatgatataaaaaaaatagctaatcatgactttgtgttttttggcgttgaaatctctaaccatcagaaaaaacaccccctgaatacaaaacatcacactgttgattttggtgcaaatgcgtatatcattgatcatgactctccatatggatatatgacattaaccgatcactttgataatgctattccacctgttttttaccatgagcaccaatcatttttagataaattttcagaggttaataaagaagttagtcgatacgtacatggaagtaaaggaattatagatgtaccaatattcaatactaaagatatgaagttagggctcggattatacctgattgactttattagaaaaagtgaagaccaaagcttcaaggagttttgctatggaaaaaatcttgcccctgtggatctggatagaatcataaactttgtttttcagccagagtaccatatacctaggatggtaagtacagaaaacttcaaaaaagttaagattagagaaatatccttagaggaggctgttacagcatctaattacgaagaaattaacaagcaggtcactaacaaaaaaattgctctccaggctctttttctttcgattactaatcaaaaagaggatgtcgccttatatatattatctaattttgagataactagacaagatgttatttccataaagcatgagttgtatgatattgagtatctacttagcgctcataattcaagctgtaaagtacttgagtattttatcaataagggattggttgatgtaaacacaaagttcaaaaaaactaatagtggggattgtatgttggataacgcaataaaatatgagaatgcagaaatgataaaactattattgaaatatggtgcaacatctgacaataaatatatttaa

SEQ ID NO: 474174 - DNA, 189 bp, Shigella flexneri
atggcaaagattgatgtggtttgtcaccgttactctgaaactcaggggggtatccggaacggccattccagttcaggggggctgctctatcgctgtaagcagtgcctgaagaccttccagttcgactaccgctacaacggggcgaaacccatcaaactttccagctattatcacattgagccatactga

SEQ ID NO: 474175 - DNA, 1698 bp, Shigella flexneri
atgccatcagtaaatttaatcccatcaaggaaaatatgtttgcaaaatatgataaataaagacaacgtctctgttgagacaatccagtctctattgcactcaaaacaattgccatatttttctgacaagcggagttttttattaaatctaaattgccaagttaccgatcactctggaagacttattgtctgtcgacatttagcttcctactggatagcacagtttaacaaaagtagtggtcacgtggattatcatcactttgcttttccggatgaaattaaaaattatgtttcagtgagtgaagaagaaaaggctattaatgtgcctgctattatttattttgttgaaaacggttcatggggagatattattttttatattttcaatgaaatgatttttcattccgaaaaaagcagagcactagaaataagtacatcaaatcacaatatggcattaggcttgaagattaaagaaactaaaaatgggggggattttgtcattcagctttatgatcccaaccatacagcaactcatttacgagcagagtttaacaaatttaacttagctaaaataaaaaaactgactgtagataattttcttgatgaaaaacatcagaaatgttatggtcttatatccgacggtatgtctatatttgtggacagacatactccaacaagcatgtcctccataatcagatggcctgataatttacttcaccccaaagttatttatcacgcgatgcgtatgggattgactgagctaatccaaaaagtaacaagagtcgtacaactatctgacctttcagacaatacgttagaattacttttggcagccaaaaatgacgatggtttgtcaggattgcttttagctttacaaaatgggcattcagatacaatcttagcatacggagaactcttggaaacttctggacttaaccttgataaaacggtagaactactaactgcggaaggaatgggaggacgaatatcgggtttatcccaagcacttcaaaatgggcatgcagaaactatcaaaacatacggaaggcttctcaagaagagagcaataaatatcgaatacaataagctgaaaaatttgctgaccgcttattattatgatgaagtacacagacagatacccggactaatgtttgctcttcaaaatggacatgcagatgctatacgcgcatacggtgagctcattcttagcccccctctcctcaactcagaggatattgtaaatttgctggcctcaaggagatatgacaatgttcccggacttctgttagcattgaataatggacaggctgatgcaatcttagcttatggtgatatcttgaatgaggcaaaacttaacttggataaaaaagcagagctgttagaagcgaaagattctaatggtttatctggattgtttgtagccttgcataatggatgtgtagaaacaattattgcttatgggaaaatacttcacactgcagaccttactccacatcaggcatcaaaattactggcagcagaaggcccaaatggggtatctggattaattatagcttttcaaaataggaattttgaggcaataaaaacttatatgggaataataaaaaatgaaaatattacacctgaagaaatagcagaacacttggacaaaaaaaatggaagtgattttctagaaattatgaagaatataaaaagctga

SEQ ID NO: 474176 - DNA, 123 bp, Shigella flexneri; identical to SEQ ID NO: 461109

SEQ ID NO: 474177 - DNA, 273 bp, Shigella flexneri; identical to SEQ ID NO: 461110

SEQ ID NO: 474178 - DNA, 738 bp, Shigella flexneri
atgacgcgcatgaaatatctggtggcagccgccacactaagcctgtttttggcgggttgctcggggtcaaaggaagaagtacctgataatccgccaaatgaaatttacgcgactgcacaacaaaagctgcaggacggtaactggagacaggcaataacgcaactggaagcgttagataatcgctatccgtttggtccgtattcgcagcaggtgcagctggatctcatctacgcctactataaaaacgccgatttgccgttagcgcaggctgccatcgatcgttttattcgccttaacccgacccatccgaatatcgattatgtcatgtacatgcgtggcctgaccaatatggcgctggatgacagtgcgctgcaagggttctttggcgttgaccgtagcgatcgcgatcctcaacatgcacgagctgcgtttagtgacttttccaaactggtgcgcggctatccgaacagtcagtacactaccgatgccaccaaacgtctggtattcctgaaagatcgtctggcgaaatatgaatactccgtggccgagtactatacagaacgtggcgcatgggttgccgtcgttaaccgcatagaaggcatgttgcgcgactacccggatacccaggctacgcgtgatgcgctgccgctgatggaaaatgcataccgtcagatgcagatgaatgcgcaagctgaaaaagtagcgaaaatcatcgccgcaaacagcagcaatacataa

SEQ ID NO: 474179 - DNA, 981 bp, Shigella flexneri
atggcacaacgagtacagctcactgcaacggtgtccgaaaaccaactcggtcaacgcttagatcaggctttggccgaaatgttcccggattattcacgttcgcgaataaaagaatggatcctcgaccagcgcgtgctggtaaacggcaaagtttgtgataagccgaaagaaaaagtattgggtggcgagcaggttgccatcaacgctgagattgaagaagaagcgcgttttgaaccgcaggatatccctctggatatcgtctatgaagatgaagatatcatcgtcattaataaaccgcgcgacctagtggtacatcctggcgcgggtaacccggatggcacggtactgaatgcgttgcttcattactatccgcccattgccgatgtaccacgtgcgggcatcgtccatcgtctggataaagacaccactggcctgatggttgtggcaaaaaccgttccggctcagacgcgtttagtcgaatctttgcaacggcgtgaaattactcgtgagtatgaagcggtggcgattggtcatatgaccgctggcggtacagtagatgaacccatcagccgccacccgaccaaacgtactcacatggcggtgcatccgatgggcaaaccggcggtgactcactatcgcatcatggaacacttccgtgtgcacacgcgtctgcggttgcgtctggaaactggacgtacgcaccagatccgcgtgcatatggcccatatcactcatccgctggtgggcgatccggtttatggtggccgtccgcgtccgccaaaaggtgcttcggaagcatttatctccacgctgcgtaagtttgaccgccaggcgcttcatgcaaccatgctgcgtctttatcacccgatctccggcatcgaaatggaatggcatgcgcctattccacaagatatggtggagctgattgaggtgatgcgcgccgatttcgaagagcataaggatgaagtggactggttatga

SEQ ID NO: 474180 - DNA, 732 bp, Shigella flexneri
atgagtaagctgattgtcccgcagtggccgctgccaaaaggtgttgcggcctgtagctccactcgtatcggcggcgtgagcttgcccccgtatgactcactcaacctcggtgcccattgtggcgataacccggatcacgttgaggagaatcgcaagcgactttttgctgcgggcaatttgccttctaaaccggtctggcttgagcaggtacacggcaaagatgtgcttaagcttactggcgaaccttatgcctcaaaacgagcagatgcctcttatagcaatacgcctggcacggtttgcgcagtgatgactgccgactgcctccctgtgctgttttgcaatcgagcgggaacggaagtcgccgccgttcatgctggctggcgtggactgtgcgcaggcgtgctggaagagacggtttcctgttttgctgataaacctgaaaacattctcgcctggttagggccggcaattggtccacgcgcgttcgaagtgggggcggaggttcgcgaggcgtttatggcagtagacgctaaagcaagtgcagctttcattcagcatggtgataagtatctggcggatatttatcagcttgcccggcagcgtctggcgaacgtgggtgttgagcaaattttcggcggcgaccgttgtacatatgcggaaaatgagactttcttctcttatcgtcgcgacaagaccaccggtcgtatggcaagtttcatttggctgatataa

SEQ ID NO: 474181 - DNA, 2574 bp, Shigella flexneri
atgcgtctggatcgtcttactaataaattccagcttgctcttgccgatgcccaatcacttgcactcgggcacgacaaccaattcatcgaaccacttcatttaatgagcgccctgctgaatcaggaagggggttcggttagtcctttattaacatccgctggcataaatgctggccagttgcgcacagatatcaatcaggcattaaatcgtttaccgcaggttgaaggtactggtggtgatgtccagccatcacaggatctggtgcgcgttcttaatctttgcgacaagctggcgcaaaaacgtggtgataactttatctcgtcagaactgttcgttctggcggcacttgagtctcgcggcacgctggccgacatcctgaaagcaacaggggcgaccaccgccaacattactcaagcgattgaacaaatgcgtggaggtgaaagcgtgaacgatcaaggtgctgaagaccaacgtcaggctttgaaaaaatataccatcgaccttaccgaacgagccgaacagggcaaactcgatccggtgattggtcgtgatgaagaaattcgccgtaccattcaggtgctgcaacgtcgtactaaaaataacccggtactgattggtgaacccggcgtcggtaaaactgccatcgttgaaggtctggcgcagcgtattatcaacggcgaagtgccggaaggattgaaaggccgccgcgtactggcgctggatatgggcgcgctggtggctggggcgaaatatcgcggtgagtttgaagaacgtttaaaaggcgtgcttaacgatcttgccaaacaggaaggcaacgtcatcctgtttatcgacgaattacataccatggtcggcgcgggtaaagccgatggcgcaatggacgccggaaacatgctgaaaccggcgctggcgcgtggtgaattgcactgcgtaggtgccacgacgcttgacgaatatcgccagtacatcgaaaaagatgctgcgctggaacgtcgtttccagaaagtgtttgttgccgagccttctgttgaagataccattgcgattctgcgtggcctgaaagaacgttacgaattgcaccaccatgtgcaaattactgacccggcaattgttgcagcagcgacgttgtctcatcgctacattgctgaccgtcagctgccggataaagccatcgacctgatcgatgaagcagcatccagcattcgtatgcagattgactcaaaaccagaagaactcgaccgactcgatcgtcgtatcatccagctcaaactggaacaacaggcgttaatgaaagagtctgatgaagccagtaaaaaacgcctggatatgctcaacgaagaactgagcgacaaagaacgtcagtactccgagttagaagaagagtggaaagcagagaaggcatcgctttctggtacgcagaccattaaagcggaactggaacaggcgaaaatcgctattgaacaggctcgccgtgtgggggacctggcgcggatgtctgaactgcaatacggcaaaatcccggaactggaaaagcaactggaagccgcaacgcagctcgaaggcaaaactatgcgtctgttgcgtaataaagtgaccgatgccgaaattgctgaagtgctggcgcgttggacggggattccggtttctcgcatgatggaaagcgagcgcgaaaaactgctgcgtatggagcaagaactgcaccatcgcgtcattggtcagaacgaagcggttgatgcggtatctaacgctattcgccgtagccgtgcggggttggcggatccaaatcgcccgattggttcattcctgttcctcggcccaacgggtgtggggaaaactgagctttgtaaggcgctggcgaactttatgtttgatagcgacgaggcgatggtccgtatcgatatgtccgaatttatggagaaacactcggtgtctcgtctggttggtgcgcctccgggatatgtcggttatgaagaaggtggctacctgaccgaagctgtgcgtcgtcgtccgtattccgtcatcctgctggatgaagtggaaaaagcgcatccggatgtcttcaatattctgttgcaggtactggatgatgggcgtctgactgacgggcaggggagaacggtcgacttccgtaatacggttgtcattatgacctctaacctcggttccgatctgattcaggaacgcttcggtgaactggattatgcgcacatgaaagagctggtgctcggtgtggttagccataacttccgtccggaattcattaaccgtattgatgaagtggtggtcttccatccgctgggtgaacagcacattgcctcgattgcgcagattcagttgaaacgtctgtacaaacgtctggaagaacgtggttatgaaatccacatttctgacgaggcgctgaaactgctgagcgagaacggttacgatccagtctatggtgcacgtcctttgaaacgtgctatccagcagcagatcgaaaacccgctggcacagcaaatactgtctggtgaattggttccgggtaaagtgattcgcctggaagttaatgaagaccggattgtcgctgtccagtaa

SEQ ID NO: 474182 - DNA, 240 bp, Shigella flexneri
atgttggggggagcgcggaagtatcaaaagcggggctttggtcaggacctactatgtgatttttttgaacatgtaaaaaaaattcacccggcattaccaattaaaggggtttatcttgatgctgaccctgccgccattaacttttatgctcgtctcggctttgttcagctttcagcgacaccaaatgcttttggtgctgtacctatgtttttggcgattcagcatattctcgcggcttag

SEQ ID NO: 474183 - DNA, 159 bp, Shigella flexneri
atggtcgacaagcatgaagagattactctgcccatagtcctctcctgtaattatcagtctgatattacttatcctgggcaaaaacagtttgattgcggtaaccctgttatcgataaatttgtacgcgctacgcgcatcgctaaagaaaagtgtgcgtaa

SEQ ID NO: 474184 - DNA, 312 bp, Shigella flexneri
atgcctggaaaaacagccgctctatacgatgtcgataaaacgctgaaaaatgcgcgggtcgaactcaaaactagtcccgacgccaaaaacaaacttcgtgaagctgcgcaagccgttgggggagatttaagcgcttttattttgagcgctgctatggaacgcgccgaaagtgtgcttgataaccaacgtcgccgtgagctttcgaatcaaagctgggaactgatgaaccaactcatcgctgaacctgctcaaccgacgctcgccctcaaggcgttaatgaaaaggaaaaacagcgatggtcgacaagcatga

SEQ ID NO: 474185 - DNA, 891 bp, Shigella flexneri
atgatgtttaagcaatacctgcaagtaacgaaaccaggcatcatctttggcaacctgatctcggtgattgggggattcctgctggcctcaaagggcagcattgattatcccctgtttatctacacgctggttggggtgtcactggttgtggcgtcgggttgtgtgtttaacaactacatcgacagggatatcgacagaaagatggaaaggacgaagaatcgggtgctggttaaaggcctgatctctcctgctgtctcgctggtgtacgccaccttgctgggtattgctggctttatgctgctgtggtttggcgcgaatccgctggcctgctggctgggggtgatgggctttgtggtttatgtcggcgtctatagcctgtacatgaaacgccactcagtctacggcacattgattggttcgctctccggcgctgcgccgtcggtgattggctactgtgcagtaaccggcgagtttgatagcggcgcagcgatcctgctggctatcttcagcctgtggcagatgcctcactcctatgccatcgccattttccgctttaaggattaccaggcggcaaacattccggtattgccagtggtaaaaggcatttcggtggcgaagaatcacatcacgctgtatatcatcgcctttgccgttgccacgctgatgctctctcttggcggttacgctgggtataaatatctggtggtcgccgcggcggttagcgtctggtggttaggtatggctctgcgcggttataaagttgctgatgacagaatctgggcgcgcaagctgttcggcttctctatcatcgccatcactgccctctcggtgatgatgtccgttgattttatggtaccggactcgcatacgctgctggctgctgtgtggtaa

SEQ ID NO: 474186 - DNA, 330 bp, Shigella flexneri
atgagtcattctaccgatcacagcggcgcgtcccatggcagcgtaaaaacctacatgacaggctttatcctgtcgatcattctgacggtgattccgttctggatggtgatgacaggggctgcctctccggccgtaattctgggaacaatcctggcaatggcagtggtacaggttctggtgcatctggtgtgcttcctgcacatgaataccaaatcagatgaaggctggaacatgacggcgtttgtcttcaccgtgctaatcatcgctatcctggttgtaggctccatctggattatgtggaacctcaactacaacatgatgatgcactaa

SEQ ID NO: 474187 - DNA, 615 bp, Shigella flexneri
atggcaactgatactttgacgcacgcgactgcccacgcgcacgaacacgggcaccacgatgcaggcggaaccaaaatcttcggattttggatctacctgatgagcgactgcattctgttctcaatcttgtttgctacctatgccgttctggtgaacggcaccgcaggcggcccgacaggtaaggacattttcgaactgccgttcgttctggttgaaactttcttgctgttgttcagctccatcacctacggcatggcggctatcgccatgtacaaaaacaacaaaagccaggttatctcctggctggcgttgacctggttgtttggtgccggatttatcgggatggaaatctatgaattccatcacctgattgttaacggcatggggccggatcgcagcggcttcctgtcagcgttctttgcgctggtcggcacgcacggtctgcacgtcacttctggtcttatctggatggcggtgctgatggtgcaaatcgcccgtcgcggcctgaccagcactaaccgtacccgcatcatgtgcctgagcctgttctggcacttcctggatgtggtttggatctgtgtgttcactgttgtttatctgatgggggcgatgtaa

SEQ ID NO: 474188 - DNA, 1239 bp, Shigella flexneri
ttgttgaccctggatcgctatctgggcacccatttctttaccaacgatatgggtggcaacatgatgatgtacatcaacctgatttgggcctggggccacccggaagtttacatcctgatcctgcctgttttcggtgtgttctccgaaattgcggcaaccttctcgcgtaaacgtctgtttggttatacctcgctggtatgggcaaccgtctgcatcaccgtgctgtcgttcatcgtttggctgcaccacttctttacgatgggtgcgggcgcgaacgtaaacgccttctttggtatcaccacaatgattatcgccatcccgaccggggtgaagatcttcaactggctgttcaccatgtatcagggccgcatcgtgttccattctgcgatgctgtggactatcggttttatcgtcaccttctcggtgggcggtatgactggcgtgctgctggcagtaccgggcgcggacttcgttctgcataacagcctgttcctgattgcgcacttccataacgtgatcatcggcggcgtggtcttcggctgcttcgcagggatgacctactggtggcctaaagcgttcggtttcaaactgaacgaaacctggggtaaacgcgcgttctggttctggatcatcggcttcttcgttgcctttatgccgctgtatgcgctgggcttcatgggcatgacccgtcgtttgagccagcagattgacccgcagttccacaccatgctgatgattgcagccagcggtgcagtactgattgcgctgggtattctctgcctcgttattcagatgtacgtttctattcgcgaccgcgaccagaaccgtgacctgactggcgacccgtggggtggccgtacgctggagtgggcaacctcttccccgcctccgttctataactttgccgtagtgccgcacgttcacgaacgtgatgcattctgggaaatgaaagagaaaggcgaagcgtataaaaagcctgaccactatgaagaaattcatatgccgaaaaacagcggtgcaggtatcgtcattgcagctttctccaccatcttcggtttcgccatgatctggcatatctggtggctggcgattgttggcttcgcaggcatgatcatcacctggatcgtgaaaagcttcgacgaggacgtggattactacgtgccggtggcagaaatcgaaaaactggaaaaccagcatttcgatgagattactaaggcagggctgaaaaatggcaactga

SEQ ID NO: 474189 - DNA, 690 bp, Shigella flexneri
atgttcggaaaattatcacttgatgcagtcccgttccatgaaactatcgtcatggttacgatcgctggcattattttgggaggtctggcgctcgttggcctgatcacttacttcggtaagtggacctacctgtggaaagagtggctgacctccgtcgaccataaacgcctcggtatcatgtatatcatcgtggcgattgtgatgttgctgcgtggttttgctgacgccattatgatgcgtagccagcaggctcttgcctcggcgggtgaagcgggcttcctgccacctcaccactacgatcagatcttcaccgcgcacggcgtgattatgatcttcttcgtggcgatgcctttcgttatcggtctgatgaacctggtggttccgctgcagatcggcgcgcgtgacgttgcgttcccgttcctcaacaacttaagcttctggtttactgttgttggcgtgattctggttaacgtttctctcggcgtgggcgaatttgcgcagaccggctggctggcctatccaccgctatcgggaatagagtacagtccgggagtcggtgttgattactggatatggagtctccagctatccggtataggtacgacgcttaccggtatcaacttcttcgttaccattctgaagatgcgcgcaccgggcatgaccatgttcaagataccagtatttacctag

SEQ ID NO: 474190 - DNA, 438 bp, Shigella flexneri
atgaactccttcttcattccgcgtctgggtagccagatttatgccatggccggtatgcagactcgcctgcatctgatcgccaacgaacccggtacttatgacggtatctccgccagctacagcgggccgggcttctcaggcatgaagttcaaagctattgcaacaccggatcgcgccgaattcgaccaatgggtcgcaaaagcgaaacagtcgccgaacaccatgtctgacatggctgcgttcgaaaaactggccgcgcctagcgaatacaaccaggtggaatatttctccaacgtgaaaccagacttgtttgccgatgtgattaacaagtttatggctcacggtaagagcatggacatgacccagccagaaggtgagcacagtgcacacgaaggtatggaaggcatggacatgagccacgcggaatccgcccattaa

SEQ ID NO: 474191 - DNA, 585 bp, Shigella flexneri
atggcaaagtacaacgaaaaagagctggcggatacgagcaagtttttaagttttgtcctccgacacaaaccggaggcgattggtatcgtactggaccgtgaaggatgggcggatatcaataagctcatactttgtgcccaaaaagcgggcaagcgattaacccgtgcattgctggataccgtggtcgcaaccagcgataaaaagcgttttagttattccagtgatggtaggtgcatccgcgcggttcaggggcattcgacttcgcaggtcgctatttcctttgccgaaaaaacaccgccacagtttctctaccacggtacggcaagccgtttccttgacgagataaaaaaacaggggctgattgcaggggatcgtcattacgtgcatctctctgctgatgaagcaacggcacgcaaagtgggagcaagacacggatcgccggttgtcttaaccgtcaaagcacaggaaatggcgaaacgaggcatccctttctggcaagcggaaaacggggtctggctgacatcaacggttgctgttgagtttcttgagtggtcgtttatgccgactggggtacaaaaacaataa

SEQ ID NO: 474192 - DNA, 684 bp, Shigella flexneri
atgacacaacaaggggatgctgtagccggggagctggcgacagaaaaagtgggcattaaagggtatctggctttttttctcaccataatcttttttcccggtgttttttccggaacagacagctggtggcgcgtttttgatttttccgttctgaacggatcgtttgggcaactgcctggtgcgaatggagccaccacctcatttcgcggggtgggtggcgcgggggctaaagatggctttctctttgcgctggagctggcaccgtcagtcattctctctctggggattatttcaattaccgatggtcttggtggattacgcgccgcgcagcagttaatgacacctgtgctaaaaccgttgttgggcattccagggatctgctcgctggcactgatcgctaacctgcaaaacacggatgccgccgccggtatgaccaaagagctggcgcaggaaggtgaaattaccgaacgcgataaagtgattttcgccgcatatcaaaccagcggtagcgccatcatcaccaactacttctcttccggcgtcgcggtgtttgcctttctgggcacgtccgtaatcgtacctttagccgtcatcctggtgtttaaatttgtcggagccaacattttgcgcgtctggcttaacttcgaagaacgtcgcaacccaacgcaaggagcgcaagcatga

SEQ ID NO: 474193 - DNA, 462 bp, Shigella flexneri
atgacaactcaggtccgcaaaaacgtcatggatatgtttatcgatggcgcgcgccgtggctttactatcgccacgaccaacctgctgccaaacgtggtgatggcgtttgtcatcattcaggcgctgaaaattaccggcctgctcgactgggtggggcatatctgtgaacccgtaatggcgctgtggggattacccggtgaagcggcaaccgtccttttagccgcattaatgagtatgggcggcgcagtcggtgttgccgccagtctggcaaccgctgacgcattaaccggccacgatgtcaccgttttactgcccgcaatgtatttaatgggcaacccggtgcaaaatgtcggtcgctgcctggggacagccgaagtgaatgccaaatattacccgcatatcattacggtctgcgtgattaacgcattgctgtcgatctgggttatgcagcttattgtttaa

SEQ ID NO: 474194 - DNA, 1173 bp, Shigella flexneri
atgattgattataccgcagccggttttaccctgctgcagggagcgcatttgtatgcgccggaagatcggggaatttgcgatgtcctcgtcgctaacggcaaaattatcgccgttgccagcaatatcccttctgacattgtaccgaactgcacggttgtcgatctcagcgggcagatcctctgcccaggttttattgatcaacacgtccatttgattggcggtggcggcgaagcaggtcccacgacgcgcacgccggaagtggcgctaagtcgcctgacggaagcgggcgtcacgtcagtggttggtctgctgggcaccgactctatctctcgccacccggaatccctgctcgccaagacccgtgcgctcaatgaagaaggcatcagcgcctggatgctgaccggcgcttatcatgtcccttcccgcactattacgggttccgtggaaaaagacgtggcgattatcgatcgtgtgattggcgtgaaatgcgccatctctgatcaccgttctgccgcaccggacgtttatcacctggctaatatggcggcagaatcccgcgttggcggtttgctcggcggtaaacctggcgtcaccgtgttccacatgggcgacagtaaaaaggcgttaaagcctatttatgacctgctggaaaactgcgatgtgccgatcagcaagctgctgccgacccacgttaaccgcaacgtaccgttgtttgagcaggcgctggagttcgcgcgcaaaggcggcaccatcgatatcaccagcagcattgacgaaccggtcgcccctgccgaaggtattgcccgcgccgttcaggcgggtattccgctggcacgcgtcaccctcagctccgacggcaacggtagccagccgttcttcgatgacgaagggaatttaacccatatcggtgttgcaggttttgaaacgttgctggaaaccgtgcaggtgctggtcaaagactatgatttcagtatcagcgatgccctgcgcccgctcaccagtagcgtagccggtttccttaacatgagcgggaaaggcgaaattctgccaggcaatgacgcagacttactggtcatgacgccagaattgcgcattgagcaggtatacgctcgcggcaaactgatggtcaaagacggcaaagcctgcgtgaaaggaacgtttgaaacggcttaa

SEQ ID NO: 474195 - DNA, 912 bp, Shigella flexneri
atggatgactgtggtgcggttttgcataatattgaaaccaaatggctttatgattttctgactctggaaaaatgccgcaatttttcccaggcggcagtcagtcgcaacgtctcgcaaccggcattcagccgccgcatccgtgcactggaacaggcgattggcgttgaattgtttaaccgccaggtgacgccactgcaactctcagaacaagggaaaatcttccattcgcagatccgccatctgttgcaacagttagaaagcaaccttgcagagctgcgtggcggcggcgattacgcgcaacgtaaaatcaagatagccgctgcacactctctttccctcggtctgttaccgtccattatcagccagatgccgccgctctttacctgggcaattgaagccattgatgtcgacgaagcggtcgataaactgcgtgaagggcaaagtgactgtattttttcctttcacgacgaagatttgctggaagcgccgtttgaccacattcgcttatttgaatctcaattgttccctgtctgcgccagtgacgaacacggagaagcactttttaacctcgcgcagccacactttccgttactgaattacagccgcaactcctacatggtgcgattgattaatcgcaccctgacgcgccacagtgagttaagtttcagcaccttttttgtctcttcgatgagcgagcttttaaagcaggttgccctcgacggctgtgggattgcctggctgccggagtatgccatccaacaagaaattcgcagcgggcagctcgttgtgctgaatcgggacgaacaggtgatcccgattcaggcctacgcataccggatgaatacccgcatgaatccagttgccgaacgcttctggcgtgaactgcgcgagctggagattgtgcttagctga

SEQ ID NO: 474196 - DNA, 393 bp, Shigella flexneri
atgatgcgccaatcacttcaggctgttttacctgaaatttcaggcaataaaacgtcattgctgcgtaaatcggtatgcagcgatctcctcactctttttaattctcctcattcggcattaccgtcattacttgtttcaggcatgcccgagtggcaagtgcataacccgagcgacaaacatctccagagctggtattgccgtcagctgcgttctgcactgttatttcatgagccacggattgcggcgttgcaggttaatttgaaagaagcgtactgccacactctggcgatcagccttgagataatgctgtaccacgacgatgaaccgctaacgtttgatctggtctgggataatggcggttggcgcagtgcgacgcttgagaatgtcagctaa

SEQ ID NO: 474197 - DNA, 1440 bp, Shigella flexneri
atggaaacaaatgggaaggtaaactatcagcttcttagcacccctgatgctattgcaaaaaatgtatgtttggaaaaaacggaagatttttcaaaatcaccagcttatatttattttgtggaaaataaaaagtggggaacagttattactaattttttttataacatgaaaaaaaatggagactttgtcagaacattatcagcatgcacattaaaccaccaaatggcgttagggttgaaaataaagcgcgtacaagaaagtgaaaaatgggttgttcagtttttcgatcctaatcgaactgttactcataaacgtactgtatttacttgtgatagccatttcgaactgagtcaattatccgctaaggatttttttgatgatttttattggaaaatttatggtctggagcaacccgggcaggtaatatttgaagataggcataattcccctctaacaaacacagtgaaacttttaccagatgaattgatcaattccagagttatatatcatgcgataacaaagaatctgacagaagtattatttatactgatggaaaaatacaaaaatggtgaaatttctcaatctaaactggtgaaccttctggccacgagaagctctgatggtactcctgcattttatatagcacttcaaaacggatattcagacattattcaagtatatggtaagatattaaatatgtgcaatcttagtcaagaaacaatacttacattgcttgctgcggtaggggcaaacaatgtgccgggtttatgcatgtcttttatgaacggacatgtagacacaataaaagcctatggggaaatagtctttaaaaccccgttaacttccgataagagattatatctattagctgcgaaagacagccatgatttacctgggttattttttgcattgcagaatggacatgcagatagtattcgtatgttcggaagtctgcttaataagaaaatgcttagtagtgaacaaattaaagaattattgaaagtaaagcatgggttgtttatggcacttcaaaatgggcacacaaaggccattatggcgtatggagatatactaaaaatactcccccctcaccaggaatatatagatgaattattatggataaaaaatcccaacggtacatcaggactttttatggcattttataatggccataccgaaacaatacgtgccttttgtaatattctaaaaaactatagttttaccacaagacgattggtcgaaatgctgtccgcaactaataaagatggtattcctggtgtatttgtatctgtagtaaatagagacaaagaaacaatattagagtattgtagaataataaaagagaacaatctggaaccggatactatagcagaacaattttcaaagaagatgaaaaaaacgtttattgaaataataaatagatttaatcattttttatga

SEQ ID NO: 474198 - DNA, 720 bp, Shigella flexneri
atgcccataaaaaagccctgtctaaaactaaatttagattctttgaatgttgtgaggtctgaaataccgcagatgctttctgcgaatgaaagattgaaaaataacttcaatatattgtacaaccaaatacggcaatacccagcgtactatttcaaagtagcatcgaacgtgccaacttactctgatatatgtcaatctttttctgtcatgtaccaaggattccagattgtgaaccatagtggagatgtgtttattcatgcatgtcgtgaaaatcctcagagtaagggggattttgttggggacaagtttcatattagtatagctagggagcaagttcctctggcattccaaattttgtctggtttattattttcagaggacagtcctatagataaatggaagataactgatatgaatcgagtttctcagcaatctcgtgtggggataggagctcagtttacgctatatgtaaaatcagatcaggaatgctcgcaatatagtgctttattacttcataaaatacgacaatttataatgtgtctcgagtctaatctattaagaagcaaaatcgctcccggggagtatccggcgtcagatgttagacctgaagactggaaatatgtcagctatcgtaatgaactacgaagcgatcgagatggaagtgaaaggcaagagcaaatgttacgagaggaaccattttatcgtttgatgatagagtag

SEQ ID NO: 474199 - DNA, 342 bp, Shigella flexneri
atggctgcgtgcgcagatgaagctgacgagcctgtgctgggcgctgaaagaactggcaaaggatatctggagcagaccatggagcgaggaaagacgcaacgactggcagagatggctgcggccaacagtgacgtccccatgatgaagaatgtggctaaaacgatagggaaaaggttgtacggtatcctgaacgccatgcgccatggcgtatcaaacggaaatgcggaagcactgaacagcaagatcaggctgctgagaataaaagccaagggctaccgcaaccgggagcgctttaagctgggagtgatgttccactatgggaaactgaatatggcgttctaa

SEQ ID NO: 474200 - DNA, 579 bp, Shigella flexneri
atgaaagtctcgtttaagtctttaggctatatttttcatgatatatataataaaaaacacactatcgatgagttcaacgatgtggtaagaaaagcagttttatcaggtaaaattaacgagctgaatgcatgtcataaagtggcaatttttcttgccgaaaaagacaatgagataacaaagaaagacaaagccaagataatagatacattaactgaaaactattccattgaatttcaacaattaatgaatattagtgagcgcacgttaaattcatctttatatattactcctggtgaaagtggttttgtcagttttgttaatcgtgaaggaaaaatatgtcatactgcatatgtaaaatcatcagataatagcatgacatattaccatgcaaatggtagcagcattgacaaatatattacggatatgtgcggccttatttgtatgaggcatattgagtctactggcattattttttatatgcttgatgaaaaagttttatctgccattgctgaatttatgaatgaaaaaggatggcgggctgcgttttgttcagcaaagaacttatataaatgtgtttaa

SEQ ID NO: 474201 - DNA, 756 bp, Shigella flexneri
ttgagtgcgggacgcctgaataaaaaatctctgggtatcgtgatgtttttatcggttggactgctattggcgggctgttcgggtagcaaatcatccgatacaggaacgtattccggctccgtttacaccgtgaaacggggggatacgctatatcgtatttcgcgcaccacgggaaccagcgtaaaagagctggcgcgactgaacggcatttcccccccttacaccattgaagttggtcagaaactaaaactgggtggggcgaaaagtagcagtagtacacgtaaatcaaccgccaaatcaacgactaaaaccgcatcggttacaccgtcatcagcggtaccgaaatcttcctggccgccagtagggcaacgttgttggttatggccaacgacagggaaagttatcatgccgtattcgacagcagatggcggcaataaagggattgatatctcagctccacggggtacacctatttacgccgcgggtgcaggaaaggtggtgtatgtgggcaaccagctgcgtggctacggtaatctcatcatgattaaacacagtgaagattacattacggcttacgcccataatgacacgatgctggtaaataatgggcaaagcgtgaaggctgggcaaaaaatcgccactatggggagcacggatgcggcatctgttcgcctgcatttccagattcgttaccgtgcaacggcaattgatccgctacgttacttgccgccgcagggcagcaagccaaaatgctga

SEQ ID NO: 474202 - DNA, 2298 bp, Shigella flexneri
atggaagcgcgggaagcaaccgctacgggtgaatcatgcatgcgcgtcgatgccattgctaaggtcaccgggcgggcacgatatactgacgattatgttatggcgggcatgtgttacgcgaaatatgtacgtagccctatcgcacatggttatgccgtaagtattaatgatgaacaagccagaagtttaccgggcgtactggcgatttttacttgggaagatgtgcctgatattccattcgctacagctgggcatgcctggacacttgacgaaaacaagcgcgataccgccgatcgcgcactgctaactcgccatgttcgtcatcatggtgacgccgttgccatcgtcgtggcccgcgatgaactcacggcagaaaaagcggcgcaattggtcagcattgagtggcaagaattacccgttatcaccacgccagaagcggcgctgacagaagacgctgcaccaatccataacggcggcaatttactgaaacaaagcacgatgtcgacgggcaatgtccaacaaacaatcgatgccgccgactaccaggtacaggggcactatcagactcccgttattcaacattgtcacatggaaagcgtaacatcgctggcgtggatggaggatgactcgcgaattaccatcgtttccagcacccagatcccgcacattgttcgccgcgtggttggtcaggcgctggatattccctggtcatgcgtacgagtcatcaaaccgtttgtcggtggcggttttggtaataaacaggatgtactggaagagccaatggcggcattcctgaccagcaagcttggcggcattccggtgaaagtttcccttagccgtgaagagtgtttcctcgcaacccgtacccgccacgcttttactattgacgggcaaatgggcgtgaaccgcgacggaaccttgaaaggttatagtctggatgttctgtctaacaccggcgcttatgcatctcacgggcactccatcgcttctgcgggggggaataaagtcgcttacctttatcctcgttgtgcctacgcttacagttcaaagacctgctataccaacctcccctcggctggtgcgatgcgtggttatggcgcgccacaagtcgtatttgccgttgagtctatgcttgatgacgccgcgacagcgttaggtattgatcctgttgaaattcgtttacgcaacgccgcccgcgaaggagatgctaatccgctcacgggcaaacgtatttgcagcgcagggttgccggagtgtcttgaaaaaggccggaaaatctttgaatgggaaaaacgccgtgcagaatgccagaaccagcaaggcaatttgcgccgcggcgttggcgtcgcctgttttagctacacctctaacacctggcctgtcggcgtagaaatagcaggcgcgcgccttctgatgaatcaggatggaaccatcaacgtgcaaagcggcgcgacggaaatcggtcagggtgccgacaccgtcttctcgcaaatggtggcagaaaccgtgggggttccggtcagcgacgttcgcgttatttcaacacaagataccgacgttacgccgttcgatcccggcgcatttgcctcacgccagagctatgttgccgcgcctgcgctgcgcagtgcggcactattattaaaagagaaaatcatcgctcacgccgcagtcatgctacatcagtcagcgatgaatttgaccctgataaaaggccatatcgtgctggttgaacgaccggaagagccgttaatgtcgttaaaagatttggcgatggacgctttctaccaccctgaacgcggcgggcagctctctgctgaaagctccatcaaaaccaccactaacccaccggcgtttggctgtacctttgttgatctgacggtcgatattgcgctgtgcaaagtcaccatcaaccgcatcctcaacgttcatgattcagggcatattcttaatccactgctggcagaaggtcaggtacacggcggaatgggaatgggcattggctgggcgctatttgaagagatgatcatcgatgctaaaagcggcgtggtccgtaaccccaatctgctggattacaaaatgccgaccatgccggatctgccacaactggaaagcgcgttcgtcgaaatcaatgagccgcaatccgcatacggacataagtcactgggtgagccacccataattcctgttgccgctgctattcgtaacgcggtgaagatggctaccggtgttgcaatcaatacactgccgctgacgccaaaacggttatatgaagagttccatctggcaggattgatttga

SEQ ID NO: 474203 - DNA, 879 bp, Shigella flexneri
atgtttgattttgcttcttaccatcgcgcagcaacccttgccgatgccatcaacctgctggctgacaacccgcaggccaaactgctcgccggtggcactgacgtactgattcagctccaccatcacaatgaccgttatcgccatattgttgatattcataatctggcggagctgcggggaattacgctggcggaagatggctcgctacgtatcggctctgcaacgacatttacccagctaatagaagatcctataactcaacgtcatctcccggcgttatgtgctgcggccacgttcattgctggaccgcagatccgtaacgtcgctacctacggtggaaatatttgcaacggtgccaccagcgcagattctgccacgccaacgctaatttatgacgcgaaactggagatccactccccgcgcggtgttcgtttcgtcccgattaatggctttcacaccgggccgggcaaagtgtctcttgagcatgacgaaatcctcgtcgcctttcattttccgccacagccgaaagaacacgcgggcagcgcgcattttaaatatgccatgcgcgacgcaatggatatttcaacgattggctgcgccgcacattgccgactggataacggcaatttcagcgaattacgcctggcatttggtgttgccgcgccaacgccgattcgctgccaacatgccgaacagactgcacaaaatgcgccattaaacctgcaaacgctggaagctatcagcgaatctgtcctgcaagatgtcgccccgcgttcttcatggcgggccagtaaagagtttcgtctgcatctcatccagacgatgaccaaaaaagtgattagcgaagccgtcgccgcggcggggggaaaattgcaatga

SEQ ID NO: 474204 - DNA, 480 bp, Shigella flexneri
atgaatcacagcgaaacaattaccaccgaatgcaccattaacgggatgccttttcagcttcacgccgcaccaggcacgccgctctcggaattactccgcgaacaaggactgctaagtgtcaaacaagggtgctgcgtgggtgaatgtggtgcctgtacggtgttggtcgacggcacagcaatagacagttgcttataccttgccgcctgggctgaaggaaaagagatccgcacgctggaaggtgaagcgaaaggcggaaaactttctcatgttcagcaggcttatgcgaaatccggcacagtgcagtgcgggttttgtacgcctggcctgattatggctaccacggcaatgctggcgaaaccacgcgagaagccattaaccattacggaaattcgtcgcggactggcgggaaatctttgtcgctgcacggggtatcagatgattgtaaatacagttctggattgcgagaaaacgaagtaa

SEQ ID NO: 474205 - DNA, 210 bp, Shigella flexneri
atgtttgccgataaaggtttggtagtcgcgcaatatattcgtaaccgtcgtctcgatttttgtgcagatgcgattcgccatgccgcagatgatgaaaaactggcaggcatcggctttcattggggattttctgaccagagtcatttttcaacggtatttaagcaacgctttgggatgacgccaggcgagtatcgacgtaaattccgctaa

SEQ ID NO: 474206 - DNA, 327 bp, Shigella flexneri
atgaagaaaacattacttctttgtgcgtttcttgttgggctggtaagcagcaatgtaatggcattgactctggatgaagccagaactcaggggcgggtaggtgaaacattttatggttatctggttgcgctgaaaacggatgctgaaacagagaaattagtaaccgaaattaatgccgaacgtaaagcgagttaccaacaacgggcaaagcaaaataatgtgtctgtagatgatatcgcgaaactcgccgggcaaaagctcgtagctcgggccaaaccgggggaatatgtacaagggataaacggtaaatgggtgcgaaagttttaa

SEQ ID NO: 474207 - DNA, 186 bp, Shigella flexneri; identical to SEQ ID NO: 261591

SEQ ID NO: 474208 - DNA, 2640 bp, Shigella flexneri
atgctgggtaaatataaagccgttctcgcgctgttattactgattattcttgtgccgttgacgctgctgatgacgctcgggctgtgggttcccacgctggcggacatctggctaccgctcgggacacgtattgcattagatgaaagcccacgcattacgcgtaaaggtttaatcattcccgatctccgttatctggtgggagattgtcagcttgcgcatatcaccaacgccagcctttcacatcccagccgctggttattgaacgtcggcacggtagaacttgattctgcttgtctggcgaaattgccgcagacggagcaatcgccagctgctccaaaaaccctcgcgcagtggcagtccatgctgcctaacacctggatcaatatcgataaactgattttttctccctggcaggaatggcagggaaaactctctctcgcattaacctctgatatccagcaactgcgttatcagggcgaaaaagttaaatttcaaggccagctgaaagggcaacaacttacagtcagcgaactggatgtcgtcgcgtttgaaaatcagccgccggttaaactggtgggggaatttactatgccgctcgtgccggatggacttcctgtaagtgggcatgctactgcgacgttaaacttgccgcaggaaccgtcactggtggatgccgagctggactggcaggaaaatagcgggcaattgatcgtgctggcacgggataacggcgatccgttgctcgatttgccgtggcaaattactcgtcaacaattgaccgtaagcgatggtcgctggagctggctgtatgcaggttttcctttgagtggccgactgggtgtcaaagtcgacaactggcaggcagggcttgagaacgctctggtcagcggacgactgaatgtgctgacccaggggcaagcgggtaagggcaacgcggtgcttaattttggcccaggaaaattaagcatggataacagtcaactgcctctgcagctgaccggtgaagcgaaacaggcggacctcattttatatgcccgtttacctgcgcagctaagtggaagtctgtctgacccaacgctgacctttgagccaggcgcgttacttcgttcaaagggaagagtcatcgattcgctggacatcgatgaaatccgctggcctttagcgggtgtaaaagtcacccaacgtggtgttgacggacgtttgcaggccattttgcaggcgcatgaaaatgaactgggcgatttcgtgctgcatatggatgggctggcgaatgattttctccctgacgctggccgctggcagtggcgctactggggaaaagggagttttacaccgatgaatgccacctgggatgtcgcaggaaaaggtgagtggcatgacagcacgattacgctgaccgatctctccaccggtttcgaccagttacaatacggtacgatgacggtagaaaagcagcgattaattctcgacaagcccgtcgtctgggtacgtgacgcacagcatccctccttcagcggcgcgctgtcactggacgccgggcaaacgctgttcactggcggcagtgtgttaccgccatcaaccttaaaatttagcgtcgatgggcgcaatccgacctatttcctctttaaaggcgatttacatgctggtgagattggcccggttcgggtaaatggtcgctgggacggtattcgtctgcgcggtaacgcctggtggccaaaacaatcactgactgtattccagccgctggtgccacccgactggaagatgaacttacgcgatggtgaactgtatgctcaggttgcattttctgctgcgcctgaacaaggattccgcgcgggagggcacggcgtgttgaaaggcggtagtgcctggatgccagataatcaggttaacggtgtcgattttgtcctgcctttccgttttgccgatggagcctggcatctggggactcgcggccccgttacgttgcgaattgccgaagtgattaatctggtgacagcgaaaaatattacggctgatttgcaagggcgttatccgtggactgaagaagaacccttgctgttgactgatgttagcgtcgatgtgttaggcggtaacgtgctgatgaaacaattacgtatgccgcaacatgacccggcgctgttgcggctgaataatctctcatccagcgaactggttagcgccgtcaatccgaaacaattcgccatgtccggggcatttagtggtgcattgccgttatggctaaacaacgaaaaatggatagtgaaagatggttggctggcaaatagcgggccaatgaccttgcggctggataaagataccgcagatgcggtggtgaaagacaatatgactgcgggttcagcaattaactggttgcgctatatggaaattagccggtcatcgacaaaaattaacttagataatctcggtttattaaccatgcaggccaacattacaggtaccagtcgcgttgatggtaaaagcggtacggtaaaccttaattaccatcatgaagagaatatttttacgctgtggcgcagtttacgctttggcgataatctccaggcatggttggagcagaacgcacgtctgccgggaaatgactgtccgcaaggaaaagagtgtgaggaaaaacaatga

SEQ ID NO: 474209 - DNA, 990 bp, Shigella flexneri
atgaaactcgccgtttatagcacaaaacagtacgacaagaagtacctgcaacaggtgaacgagtcctttggctttgagctggaattttttgactttctgctgacggaaaaaaccgctaaaactgccaatggctgcgaagcggtatgtattttcgtaaacgatgacggcagccacccggtgctggaagagctgaaaaagcacggcgttaaatatatcgccctgcgctgtgccggtttcaataacgtcgaccttgatgcggcaaaagaactggggctgaaagtagtccgtgttccagcctatgatccagaggccgttgctgaacacgccatcggtatgatgatgacgctgaaccgccgtattcaccgcgcgtatcagcgtacccgtgacgctaacttctctctggaaggtctgaccggctttactatgtatggcaaaacggcaggcgttatcggtaccggtaaaatcggtgtggcgatgctgcgcattctgaaaggttttggtatgcgtctgctggcgttcgatccgtatccaagtgcagcggcgctggaactcggtgtggagtatgtcgatctgccaaccctgttctctgaatcagacgttatctctctgcactgcccgctgacaccggaaaactaccatctgttgaacgaagccgccttcgatcagatgaaaaatggcgtgatgatcgtcaataccagtcgcggtgcattgattgattctcaggcggcaattgaagcgctgaaaaatcagaaaattggttcgttgggtatggacgtctatgagaacgaacgcgatctgttctttgaagataaatccaacgacgtgatccaggatgacgtattccgtcgcctgtctgcctgccacaacgtgctgtttaccgggcaccaggcattcctgacagcagaagctctgaccagtatttctcagactacgctgcaaaacttaagcaatctggaaaaaggtgaaacctgcccgaacgaactggtttaa

SEQ ID NO: 474210 - DNA, 333 bp, Shigella flexneri
atgaagaaagtagccgcgtttgttgcgctaagcctgctgatggcgggatgtgtaagtaatgacaaaattgctgttacgccagaacagctacagcatcatcgctttgtgctggaaagcgtaaacggtaagcccgtgaccagcgataaaaatccgccagaaatcagctttggtgaaaaaatgatgatttccggcagcatgtgtaaccgctttagcggtgaaggcaaactgtctaatggtgaactgacagccaaagggctggcaatgacccgtatgatgtgcgctaacccgcagcttaatgaactcgataacacggtaatgactccaacttactga

SEQ ID NO: 474211 - DNA, 696 bp, Shigella flexneri
atgaagaaatccatcaccacgcttgatctcaatctgctgctctgtctgcaactgctgatgcaggagcgcagcgtgaccaaagcggcgaagcggatgaacgtgaccccttcagcggtgagtaagtcgctggcaaagttaagagcgtggtttgacgacccgctctttgtgaactcaccgctggggctgtcgcccacacagctaatggtcagcatggagcaaaatctggcggaatggatgcaaatgagcaatctgctgctggataaaccgcaccaccagacaccgcgcggcctgaagtttgagttggcggcggaatcgccgctgatgatgatcatgcttaatgcgctgtcgaaacggatctaccaacgttacccgcaggcgaccatcaaactacgtaactgggattacgattccttagatgccattactcgtggtgaagtggatattggtttttccggtcgcgaaagccatcctcgctcgcgggagctgttaagctcgctaccgttagccattgattatgaagtgctgtttagtgatgtaccctgcgtctggttacgcaaagatcatccggcactgcatgaaacgtggaatctggacacctttttacgttatccgcatatcagcatttgctgggaacagagcgacacctgggtgaggtgtactggcaatagcggacactaccatttgttctttttttaa

SEQ ID NO: 474212 - DNA, 1176 bp, Shigella flexneri
atgtcccgctttttgatttgtagttttgccctggttttactttatcccgccgggattgatatgtacctcgttggtttaccgcgcatcgccgccgatctcaatgccagcgaagcgcagttgcatattgcgttctccgtatatctggcggggatggcagctgcgatgctatttgccggtaaagtggccgatcgttcagggagaaagccggtcgccatacccggcgcggcgctatttattattgcctcggtgttctgttcactggctgaaaccagcacgttatttcttgcaggccgatttctacaggggttgggcgcaggctgttgttacgtggtggcgttcgccattttgcgcgacacgctggatgatcgacgtcgggctaaagtgctgtcattactcaacggtattacctgcatcattccggtgttagcgccagtgctcggacatctgattatgcttaaattcccgtggcagagtctgttctgggcgatggcaatgatgggcatcgcggtactgatgttgtctttgtttattttaaaagaaacgcgcccagcgtcccccgctgcttcggacaaaccacgagaaaatagcgagtcgctgcttaatcgttttttcctcagccgtgttgttatcaccaccctcagcgtttcggtgatcctcactttcgtcaatacatcgccggtattgctgatggaaatcatggggtttgagcgcggagaatacgccaccattatggcgctgaccgctggcgtcagcatgaccttttcattctcgacgccatttgcgctgggaatttttaagccacgtacgttgatgatcacctcgcaggtgttattccttgcggcggggatcacccttgccgtttcaccttcccatgcggtttctctgtttggtatcacgctgatttgcgccggtttctcggtaggttttggcgtagcgatgagtcaggcgttaggaccattttcattacgcgcgggcgtagccagctcgaccttaggtattgcgcaggtttgcggttcgtcactgtggatttggctggccgcggtggttggtatcggcgcatggaatatgctgatcgggattctgattgcctgtagcatagtgagcctgttgctgattatgttcgtcgcgcctggacgccccgttgccgctcatgaagaaatccatcaccacgcttga

SEQ ID NO: 474213 - DNA, 1248 bp, Shigella flexneri
atgactgatcaagctgaaaaaaagcactctgcattttggggtgttatggttatagcaggtacagtaattggtggaggtatgtttgctttacctgttgatcttgccggtgcctggtttttctggggtgcctttatccttatcattgcctggttttcaatgcttcattccgggttattgttattagaagcaaatttaaattatcctgtcggctccagttttaacaccatcaccaaagatttaataggtaacacctggaacattatcagcggtattaccgttgccttcgttctctatatcctcacttatgcctatatctctgctaatggtgcgatcattagtgaaacgatatcaatgaatttgggctatcacgctaatccacgtattgtcgggatctgcacagccattttcgttgccagcgtattgtggataagttcgttagccgccagtcgcattacctcattgttcctcgggctgaagattatctcctttgtgatcgtgtttggttctttcttcttccaggtcgattactccatcctgcgcgatgccaccagcaccactgcgggaacgtcttacttcccgtatatctttatggctttgccggtgtgtctggcgtcatttggtttccacggcaatattcccagcctgattatttgctatggcaaacgcaaagataagttaatcaaaagcgtggtatttggttcgctgctggcgctggtgatttatctcttctggctctattgcacgatggggaatattccgcgcgaaagctttaaggcgataatctcctcaggcggcaacattgattcgctggtgaaatcgttcctcggcaccaaacagcatggcattatcgagttttgcctgctggtgttctctaacttagctgttgccagttcgttctttggtgtcacgctggggttgttcgattatctggcggacctgtttaagattgataactcccacggcgggcgtttcaaaaccgtgctgttaaccttcctgccacctgcgttgttgtatctgatcttcccgaacggctttatttacgggatcggcggtgccgggctgtgcgccaccatctgggcggtcattattcccgcagtgcttgcaatcaaagctcgcaagaagtttcccaatcagatgttcacggtctggggcggcaatcttattccggcgattgtcattctctttggtataaccgtgattttgtgctggttcggcaacgtctttaacgtgttacctaaatttggctaa

SEQ ID NO: 474214 - DNA, 1416 bp, Shigella flexneri
atggaaaactttaaacatctccctgaaccgttccgcattcgtgttattgagccagtaaaacgtactactcgcgcttatcgtgaagaagcaattattaaatccggtatgaacccgttcctgctggatagcgaagatgtgtttatcgatttactgaccgacagcggcaccggggcggtaacccaaagtatgcaggcagcgatgatgcgcggcgacgaagcctacagcggcagccgcagctactatgcgttagccgagtcagtgaaaaatatctttggttatcaatatactattccgactcaccagggccgtggcgcagagcaaatctatattccggtactgattaaaaaacgcgagcaggaaaaaggcctggatcgcagcaaaatggtggcattctctaactatttctttgataccacgcagggccatagccagattaacggctgtaccgtgcgtaacgtctatatcaaagaagccttcgatacgggcgtgcgttacgactttaaaggcaactttgacctcgaaggattagaacgcggtattgaagaagttggcccgaataacgtgccgtatatcgttgcaaccatcaccagtaactctgcaggtggtcagccggtttcactggcaaacttaaaagcgatgtacagcatcgcgaagaaatacgatattccggtggtaatggactccgcacgctttgctgaaaacgcctatttcatcaagcagcgtgaagcagaatacaaagactggaccatcgagcagatcacccgcgaaacctacaaatatgccgatatgctggcgatgtccgccaagaaagatgcgatggtgccgatgggcggcttgctgtgcatgaaagacgacagcttctttgatgtgtacaccgagtgcagaaccctttgcgtggtgcaggaaggcttcccgacatatggcggcctggaaggcggcgcgatggagcgtctggcggtaggtctgtatgacggcatgaatctcgactggctggcttatcgtatcgcgcaggtacagtatctggtcgatggtctggaagagattggcgttgtctgccagcaggcgggcggtcacgcggcattcgttgatgccggtaaactgctgccgcatatcccggcagaccagttcccggcacaggcgctggcgtgcgagctgtataaagtcgccggtatccgtgcggtagaaattggctctttcctgttaggccgcgatccgaaaaccggtaaacaactgccatgcccggctgaactgctgcgtttaaccattccgcgcgcaacatatactcaaacacatatggacttcattattgaagcctttaaacatgtaaaagagaacgcggcgaatattaaaggattaacctttacctacgaaccaaaagtattgcgtcacttcaccgcaaaactgaaagaagtttaa

SEQ ID NO: 474215 - DNA, 474 bp, Shigella flexneri
atgtctgtttcacgtcgggtaatacatcacggactttattttgcggttttaggaccgttaattggtgttctgtttcttgtcctctacatattcttcgcaaaagaaccgctggttcttttggtaataatacaggtacttccattgtttctcttattgtcgattactacgggagctattcctgcattgttaaccggcgtgatggtcgcctgtctgccggaaaagatcgggtcacagaaaaattatcgttgtctggctggtggcataggtggcgtcgttatcaccgagatctattgtgcagttattgtacatattaagggcatggcttcctcggagttgtttgaaaacattctttctggtgacagtctcgttgtccgcatcattcctgcattgctggcaggtgtggtgatgagcagaatcattacccgtctgcccggattggatatttcatgtcctgaaacagactctttaagttaa

SEQ ID NO: 474216 - DNA, 657 bp, Shigella flexneri
atgtcccggatagaagcggtatttttcgactgcgacggtacgctggtcgacagtgaagtcatttgctcccgcgcatatgtaacgatgtttcaggaatttggtattacgctcgatcctgaagaggtattcaaacgtttcaaaggtgtaaaactgtacgaaattatcgatattgtttcccttgaacatggtgttacgttagcgaaaacagaagctgaacacgtttaccgtgcagaagtcgctcggctgttcgattcagccatcgaaggggctggagcgctcctgtcagcgatcactgcgccaatgtgtgtggtatctaacggcccaaataacaaaatgcagcattctatgggcaagctgaatatgttgcactacttcccggataaactgttcagcggctacgatattcagcgctggaagccagacccggcgttaatgttccatgcggcaaaagcgatgaatgtaaatgtagaaaactgcattctggttgatgactcagttgccggtgcgcaatctggtatcgacgcaggtatggaagtgttctacttctgcgccgacccgcacaataagccgatcgttcacccgaaagtcaccacctttacccatctttcgcagttaccggaactgtggaaagcgcgtggttgggatattacggcatag

SEQ ID NO: 474217 - DNA, 1338 bp, Shigella flexneri
atgagtcatcaacataccacccagacttctggtcagaggatgctggaacgtgtttttaaactgcgcgaacatggtactacggcacgaactgaagtgattgccgggttcaccaccttcctgacgatggtctacatcgtatttgttaacccacaaattctgggcgttgctggcatggacaccagtgccgtcttcgtaacaacctgtctgattgctgctttcggtagcattatgatgggattgtttgcaaaccttccggtggcgctggctcctgcgatggggcttaacgcctttttcgcttttgtggttgtccaggcaatggggctgccgtggcagatcggtatgggcgcaatcttctggggcgctgtcggactgcttcttttgaccattttccgcgttcgttactggatgattgctaacattccggtaagtctgcgtgtgggtattaccagcggtatcggcctgtttatcggcatgatggggctgaaaaacgcaggtgtgattgtcgctaactcggaaacgctggtgagcatcggtaatctgacttctcacagcgtacttctgggtatcctcggctttttcatcattgctattctggcctcgcgcaacattcacgcagcggtgctggtttctatcgtggtgacgacgctgctgggctggatgctgggtgatgtgcactacaatggcatcgtttctgcgccgccgagcgtaatgacagttgtgggtcatgtagatttagccgggtcgtttaacctcgggctggcaggggtgattttctctttcatgttggtcaacttgtttgactcctccggtacgctgattggcgtgaccgataaagcaggtctggcggatgagaaggggaaattcccgcgcatgaagcaggcgctgtatgtcgacagtatctcttccgtgaccggttcgtttatcggtacttcttccgttacggcttatattgagtcctcttccggcgtatcggttggcggtcgtaccggtctgacggcagtggttgttggtctgctgttcctgctggttatctttctgtcgccgctggcgggaatggtgccaggctacgctgcagctggcgcgttgatctacgttggcgtgttgatgacctcaagtcttgctcgcgtgaactggcaggatcttactgaatctgttccggcgtttattaccgccgtgatgatgccgttcagcttttcgattaccgaaggtattgcgctgggctttatctcctactgcgtgatgaagattggtaccgggcgtctgcgtgaccttagcccgtgcgtaatcatcgttgcgctgctgtttatcctgaagattgtatttatcgacgctcattaa

SEQ ID NO: 474218 - DNA, 567 bp, Shigella flexneri
atgtctgaaaaattgcaggtggttacgttactggggagcctgcgcaaaggctcatttaatggcatggttgcacgtaccctgccgaaaattgctccggcgagcatggaagtcaatgcgttaccttccattgccgacattcccctgtatgacgctgacgtacagcaggaagaaggttttccagcaacggttgaagctctggcggaacagatccgtcaggctgacggtgtggtgatcgtcacgccggaatataactactcggtaccgggtgggctgaaaaatgccatcgactggctttcccgcctgccggatcaaccgctggccggtaaaccggtgttgattcagaccagctcaatgggcgtgattggcggcgcgcgctgtcagtatcacctgcgccagattctggttttcctcgatgcaatggtgatgaacaagccggaatttatgggcggcgtgattcagaacaaagttgatccgcaaaccggagaagtgattgatcagggtacgctggaccacctgaccgggcaattgaccgcatttggtgagtttattcagcgagttaagatctaa

SEQ ID NO: 474219 - DNA, 750 bp, Shigella flexneri
atggcgactcactttgcccgagggattttaacggaaggacatctgatttctgttcgtctcccctcccagtgtcatcaagaagcccgaaacattccccctcatcgtcaaagccgttttctggcgtccagaggtttactcgcagaactgatgttcatgctgtatggcattggcgaattgccggaaatcgtcaccctgccgaaaggtaaaccggttttcagtgataaaaatttgccttcgttttctatttcctatgccgggaatatggttggcgtggcgttaacaaccgaaggtgaatgtggcctcgatatggaactacagcgtgcgacgcgcgggtttcatagcccacacgcgcccgataaccacaccttttccagcaatgaatcgctatggatcagtaaacaaaacgatcctaacgaagcgcgggcgcagctcattacgctgcgccgaagcgtgctaaaactaaccggtgatgttttgaatgacgatccgcgcgatctgcagctgctgcccattgccggacgcctgaaatgtgctcatgtaaatcatgtagaagcgttatgcgacgcggaggacgtgctggtgtggtccgtggcggtcacgcccgcgattgaaaagctcagtgtctgggagttagatggcaaacacagctggaaaagcctgccggatattcacagccgcgccaacaatcctaccagccggatgatgcgttttgcccagctctctaccgtgaagtctttttcgccaaattga

SEQ ID NO: 474220 - DNA, 363 bp, Shigella flexneri
atgccattctatttcaggaaggagtgtccgttaaactcaggctacctcagggcgctggacaatgtgttacaggagctggggcgcgaacgcacgattgctatgagcctgccggaattcgagcagtcactgtttatggcagcgcaacccgacaatctgctactggcgaccgcgccgcgctactgtcagtactacaatcaactccatcaactgccgttggttgctcttcctctcccgtttgacgaaagccagcaaaaaaagctggaagttccttttaccctgctgtggcataaacggaacagccataatccgaagatcgtctggttacgggaaaccattaaaaacctttacgcgtcgatggcataa

SEQ ID NO: 474221 - DNA, 267 bp, Shigella flexneri
gtgggcgaaatcacggcgatgtacgggcttccttatggcgtcacggtgtatggagggattcaaaacgccactcattttaatgcaatatctacgggtattggcatttctctggggctgttagggagtttatcgacagatattacgcgttcgattgcgaatttatattatgggaataaatatcgtattcgttatagtaaatccattagtgattttggtactcaattgttggatttgcccctatatttccagacatctgttatcacttaa

SEQ ID NO: 474222 - DNA, 1080 bp, Shigella flexneri
atgttttatcgactgtcattaattttgataatggccttacttgcgggtcagttaagtgcccaggagtggtcatttgattcttcacagttggaaggaaacgttagtgcggacactgtggcaatgtttaatcagggagagcaactccccggaaattatcgtgtggaaatttatcttaacggtgaaaaagttgatgttggggagtttccctttcatcgtccggaatcccctgaagaaaaagagcttgttccatgtttaaccgttgatgaccttatccactatggcattaaaattgataaaagcagcagtgatactgacaataaaaagaatcagtgttttaaatggaactctattgaaggtttgaaagtaaattatgattttgatagccagcgcgtacagataaccgttccacaactgtatctgcaagataaaaaaagtagtttagcaccagtgtcgttatggaatgagggtgtagctgcattccgcatggtgtatcagacaaatattgatatttccaaacaaaatgataatcaatctaccacgcgtaattctcgttatggcaggttcactccagggtttaatcttggtgcctggaggtttcgtagttcagtgacatggagcaaggaacttggccagtcagaaagatggcaaaggggttacatgtggtttgagcgaggcataaatgcgattaaaagccgattaacgcttggagaatcttatacgtcgtctgaggtgtttgacagcataccttttcgcggcgggatgttagcgaccgacgatgcgatgactccgccggaggacagctactacacacctgtggtgcatggaatagcacaaagtgaggcgcaggttattattaaacaaaatgggcaaattatttttacccgttctgtgccgccagggccttttgcgctggataatttaccaacgctggccgttggcggggagcttgatgttacagtgagagagagtaatggcgaggagcagtatttttccgtgccatttcaaacgccggccatcgctctgcatgaaggatatttcaaatatagtgtgatgggggggaatataaagaagaaggtataa

SEQ ID NO: 474223 - DNA, 762 bp, Shigella flexneri
atgaaaaattttaatgtactaaccaaagtcgtattttgcttgtcgtttttatcaagcgcatttcccacctatgctgcggatgatgtcaaagtgactcaaaacacttcagtttttaaactgaagcttagtgcaacgcgattaatctatgaacaagggtcggatggcgcagcgataactgtgacaaatccgcaggattggccgatgcttgtgcagagtaaagtctttgaagaagataaagtaactgcagcgccctttattgtcactccgccactgttcaggcttaatccaggccagcaaaataaaatgtgggttgtgcagactgcgccagctttacaagacagggaaaaattacactggctatgcgccaccggcattacgcctaaaaagagtgatgtttgggccgagaaagataaagaaaaaattgctgaaaatgtgaacctgaacatccaggttaacgtacatacctgcataaaacttattaccaggccatctggtattgaaggcaagatggttaatgcgagtgagaagttatcgtggaaaaagcagggtgataaaattgtcgcggtcaatcagtcgccgttctacatcaacctttcttctttacaggttggcggtagcaagattgagaaactagattatattgcgccgttttcgcaacatgagtttgttatgccaaaaactagcggccaggatattaaatggtctgtgattactgatgaaggtggtgagagtcgtttgtttatatctcatttgcaatcataa

SEQ ID NO: 474224 - DNA, 675 bp, Shigella flexneri
atggttaacgatctgacgtataagaaattagaaagcacaaacatcaactgtaatattctctcgccagaaaataccacatggacaaatgtcacggtgattggcctggatctttttgccatttgcggcgtgtgcagtttgctcaagcgtgttgggggagtgaaacttcaggttttcacttccttacccactgatatgaatgttctgactgacagtagcatcgtgatatgggtaaaaatgcgtcacgatggtttgcctgaattagccggacatattgtgaaggtttgtcgtcgataccgtctgatgcggcaactcgttattagcgatgctattcctgaaggaatgacgaatgatatcgggcctctttcccgagtatggcttactcatgggagtgcaaaagtggatattttattatcttcattacggaaggtgttaaatgctcattgtttgcctggtcctttgtttataaaacgcctgggaagagtgcaatggagggttcttttactccgcgcgaaggggattagcacacgtaaaattgcagaaatctgtggtattggcctcaagaccgttagcgcccatgagtccgcaattcgagaacgattaggcaccaggaataaaagtgagtacgtctggttagtacgtaatgctcaacttatacaacaggcgatacccgcgtag

SEQ ID NO: 474225 - DNA, 1275 bp, Shigella flexneri
atgccattctatttcaggaaggagtgtccgttaaactcaggctacctcaactttccgtatggcattttccagcagcgaaatgttcttgcgagctggctggcaacaggttgcggcgtagcgttgtatctggctttaacggcgcgtactcgttctctgacgttgatatgtttgttgtcgttataccctctgtctacagctttagtccttacacaaagccgtgtcggccttcttggtttattttgcgtcatcgtgctggccgctctcgcggacagaccccgctggcgcggacgtccccttagcggtctgttgcgcttgatcttcgtcgcctccttgctgtgctggtgtgtcggtatctcaaactatgccatgccaggggagacaacggctgactttacgcattcatcatcgaatgaccagcgtatacgtattctgaaaggtgccataagtcttattcaacagcgccccttaaccggttgggggttaggcagctttgaagcgaccttcccgcaagccttagaggatgtgggcgtgacaaacatagagagtgatacggctacgcatccccataacgaactgctgttcgtaacggctgaaggtggcatcgtcgccttgtttggttttttgctgctatcaggcgtttggctgtggccgtgtatatgccgcctgaaaatgacaaacaataacgcgcaccatcaatgtgaaaagtggtttattgccttaatggggttgcctttagtcattcatatgatgaccgaatatcctctctatacgtctgttccccatttgatgctgttgctgctccttttccgcatcggaatgccggaaaacgtgatgaatcaggtacgtatacctaaaacagtccggttgggtattctgcctgtcattgtgctcattatgaccgccgcgctggtcatcctggtagcgggatttgatgcacagcgggaactgaccagagctgaagctgatatgaacgaaggatttatccctcgccttccggaacatagctggaaatacctgacgcaggcagaacgtcttgagcgcgatcagcatctgcttattgcgaataaaccggggttcgttcgcgatacggaaagcatgtctcttttcactgtgtggggaaataaatggttggcaatccacaatgatgcagacgtaagcgctgcaatgatattcattgcgcacaggcgcggtgattatctgacagctgaaaaaataagaaaacgcgcagctcgggtatttgtaaatgacgaacgttttactcgcgggggaaactaa

SEQ ID NO: 474226 - DNA, 321 bp, Shigella flexneri; identical to SEQ ID NO: 462766

SEQ ID NO: 474227 - DNA, 882 bp, Shigella flexneri
atgctaagaattaaacattttgacgctaacgaaaaactacagattttatatgcaaagcaactctgcgagcgtttttcgattcagacattcaaaaataaatttacaggcagtgaaagtttagtcactcttacttccgtgtgtggggattgggtaattcgtattgatacattatcttttttgaaaaaaaaatacgaggtattttcaggattttctacacaagaatctttactgcatttatcaaaatgtgtctttatagagtcgtcatctgtattttcgattccagaactgtctgataagattactttccggatcacgaatgaaatccagtatgcaactactgggagtcatttatgctgtttttcctcttctttaggtattatttattttgacaagatgccggtattacgtaatcaagtttctcttgactcattgcatcatcttttagagttttgcttaggttcatctaatgtaaggctggctactttaaaaagaattcgcactggtgatataatcatagttcagaaactttataatttattattgtgtaatcaagttattattggggattatattgtgaatgataataatgaggcaaaaattaatctgtcagaaagtaatggtgagtcagaacacacagaagtttctttggcattattcaattatgatgatatcaatgtaaaagtggactttattcttttagaaaaaaatatgacaatcaatgaactaaaaatgtatgtagaaaacgaattattcaagtttcccgatgacatagttaaacatgtaaatattaaagtaaatggttctttggttgggcatggggaacttgtttctattgaggatggttatggtatcgagattagttcttggatggtaaaggagtaa

SEQ ID NO: 474228 - DNA, 651 bp, Shigella flexneri
atgctgagtgacatgtccctcatcgctacactttctttttttacgctattaccatttttagttgctgctggtacctgttatataaagttttctattgtttttgtaatggtacgaaatgcacttggtttgcagcaggttccatcaaatatgactctcaatggtattgcattgattatggctttgttcgtgatgaaacccattattgaagctggttatgaaaattatctaaatggccctcaaaaatttgatacaatatctgatattgtccgtttttctgattctggcttgatggaatataagcaatacttgaaaaagcatacagatcttgagttagcacgttttttccaaaggtctgaagaagaaaatgctgatttaaagagtgcagagaataatgattattcattgttttccctcttgcctgcatatgcgctaagtgaaatcaaagatgcgttcaaaataggtttttatttatatttgccatttgttgttgttgatcttgttatttcaagcattttacttgcacttggtatgatgatgatgagtccaatcacaatatcagtaccaataaaacttgtattatttgttgcgcttgatgggtggggtatcctgtctaaggccttgattgaacaatatatcaatattcctgcttag

SEQ ID NO: 474229 - DNA, 261 bp, Shigella flexneri
gtgtctgatatagtttatatgggtaataaggctctttatttaatccttatcttttccttatggccagtaggtatagctacggttattggattatctattggtttgttacagacagtgactcaactccaagagcagacacttccttttggtataaagcttataggtgtctcaatatctttgctacttctttctggatggtatggtgaggttttattgtctttttgtcatgaaataatgtttttaattaagagtggggtttga

SEQ ID NO: 474230 - DNA, 771 bp, Shigella flexneri
atggacatttcaagctggttcgaaagtattcatgtgtttttaatactcctgaacggcgttttttttagattggctccattatttttctttcttccatttttaaataacggtataatttctccatctattagaatacctgtgatttttcttgttgcatcaggattaattacttctggtaaggtagacataggttcttctgtttttgaacatgtttatttccttatgttcaaggaaataattgttggcctccttctctctttttgcttgtctcttcccttttggatatttcatgctgttggtagcattattgacaaccagcgtggggcaacgcttagtagttcaattgatcctgccaatggtgttgatacgtctgagttggcaaaatttttcaatcttttttctgcagttgtatttctatacagtggtggtatggtctttattttagaatccatacaattgtcttataatatatgcccgttattttctcaatgttctttccgtgtctcaaatatcttaacatttctgactttattggcaagtcaggctgttattttagccagtcctgttatgatagtattgttactatcagaagtattacttggtgtattatcgagatttgctccgcagatgaatgctttttccgtatcattaactattaaaagtttacttgcaatatttattattttcatctgttcttctactatttacttttctaaagttcaatttttcctcggtgaacataaatttttcacaaatctatttgttagataa

SEQ ID NO: 474231 - DNA, 1029 bp, Shigella flexneri
atggcaaataaaacagaaaagccgacacctaaaaaactaaaggatgccgcaaaaaaaggacagtcatttaaatttaaggatttaacgactgttgttattattctggtagggacatttactataatatcattcttttccttaagtgatgtaatgctcttatacagatatgtaataattaatgacttcgaaattaatgagggtaaatacttttttgcagtggttattgtcttttttaagataattggcttcccactttttttctgtgttctttcggctgtgttgccaacattggttcaaacaaagtttgttcttgcgactaaagctatcaagattgatttttcagtattaaaccctgttaaagggttaaaaaaaatatttagtataaagacaataaaagaatttttcaaaagcattctgcttcttattattctagcattaacaacctatttcttttggattaatgaccgaaaaataattttttctcaggtgttttctagtgttgatggcttatatcttatttgggggaggctgtttaaggatataatattatttttcttggcattttctattcttgttattattcttgactttgtgattgagttcattttatacatgaaagatatgatgatggataaacaggagataaaaagagaatatatagagcaagagggacactttgagacaaagtcgagaaggcgtgagttgcatatcgagattctttcagagcagactaaatctgatatacgtaattcaaaattagtggtaatgaacccgactcatattgcaattggtatttattttaatccagaaatagcgcctgcaccttttatttctctcattgaaactaaccagtgtgccttggctgtcagaaaatatgcaaatgaagttggtataccgactgtgcgtgatgtgaaattagctagaaaactatataaaacacatacaaaatatagttttgttgattttgaacacttggatgaagtcctacgtcttattgtttggcttgagcaggttgaaaacactcattaa

SEQ ID NO: 474232 - DNA, 234 bp, Shigella flexneri
atgggagttaatttctgtaataaaataggtattgatcagtctgaatttgaaatagaatcttccatcattaactccattgctaatgaggtattgaacccaatatctttccttagcaataaggatataataaatgttttactcagaaagatttcatctgaatgtgacctggttagaaaagacatttatcgttgtgctctggagttggtcgttgaaaaaacacctgatgatttataa

SEQ ID NO: 474233 - DNA, 561 bp, Shigella flexneri
atgacagagcagaagcgaccggtactgacactgaagcggaaaacggaaggggagacgcctgtccgcagccggaaaaccatcatcaatgtcaccacgccaccaaagtggaaggtgaaaaagcagaagctggccgagaaagcagcccgggaagcagagctggcggcaaaaaaagcgcaggccagacaggcactgtccatttatctgaacctgcccacgctggatgaggccgtgaataccctgaagccctggtggccgggattgtttgacggtgacacaccccggcttctggcctgcggtatccgggacgtgttactggaagacgtggcgcagcggaatatcccgctctcgcataaaaaactgcgcagggcgctgaaggccatcacccgttcagaaagctatctgtgtgccatgaaagccggtgcctgccggtatgacacggaagggtatgtgacggagcatatttctcaggaggaggaagtgtatgcggcagcgcgtctggataaaatccgccgccagaacaggataaaggcagagcttcaggccgtgcttgatgagaaataa

SEQ ID NO: 474234 - DNA, 747 bp, Shigella flexneri
atgacaacggataacacgaacacgacacgtaacgattcactggctgcacggaccgatacctggttgcagtcatttctggtctggtcacccggacagcgggatatcatcaaaacggtggcactggtgctgatggtactggaccacatcaatctgatattccagctgaagcaggaatggatgtttctggccgggcgaggagcctttccgctgtttgccctggtgtgggggctgaatctgtcccgtcatgcgaatatccggcaaccggccattaaccggctgtggggatggggaattattgcccagttcgcatattatctggcaggctttccctggtatgaggggaatatcctgtttgcctttgcagtggcggcacaggtgctgacgtggtgtgaaacgcgcagtgggtggcgtacagcagcggccatactcctgatggccctgtgggggcctttgtccggcaccagttacggtattgccgggctgctgatgctggcagtcagccaccggctgtaccgggcggaagacagagcggaacgtctggcgctggtcgcctgcctgctggctgttattccggcgcttaaccttgccaccagtgatgcagcggcggtggctggtcttgtgatgacggtgctgaccgttggtctggtgtcgtgtgcaggaaaatcattaccccgtttctggcccggggattttttcccggtattctacgcctgtcatctggctgtgctgggcgttctggcgctgtga

SEQ ID NO: 474235 - DNA, 258 bp, Shigella flexneri
atggcagagaacaaacctgacctgccggatggcaaaacagagcaggctgtcagggaaattgccgggcaggagcgtgaccgggctgacataactgaacgggaagccgcgctgccggagagtgtgctgcgtgaatcacaacgggagcaggaagcggtccgggaggttgcccgggaaaatctgctgcaggagcgtctgcagcagatggagcgggatatggttcgtgacctgcagaaagagaaaaccctgggcggagactga

SEQ ID NO: 474236 - DNA, 963 bp, Shigella flexneri
atgttgctctgcccgctcctggccggggcgaatcacccgggtctgctgtccgtccgacagcgtgacactgtcaccggaaaccgctgtcaccgtccagacgctgttggccacataaccgcgctcccggtcactcttcgtgaagcgcatccggtcgccggtccccacccggattttgtctggtgtgtacagtgtgacaccttcagccaccgcctcccggggcgaaatcagccgcgtgttaccttccgcatcctgcagggttatcagcccgtcatccctgctgataccggcaatccggtgatacacattatccaccagggcaagggcatccgggtttttctcccaggtggagagacgacgcagttctccgtcacgtatattcgctgtgttcaggacaggcaccatgacctgctctttgcccagctcaccggccttttcccgtgcatcatgaatcatgctgttcagtacgcgccggtcctcattcaggtgcgtgacaatcagcgtctgctcccgtgcttccggtgtcctgccggtatagtcgcggacaatggcctcatacagtgtcatggggatatccgggaaagcctcgcctttcagcatcgccttctgctgcgcttctgccagtttcgcttcctggctgtgactgaactccgtcacggagtgctccggtgcccatgcgccctccagacgtggcacctgagacggtttcacactctcaagcccggacagtgccctttccacatcccggttaatcaggctgtataccgcctcccgcagttccggcgtctgacgcacaatctccttcatgatggccacatcggcagcactgcgcgtctgctggagacggaaaggctgaccgggcgcgatggcctgcagctggtccgtgtcaccactggccacggcacgaccgccaccggccgcaatcagggcgtatgcccgtgccatatcggtattgcccaccattga

SEQ ID NO: 474237 - DNA, 570 bp, Shigella flexneri
atggcctgctgtgccggcgtgtgcagcccggctttctgcagactgatagcggtttccagcaatgtctcaccggcacgcgcctttatctgctcagaaaccaccgtaaaggagggatggcgggcaagtttttccgcagtacgggtttcatccagtgaggaatacagccggacatcacgaccgctgcgggccagaccgttcagggtggcgttgtccattgccatctgtgtgacggaggcaaacaccgtcgcactgtcactgacggaatgcccgggcgtttccacccagccgttctccagcttcagtgccgtgaacggtgaatcgctcacaggcagggaggccggttcagcccgccccggcacaacaaccgtcatcgcatcttcactgacggatgccacctgcaggcggtcaccgccggagacgcggagtccgggaattttccctgtcaccctcagtcgctcgccgtctgccaccggcattttttccggccggaacagcgaccagctgctgtccagggaggaaatacgcaccacctgcgtttcgccctgcgcattccgcagggtcaggctgtga

SEQ ID NO: 474238 - DNA, 150 bp, Shigella flexneri
atgaagcgcaaccctctggtggtgtgtctgctcattatctgcattacgattctggcattcacactcctgacccgacaaacgctctacgaactgcggttccgggacggtgataaggaggttgctgcgctcatggcctgcacgtccaggtaa

SEQ ID NO: 474239 - DNA, 174 bp, Shigella flexneri
atgaaaaaactggcacttattttgtttatgggaacgcttgtttccttttatgccgatgccgggcgcaaaccctgttctggttcgaaaggggggatctcacactgtacggcaggcggcaaatttgtctgtaatgatggttctattagtgcatcgaaaaaaacatgcactaactga

SEQ ID NO: 474240 - DNA, 531 bp, Shigella flexneri
atggaaaataaatactcaaggttacaaatcagcattcactggctggtctttttgctggttatcgcagcgtattgcgcaatggagtttcgtggtttcttcccacgtagcgatcggccgctcatcaacatgattcatgtttcctgtggcatctcaattctcgtgctgatggtggttcgtcttttgttaagactgaaatacccaaccccgccgattatacctaagccgaaaccgatgatgacgggactggcgcatttgggacatttggtgatttatctcctgtttattgcgctgccagtgattggtttggtgatgatgtataaccggggcaacccgtggtttgcgtttggtttgacgatgccttacgcttcagaggccaatttcgaacgggttgatagcttaaagtcgtggcatgagacgctggcgaatctgggatattttgtcatcgggttgcacgctgcggctgcactggcacaccactatttctggaaggacaacacacttctacgcatgatgccgcgtaaacgttcctga

SEQ ID NO: 474241 - DNA, 1002 bp, Shigella flexneri
atgagtaaagttggtattaacggttttggtcgtatcggtcgactggtgttgcgtcgtttacttgaagtcaaaagcaacatagacgttgtcgctattaatgatcttacttccccaaaaattctcgcctatctgctgaaacatgattcaaactatggtccgttcccctggagcgttgattttacggaagattcacttatcgttgatgggaaaagtatcgcggtttacgccgaaaaagaggctaaaaatattccgtggaaagcgaaaggggcagaaatcattgtcgaatgtactggcttttatacctccgccgataaatcgcaggcgcatcttgatgctggtgcgaagaaggtgttgatttccgctcctgccggtgaaatgaaaaccatcgtttataacgttaatgacgacactctggatggcaacgacaccattgtttccgtggcgtcatgcaccactaactgccttgcgccgatggccaaagccttgcatgacagtttcgggatagaagtcggcacgatgacgaccattcatgcctatactggcacccagtcactggtggatggcccgcgtggtaaagatttacgtgcttcacgcgcagcggcagaaaatatcattccccacactacgggggcggcaaaagccattggtctggtgatcccggaactgagcggcaaactgaaaggtcatgcgcaacgcgtgccggtgaaaacaggttcggtcactgagctggtgtccattctcggaaaaaaagtgactgccgaagaggtgaataacgcacttaaacaagcaaccaccaataacgagtcatttggttataccgatgaagaaatagtctcttccgatatcattggcagccatttcggttcagtgtttgatgccacgcaaacggaaattaccgccgtgggcgatttacaactggtgaaaacggtcgcctggtacgataacgaatatggcttcgtcacgcagcttattcgcaccctcgaaaaattcgctaaactctga

SEQ ID NO: 474242 - DNA, 1440 bp, Shigella flexneri
atgtcagtacccgttcaacatcctatgtatatcgatggacagtttgttacctggcgtggagacgcatggattgatgtggtaaaccctgctacagaggctgtcatttcccgcatacccgatggtcaggccgaggatgcccgtaaggcaatcgatgcagcagaacgtgcacaaccagaatgggaagcgttgcctgctattgaacgcgccagttggttgtgcaaaatctccgccgggatccgcgaacgcgccagtgaaatcagtgcgctgattgttgaagaagggggcaagatccagcagctagctgaagtcgaagtggcttttactgccgactatatcgattacatggcggagtgggcacggcgttacgagggcgagattattcaaagcgatcgtccgggagaaaatattcttctgtttaaacgtgcgcttggtgtgactaccggcattctgccgtggaactttccgttcttcctcattgcccgcaaaatggctcccgctcttttgaccggtaataccatcgtcattaaacccagtgaatttacgccaaacaatgcgattgcattcgccaaaatcgtcgatgaaataggccttccgcgcggcgtgtttaaccttgtactggggcgtggtgaaaccgttgggcaagaactggcgggtaacccaaaggtcgcaatggtcagtatgacaggcagcgtctctgcaggtgagaagatcatggcgactgcggcgaaaaacatcaccaaagtgtgtctggaattgggtggtaaagcaccggctatcgtaatggacgatgccgatcttgaactggcagtcaaagccatcgttgattcacgcgtcattaatagtgggcaagtgtgtaactgtgcagaacgtgtttatgtacagaaaggcatttatgatcagttcgtcaatctgctgggtgaagcgttgcaggcggttcaatttggtaaccccgctgaacgcaacgacattgcgatggggccgttgattaacgccgcggcgctggaaagggttgagcaaaaagtggcgcgcgcagtagaagaaggggcgagagtggcgttgggtggcaaagcggtagaggggaaaggatattattatccgccgacattgctgctggatgttcgccaggaaatgtcgattatgcatgaggaaacctttggcccggtgctgccagttgtcgcatttgacacgctggaagatgctatctcaatggctaatgacagtgattacggcctgacctcatcaatctatacccaaaatctgaacgtcgcgatgaaagccattaaagggctgaagtttggtgaaacttacatcaaccgtgaaaacttcgaagctatgcaaggtttccacgccggatggcgtaaatccggtattggcggcgcagatggtaaacatggcctgcatgaatatctgcagacccaggtggtttatttacagtcttaa

SEQ ID NO: 474243 - DNA, 339 bp, Shigella flexneri
atgcagcggcgcacgatggcaacgttccgccgtatgaccggggacaatcccgatgcaccacgctggttaagttatcccggattcgttcctcagttaggaaataacgcagacagtgtaatctttattaatcagttacaaggattatggccggttgagcgttatctctcactactcactggcgagctgccgcgtttacacgatgatagcgatggctacggtccccgcgggcgagattttatcgttcacgttgattttccggcagaagtcatccatgcatggcaaacgctgaaacatgatgcggtgctcatcgaggcgatggaaagtcgctcgttacgttaa

SEQ ID NO: 474244 - DNA, 378 bp, Shigella flexneri
atgccaacaggcggctgcaccgttgatagtcgtaatgtcaccgtggatctcccggactttcctggaagcgcagaaataccccttggcgtatattgctcaagcgaacaaaagctctcattttatctttcgggtgccaccactgacagtagccgacaagtgtttgctaacacagcacctgatgcaacaaaagcatcgggagtgggtgtcactctaatgcgtaatggaaaaatactggctacgggagaaaatgtctccctggggacagtaaataaaagcaaagtacctctgggtttaagcgcaacctatggacaaacaggaaacaaggtttcagccggaaccgtccagtcagtcattggtgtcacttttatctatgaataa

SEQ ID NO: 474245 - DNA, 2280 bp, Shigella flexneri
atgaagaaaaaaattgaatcctaccagggtgctgcaggtggttggggtgctgttaaatccgtagcgaatgcagtacgtaagcagatggatatacgccatgatgttattgccatgtttgacatgaataagccagagggctttgactgtccgggttgtgcatggccagatcctaagcacagtgcgtcattcgacatttgtgaaaacggcgcaaaagcaatcgcctgggaagtcacggataagcaggtaaatgcctctttctttgctgagaatacggttcaatcattacttacctggggagatcacgagcttgaggctgcggggcgtctcactcagcctttgaaatatgatgccgtcagcgactgttacaagccattaagctggcaacaagctttcgacgaaattggcgcacgccttcaaagctatagtgatcccaatcaggttgaattctatacttcgggccgcacttccaatgaagctgcctttctttatcagctttttgcccgtgaatacgggagcaataactttcccgactgctccaacatgtgccatgaaccgacaagcgtgggtttggcagcgagtatcggtgtaggtaaagggaccgtgttgctggaagactttgagaagtgcgatttagtcatttgcattgggcataaccctggtacaaaccaccctcgcatgctgacttcgttgcgcgctttagtgaaacggggagcgaaaatgatcgccatcaatcctctacaggaacgtggcctggagcgatttaccgcaccgcaaaacccgtttgaaatgctgacgaactctgagactcagttggccagtgcctactacaacgtgcgcattggtggcgatatggcgttgctcaaggggatgatgcgcctgttaattgagcgcgatgatgctgcaagtgccgcaggtcggccctcattgcttgatgacgaatttattcaaacgcataccgtcggctttgacgagctacgccgtgacgttctcaattccgagtggaaagatatcgaacgtatttctggactaagtcagacacaaatcgccgaactggctgacgcatatgccgctgccgaacgcaccattatctgttacggaatggggatcactcagcacgaacatggtacccagaacgtgcagcaactggtcaatttgctgttgatgaaaggtaacattggcaagcctggtgcgggtatctgcccactacgtggtcactctaatgtacagggcgaccgaaccgtcggtatcaccgagaaaccgtctgcagagtttctggctcgcctgggtgagcgctatggcttccccccacctcatgcacctggacatgctgcaattgccagcatgcaagcaatatgtacggggcaggctcgagcattgatctgcatggggggcaactttgcactggcaatgccagatcgggaagcgagcgctgtaccgttaacgcaattagatttggcggtacacgtagccactaagcttaaccgctctcatctgctgaccgcacggcatagctatattctgccggttctggggcgtagcgagattgatatgcaaaaaagcggtgcgcaggcggtaaccgttgaggattcaatgtcgatgattcatgcctcgcgtggcgtgttaaaacccgccggtgtaatgctgaaatcagagtgtgcagtggtcgcgggaatcgcgcaggcagcactaccccagagcgtggtagcctgggagtatctggtggaagattatgatcgcattcgcaatgacattgaagctgtgctgccagagttcgccgactataaccagcgcatccgtcatcccggtggttttcacctgataaatgcagctgctgaaaggcgctggatgacgccgtcaggtaaggctaatttcattaccagcaaagggctgttagaagatccctcttcagcgtttaacagtaagctggtcatggcgacagtacgcagccacgatcagtacaacacgacgatttatggtatggatgatcgctatcgaggggtattcggtcaacgagatgtggtctttatgagtgctaaacaagctaaaatttgccgtgtaaaaaacggcgaaagagttaatcttattgcgcttacgccagacggtaagcgcagctcacgccgcatggatagattaaaagtggtcatttaccctatggctgaccgctcactggtgacctattttccagaatcgaatcacatgctaacacttgataaccacgatccattaagtggcattcctggctataaaagtattccggttgaattagaaccatcaaattaa

SEQ ID NO: 474246 - DNA, 204 bp, Shigella flexneri
atgcatgcgaccacagtgaaaaacaaaatcacgcaaagagataactataaagaaatcatgtctgcaattgtggttgtcttattactgacacttacgttgatagccattttttcggcaattgatcagctgagtatttcagaaatgggtcgcattgcaagagatcttacacatttcattatcaatagtttgcaagactggaaataa

SEQ ID NO: 474247 - DNA, 762 bp, Shigella flexneri
atgtcgctcgtttgttctgttatatttattcatcatgctttcaacgctaacattttagataaagattacgccttctccgacggcgagatcctgatggtagataacgctgttcgtacacattttgaaccttatgagcggcattttaaagaaatcggatttaatgaaaataccattaaaaaatatctacaatgcactaacatccagacagtgacggtgcctgttcctgcgaagtttttacgtgcttcaaatgtaccgactggattgcttaatgaaatgattgcttatctcaactcggaagaacgcaatcatcataatttttcagaacttttgcttttttcttgcctgtctatttttgccgcatgcaaaggtttcattacactattaactaacggtgtgctatccgtttccgggaaagtgagaaatattgtcaacatgaagctggcgcacccatggaagctgaaagatatttgtgactgcctgtacatcagtgaaagcctgttgaagaaaaaactaaagcaagagcaaacgacattctcacagattctattagatgccagaatgcagcacgcaaaaaatttgatacgcgtagaaggttcagtcaataaaattgccgaacaatgtggttatgccagtacatcttattttatttatgcgttccgcaaacatttcggcaacagtccgaagagagtttctaaggagtaccgttgtcaaaggcacacgggtatgaatacgggcaacacgatgagtgctttagctatttga

SEQ ID NO: 474248 - DNA, 168 bp, Shigella flexneri
atgaagtctgcattaaagaaaagtgtcgtaagtacctcgatatctttgatactggcatctggtatggctgcatttgctgctcatgcggcagatgatgtaaagctgaaagcaaccaaaacaaacgttgctttctcagactttacgccggtaatgactccaacttactga

SEQ ID NO: 474249 - DNA, 2850 bp, Shigella flexneri
atgaaaatctgtctttatcatactctgaatcctgacacgatcccgggttataaaaaatttgcacaggctattgccaccgataactttgttcaggctgatgttcgtaaaattgacaccaatctttaccgcgcccggctcagtatccgggaccgattactgttttcgctgtatcgctaccacggtgaaactatctgccttgttctggaatatattcgcaatcatgcctataacacttcacgttttcttcgcagaaacgtggtgattgatgaagggcgcttacaacaacaaccagtgccggatcctgttgatatcgcgactgaagcgctgacgtatatcaatccgtctcatgggcgtttccaccgcctggataaaatgctgtcctttgatgatgatcagcaggcactgtacgaacacccgctaccgctggtgattgttggctcggcgggaagtggtaagacggcgctggtactggaaaaaatgaagcaggctgctggtgatatactgtatctcagcctttcctcatttctggtggaaaaagcgcgtactctctatgacgcttcaggggaagggagtgaggtacagaatattgactttctttcgctgacggaatttctggaaactctgcgcattccggaaggcagggaggtgactttcagtgcgttcagcgactggctgccccgcaacagggctatcgccgcactgggggctgcccataccctgtatgaggagttcaggggcgtgatcggtgcggttgcctccgggaatgggccgctgtcccgggaggcgtatctgtcactggggatacggcagtcgctctatggcatggaggaccgcccgacggtctatgtcctgtttgaacgttatatcgcatggctgaaacagtcgcatcagtatgacagtaatctgctcagtcatcagtatctttcgttggcaactccccgttatgatgtcatttttgttgatgaagttcaggatatgacgcctgttcaactgcaactggtactgaaaacgctacgtcatcccggtcagtttttactctgtggtgatgccaatcagatagttcatccgagctttttctcatggagttcgctcaaaagtctctttttccggcagcaacagggaaacgacacaaccgttaatatcctgcaggcgaattaccgtaacgggcaccacgtcactgcactggctaaccggttgctgagactcaaacaggtccgctttagtgctattgatcgggaaagtcaccattttgtcagaagctgcggtcaggcagaagggaccatccggttgctggacgatagggaagagacaaagcaggaactgaatgccaaaacctcactttcgaatcgtgtagcggtcattgtgatgcatccggaacagaaagcacaggcgcgatgctggttcagtacgccgctggtcttttcggttcaggaggttaaggggctggaatacgaaacggtgatcctttacaatatagtaagcgctgcccggcaggcatttgatgatatttgcgagggtcttacaccggctgatcttgagggcgaggcccgttattcccgtccgcgggacaggcaggatcgttcagcggaaatctataaattttttaccaacgcgctgtatgttgcgctcacccgtgctacacacaatgtgtatcttgttgaacagcaggtggagcatcctctgtggagtctgcttgcgctcacgcatcaggaagagcctctgaatctgcaggaagagatttccagccgtgatgagtggcagaaaaccgcacatctgcttgaaaaacaggggaagcaggagcaggcggacaccatccgtagccggatcctgcagacatctgagatgccatggcagattatcaccgcagaggatgcacgacagtggaaacagcatatcctcgcaggtacagccgataaaaccatacaactgcaggcgctggagtacagtctgatttattccctgttcccgctgtataatgcactgtaccgggaagattttaagcccacaaggcagcccagaacgaagactctgcagttactggagctgaagtatttccggccatactcaatgaataacccggttgccgtgttgcgggatattgaacgttatggtgttgatcaccgttcgccgtttaatcttactccgctgatgtcagcagcccgggcaggtaatattgcactggttcagttactgctggagcgtggtgcagatcccttgctgaccggtaatgacgggctggcggcttatcatcaagttctgtcagcggcggtcagtacgccccgttatgcgcaacagaaaagtgcgcagttgtataccctgctgaaacctgaaagtctgtcactgcaggtggaaggacgcctcatcaaactggacaaccggcagatggcaatgtttctggtgatcctgatgcaggcgctgttccacacgcatctgggaagtgctctgtttttttcggaagccttcagtgcggcacgactggcagagtgtgtggttcatcttcctgaagcgttgctgccggaacgccgcaaacgaaggagttatatcagcagccagctctctcaacatgaagttaacagcaaaaatccttatggaaaaaagctttttctgaggctgaaccacggacagtatattcttaacccggggcttaaaataaggaagggtgatgtgtggcgcgcggtttatgagttgcagtcaccggaagatctggggcatgatttgcagacttatctgcaggatatgtcaccggaattagtggatatgctgggagggaagaagggtttttacgaacgcagtgaaaagtctgtcggatactgggtgggggggatccgtcgtgccgctcaaaaagcgtga

SEQ ID NO: 474250 - DNA, 336 bp, Shigella flexneri
atgcagcgcttatttcttttggttgccgtcatgttactgagcggatgcttaaccgccccgcctaaagaagccgccagaccgacattaatgcctcgtgctcagagctacaaagatttgacccatctgccagcgccgacgggtaagatctttgtttcggtatacaacattcaggacgaaaccgggcaatttaaaccctacccggcaagtaacttctccactgctgttccgcaaagcgccagggcttacaaaacctgcttaacgagcgcaaggttattcgtgcggcacaagaaaacggcacggttgccattaataaccgaatcccgctgcaatctttaa

SEQ ID NO: 474251 - DNA, 357 bp, Shigella flexneri
atggttgaaggttcgattatcggttatgaaagcaacgttaaatcgggcggtgttggggcaagatattttgggatcggtgcagacacgcaataccagctcgatcagattgccgtgaacctgcgtgtcgtcaatgtgagtaccggtgagatcctctcctcggtgaacaccagtaagacgatactttcctatgaagttcaggccggggttttccgctttattgactaccagcgcttgctggaaggggaagtgggttacacctcaaacgaacccgttatgctgtgtctgatgtcggctatcgaaacaggggtcattttcctgattaatgatggtatcgaccgtggtctgtgggatttgtaa

SEQ ID NO: 474252 - DNA, 522 bp, Shigella flexneri
atggccgcgttttctgctatcatgcgcggcatgaacatacttctctctattgcaatcacaacaggcattctctccggtatctggggatgggtggctgtttccctgggcttactaagctgggcgggcttcctaggctgtacggcctactttgcttgcccgcaaggtgggctgaaagggctggcgatctccgctgcaaccctgcttagtggcgtggtgtgggcgatggtcattatttacggtagtgcactggcaccacatctggaaattctcggttatgtcataaccggtattgtcgcgtttctgatgtgtattcaggccaaacagctgctgctttcatttgttccggggacgtttataggcgcatgcgcgacgtttgccgggcagggtgactggaaactggtgttaccttcgctggcgcttgggctggtatttggttacgcaatgaaaaacagcggcctgtggctggcggcgcgtagtgcaaagacggctcaccgtgagcaggaaatcaaaaataaagcgtga

SEQ ID NO: 474253 - DNA, 555 bp, Shigella flexneri
atgaacgagttttctatcctctgtcgtgtgctgggttcgctctattaccgccaaccgcaagatcctttactggtgccgctgtttactctgattcgtgaggggaaactggctgcgaactggccactggagcaggatgagttactgacgcgtttacagaaaagctgtgatatgacgcaagtctctgccgattacaatgcgttgtttatcggcgatgaatgtgccgtgccgccatatcgtagcgcatgggttgaggacgcaacggaagcggaagtgcgcgcttttctttccgaacgagggatgccactggcggatacgccagccgatcacatcggcacattgctgcttgcggcttcctggctggaagatcagtcaacggaagatgagagcgaagcactggaaacactgttcagtgagtatctgttaccctggtgtggtgcgttcctcggcaaagtggaggcccatgcaaccacgcctttctggcgcaccatggcaccgctaacccgtgatgccattagtgcaatgtgggacgagctggaagaagattctgaagagtaa

SEQ ID NO: 474254 - DNA, 738 bp, Shigella flexneri
atgtatcccgtcgaccttcatatgcataccgttgccagcacacatgcatatagcacattgagtgattacattgcccaggccaaacaaaagggcattaaactttttgcgatcaccgatcatggcccggatatggaagatgcgccgcatcactggcacttcattaacatgcgtatctggccgcgagtggttgatggggtagggatcctgcgcggcattgaagctaacattaaaaatgttgatggtgaaattgactgcagcggtaaaatgtttgactcgctggatctgattattgccggttttcatgagccggtttttgcgccacatgacaaagcgaccaatacacaagcgatgatctccactatcgccagcggcaatgtgcatataataagccatcccggaaatccgaaatatgaaatagatgttaaagccgttgctgaagcagccgcgaaacatcaggtggcgctggaaatcaataattcctcatttttacactcacgtaagggcagtgaagacaactgtcgtgcggtagctgcagcggtacgtgatgctggaggttgggtggcattaggctcggattctcacaccgcgtttaccatgggggaatttgaagagtgtcttaaaatcctcgacgcggtagattttccgctagagcgcattttgaatgtttctccgcgccgcttactgaacttccttgaatctcgcggtatggcaccgattgcggaatttgcagacctttaa

SEQ ID NO: 474255 - DNA, 417 bp, Shigella flexneri
gtgcaaagctttgccggacgggaagaactgtctgcatttctgagccaatgtcgggtattgattaatttgttaccgaatacccctgaaaccgtcggcattattaatcaacaattactcgaaaaattacctgatggcgcgtatctcctcaacctggcgcgtggtgttcatgttgtggaagatgacctgctcgcggcgctggatagcgggaaagttaaaggcgcaatgctggatgtttttaatcgtgaactcttaccgcctgaaagtccgctctggcaacatccacgcgtgacgataacaccacatgtcgccgcgattacccgtcccgctgaagctgtggagtacatttctcgcactattgcccagctcgaaaaaggggagagggtctgcgggcaagtcgaccgcgcacgtggctactaa

SEQ ID NO: 474256 - DNA, 351 bp, Shigella flexneri
gtgactaaacaggaaaaaaccgcccttaacatggcccgctttatcagaagccagacattaacgctgctggagaagctcaacgaactggacgcggatgaacaggctgatatctgtgaatcgtttcacgaccacgccgatgagctttaccgcagctgcctcgcacgtttcggggatgccgggagcagacaagcccgtcagggcgcatcagcaggttttagcgggtgtcggggcgcagccatgacccagtcacgtagcgatagcggagtgtatactggcttaaccatgcggcatcagtgcagattgtatgaaaagtgcgccataccgggtatgaaataccgcacagatgcgtaa

SEQ ID NO: 474257 - DNA, 339 bp, Shigella flexneri
atgaaacgcgagaggatgctcacgatacgggttactgatgatgaacatgcccggttactggaacgctgtgagggtaaacagctggcggtatggatgcggcgggtctgcctgggggagccggttgcccgttccgggaaactgccgacactggcaccgccgttactgtgtcagctggctgccatcgggaataacctgaatcagacagcgaggaaggtgaacagcgggcagtggtcttccggtaaccgggttcaggtggtggccgcactgatggccatcggggacgagctgcgccggctgcgtctggccgtcagggaacaggggacgcgggatgatagttaa

SEQ ID NO: 474258 - DNA, 531 bp, Shigella flexneri; identical to SEQ ID NO: 25363

SEQ ID NO: 474259 - DNA, 234 bp, Shigella flexneri
atgacggagctggaaagacatttgctgaacgcattagaacaactgcaacaggactatatgcagcggctgaacgaatgggagagcgccttcgtggaattgcagaaaatgttttcgcttacgcaacgggacaacgcgatgctgaacgagcgggtcatgcagttgagtcagcaggtgcagcacttgagcgagcagacagaacgcttgagccagttatacagcgagaacaggagataa

SEQ ID NO: 474260 - DNA, 198 bp, Shigella flexneri
atgcgttatccctggagcgtgagcaccagctggaaatacaggaacggacactggatggcccttcgctgggatggtaatcagagacaggctaaaatgttgtcagcgcgtttccggtgcattttttgggataatggttggttcgggggcaccgggaacgcgcttcagtcagaccttgctgaaaacataggaacgcgttaa

SEQ ID NO: 474261 - DNA, 468 bp, Shigella flexneri
atgagaatagacatatcacatcaaacacggcataccccgccaaacatgcttcctcgggaacaaaattgtgtagcaatggcattatctgcgtgctttagacaacaactaaaccctgtggtaaacagcttattaaaagagagaataatacactcccctaaagaattggaacatgataacgcagtaataagagtcctgcaaaaactacaaattcaagaagtttgtaacaacaccctttgggagacagccaaacaacaactacttcaaaaatcggatggaagatattttgccatcaattctaaacacttatcctttccaggcccaggagaatctcacgccttctgttgcatcaaatacaaaaatgcaattggcattaacggaaacaatgccgaaacccaatcgacccactaccaaccctatccctatgataaagtcagtatatggggaccattccctcacaatttaacgtaa

SEQ ID NO: 474262 - DNA, 456 bp, Shigella flexneri
atgttcggtcccccaaaaacaaatgccgggatccggacggtaacattactgcagccggctcttgaagcactgaaggagcaatacaaactgaccgggcatcatcgcaaaagcgaaatcactttttatcatcgggagtacggcagaactgaaaaacaaaaactgcattttgttttcatgcccagggtgtgtaacgaaaaacagaaaccttattactcggtaagcagtttgggtacaagatggaatgcagcagtaaaacgtgctggtattcgccgccgtaatccgtaccacacgcgacatacttttgcctgctggctgttgacggcaggagcgaacccggcatttatagccagccagatggggcatgaaactgcgcaaatggtgtatgaaatttacggtatgtggattgatgacatgaacgacgaacagatagccatgttgaatgcgcggttatcgtag

SEQ ID NO: 474263 - DNA, 915 bp, Shigella flexneri
atgcactcaataaaaaaagtaaccatgctcttggggtgcctcgccctcacctgctcgatcgcatttcaggcaagtgcaactgaaaaattcaaggtcattacaacatttaccatcatcgcggatatggccaaaaacgtggctggagatgctgcagaagtctcatccataaccaagcctggtgcagaaattcatgagtatcagcctacccctggcgatattaaacgtgcgcagggggcacaactgattctcgccaatggtatgaatctggaattgtggttccaacgcttttaccagcatctcaatggggttccagaagtaattgtctcttcgggtgtgacgccagtagggatcaccgaaggaccctatgagggcaaacctaatccccatgcatggatgtcgccagataatgctctgatttacgtcgataatattcgtgatgcgttgataaaatacgatccggcaaatgcacaaacctaccaacgtaatgccgatacttataaagccaagattacccaaacccttgcccccctgcgtaagcagattacggaactccctgagaatcagcgatggatggtcaccagtgaaggggctttttcttatctcgcacgcgatttggggctaaaagagctttatctgtggccgattaatgccgatcaacaaggaacaccgcagcaggtacgtaaggttgttgatatagttaagaaaaatcatatcccggcagtctttagcgagagtacgatttccgataaaccagcgcgtcaggttgcgcgtgaaaccggcgcacactacggcggtgtgctctatgtcgattccctgagcacagaaaacggcccggtacctacgtatatcgaccttcttaaggttactaccagtacgctggtacagggaattaaagccgggaaaagggagaaataa

SEQ ID NO: 474264 - DNA, 828 bp, Shigella flexneri
atgatgcaatctgcaggcattgtcgttaatgatgttactgtcacctggcgtaacgggcacacagcactgcgcgatgcatccttcacagtaccaagtggatctattgccgctctggttggggtaaacggttccggaaaatcgacgttgtttaaagcgattatgggatttgtgcgtctgaccagcggaaagatatctgttctgggtattcccacgcgacaggcgctacagaaaaacctggttgcctacgtccctcagtcagaagaggttgactggtcatttcctgtactggtggaagatgtggtgatgatgggccgctatgggcatatgggtatgttgcgtatagccaaaaagagggatcgtcagattgtcaccgatgcgctggaacgtgtcgatatggtggattttcgccatcgtcaaatcggcgagctttccggtggacaaaagaaacgcgtctttctggcgagagcaattgcacagcagggtgatgtgatcctgctggatgaaccttttaccggcgttgatgtgaaaaccgaagcgaaaatcatcagcctgttgagggagttacgcgcggaaggcaaaacgatgcttgtctcaacgcacaatctcggctcagtcacgacattttgcgattatacggtcatggtcaaaggcaccgtcctggcaagcgggccgacagacaccacttttacagccgagaacctggagctggcttttagcggcgtactgcgccatgtcacacttaacggctcggaagaaagcattattactgacgatgaacgcccttttgtggcacatcgaccgtcagcggtgcagagggaagcaagatga

SEQ ID NO: 474265 - DNA, 858 bp, Shigella flexneri; identical to SEQ ID NO: 461758

SEQ ID NO: 474266 - DNA, 858 bp, Shigella flexneri
atgatggcattattactggagccactgcagttcacctttatgagtcacgcactgctgatttcactggtagtttccataccctgtgcgctgctgtcggtctttctggtcctgaaaggttgggcactgatgggtgacgcgatgagtcatgcggtttttcctggcatcgtgcttacctggattctggggttacctctggctacaggggcattcgtcgccggagtattctgcgcggtggcgacgggatacctgaaagacaacagccgaatcaagcaagatacagttatggggattgttttttctggcatgtttgccgcaggtctgatcttgtatattgcaattaaaccagacgtacatcttgaccatattcttttcggcgacatgctcgggataaccatcggcgatataatccagacggtgattattgccgggctggttacacttgttattagcgtaaaatggcgggattttttgctgttcagctttgattatcaacaggcgcaggtaagcggtttgcatacgagatggctgcattatgggctgctgtgcatggtttccctgaccattgtggcgacgctgaaagcagtaggtatcattctctctatttctctgctcattgcgcctggcgccattgcagtactcctgacacaacgctttcatattgcgctcctactggcgactggcatatcggtaatagtgtcaatgactggtgtctggctgtccttttttatcgacagcgcaccagctccgacgattgtcgtcttattcgcggtcgtgttcatcatgacgtttaccgttaccagcatcaacgcacgcacaaagggaaacgcccatacacaggatctgttatcacccaattag

SEQ ID NO: 474267 - DNA, 504 bp, Shigella flexneri
atgtccagaacactggatttgatattacagtgtcgcccggttcaggatatggttcatctgctgatgcgtattacattgcaatgggatattaacgaaatgtcatatttttattctgcatcgacaaacggattttattcgactgaatttcacggcaccaatattcctgatgatgcagtggaaatctcggaatcagagtggaaaacactgattaattcgcagagtgtaacaaaaatgattacctgtggtgagaatggtcaccctgtcattgttgaccgtccttctccaacaccagaacaattagccttaataaataatgaaaagaaatctgcactgatagcagaggcaacgaatgtaatagcgccgcttcaggatgcggttgatttagatatggcaacagatgatgaaacgaaactgttactggcatggaaaaaatatcgcgcactattgatgcgtgttgatataaaaaatacagagtggccgaaaaaaccagagagcaatctataa

SEQ ID NO: 474268 - DNA, 1521 bp, Shigella flexneri
atgagcatatgtattaaacaatcagcattaaaaatattattggctttatcagcactcctaataacttggttgactaccagatactttccagttgaaccggatgttgctaacagcccaattgtatggaggcatattttagagaatggtatatcatcaatccacgactggaaaccaaccgtggataattggtatttcaccgtttacccaattaactttttattttatatgctgttaggtgatgatggcttagtagcattaagattatcaactgcagttttctctattgctatagtaatagcagcgatgttaacgctacgtaaggcattcgggtttacccctgctttattttctattatacttctatctctaataccatatttttcatacacttatggttttgtatcacatcctttttctcataattcaacaaacgctttcggctttttatgcttgcttatatctgttttcaacatacagtataaaaatatatttatcactctcctcttaagtttgacagcattattttccagcgtatccgatccgtggtttacagctgcattttttattccactattaatatcttaccttttattctctgtatgggataaaaaattatttaagcatactgcattaatactatttgcatgtttaatctctctttccaatgtattgcaaaatctacttaacatacctccccaccaatttgaaattgtatcactcaatgatatgattttaaatgcaaaatggtgcattctgttaataggaaaaagtcttaatttattagttgtcgacaataacgcaacatcttacgcctcatttgtcatttggttcattgccattattacatctgcgtggtttgttttatcggacaataaaaaaaacacataccgtatttatattgtgttattttcattattatctatcgcaggtattgtctcatcattcatactgagctataaatcccctgattatattagcatgcgtttctttatgaatgttacctgtttcgcactgatattgtgctgtatcggtacatcaacaaaagcaaagatattattttatctaatcgcatttttattttcgatcagttcaattaaatcttacacaaataatgcttcaccattacacgatcaggagaagattgttaaatcatacattgattttttaaaaaaaaataatctccattatgggtacggctctttttgggatttgtcaatgactgtaaattggttatctggtggggacatacagataactcctgttttctttaatgctgattcggggaaaattaactttactggcgtgagacaacagacactggcttcttggcatagcaaggaggcgttcaattctgctcctgagcgacagtttatagcagtttccatagctaacgaacctgaacgatgtaaagaaatgacatcctgccttgcaggtattcaagaacaattaggtaagcctgacgaagttttgaactttgaaggaagagtaatattagtatttaacaaaaaacttaacctatag

SEQ ID NO: 474269 - DNA, 921 bp, Shigella flexneri
atgaaaatatctcttgtcgttcctgtcttcaatgaagaagaagcgatacctgttttctataaaacggtacgtgaattccaagagttgaagccatatgaagtagaaattgtattcataaatgacggaagtaaagatgccacagagtcaattattaacgcgctggctgtttcagacccgctagttgttccgctgtcatttacacgcaactttggtaaagaaccagccttatttgcagggttagaccatgcaagcggcgatgctgtaattcctattgatgtcgacctgcaagacccaattgaggttatccctcatcttattgaaaagtggcaggcaggtgctgagatggtgcttgctaaacgttcagaccgctcaactgatggacgactgaaacgtaagacagctgagtggttctataaattacacaacaaaataagcaccccaaagatcgaggaaaatgtcggagattttcgactcatgtctcgtgaggttgtggagaacattaaactgttgcctgagcgcaatcttttcatgaaaggcatactgagctgggtgggtggtcagacggatgtcgttgaatatgtacgcgcagagcgtgttgctggcatctcaaaatttaatggctggaaattatggaatctggcactggaaggtatcacaagtttttcaacctttcctcttcgcgtatggacttatataggcttgtttgttgcaagcatttcatttttatatggtgcatggatgattatagacacccttgtctttggtaacccagtacgcgggtatccctccctgcttgtatcaatacttttcttgggtggagtgcaactgatcgggattggtgttctcggtgaatatataggtagaatttacttagaaacaaaatcaagacctaagtatattttgaagaaaggtagaaaataa

SEQ ID NO: 474270 - DNA, 267 bp, Shigella flexneri; identical to SEQ ID NO: 463627

SEQ ID NO: 474271 - DNA, 207 bp, Shigella flexneri
atgacaaaaacagtatcaaccagcaaaaaaacacgtaaacagcattcgcctgaattttgcagtgaagccctgaagcttgctgaacgcatcggtgttgctgccgcagcccgtgaactcagcctgtatgaatctcagctctatgcgtggcgcagcaaactgcagcaacagatgacctcgtctgagcgtgaaagtgaactgcccgcctga

SEQ ID NO: 474272 - DNA, 777 bp, Shigella flexneri
atgaaaattaaaagatcaacttttatctcgaatattttttacattatcagttggtttcttatgaatgacaattcattgcttagaaattcttcattattcatcgcctatatgggatgtgtagggtgggtcagtgcttattcttatggctggggaacctctttttactatggatttccatggtgggttgttggtgcaggtttggatgatgttgccagaagtttactctatgctatcatagtaatgggtatactttttaccggttgggggattggtattttattttttcttcttataaagaaaagaagtaaaatacaagacttgagtttttttagactattttttgctattaccctactgtttttccctgtaatattcgaacttttaattctcaaacaatatttcatacttccattatcactttcattcattattagttcattggttatttcaataataattcgtatatatggacggatcttttctgtatcatgtttttcagatatcccttttgttagagaacaccgcattaagttaattatggctggttttttggtttatttttggtttttttcctttcttgttggctggtataaacctcaattaaaaaaagaatatcagatgctttgttataataatagttggtattatgttcttgctcgttatgattcacggctcgttttatctagttcatttaaagatgacagtaacagattcttaatatttaatacagaacagtcgggattttatgaaatcaatgatgtttatgtcagaaagtaa

SEQ ID NO: 474273 - DNA, 123 bp, Shigella flexneri
atgcgcctacttgcagccggaaacgccaaaaaagtggcactggttgcctgtatgcgtaagttgctgaccattatgaacgcaatgctcagaaaaaacgaagaatggaatgaatcgtatttatga

SEQ ID NO: 474274 - DNA, 342 bp, Shigella flexneri
atggctgcgtgcacagatgaagctgacgagcctgtgctgggcgctgaaagaactggcaaaggatatctggagcagaccatggagcgaggaaagacgcaacgactggcagagatggctgcggccaacagtgacgtccccatgatgaagaatgtggctaaaacgatagggaaaaggttgtacggtatcctgaacgccatgcgccatggcgtatcaaacggaaatgcggaagcactgaacagcaagatcaggctgctgagaataaaagccaagggctaccgcaaccgggagcgctttaagctgggagtgatgttccactatgggaaactgaatatagcgttctaa

SEQ ID NO: 474275 - DNA, 234 bp, Shigella flexneri; identical to SEQ ID NO: 8563

SEQ ID NO: 474276 - DNA, 441 bp, Shigella flexneri; identical to SEQ ID NO: 30631

SEQ ID NO: 474277 - DNA, 1902 bp, Shigella flexneri; identical to SEQ ID NO: 263385

SEQ ID NO: 474278 - DNA, 612 bp, Shigella flexneri
atgcaacactccataaaacaccgcgcttcaacggcgcaccccgacgaggatgaccttgttgataccacgtgcactcataagaacctcctgactgaaagatgtgagataaaccggataccggcgacgggacgttcatgtgccccttcagaggagcgaaagctcctcctgccgtccacttcacaggggtttctccccgcagtggacctttccgatgggggcccgtttaccgcctcacggggcagctgtccgggggcggacgcaaaattttttgccgggttcatggctaaaaattttgtggccggtgcatctcaccctggacagatggaacgggagggggttacgtctgccccccggaaagtccacagcggggaaacaggccgcagggggggcggcaggagggaggactgctgcgccatcaggcgcagtttcctcacacaccgtcaggtgtgcagggagcgcaggtcacggcgcgacaggggcggcgcgaccggaacggtcgctgcaagcccgggttttcacgcatcggaccgtagcggcagcccgaaaccgcgccagcgggttcggcggagactggcgggtgcgccagcagctgcccgtcggagtcgggcctga

SEQ ID NO: 474279 - DNA, 669 bp, Shigella flexneri
atgagtgaacaaatcaaacaggatatcgatctgattgagattttatttcatctgaagaaaaagattcgtgttatcctttttattatggctatctgtatggcaatggtgctgttgtttctgtatatcaataaagacaatacaaaagtgatttacagccttaaaataaaccagacaacgccaggtatacttgttagctgtgatagcaataataattttgcctgtcagaccacaatgactgaagatgttattcagcgaattactacattttttcagaccagcccagatatcaagaacagagaaataaggctggaatggtcaggagataagagagatttaccaactgctgaagaggaaatatctcgcgtgcaggcgtctattatcaaatggtatgcgtcagaataccataatggcaggcaagttctcgatgagatacaaacgccttcagcaattaacagtgagctttatacaaaaatgatatacctgaccaggaactggtcattgtatccgaacggtgatggctgtgtaactataagctcaccagaaataaaaaataaataccctgctgccatttgcctggctctgggattttttctaagcattgtaatttctgtaatgttttgccttgtcaaaaaaatggtagatgaataccaacaaaactctgggcagtaa

SEQ ID NO: 474280 - DNA, 696 bp, Shigella flexneri
atggataatcggagcgaatttttgaataacgttgctcaggcactgggtcgcccgctgcgacttgaaccgcaagcagaagatgcgccgcttaacaactatgctaacgagcggcttacccaacttaaccaacagcagcgctgtgacacgtttattcagtttgccagcgatgttatgttgacgcgctgtgagctgaccagcgaggcgaaggcggcagaagctgcaatacgtctgtgtaaagagctgggagatcagtcggtcgtgattagcggtgacacgaggctggaggaattggggattagtgaacgtttgcagcaggaatgcaatgccgttgtttgggatccggcgaaaggtgccgagaatatctcgcaggcagagcaggctaaagtgggtgtcgtgtatgctgaatatggtttaaccgaatcgggaggcgtggttcttttttccgccgccgagcgcgggcgttcattgagcctgctcccggaatcttctctttttatcctgcgtaaaagcacaatcctgccgcgtgtagcgcaactcgcagaaaaattgcatcagaaagcgcaggccggtgaacgaatgccgtcatgtattaacatcatcagtggtcccagctcaacggcggatattgagcttatcaaagtcgtcggggttcatggtccggtgaaagcggtgtatctgattattgaggattgctga

SEQ ID NO: 474281 - DNA, 1428 bp, Shigella flexneri
atgtcgatcaaaaccagtaatacagattttaagacacgcatccgtcagcaaattgaagatccgatcatgcgcaaagcggtggcaagcgcgcagcagcgtattggggcaaatcggcaaaaaatggtcgatgaattggggcactgggaggagtggcgcgatcgggccgcccagatacgtgatcatgttctgagtaatctcgacgcttatctgtaccagctctcagaaaaagtgacgcaaaacggcggtcacgtctattttgcaaaaaccaaagaagacgctacccgctacattttacaggttgcccaacgcaaaaatgcccggaaggtggtgaaatctaaatcgatggtgaccgaagagattggtgtcaatcatgtgttgcaggatgctggcattcaggtgattgaaaccgatctgggtgaatatattctccagctggatcaagatccgccatctcatgttgtggtcccggcaattcataaagatcgccatcagatccgtcgagtgctacacgaacgtctgggctatgaggggccggaaacgcctgaagcgatgaccttattcatccggcaaaaaatccgtgaagatttcctcagtgctgaaataggtattaccggctgtaatttcgcggtggcagagaccggttcggtatgcctggtgaccaatgaaggtaatgcgcgaatgtgtaccacgctgcctaaaacgcatattgcagtgatgggaatggagcgtattgcccccacgtttgccgaggtagatgtattgatcaccatgctggcgcgcagtgccgttggtgcacgtttgacgggatacaacacctggctgacagggccgcgcgaagcggggcacgttgatggtcctgaagagtttcatctggttattgtcgataacgggcgttctgaggtgctggcctctgaatttcgggatgtgctgcgctgtattcgctgcggggcttgtatgaatacttgtccggcatatcgccatattggcggtcatggatatggctctatttatccagggccaattggtgcggtgatttctccgctacttggcggctataaagattttaaagatttaccctacgcctgctctttatgcactgcttgtgacagcgtgtgtccggtgcgtattccgctgtcaaaactgattttgcgtcatcgtcgggtgatggctgaaaaagggatcaccgcaaaagcagagcaacgggcgataaaaatgttcgcttatgccaatagtcatccaggattgtggaaagtcgggatgatggccggcgctcatgcggcaagctggtttatcaatggcggcaaaacaccactcaaatttggcgcgattagcgactggatggaagcacgcgatcttcctgaagctgacggagagagtttccgtagttggtttaagaaacatcaggcgcaggagaaaaagaatggataa

SEQ ID NO: 474282 - DNA, 720 bp, Shigella flexneri
gtgaatgtcaatttctttgtcacctgtattggtgacgccctgaaatcaagaatggcacgagactccgtgctgctactggaaaaactcggctgtcgcgtaaatttcccggagaaacagggatgctgcggtcagcctgcgatcaatagcggttatatcaaagaagcgatttcagggatgaaaaatctgatcgccgcactggaggataacgacgatcccattatttcaccggctggctcttgcacctatgccataaaaagttacccgacgtatctggcggatgaacctgaatgggcatcacgtgccgaaaaggttgccgcgcgtatgcaggatctcacctcttttattgttaataaattaggggtagtcgatgtaggtgccagtttgcaagggagagctgtgtatcacccatcttgtagcctggcccgtaagctgggagtgaaggacgagccacttacgctgctgaaaaatgtgcgtggactggagctgttgacctttgctgaacaggatacctgctgcggatttggcggcacgttctcggtcaaaatggccgaaatatccggcgagatggtgaaagaaaaggttgtgcacctgatggaagtccgccctgagtatttaattggtgctgacgtgagttgcctgctgaacatcagtgggcgattacaacgggaagggcagaaagtcaaagtgatgcatattgctgaagtgttgatgagccgctga

SEQ ID NO: 474283 - DNA, 459 bp, Shigella flexneri
atgtaccgtgaaagcgacatcgtaccgggagagcagaccgccaccagcatactgaaacagcgcacaaaaaatcttgcgccgctgcctcacgcccaccagcaacagaacccacaacaggaaaagacggtggtcagcattgccgttgatcctgagtctccggaatctttcatgaaacgacctaaacgtcgccgctgggttaacgagaaatacaaacgctgggtgaagacacagccgtgtgcgtgttgtggtaagccagccgacgatccccatcacctgattggtcatggtcagggcggaatggggaccaaatctcacgatattttcacgctaccgctgtgtcgggagcatcacaacgagcttcatgcggatcctctggcgttcgaagaaaagcatggttctcaggttgatttaatttttcgttttcttgatcacgcctttgcaactggcgtgcttgggtaa

SEQ ID NO: 474284 - DNA, 357 bp, Shigella flexneri
atgctcatagatttggttttaccttacccgccgacggtgaacacttactggcgacgccgtggcagcacatattttatctcggaggagggaaagcgttatcgccgggctgtggcgcttattgttcgccagcagcggctgaaattaagcctgtccggaaggctggcgataaaggtgattgcagagccaccggataagcgtcgtcgcgacctggacaatatcctgaaagcaccgctggatgcgctgacgcatgcgggagtgttaatggacgatgagcagtttgatgaaatcaatatcgttcgtggtcagccagtatctggtggacgtctgggggtgaagatttaccccataatgcattaa

SEQ ID NO: 474285 - DNA, 822 bp, Shigella flexneri
atgaaactggaagatttaccgaaatactactccccaaaatcccctggcctgaccgatgcatcggcctcaacgtcaaaagatgcgctgagtatcactgatgtgatggccgcgcagggcatgacacagaatcgggctgagatgggtttttctgcgttcctggggaaaatgggcatcagtatgaatgacagggcgcgggcaacagaattactggcagattatgcactcagtcggtgcgatcgtgtggcggcgttgagaaaacttccggcagaaataaaaccggtagtgatgcgcattatggcttcgtacgcttttgaggattatgcccgcagcgcagcgagtaaaaagcagtgcccttgttgctatggggaaaaatttattgaaagcatagtttttacaaacaagatccagtatccggatggtaagccgccggtatgggcaaagtgtacgaaaggtgtgtatccgtcttactgggaagaatggaaaaaagtcagggaggtggtaaaagttgcctgtccggagtgtggcggaaagggtgaggtttccaccgcctgtaaggattgccgtgggcgtggtgtcgccattcatcgtgaagagtcggtaaaacgtggtatgcctgttatcagagactgccagcgttgtggtggtcgtggctatgaaagactaccatcaacggaggcatttaatgctatatgcgaggtgacaaaccagataacacgcgcgtcatgggaaaaaacagttaagaaattttatgatgcgctggtgacccggtttgatattgaagaagcatgggctgagcggcagttaaaaaaggtaactaggtaa

SEQ ID NO: 474286 - DNA, 336 bp, Shigella flexneri
atgaagtggattgtgattgatacagttatccagccatcatgcggaatatctttttcagtcatatggagtaaaataaaattaataatctggtatcaatcggatgctttcttacctcctgaaagtatatttacactgactcacacaggcatcatgctcaataacaaagtgctacctgtaaccatttacaacgtagtaccattcaataaaacattctggaatttaatcaaaaacagccaggaatgccctacaaatacagataacgtattgaatgaatgctttaataaccgttgcactctgcaaatatgtccttatggactaaaacaacaaagtccataa

SEQ ID NO: 474287 - DNA, 189 bp, Shigella flexneri; identical to SEQ ID NO: 467093

SEQ ID NO: 474288 - DNA, 162 bp, Shigella flexneri
gtgatactacgtcatcgtactggcccggcattccaggccataaaagacagtctggcagtgggactaaatgcactgacgctgacggatattaccaaaaatgcaacgtatggcgttgagatagaaagtctggtgctggagataaatgcaccggcatcatcataa

SEQ ID NO: 474289 - DNA, 180 bp, Shigella flexneri
atggaccagatggaaaaaatcacaacaggtgtgtcatacaccacgtcagcggtgggaacgggctactggttcctgcagttgctggacagggtttccccgtctcagtgggcggcaataggcgtgctggggagtctgctgtttgggctgctgacatatctgactgaggtgtactggcaatag

SEQ ID NO: 474290 - DNA, 804 bp, Shigella flexneri; identical to SEQ ID NO: 6089

SEQ ID NO: 474291 - DNA, 837 bp, Shigella flexneri
atgttcatgccgcctgtttttcctgctcattggcacgtttcgcaacctgttctcattgcggacaccttttccagcctcgtttggaaagtttcattgccagacgggactcctgcaatcgtcaagggattgaaacctataaaagacattgctgatgaactgcgcggggccggctatctggtatggcgcaatgggaggggagcagtccggttgctcggtcgtgagaacaatctgatgttgctcgaatatgccggggagcgaatgctctctcacatcgttgccgagcacggcgactaccaggcgaccgaaattgcagcggaactaatggcgaagctgtatgccgcatctgaggaacccctgccttctgcccttctcccgatccgggatcgctttgcagctttgtttcagcgggcgcgcgatgatcaaaacgcaggttgtcaaactgactacgtccacgcggcgattatagccgatcaaatgatgagcaatgcctcggaactgcgtgggctacatggcgatctgcatcatgaaaacatcatgttctccagtcgcggctggctggtgatagatcccgtcggtctggtcggtgaagtgggctttggcgccgccaatatgttctacgatccggctgacagagacgacctttgtctcgatcctagacgcattgcacagatggcggacgcattctctcgtgcgctggacgtcgatccgcgtcgcctgctcgaccaggcgtacgcttatgggtgcctttccgcagcttggaacgcggatggagaagaggagcaacgcgatctagctatcgcggccgcgatcaagcaggtgcgacagacgtcatactag

SEQ ID NO: 474292 - DNA, 2175 bp, Shigella flexneri
atggcggttctggttgcctttgtccttgcatgggaaacgctggcgctggatgatgcattggacgttctggacgccatgctggccgttatcatccgtgacgccagaaagattgggcagaaaaaacggctccgctcgctgaaggatctggataaatctgcattggcgctcgccagcgcatgttcgtacctgctgaaagaagaaacaccggacgaatcgattcgtgctgaggtgttcagctacatcccaaggcaaaagctggctgaaatcatcacgcttgtccgtgaaattgcccggccctcagacgataattttcatgaagaaatggtggagcagtacgggcgcgttcgtcgtttcctgccccatctgctgaataccgttaaattttcatccgcacctgccggggttaccactctgaatgcctgtgactacctcagccgggagttcagctcacggcggcagttttttgacgacgcaccaacggaaattatcagtcggtcatggaaacggctggtgattaacaaggaaaaacatatcacccgcaggggatacacgctctgctttctcagtaaactgcaggatagtctgaggcggagggatgtctacgttaccggcagtaaccggtggggagatcctcgtgcaagattactacagggtgctgactggcaggcaaaccggattaaggtttatcgttctttggggcacccgacagacccgcaggaagcaataaaatctctgggtcatcagcttgatagtcgttacagacaggttgctgcacgtctttgcgaaaatgaggctgtcgaactcgatgtttctggcccgaagccccggttgacaatttctcccctcgccagtcttgatgagccggacagtctgaaacgactgagcaaaatgatcagtgatctactccctccggtggatttaacggagttgctgctcgaaattaacgcccataccggatttgctgatgagtttttccatgctagtgaagccagtgccagagttgatgatctgcccgtcagcatcagcgccgtgctgatggctgaagcctgcaatatcggtctggaaccactgatcagatcaaatgttcctgcactgacccgacaccggctgaactggacaaaagcgaactatctgcgggctgaaactatcaccagcgctaatgccagactggttgattttcaggcaacgctgccactggcacagatatggggtggaggagaagtggcatctgcagatggaatgcgctttgttacgccagtcagaacaatcaatgccggaccgaaccgcaaatactttggtaataacagagggatcacctggtacaactttgtgtccgatcagtattccggctttcatggcatcgttataccggggacgctgagggactctatctttgtgctggaaggtcttctggaacaggagaccgggctgaatccaaccgaaattatgaccgatacagcaggtgccagcgaacttgtctttggccttttctggctgctgggataccagttttctccacgcctggctgatgccggtgcttcggttttctggcgaatggaccatgatgccgactatggcgtgctgaatgatattgccagagggcaatcagatccccgaaaaatagtccttcagtgggacgaaatgatccggaccgctggctccctgaagctgggcaaagtacaggtttcagtgctggtccgttcattgctgaaaagtgaacgtccttccggactgactcaggcaatcattgaagtggggcgcatcaacaaaacgctgtatctgcttaattatattgatgatgaagattaccgccggcgcattctgacccagcttaatcggggagaaagtcgccatgccgttgccagagccatctgtcacggtcaaaaaggtgagataagaaaacgatataccgacggtcaggaagatcaactgggcacactggggctggtcactaacgccgtcgtgttatggaacactatttatatgcaggcagccctggatcatctccgggcgcagggtgaaacactgaatgatgaagatatcgcacgcctctccccgctttgccacggacatatcaatatgctcggccattattccttcacgctggcagaactggtgaccaaaggacatctgagaccattaaaagaggcgtcagaggcagaaaacgttgcttaa

SEQ ID NO: 474293 - DNA, 384 bp, Shigella flexneri
gtgatgcgtgatattcagcaggttcttgagcgctggggcgcgtgggtggctaataatcatgaggatgtgacctggtcgtccattgctgccggttttaagggattaatcccttcaaaagtaaaatcccgcccgcaatgctgtgacgatgacgcgatggttatatgtgggtgtatggcccgccttaaccggaacaacaacgatctacatgacttgctggttgactactacgtgtttgggatgacattcatgacgctggcgcggaagcatggatgctcagatggttatataggaaagaagctacaaaaagccgagggggtggtggaaggaatgttgatgatgttgggtgtccggttagaaatggacaaatatattgaacatccctga

SEQ ID NO: 474294 - DNA, 201 bp, Shigella flexneri
atgagcgtcaaaattcaaacgataccggaactgcttatccagacacgaggtaatatgaccgaagtttcacgaatgctgaactgtaatcgcgccacggtaagaaaatatgctgaagataaagagggcaaagggcacgccattgttgatggtgttctgattgttcatcgtggatgggacaggggtaaagacagtgatgcgtga

SEQ ID NO: 474295 - DNA, 258 bp, Shigella flexneri
ttgaacaaccagacaatgacttttacccctgaacaattgcgtaaacacgcgcaggaaatgctgcgtcatgctgaacaactcgaaaaaacgggcataacaaaagatgctatccgtaaagatatggtacccgcgcttcgggaactgatgcaggcgaagcatcgcgcacagaaagcagtagatgagctggtggactgtgtggcagagctggaaaccagagtcggaaagtttgaaaaactggtgcaggaggcgctgcgctga

SEQ ID NO: 474296 - DNA, 1392 bp, Shigella flexneri
atgacaactccagtatggcgtaacgatgaccttgaaggcgctgtcatcggcgcgttctttctgcgcggagcagatcctgaagtgatggatattctggccacactgccagcggacgttttttctgtacgagcgtatcaggatatctatacaggcatctgcagacaggcccgtgtttcaggagtgattgaccccgtgctgttgtgtaatgagatgccggaacttgccccggtgattactgataccgggcgtaaaacctgggtgaagtcttcactggagcactatgttgcagcgttgcggcgcaatgccgcactgcgcgatgcagaaaaaacactgaatgaggcgctgcagaaattacgtgatgcgcatacctgtgaagcagctgaagatgccctgaaggatgcgcagaacatgatggtcacactgtcgacaggaaagggcgtcattcagccggtacatattgatgatgtgcttccggaagtggttgagcgtgttgaatgccggaatcaggggctggagaaatccaggacgttgatgaccggtattgatgaactggacgcaaaaacaggcggtatggagcccggagacctggtattcattgccgcccgtccttcgatggggaaaaccgaacttgcgctggacatcatcgacaaggtgactgagcaggggcatggtgtgcttctgttcaccatggagatggcgaacatccagattggtgaacgtatggtgtctgcggctggagggatgccagtatcacgcctgaaatctgtggctcactttgaagatgaagactggacgcgtttctcacaaggggtggggcggatgaccgggcgcaatatctggatggtggaccaggcgaacctggccattgatgagatatgcgcaacaacgaaacaccacctgattaaatatccggaaacggcgctggtggtggttgattatctcgggctgataaaaacccgaaccacggggcgtcatgaccttgccgtgggtgaaatctcaaaggggcttaaaggcctggcaaaatccggtggttttccgttgattgcgctgagccagctctcccgcggtgtggagtccagacccaataaacgtcccatgaactcagacctgaaaaattccggagaaatagaggcggatgcagacatcattctgatgctttacagggatgaagtgtacaacccggatacgcaggccaggggcatcgcagaaatcaatatcacgaaacaacgtaacggttctctgggaacgatttaccggcgtttttataacggacattttctgcctgtggaccaggaaagtgcacgggtgctttccactcccatgaagcccggcaatccgcgcagatacagtaataaacgaactgacagcagtaagatggagcgtttcttttga

SEQ ID NO: 474297 - DNA, 879 bp, Shigella flexneri
atgatgacgtttaacctgcgtgaacaacaaaaaagactacaggcgcgaatggatgagttacgggcagagattgcatttgctcagaagggcgaaaagccatggccttatcgttcctgcctgatgcgtgaaggtcgcggatattgcgaaaaacatggcgaatatcacacgcatatactggtgtggagcgatcgtaatggcgaggacagagaagaaatttcatgctgccctgactgcttaatcgctgaggccaacgatttgaccatggagctgtcgtccatcaaggcggaagagctgactgataacgccggaattgccctgcgttttcgggactgcgagtttgataattatctggaggttaatcctggcgcagccagaaatcttgcggcctgtcgccgctatgcggagaactggccagatatgctggagaacggtaccagtcttgttatgaccggcagttgtggtaccggaaaaaatcatctggctgtggctatggcaaaacacatcatccgtaactatctggccagtgtggagatcaccgacgtgatgcgccttacccgtgctgtgaaaaattgctggcggaatgacagcgaaaaaacagcggatgaagttattgagcgttatgcgtcaatggatttgctgatcatcgacgaagttggcgttcagtttggcagcgcggctgaaatggctattttgcaggaaattatcaacgccaggtacgaaagtatcttgcccaccattctgatcagtaacctctcaccggaagagttgtgggcgttcatcagtccccgaattgccgacaggatcacagacgggggacgcaactggttgtcgtttaactggcccagttaccgttctcgtatcagaggtgtggctgcatga

SEQ ID NO: 474298 - DNA, 639 bp, Shigella flexneri
atgttctaccgtatagattgtgagcgccttaatgaaattatcaatgaaaacaatcagttttcccgaaatggggaaacccgttttcgggaaactgtaaaacccaatttcgcggaggagggaaagccttcaccgcggacacgggaaacccctcgccgcggagaagggaaaaccaatttcgatcttacagagaatacaacagagattacttcagagaatactacagagagtaaaaacactattggcgcatccgctgacgcgtctgcaccagcgcgttcttcccgacaggaatattcaccggaatttgaacaggcctggcaggaatatccaaaacgtgctggtggtaactcaaaatccgcagccttcaaagcctggaaagcccggctcagggagggaataaaacctgaagccatgcttgatggcgtgaaacgctatgctgcctgggtacgtgccacaggaaataccggcacacagttcgtgaagcaggctgcgacgttctttggacccgatcgtcacttcgaagacttctggcaacagccagccgctcccagaggtgggcgacagcgacaggtcgatgtcctggctggcctgggagccatgtctgacaaattcggtaaatccagtgacaaactgacattctga

SEQ ID NO: 474299 - DNA, 165 bp, Shigella flexneri
atgcttacgcgctacagcctgttgttcaaatgtaagtccggtttcgtgttgtatctcttcacgcgttttatgtacgccttccgctgcatgtgctttatcctgccagtaaaaaatctgaccaaagaaaataacagcgtgcggacggtaatgctgccaacttactga

SEQ ID NO: 474300 - DNA, 342 bp, Shigella flexneri
atgatgagaaccttattagcgatattattgtttccgctgctggtgcaagccgccggggaggggatgtggcaggcaagtagtgtcggaattacgctaaatcatcgcggtgagtcgatgtcgtctgcacctctttctgcgcgacaacctgcttcaggattgatgacgctggtggcgtggcgttatcagcttatcggcccgacacctgcaggactgcgggttcgcttgtgttcgcaatctcgttgtgtcgaattagaggggcagagcggtaccaccgtggccttttccggtatagcggcagcagaaccgttgcgatttatctgggaagtgccaggcggtgggtga

SEQ ID NO: 474301 - DNA, 1383 bp, Shigella flexneri
atgagcatgggacacgcggcggaaagttatacgctattgaccattggcgacggtctggtggcacaaattccggcgctggtgatttctaccgccgcggggggcatcgttacgcgtgtcagcaccgatcaggatgttggcgagcagatggtgaatcagcttttcagtaacccaagcgttatgttgttaagcgccaccgtgctcggtttactcggcctggtgcctggaatgccgaacctggtatttttgctgttcactgccggattgctggggctggcctggtggatacgcggacgcgaacaaaaagcgcctgccgaacccaaaccggtaaaaatggcagagaataataccgttgtcgaagcgacgtggaacgatgtacaactggaagattctctgggaatggaagtgggttatcgactgatcccgatggtcgatttccagcaggatggtgagttgttgggccgtatacgcagtatccgcaagaaatttgcccaggagatgggatttctgccgccagtggtgcacattcgcgacaatatggatctgcaacctgcccgctatcgcattttgatgaaaggcgtggagattggcagtggtgatgcttatccggggcgctggctggcgattaaccctggaaccgctgccgggacgttacctggtgaggcgaccgtcgatccggcatttggcctgaatgctatctggattgaaagtgcgctaaaagaacaggcgcagattcaggggtacacagtggttgaggccagcacggtggtagcaacgcatcttaaccacctcattagccagcatgccgcagagctgtttggtcgtcaggaggcgcaacagctgttggatcgcgtcgcccaggagatgccaaagctgacggaagatctcgttcctggcgtcgtcacgctcaccacactgcataaagtgctgcaaaatctcctcgatgaaaaagtaccgattcgcgatatgcgcaccattctcgaaacgctggcggaacatgcgcccatccaaagcgatccacatgaattaaccgccgtcgtgcgcgtggcgttgggacgggcgattacccagcagtggtttcctggcaaagatgaagtccatgttattggcctcgatacaccgctggaacgtttgttactacaggcgctgcagggcgggggaggactggagccagggctggcggatcgtttactggcgcaaactcaggaagctctatcccgtcaggagatgctgggtgcgccgccagtattgttggtgaaccacgcgctgcgaccattattgtctcgcttcctgcgccgcagcttgccgcagttagtggtcctgtcgaatctggaactgtatgataaccgacatatccgcatgacggcgacaattggcggtaaatga

SEQ ID NO: 474302 - DNA, 621 bp, Shigella flexneri
ttgatcctgttgatcttgtcgatgatggtgctgccactgcccgcattcatactcgacctgttgtttaccttcaatattgccttgtcgatcatggtgttgctggtggcgatgtttacccagcgcacgcttgagtttgctgcgtttccgaccattctgttgtttactacgttgttgcgtctggcacttaacgtggcttcaacccgtatcattttgatggaagggcataccggcgcggcggcggctgggaaggtggtcgaagcgttcggtcacttcctcgttggtggcaatttcgctatcggtatcgtggtgtttgtcattctcgtgatcatcaactttatggtcattaccaaaggtgccgggcgtatagcagaagtgggtgcgcgctttgttctcgatggtatgccgggtaagcagatggcgattgacgccgaccttaacgctggattgattggtgaagatgaggcgaaaaaacgccgctccgaagtgactcaggaagccgatttttacggctcaatggacggggcaagtaagtttgttcgcggcgatgccattgccgggatcctcatcatggtcattaacgttgtcggcgggttgctggtcggcgtgctgcaactggcatga

SEQ ID NO: 474303 - DNA, 1194 bp, Shigella flexneri
gtgtctgacgagagcgacgacaaaacagaagcccccacacctcaccgactagaaaaagcgcgggaagaggggcaaatcccgcgttcccgtgaactgacctcactgctgattttgctggtgggcgttagtgttatctggtttggcggtgtgtcgctggcccgtcgattgtcgggcatgctctccgctgggctgcattttgatcacagtattatcaaagacccgaatctgatcctcgggcaaattattctgctgatcagagaagccatgctggcgctgctaccgctgattagcggcgtggtgctggtggcgctcatttctccggttatgctgggggggctggtatttagcggcaaatccttgcagccgaagttttccaaactcaacccgctaccgggcattaaacggatattctcggcacagactagcgcggagttgcttaaggcaattttgaaaaccatcctggttggcagcgtgacggggttttttctctggcatcactggccgcagatgatgcgcttaatggccgagtcaccgattaccgccatgggtaatgcgatggatttggtagggctatgcgcactgctggtggtgcttggtgtcattccaatggtgggatttgacgtctttttccaaatcttcagccacctgaaaaagctgcgaatgtcgcggcaggatattcgtgatgagttcaaacaaagcgaaggcgacccccatgttaaaggacggatctgtcagatgcagcgagctgccgcacggcgtcggatgatggccgatgtgccgaaagcggatgtcattgtcaataacccgacccactattcggtagcgttgcagtatgacgaaaacaaaatgagcgcaccgaaagtggtcgctaaaggtgcagggctggtcgcgctgcgcattcgtgaaattggcgctgaaaataacgtcccgacgcttgaagcgccgccgctggcgcgagcgctgtatcgacatgcggagattggtcaacaaatcccgggtcaactgtacgccgcggtggcggaagtgctggcctgggtctggcaactgaaacgctggcgtctggctggtggacagcgccctgtacacctactcatcttccggtgccggcagccctggattttattaacgagaaaccgacccatgagtaatctggccgcgatgctgcgcctgcccgcaaacctgaaatcgacataa

SEQ ID NO: 474304 - DNA, 270 bp, Shigella flexneri; identical to SEQ ID NO: 239458

SEQ ID NO: 474305 - DNA, 165 bp, Shigella flexneri; identical to SEQ ID NO: 239457

SEQ ID NO: 474306 - DNA, 924 bp, Shigella flexneri; identical to SEQ ID NO: 16120

SEQ ID NO: 474307 - DNA, 675 bp, Shigella flexneri
atgctccagccgcccgcattggagaaattcttcaaattcccgttgcacatagcccggcaattcctttccctgctctgccataagcgcagcgaatgccgggtaatactcgtcaacgatctgatagagaagggtttgctcgggtcggtggctctggtaacgaccagtatcccgatcccggctggccgtcctggccgccacatgaggcatgttccgcgtccttgcaatactgtgtttacatacagtctatcgcttagcggaaagttcttttaccctcagccgaaatgcctgccgttgctagacattgccagccagtgcccgtcactccctgtcgtctgggcgttcctctgggctaaacatcgacatgatccggcgcttaatatcgccgtccttgttgaccagcgtcttggtcacgaaggccgcgtattctttggcgttgtcgtaccctttccagacctcgtgggggtcaagagcgtaggcgcaaacccgcccagcgactgggattctgaccaaggcgcgttctgtctcaaggtacttgagccagttccgaatcgtgcgggtgctaacctccagatggtcagccaggaactgctgatcgcagacaacagcgccacaggtagggtcgatgtgttcagcgaagaaggcatacaggccagcggcccccgcattgccctttga

SEQ ID NO: 474308 - DNA, 861 bp, Shigella flexneri; identical to SEQ ID NO: 5314

SEQ ID NO: 474309 - DNA, 162 bp, Shigella flexneri; identical to SEQ ID NO: 463224

SEQ ID NO: 474310 - DNA, 1278 bp, Shigella flexneri
atgatttcacgctggaaatggatgctgaagcagacaattaaaaaactatggttcagggcaacgttattcgcaattgtcgcgataataacggcccttttatcaattctttttaaatcaatgatacctgagtcggtttccgtgaaggttggtgcggaagcagtcgataacattctgaacatactggcatcgagtatgctggcagtgaccacattttcgctgagtatcatggtcacagcctacggttcagccactactaatgtgactcccagagctacgcgtttagttgttgaagacgtcaccacacaaaatgtactggccaccttcatcggttcttttctcttcagtctggtagggattattgccctcaatatgggagcttatggagaaagggggagagtcattttattcattgtcacactggttgtcattgccttaatcctcatcacattgcttcgctggatacagcatttgacctctctggggagggttggtgagacaacggcacaagtagaacaggcggccatcgaaacatttattgcgagagcaagaaatccctgtctcggcggatatccatggcttgagaacaatgaacagccgaaaggaacggttgcagtttatccgaagaagattggctatgttgaatatattgatatggtgaaacttagcaagctgctgaccaatgatccccgtcatgtatacctcgtggcgcagccaggcagtttcatacatccgtccatgccagttttgtacctgagtcagggccaggagtcgtcaatcaacaccgatttacttgagacgattattgtctcggatgcacgttcatttgctcaggatcctcgattttgtcttagcgtcatggccgaaatagcctgccgggccctttcccctgcagtgaacgatcctggaaccgccattgatgtcattggcagaggtgttcgtatactttccacttacgcgcagaataaatctgatgaaatagaagtgaaatatccttcagtacatgttgcaccacttcagaataacgatctactggaagactttttctcacctgtcgcgcgcgatggtgccagtatgagggagattcagataagagtccttaaaggactgtcgatgctgagtaaaggttggcctgagatatttgctgaagccgcacataccctggcatttgaaacattagagcatgcaactcgtgctgaccatatagattctgatagatatctaataaaatcaacttattataatttatttagtggcgaatattctaataaaaaaaaatag

SEQ ID NO: 474311 - DNA, 159 bp, Shigella flexneri; identical to SEQ ID NO: 7652

SEQ ID NO: 474312 - DNA, 1998 bp, Shigella flexneri
atgagtgaaaatgatacaatcccaaagaagtctacaagtcagattaacaaagcggtattctttacatctgctttgctaattttccttcttgtcgcctttgccgccgtattcccggatgtcgccgacaaaaattttaaactacttcagcaacaaatcttcacgaatgccagctggttctacatccttgctgtggccctgattttactgagtgtcacgttccttggactctcacgctacggtgatatcaagctgggcccggaccatgcgcagcctgatttcagctaccactcctggtttgcgatgcttttttcggcagggatggggatcggcctgatgttctttggcgttgccgaacctgtaatgcattatctttcgccacccgttggcactccagaaaccgttgcggcagctaaggaagcaatgcgtctgacctttttccactggggactgcacgcatgggcaatttatgccattgtggcgctgattctggcgttcttcagttaccgtcacggtctgcctttaactctgcgctccgcactctatcccattattggcgatcgcatatacggacctgtaggacatgcggttgatattttcgctgttataggcacggtctttggcgttgcgacatcactgggttacggtgttttgcaggtgaatgccggtttgaaccatcttttcggggtgcccatcaatgaaacggtgcaggtaattctgatcgtggtcatcacggggttagcgacgatttcagtggtgtccggtctggataagggaatacgtatcctgtctgaactcaatctgggtctggctttgttgctcctggcgctggtcctgtgtctgggaccaaccgtgcttctgctgaagtcatttgtggaaaatacgggcggttatctttcggaactggtgagtaaaacgttcaacctttacgcgtatgagcccaagtcgagcaactggctggggggctggacattactgtactggggatggtggctttcatggtcgccgtttgtggggatgttcatcgcacgggtctcccgcgggcgaaccattcgcgagtttgtcaccggcgtgctgtttgttcccgcgggttttacgctaatgtggatgacggtgtttggtaacagcgcgatctatctcattatgaaccagggggccacagacctcgccaatactgttcagcaggatgtggcgctggccctgtttaatttcctggagcatttcccgttctcttctgtgctgtcattcattgcaatggcgatggtcatcgtcttctttgtaacgtctgctgattcgggggcaatggttgtggatactctggcatcaggtggagtggcaaacacacccgtctggcagcgaatattctgggcctcgctcatgggcattgttgcaattgcgcttctccttgccggagggctaagtgcgctgcaaacggtgacaatagcgagtgcattgcccttctcagtgatcttactaatatctatatacggacttttaaaagctttgcgccgggatttgaccaagcgtgaaagcctgagcatggcgacaattgctcctacggctgcacgtaacccaattccttggcagagaaggttacgcaatatcgcgtatctgccgaagcgatctcttgtgaaacgttttatggacgacgttatccagcccgccatgacgctggttcaggaggaactgaacaagcaggggacgataagccacattagtgatgcagtcgacgatcgtattcgtcttgaagtcgatttgggcaacgagctgaattttatatatgaagtgaggcttcgcgggtatatctcaccgaccttcgcgctcgccgcaatggataatgatgagcagcagactgaacaacatcgatattatcgcgctgaggtttatctcaaagaaggcggtcaaaattatgatgtgatgggctggaaccaggaacagctgattaatgacatactggaccagtacgaaaaacacctgcacttcctgcacctggttcgttaa

SEQ ID NO: 474313 - DNA, 123 bp, Shigella flexneri; identical to SEQ ID NO: 461374

SEQ ID NO: 474314 - DNA, 741 bp, Shigella flexneri
atgaaaaccaaaaactttcttcttttttgtattgctacaaatatgatttttatcccctcagcaaatgctctgaaggcagaaggttttctcactcaacaaacttcaccagacagtttgtcaatacttccgccgcctccggcagaggattcagtagtatttcaggctgacaaagctcattatgaattcggccgctcgctccgggatgctaatcgtgtacgtctcgctagcgaagatgcatactacgagaattttggtcttgcattttcagatgcttatggcatggatatttcaagggaaaataccccaatcttatatcagttgttaacacaagtactacaggatagccatgattacgccgtgcgtaacgccaaagaatattataaaagagttcgtccattcgttatttataaagacgcaacctgtacacctgataaagatgagaaaatggctatcactggctcttatccctctggtcatgcatcctttggttgggcagtagcactgatacttgcggagattaatcctcaacgtaaagcggaaatacttcgacgtggatatgagtttggagaaagtcgggtcatctgcggtgcgcattggcaaagcgatgtagaggctgggcgtttaatgggagcatcggttgttgcagtacttcataatacacctgaatttaccaaaagccttagcgaagccaaaaaagagtttgaagaattaaatactcctaccaatgaactgaccccataa

SEQ ID NO: 474315 - DNA, 867 bp, Shigella flexneri; identical to SEQ ID NO: 461376

SEQ ID NO: 474316 - DNA, 465 bp, Shigella flexneri
atgaaccattatccgtcagtcacttcactggagacgccggaagctcgttgccgaagcggcgttccaccgctcccagcatgtcgccaacgggagagcatctacggtctgattgaactgtttattcaaattgtccaccgtctgtcagtacgctctgaacgtcggctggttaaaacactgctcgctgattttcagagggttcacggtaaaacagcacttttattccggattgcggaagcggctctgaataatccggatgggctggttaaagaggttgtgtaccatctgcatattgttgaaccagatcgcagcggtaagagaagttcatcatacttggcgcagttacgcgatgtttctgctagaggtgatgccgtaaagaacggcagaacattaccggaacaagatagcggtctacctgcactggtatcagacccggggcttccccggatgatctccacggtactttag

SEQ ID NO: 474317 - DNA, 669 bp, Shigella flexneri
atgctggataaggcaccaattattaaagtgcctcaaccaaagaataaacggatccgctggctggagccccatgaagcacaaaggctgattgatgaatgtccggagccattaaagtctgttgttgaatttgcactggcaacaggcttaagacgctcgaacatcatcaaccttgaatggcaacaaatagatatgcagcgccgggtggcatggataaacccggaagagagtaaatcaaaccgcgcaattggcgttgcgctgaatgatactgcatgtcgcgtattgaaaaaacaaatcgggaatcatcaccgttgggtatttgtgtacaaggaaagctgtaccaaaccagacggaacgaaagcgccaacagtaaggaagatgcggtatgacgcaaacacagcctggaaagcggcgctgagacgggctggtattgatgatttcagatttcacgacttgagacacacctgggcaagttggctggttcaagccggagtcccgttgtcagtgttacaggaaatgggaggctgggagtctatcgaaatggttcgtcgatatgctcaccttgcacctaatcaccttaccgaacacgcacggcaaatagactcgatcctgaacccatcggtcccaaatttgtcccagtcaaaaaataaggaaggtactaatgatgtgtaa

SEQ ID NO: 474318 - DNA, 1254 bp, Shigella flexneri
atgctggaacaaatgggcattgccgcgaagcaagcctcgtataaattagcgcaactctccagccgcgaaaaaaatcgcgtgctggaaaaaatcgccgatgaactggaagcacaaagcgaaatcatcctcaacgctaacgcccaggatgttgctgacgcgcgagccaatggccttagcgaagcgatgcttgaccgtctggcactgacgcccgcacggctgaaaggcattgccgacgatgtacgtcaggtgtgcaacctcgccgatccggtggggcaggtaatcgatggcggcgtactggacagcggcctgcgtcttgagcgtcgtcgcgtaccgctgggggttattggcgtgatttatgaagcgcgcccgaacgtgacggttgatgtcgcttcgctgtgcctgaaaaccggtaatgcggtgatcctgcgtggtggtaaagaaacctgtcgcactaacgcggcaacggtggcggtgattcaggacgccctgaaatcctgtggcttaccggcgggtgccgtgcaggcgattgataatcctgaccgtgcgctggtcagtgaaatgctgcgtatggataaatacatcgacatgctgatcccgcgtggtggcgctggtttgcataaactgtgccgtgaacagtcgacaatcccggtgatcacaggtggtataggcgtatgccatatttacgttgatgaaagtgcagagatcgctgaagcattaaaagtgatcgtcaacgcgaaaactcagcgtccgagcacatgtaatacggttgaaacgttgctggtgaataaaaacatcgccgatagcttcctgcccgcattaagcaaacaaatggcggaaagcggcgtgacattacacgcagatgcagctgcgctgacacagttgcaggcaggccctgcgaaggtggtggcggttaaagccgaagagtatgacgatgagtttctgtcattagatttgaacgtcaaaatcgtcagcgatcttgacgatgccatcgcccatattcgtgaacacggcacacaacactccgatgcgatcctgacccgcgatatgcgcaacgcccagcgttttgttaacgaagtggattcgtccgctgtttacgttaacgcctctacgcgttttaccgacggcggccagtttggtctgggtgcggaagtggcggtaagcacacaaaaactccacgcgcgtggcccaatggggctggaagcactgaccacttacaagtggatcggcattggtgattacaccattcgtgcgtaa

SEQ ID NO: 474319 - DNA, 1104 bp, Shigella flexneri
atgagtgacagccagacgctggtggtaaaactcggcaccagtgtgctaacaggcggatcgcgccgtctgaaccgtgcccatatcgttgaacttgttcgccagtgcgcgcagttacatgccgccgggcatcggattgttattgtgacgtcgggcgcgatcgccgccggacgtgagcacctgggttacccggaactgccagcgactatcgcctcgaaacaactgctggcggcggtagggcagagtcgactgattcaactgtgggaacagctgttttcgatttatggcattcacgtcgggcaaatgctgctgacccgtgctgatatggaagaccgtgaacgcttcctgaacgcccgcgacaccctgcgtgcgttgctcgataacaatatcgttccggtaatcaatgagaacgatgctgtcgctacggcagagattaaggtcggcgataacgataacctttctgcgctggcggcgattctggcgggtgccgataaactgttgctgctgaccgatcaaaaaggtttgtataccgctgatccgcgcagaaatccgcaggcagaactgattaaagatgtttacggcattgatgacgcactgcgcgcgattgccggtgacagcgtttcaggcctcggaactggcggcatgagtactaaattgcaggccgctgacgtggcttgccgtgcgggtatcgacaccattattgccgcgggcagcaagccgggcgttattggtgatgtgatggaaggcatttccgtcggtacgctgttccatgcccaggcgactccgcttgaaaaccgtaaacgctggattttcggtgcgccgccggcgggtgaaatcacggtagatgaaggggcaactgccgccattctggaacgcggcagctccctgttgccgaaaggcattaaaagcgtgactggcaatttctcgcgtggtgaagtcatccgcatttgcaacctcgaaggtcgcgatatcgcccacggtgtcagtcgttacaacagcgatgcattacgccgtattgccggacaccactcgcaagaaattgatgcaatactgggatatgaatacggcccggttgccgttcaccgtgatgacatgattacccgttaa

SEQ ID NO: 474320 - DNA, 486 bp, Shigella flexneri; identical to SEQ ID NO: 461024

SEQ ID NO: 474321 - DNA, 981 bp, Shigella flexneri
atggaaaacagaaagcaccgaccgactattggccgtacgctgaatacaaatatcctgaataatactgaagaaatatcggctccagttcatgtatttaccctcaatactggccgaaaggcaaaatttactgagatcaaggttgatcatgacaaagtggatactcaaacttttgtggttgaagaggtgaatggccgcgaacagacagccctgacgccggactcactaaaagacatcaccagaactatacgtttacaacaattctatccatgtattgggattcggactggcgatcttattgagattttggatggttcccgtcgtcgggcagcagctttgctatgcaaggttggattacgtgtacttgtaacggatgatgagcttactgtttctgaagctcagcatctggcgaaagatttgcagacgtcacttgaacataatattcgtgaaattgggttgcgtttagtacgtctcaaagaggccggtatgaaccagaagcaaattgcggaaagagagggattgtcggcagctaaggtgactcgtgccctccaagcagcgtccgtacctaaagattttgtgtctctttttcctgttcagtctgagctgacatacgccgattacaggcaactggctgaattaagtgaacgactgaggctgggtgatatatctattgatgaagttgtgaagaatatctcgccgagtattgagcttattactgctgatgacaatctttctgaagacgaggttaaaaacagtattatgcggcttataaccaaggaaatgtcttcattgcttgattcaggagtaaaggataaagcggttgtaactttgttatggaaatttgatagtaaagataaatttgctcgaaaacgagtaaagggacgtacgttctcatatgaattcggcagattaccgttggaagttcaggataagttagatcgtatgattgctcttgtactaaaagataatctgaattcgctgtga

SEQ ID NO: 474322 - DNA, 1200 bp, Shigella flexneri; identical to SEQ ID NO: 461026

SEQ ID NO: 474323 - DNA, 297 bp, Shigella flexneri
gtgttggcttacactttcgggccacggaatgatgagacctgtcgggaactgttagccctgttgactccgttctgtatcggcatggtgaccagcgatgactggggcagctacgccagagaagtgccgaaggagaaacacctgaccggcaaaatcttcacgcaacgtattgcacgtaacaaccggaccctccgcacccgcatcaagcggctggcacgtaaaacaatctgcttctcgcgttccgtggaaatccacgaaaaagtcatcggctccttcattgaaaagcacatgttctactga

SEQ ID NO: 474324 - DNA, 540 bp, Shigella flexneri
atgtctggaaatataggggcaaatccagcaatcatcaaactgtcttggatagaagccgcagtggatgcgcacaaaacgttaaatttcgaacccagtggaagaaagcgtattggctttgacgtggctgacagtggtacagataagtgcgctaacgtttaccgtcacggatccgttgttttctgggccgacgaatggaaggccaaagaagatgaattactgaagagctgccagcgtacttatcaggcggcgctggagcgtgaagcagatattgtttacgactctatcggtgttggtgcgtctgccggtgctaaattctctgaaattaacgctgaccggaagagcgagaacgcatacgcgcgacgtgtgaattaccagaggtttaacgccggtgctggtgtgcatgagccagatgacgagtacaacggcatccccaacaaagactttttcgcaaatcttaaggctcaggcatggtggctgaccgtttcagaaatacgtttaacgccattaacaacggagaacagtatcctgtggatgagctga

SEQ ID NO: 474325 - DNA, 234 bp, Shigella flexneri
gtggatgagctgatcagcatagattctcgttgtccgttgcttgaaaagctgaaactggaactgacaacacctcatcgtgatttcgaccgtaacggacgtgtgatggtcgaaagtaaaaaagacctcgcaaaacgcgagacaccgtcaccaaacgttgctgatgcattcattatggccttcgcgccaatcgatacatcgctggatatctgggaacagctggggagacaggcctga

SEQ ID NO: 474326 - DNA, 1467 bp, Shigella flexneri
atggcacgaaacaaacaagccctgcggcgaactgtgcaggccacagctgatggttatgagaattttattgcccgagtagggatgcagacacctaaccagcactcagcatccacctaccgggctaatttcaccagtcgtaaccgcatgctggtggaatggtcctatcgttcatcctggatcatcggcgaagcagtcgatgctatcccggatgatatgacccgcaaaggcattcgcatcacttcggaaattgatgcaaaagatcgtggcattctcgaatcacaactggatgagttgcaaatctgggatgcgctgaatgacgtgctgaaatggtcgcgcctctacggcggcgcggtgggtttcatcatgattgaggggcaggcaccaatgaccccgctgcgacccgaaaccatcggtaagggcaagtttaaggggattctcccgctcgaccgctggatggtcgacccggcactgacccgccgcattaaagatatggggccggacctgggtaaacctgagttttacgatgtggtgaccacagcaacgggaattcctgcctggcgcattcatcacagtcgcctgattcgctttgatggcgtcacgttgccatttcagcagaagatgaccgagaacgaatggggaatgtcggttgtagagcgtatctgggatcgtcttaccgcgttcgacagcgctactgtcggcgcggcgcagctggtctacaaggcgcatttgcgtacctacagcgtggagaagctacgcgagcttatcgcacttggtggtcctgcgtatgaagcgttgctgaagaatatcgacctgattcgacagttccagagtaatgaaggcatgacgctcatggactcgcgggataagtttgaaacccatcagtacagcttcagtggtctggatgacatcctttcgcagtttgcagaacagattagtggcgctgttggtatcccactggtgcggttgttcggacagtccccgaaaggattttctaccggtgatgcagaccttgccaactattacgatcgcatcagttcgttgcaggagaggcgtttacgtcttccggtgcggcggatactggacatcatgcatcgttcggaacttggcaagccgctgccggacgatttcacgtttgagtttaacccgctctggcaaatgtctgatgtcgatcgctcaacggtggcgttaaacaccaccaacgcaatcagtacggcgctgggtgatggtctgatgacactgaaagccgctatgactgatttgcgagaaaattctgacgtaaccggcataggggcatccattaccaacgaggacatcgagaatgccgaagatgaagcgccgcccggcatcggcgaacctgatgacgaaccgcaggagccgtcaggcggaaatccggtatcgaaccagcctacgcaggatagcgagggcggtcggagacatcgtaaatggtcgctacgatggttcaaatga

SEQ ID NO: 474327 - DNA, 459 bp, Shigella flexneri
gtgggccaggtgatgcaatccatcatcgccgaacaggtcaagtacatcaaatctctgcctctcgaggccgcagacagggtgtacgacatccagagcaaagcgatagaggctgttgtcaccggtggtcgggcggagcagtttgctaaagagattgcatctaccggcgatgttgctaagtctagggccgatctgattgcccgaacggaactgggaagagcaacgggcgcgctggatatggcccgagcgatagctattggctcggatggttatatttggcgtacagccgatgatggcgatgtccgagattcccacgatcacatgaaaggtaaattcgtccgctgggattcacctccaactttggacggcatgaccggccacgcgggcgagctgccaaactgccgctgctataaagagatcgtgtttgttcgcgttccattcgcaatgaaaagggcagcataa

SEQ ID NO: 474328 - DNA, 783 bp, Shigella flexneri
atgaaatacttttttgagaccaggctcggggaaacccgataccgcctggctgacggctcgttgctgtgcaaagacgtgccgataggacgaacaggtaagcagctctatggtgctgatgacctgccaaaactgaaacccgataagttcgttgaaatagtcgtcacgcgttctcctgagcaggtattccatccggccacgcttgcctcattcgaagggatgagcatcacgatcctgcatcctgaagatgaaaacgggaatgtgcggctggtaaatcccgagaactggaaagtgcttgctgtcgggcacctccagaatgtccggcgcgggacgggtgagcagtctgatttgatgctggctgaccttatcgtcaaagacgaaagcgccattcagcttatcgaagatggcctgcgcgaagtgtcgtgcggctatgacgcggagtacgagcagaccgagccaggtaaagccgagcaggtcgatattaccggaaaccatgtggctcttgtccctaaaggcagagccggaaatcgttgtgcaattggagacagagacacaatggcaaatcaaaagaaaaactggtggaaccgcatgcgtgcggccatcaagacaggagatgccgacaccatgaacgaactggtggagtcggctcccgcatcggttacaggagatgagggggatttgccgcagggcgttaatctcaacatcaacctgtccccgcagcaaccactaccggacaaagcaccagagatgggcggagatccaaccggcgacagtgatgatgactga

SEQ ID NO: 474329 - DNA, 462 bp, Shigella flexneri
atgaaggctttcaataagctgttttccctcgttgttgcatctgttctggttttctctcttgctggctgcggtgacaaagaagaatcgaagaaattcagcgccaatctgaacggcactgaaattgccattacctatgtctacaaaggtgacaaggtgcttaagcaatcttctgaaaccaaaattcaatttgcctccattggtgcaaccaccaaagaagatgctgccaagacacttgagccgttaagcgccaaatacaaaaacatcgcgggtgttgaagaaaaatcaacctataccgatacctacgcgcaggaaaacgtgactatcgatatggaaaaagtggattttaaagccctgcagggtatttcaggaatcaacgtttctgctgaagatgccaaaaaaggtatcactatggcgcaaatggaactggtgatgaaagccgctggttttaaagaagtgaaataa

SEQ ID NO: 474330 - DNA, 471 bp, Shigella flexneri
atgataagtaacgatattctgcgcagcgtgcgctacattttgaaagccaataataatgacctggtgcgtattctggcgctggataatgtcgaagccaccgcggaacagatcgccgtctggctacgtaaagaagacgaagagggttttcagcgttgtccggacattgttttgtcgtcattcctcaatggcctgatttatgaaaaacgcggcaaggatgagtctgctccggcactggagccggaacgtcgcattaataacaacatcgtgctgaaaaaattacgcatcgcgttttcgctgaaaaccgatgacattctggctatcctcaccgaacagcagttccgcgtttcgatgccggaaattacagcgatgatgcgcgcaccggatcataaaaacttccgcgaatgcggcgatcaatttttacgttattttctgcgtggactggcagcgcgccagcatgtgaagaaaagctaa

SEQ ID NO: 474331 - DNA, 720 bp, Shigella flexneri
atgattaaagtcttaattgtcgatgatgaaccgttagcacgggagaacctgcgtatatttttgcaggagcagagcgatattgaaatcgttggagagtgttcaaacgccgtggaagggatcggcgcggtgcataaactgcgcccggatgtgctgtttctcgatatccagatgccgcgcatcagtggtctggaaatggtggggatgcttgacccggaacatcgcccgtatattgtttttctcactgcgtttgacgaatacgctattaaagcctttgaagaacatgcctttgattatctgctgaagccaattgatgaagcgcgactggagaaaacgctggcgcgattgcgtcaggagcgcagcaagcaggatgtttcgctgttaccggaaaatcaacaggcgctgaaatttatcccttgtacggggcatagtcggatttatttgctgcaaatgaaagatgtggcatttgtcagcagtcggatgagcggtgtctacgttaccagccacgaagggaaagagggctttaccgaattgacattacgtaccttggaaagtcgtacaccactactgcgctgccatcgtcagtatctggttaacctcgcgcatttacaggagattcgtctggaagataacggccaggccgagttgattttgcgtaatggcttaaccgtgccggtcagccgccgttatctgaaaagcttaaaagaggcgattggcctgtaa

SEQ ID NO: 474332 - DNA, 1686 bp, Shigella flexneri
atgtacgattttaatctggtgttgctgctgcttcagcagatgtgcgtttttttagtcattgcgtggttaatgagtaaaacgccattattcataccgttaatgcaggtcacggttcgtctgccgcataaatttctctgctacatcgtcttttccatcttctgcatcatgggcacctggtttgggttgcacattgacgattctattgccaatacccgtgcgataggcgcggtaatgggcggcttactcggcggtccggtcgtcggtgggctggttggtctgaccggcggcttacatcgatattcgatggggggcatgaccgcgctaagttgcatgatctcaaccatcgttgaaggattgctcggcggcctggtacacagcatcctgatccgtcgcgggcgcactgataaagtctttaaccccattaccgccggtgccgtcacgttcgtcgctgaaatggtgcaaatgctgatcatccttgcgatcgcccgaccttatgaagatgcggtgcgtctggtgagtaatattgctgcgccaatgatggtcaccaataccgtcggcgcggcgctgtttatgcgtatattgctcgataaacgcgcgatgtttgaaaaatacacttcggctttttctgccactgcgctgaaagtggcagcctcgacggaaggcattttgcgacaggggtttaacgaagtgaacagcatgaaagtggctcaggtactgtatcaggagctggatattggtgcagtcgcgattaccgatcgagagaaattgctggcctttaccggaattggtgacgaccaccatttacccggcaaaccgatttcttcgacttacaccttaaaagcgattgaaaccggtgaagtggtctacgctgatggcaacgaagtaccttatcgttgctctttgcatccgcaatgcaaactggggtcgacgctggtaattccgttgcgtggcgaaaatcagcgcgtgatgggcaccatcaaattgtatgaagccaaaaaccggttattcagttcaataaaccgcacgctgggcgaggggattgcgcaactgctttcggcgcagattcttgccgggcaatatgagcggcaaaaagcgatgctcacccagtcagaaatcaaactgcttcacgcccaggtgaatcctcattttttgtttaatgcgcttaacaccattaaagcggtgatccgccgcgacagcgaacaggccagccagctggtgcagtatctttccacttttttccgcaaaaacttaaagcggccttcggagtttgttactctcgccgacgaaattgaacatgtgaacgcttatctgcaaattgaaaaggcgcgcttccagtcgcggttgcaggtcaacattgctattccgcaagaattatcccagcagcaattgcccgcgtttaccctgcaaccgatagtggaaaacgccattaaacatgggacatcacaactgctggatacagggcgagtggcaatcagcgcccgacgtgaggggcaacatttgatgctggagatcgaagacaatgccggtttgtatcaaccggtaaccaatgccagtgggctggggatgaatctggtggataagcgtttacgtgaacggtttggcgatgactatggaataagcgtcgcctgtgagcctgatagttacacccgaataacgttacgactaccatggagggacgaggcatga

SEQ ID NO: 474333 - DNA, 981 bp, Shigella flexneri
atgaacgcaataatatcacccgattattactatgttcttaccgttgctggtcagtctaatgccatggcgtatggcgaaggactgccattaccggacagggaagatgcgcctcattccagaattaaacaattagcgagatttgcgcatacgcatcccggaggcccgccatgtcactttaacgacattattccactgactcactgcccacacgatgttcaggatatgcagggttatcaccatcctctggcaacgaatcatcaaacacagtacggcaccgttggccaggcactgcatattgcacggaaattactgcccttcattcctgataatgcagggattcttatcgttccgtgttgccgtggcggatcggcttttaccgcgggcagcgaagggacatattcagaacggcacggagccagccatgatgcttgtcgttggggaacggatactccgctgtaccaggatttagtcagcagaacgcgagccgcactggcaaaaaatccgcagaacaaattcctcggcgtatgctggatgcaaggcgaatttgacttaatgaccagtgactacgcgtcacaccctcaacactttaatcatatggttgaagcctttcgtagggatctaaaacaataccattctcagcttaataatattactgacgcgccgtggttttgcggcgataccacctggtactggaaagaaaatttcccgcattcgtatgaagctatttatggcaattatcaaaataatgttttagccaatattattttcgtcgacttccagcaacaaggtgaaagaggactgacgaacgcgcctgatgaagacccggacgatttaagcacgggatattacggttcagcgtaccggtcaccggagaactggacgacggcactgcgaagcagtcatttcagcacggcagcccgtcgggggattatttctgacagatttgtagaagcaattttgcagttttggcgcgaaaggtga

SEQ ID NO: 474334 - DNA, 1107 bp, Shigella flexneri
atgaataaaactataatggcgcttgctatcatgatggcttcatttgccgcaaacgcgtctgtattaccggaaactcctgtgccatttaaaagtggtaccggagcaattgataacgacactgtctacattggtttaggtagcgcaggtacagcatggtacaagctagatacacaggccaaagataaaaaatggactgcgttagctgcattccctggtggaccgagagagcaagcaacctctgcatttattgatggcaatctgtatgtgtttggcggcattggcaaaaacagcgagggattgactcaggtatttaatgacgtacacaaatacaaccccaaaaccaatagctgggttaaattgatgtcgcacgcgccgatgggcatggcgggtcatgtgacttttgtacacaacggcaaggcttatgttactggcggtgttaaccagaatatcttcaatggctattttgaagatctcaacgaggctggaaaagattcaaccgctatagataaaatcaacgcccactattttgacaaaaaagcagaagattatttcttcaataagtttctgttgtcttttgatccctcaacacagcaatggagttacgctggcgaatcgccctggtacggaacggctggtgcggcggttgtgaataaaggtgataaaacctggcttattaatggcgaagccaaaccaggattgcgaacggatgccgtatttgaacttgatttcaccggtaataatttaaaatggaataagcttgatcccgtctcatcaccagatggcgtcgctggcggttttgcggggataagcaatgattctcttatatttgccggaggggccggattcaaaggttcacgagaaaattaccagaacggtaagaactatgcgcatgaaggcctgaaaaaatcatatagcactgatattcatctttggcataacgggaaatgggataaatcgggtgaattatcgcaaggtcgggcctacggagtatcattgccctggaataatagtttattaattattggcggtgaaactgcaggcggcaaagcggtgacggattcagttttaatttctgtgaaggataataaagtcacagtacaaaactaa

SEQ ID NO: 474335 - DNA, 717 bp, Shigella flexneri
atgaaaaaggctaaaatactttctggcgtattattactgtgcttttcgtccccattaatttctcaggctgcgacactggacgtacgtggtggatatcgtagtggaagccacgcctatgagactcgactcaaagtcagtgagggatggcaaaatggatggtgggcaagcatggaaagtaatacctggaataccattcatgataataaaaaggaaaatgccgcactcaatgatgttcaggttgaagttaattacgcaattaaacttgatgatcaatggacggtgcgcccgggaatgttaacgcattttagcagcaacggcacacgctacggaccctacgtaaaactgtcctgggacgcgacaaaagatcttaattttggcattcgctatcgttacgactggaaagcttaccgacaacaagacttatccggtgatatgtctcgtgataacgttcatcgttgggatggatatgtcacttaccatattaatagtgatttcaccttcgcatggcaaacgacgctatacagcaaacagaatgattatcgctatgcaaaccacaagaaatgggcgacggaaaatgcctttgttctacaataccatatgacgcccgatattacgccatacatagaatatgactaccttgaccgccagggtgtttacaacggcagagataatttatcggaaaacagttatcgcattggtgtgtcatttaaactgtag

SEQ ID NO: 474336 - DNA, 927 bp, Shigella flexneri
atgacgccttacctacagtttgaccgcaaccagtgggcagctctgcgtgattccgtacctatgacgttatcggaagatgagatcgcccgtctcaaaggtattaatgaagatctctcgttagaagaagttgccgagatctatttacctttgtcacgtttgctgaacttctatataagctcgaatctgcgccgtcaggcagttctggaacagtttcttggtaccaacgggcaacgcattccttacattatcagtattgctggcagtgtcgcggtggggaaaagtacaaccgcccgtgtattgcaggcgctattaagccgttggccggaacatcgtcgtgttgaactgatcactacagatggcttccttcaccctaatcaggttctgaaagaacgtggtctgatgaagaagaaaggcttcccggaatcgtatgatatgcatcgcctggtgaagtttgtttccgatctcaaatccggcgtgccaaacgttacagcccctgtttactcgcatcttatttatgatgtgatcccggatggagataaaactgttgttcagcctgatattttaattcttgaagggttaaatgtcttacagagcgggatggattatccacacgatccacatcatgtatttgtttccgattttgtcgatttttcgatatatgttgatgcaccggaagacttacttcagacgtggtatatcaaccgttttctgaaattccgcgaaggggcttttacagacccggattcctattttcataactacgcgaaattaactaaagaagaagcgattaagactgccatgacattgtggaaagagatcaactggctgaacttaaagcaaaatattctacctactcgtgagcgcgccagtttaatcctgacgaaaagtgctaatcatgtggtagaagaggtcagactacgcaaataa

SEQ ID NO: 474337 - DNA, 966 bp, Shigella flexneri
atgaaggataacaccgtgccactgaaattgattgccctgttagcgaacggtgaatttcactctggcgagcagttgggtgaaacgctgggaatgagccgggcggctattaataaacacattcagacactgcgtgactggggcgttgatgtctttaccgttccgggtaaaggatacagcctgcctgagcccatccagttacttaatgctgaacagatattgggtcagctggatggcggtagtgtagccgtgctgccagttattgactccacgaatcagttccttcttgatcgtatcggagagcttaaatcgggcgatgcctgtgttgcagaataccagcaggctggccgtggtcgccgggggcggaaatggttttcgccttttggcgcaaacttatatttgtcgatgttctggcgtctggaacaaggcccggcggcggcgattggtttaagtctggttatcggtatcgtgatggcggaagtattacgaaagctgggagcagataaagttcgtgtcaaatggcctaatgacctctatctgcaggatcgcaagctggcaggcattcttgtggagctgactggcaaaactggcgatgcggcgcaaatagtcattggagccgggatcaacatggcaatgcgccgtgttgaagagagtgtcgttaatcaggggtggatcacgctgcaggaagcggggatcaatcttgatcgtaatacgttggcggccatgctaatacgtgaattacgtgctgcgttggaactcttcgaacaagaaggattggcaccttatctgtcgcgctgggaaaagctggataattttattaatcgcccagtgaaacttatcattggtgataaagaaatatttggcatttcacgcggaatagacaaacagggggctttattacttgagcaggatggaataataaaaccctggatgggcggtgaaatatccctgcgtagtgcagaaaaataa

SEQ ID NO: 474338 - DNA, 1029 bp, Shigella flexneri
atgaaccactccttaaaaccctggaacacatttggcattgatcataatgctcagcacattgtatgtgccgaagacgaacaacaattactcaatgcctggcagcatgcaaccgcagaaggacaacccgttcttattctgggtgaaggaagtaatgtactttttctggaagactatcgcggcacggtgatcatcaaccggatcaaaggtatcgaaattcatgatgaacctgatgcgtggtatttacatgtaggagccggagaaaactggcatcgcctggtaaaatacactttgcaggaaggtatgcctggtctggaaaatctggcattaattcctggttgtgtcggctcatcacctatccagaatattggtgcttatggcgtagaattacagcgagtttgcgcttatgttgattgtgttgaactggcgacaggcaagcaagtgcgcttaactgccaaagagtgccgttttggctatcgcgacagtatttttaaacatgaataccaggatcgcttcgccattgtagccgtaggtctgcgtctgccaaaagagtggcaacctgtactaacgtatggtgacttaactcgtctggatcctacaacagtaacgccacagcaagtatttaatgcggtgtgtcatatgcgcaccaccaaactccctgatccaaaagtgaatggcaatgccggtagtttcttcaaaaaccctgttgtatctgccgaaacggctaaagcattactggcgcaatttccaacagcaccaaattacccccaggcgggtggttcagtaaaactggcagcaggttggcttattgatcagtgccagctaaaagggatgcaaatgggtggggctgcggtgcaccgtcaacaggcgttagttctcattaatgaagacaatgcaaaaagcgaagatgtggtgcaactggcacaccatgtaagacaaaaagtgggtgaaaaatttaatgtctggcttgagcctgaagtccgctttattggtgcatcaggtgaagtgagcgcagtggagacaatttcatga

SEQ ID NO: 474339 - DNA, 516 bp, Shigella flexneri
atgccattctatttcaggaaggagtgtccgttaaactcaggctacctcatccgtctgggtggggagatggataaagatatgatcgccattcgaatcgggccagatataccaatggctattgttggctcaccggattatttttctcgtcgaagtgctccaacgtcagtgtcacaattaatagatcatcaggcaattaatttgtatcttcccacatcgggtacagcaaatcgctggagattaatacgcggtggacgtgaagttcgtgttcgcatggaaggtcagcttttactgaatacgatagacctgatcattgatgctgcaattgatgggcatggattggcgtatctaccttatgatcaggttgagcgggctattaaagaaaaaaaactgatacgtgttttggataaattcactccagatttacccggttatcacctgtactatccacaccgtcgacatgctggctcggcattctcattatttatagataggctgaagtataaaggtgctgtttag

SEQ ID NO: 474340 - DNA, 1614 bp, Shigella flexneri
atgaagcactctgtttcagttacgtgttgtgcgctgttggtcagcagcatttctctttcgtatgctgcagaagttccgagcggcacagtactggcagagaagcaggagctggtgcgccacattaaagatgagcctgcgtcgctggatcccgctaaagccgtgggcctgccagagattcaggtcattcgcgatctgtttgaaggtctggtgaatcagaacgaaaaaggggagattgtccccggcgtcgcgactcaatggaaaagtaatgacaaccgtatctggacttttaccctgcgcgataacgcaaaatgggcggatggcacaccggtaacggcgcaagattttgtctacagctggcaacgtctggtggacccaaaaacattgtcgccatttgcatggtttgccgcgctggcgggaatcaacaacgcacaggcgattattgatggtaaagctacgcctgatcagcttggcgtcaccgcagttgatgcccatactttgaaaattcagcttgataaaccgttgccgtggtttgtgaatttaaccgctaactttgccttcttcccggtgcaaaaagccaacgtagaaagcggtaaagagtggacgaaacccggaaatctgatcggcaatggcgcttatgttcttaaagagcgcgtagtcaatgaaaaactggtcgtggtaccgaatacccattattgggataacgccaaaacggtgctgcaaaaagtgaccttcctgccaattaatcaggaatccgcagccactaagcgttacctcgcgggggatattgatatcaccgaatccttcccgaaaaatatgtatcagaagctgttgaaggatattccggggcaggtttatacgccaccgcagctcgggacctattattatgcctttaacacgcaaaaagggccgacggcagatcagcgcgttcgcctggcattaagtatgacgatagatcgccgcctgatgaccgaaaaagtgttggggacgggcgaaaagccagcgtggcattttataccagatgttaccgccggatttacgccggaaccttcgccgtttgaacaaatgagtcaggaagaactgaatgcgcaggcaaaaactttgttgagcgcagctggttatggtccgcaaaaaccgctgaagctgacgcttttgtataacacttcagaaaaccatcaaaaaattgcgattgctgtagcatcgatgtggaaaaagaaccttggcgtagatgttaaattgcaaaatcaggaatggaaaacctatatcgatagccgtaacaccggcaattttgatgttatccgcgcctcatgggtgggggattataatgaaccctccactttcctgacattattaacgtcaatgcattcaggaaatatttcacgctttaacaatccggcatacgacaaagttctggcccaggcatcgacggaaaataccgttaaagcgcgtaatgccgattacaacgcggcagaaaaaatcctcatggagcaagcaccgattgcaccaatttatcaatataccaatggacgattaatcaaaccgtggctgaaaggttatcccattaataaccctgaagatgtagcgtacagtcggactatgtatattgtgaagcattga

SEQ ID NO: 474341 - DNA, 1014 bp, Shigella flexneri
atggttacgctttggggaaattatgaggggatctctcagtgcgcagcattgattctgatgagcttttggtttcgccgtggaaatcgtaaaagaaaaggatttttattccatgcggtgcaatttttaatctacaccataattatcagtgctgttggtagcatcagtaattatgttatagaaaactataaactcaaatttatcaccccaggcgttatcgattttatctgtacgtccctgattgcggttattctgacgattaagctatttctgctgattaatcagtttgaaaaacagcagattaaaaaaggtcgcgatatcaccagtgcgcggattatgtcgcgcattatcaaaatcaccattattgtagtgcttgttctgctttatggcgaacatttcggcatgagcctttctggcttgctgacctttggtggtattggtggtctggctgtcggtatggccggtaaagatattctgagtaatttcttttccgggatcatgctctatttcgaccgtcctttcagtattggcgactggatccgttcaccggacagaaatatcgaaggtacagtagcggaaattggctggcgaattaccaaaattacgacctttgataatcgtccattgtacgtaccgaactcgctgttttcgtcgatcagcgtagaaaacccaggacgaatgaccaaccgccgcattaccacgaccattggtttacgttatgaggatgcggcaaaagtgggcgttattgtcgaagccgtacgtgagatgctgaaaaatcacccggccatcgaccagcgacaaaccttactggtttatttcaaccagtttgctgactcgtcattgaatattatggtttattgctttaccaaaaccacggtatgggctgagtggcttgctgcacagcaagacgtttatttgaagattatcgatattgtacagtcacacggcgcggactttgccttccccagccagacgctgtatatggataacattacaccgccggaacaggggcgctaa

SEQ ID NO: 474342 - DNA, 189 bp, Shigella flexneri; identical to SEQ ID NO: 469030

SEQ ID NO: 474343 - DNA, 795 bp, Shigella flexneri
atgctgccctggtacacgcatctgggcatcaaattcaccctcgcaccgttcagcattctcggtgtcgccatcgccatttttcttggttttcgtaataatgccgggtacgcccgttacgttgaagcgcgaaaactttgggggcagttgatgattgcctcacggtcgttactgcgagaggtaaaaacgacattgccggattcggcaagtgtaagggagtttgccaggctgcaaatcgccttcgcccactgtttacgcatgacattacgcaaacagccacaggcggaagtgctggctcattatctcaagactggagatcttcagcgtgtactggcttcgaactctccagctaaccgtatcttgttaataatgggagaatggttggcggttcagcgccgcaatggacagctttcagatatcctgtttattagcctcaacgatcggcttaatgatatttcagcggttctggcaggctgtgagcgcattgcctacacgccaattccctttgcctacaccctgattttgcatcgtaccgtttatctgttttgtatcatgctgccgttcgcgctggtcgtggacctgcattacatgacgccttttatctctgtgctgatttcctacacttttatttcgctggattgtctggcggaagaactggaagatccgttcggtactgaaaacaatgatttaccgctggatgccatctgcaacgctattgaaattgacctgttacagatgaacgatgaagcagaaattccagcaaaaattcttcccgatcgtcattaccagctgacgtga

SEQ ID NO: 474344 - DNA, 759 bp, Shigella flexneri
atgtctgactggaacccctctttatatctgcacttttccgctgaacgatcgcgtccggcggtggagctgcttgccagagtgccgctggagaatgtcgaatatgttgccgatcttggctgtggcccaggtaacagcaccgccctgctgcatcaacgttggcctgcggccaggataacaggcatcgactcgtctccggcgatgattgctgaagcgcgcagtgctttgccagactgccagttcgtggaagcagacatccgcaactggcaaccggaacaggcactcgatctgatttttgctaatgcctcactgcaatggctgcccgaccactacgaattgtttcctcacttggtttctttacttaatccgcagggcgtgctggcagtacagatgccagataactggctggagccgacccatgtgctcatgcgcgaagttgcttgggaacaaaactacccggatcgcgggcgtgagccgttggctggcgttcatgcttactacgatattttgagcgaagccggatgtgaggtcgatatctggcgaaccacttactatcaccagatgccgtcgcaccaggcgattatcgattgggtgaccgccactggattacgtccgtggttacaggatctgaccgagagcgaacagcagctttttcttacgcgctaccatcagatgctggaagagcagtatccactgcaagagaacggacagatactgctggcatttccgcgtctgtttattgttgcccgccgtacggagtaa

SEQ ID NO: 474345 - DNA, 291 bp, Shigella flexneri
atgcacgtcacactggttgaaattaacgttcatgaagacaaggttgacgagtttatcgaagtttttcgccagaaccacctgggctctgtacaggaagaaggtaatttgcgcttcgatgtcttacaggacccggaagtgaattcgcgcttttatatttacgaagcctataaagatgaagacacagtggcattccataaaaccacgcctcactacaaaacctgtgtcgcgaaactggaatctttaatgaccgggccgcgtaaaaaacgtctgttcaatgggttgatgccgtga

SEQ ID NO: 474346 - DNA, 771 bp, Shigella flexneri
atgcagtcacgcttatcgtggatatttaatccgaaaacgggtaaaactgtgatgctggcctttgaccatggttattttcagggtccgactaccggacttgaacgcattgatataaatatcgccccgctgtttgaacatgccgatgtattaatgtgtacgcgcggcattttgcgcagcgtagttcccccggcgaccaataagccggtggtactgcgggcgtcaggtgcgaactctattctggcggaattaagtaatgaagccgtggcgttatcgatggatgatgccgtgcgcctgaacagttgcgcggtggcggcgcaggtttatatcggcagcgaatatgaacatcagtcgatcaaaaatattattcagctggtcgatgccggaatgaaagtgggaatgccgaccatggccgtgactggcgtgggcaaagatatggtgcgcgatcagcgttatttctcgctcgcgactcgaatcgccgctgaaatgggggcgcaaattatcaaaacctattatgtcgaaaaaggttttgaacggattgttgccggatgtccggtacccattgttattgctggcggtaaaaaattaccggagcgcgagacgctggaaatgtgctggcaggctatcgatcagggcgcttctggtgtggatatggggcgtaatattttccagtctgaccatccggtggcgatgatgaaagccgtacaggcggtggttcaccataacgaaacggctgatcgggcatatgaactctatctgagtgaaaaacagtaa

SEQ ID NO: 474347 - DNA, 198 bp, Shigella flexneri
atgggcaatgtgattcaactggctcccaatgaatgggtttgtgaaagcgttctaatcgcaattaccgggctcaaaccaggcacaattcttcggacccggaaagaatgctggatggttggaagagagtatattcacgtatcaccagacggtaatccaaagccttctgaagtggtcaacaaaaactggccaccgagttag

SEQ ID NO: 474348 - DNA, 147 bp, Shigella flexneri
atgaataaagcgtttgagctatgggtccaccagcgttacggcaaccactacgacctgacgcgagatgttgacggtttctactgtcgtgaaattgtgaaacgaatgtttgaggactggtgccactgccgtgggctgagtgttgtgtga

SEQ ID NO: 474349 - DNA, 243 bp, Shigella flexneri
atgttcgctttgattcaacgcgggcagatatacacagacagagccggatacccagtagaaattactcgcagtactgagcactcagtgttctttcggaggatggacggacgtaccgggcgagtacgcatcggtgaattcagtagcctggtcgagcatattgaccacctggaatatcacaagattctggctgaaacagaacaagaaaagcacctgaagaaattacgcgcaatgcaaaggaagtaa

SEQ ID NO: 474350 - DNA, 123 bp, Shigella flexneri; identical to SEQ ID NO: 24916

SEQ ID NO: 474351 - DNA, 570 bp, Shigella flexneri
atgatcatccagtcaaaacttattcgcgccgctctggtgtgcgctgctaaaaacgacgttcgttattacctgaacggtcttcacatcacgccgaaacatattgaggcaaccaatggttccgtggcactgcgcatggctcacggcatccggacgaagaaaaacatcattgtccagttcgaagggggcgtcccggccaaagccgaaacgacagagctgatttttagtaaagagccgatcgctgttcatcgcgaccagtttcagcgacgactgtccattaccggcattaaactggtggacggttgttttccggatttggatcgcatcattccgaaaaagtttgaccgctgtactcacccggtgctccaggcgggttacctgagttatccagagaagatgtttggtcgtgagcgtaaatttattcccgtccagttacgtccctccggtgacgggcaagcggtcagaattcagtttgattccatcatcaactcaatgtatggcaatcctgaatttgttgtgatgccttgtcgtgatcatggcgatttcaacgtggctcaggagcatccggaatga

SEQ ID NO: 474352 - DNA, 750 bp, Shigella flexneri
atgaatactgtaaccatcaacaacaaacagtttccggtaatcgaatatcgcggtcagcgtgttgtgacgctggcgatgattgatgaagtccaccagcgaccggaaggaaccgcgcgtgcagcattcaaccgaaaccgtgagcatttcatcagcggtgtggattatgccgaattaggtgcggacgtaatacgtacggacctcccggaaggaacattctctaaatttgcaccatcggggattgtactttttgaatcaggttacctgatgttgacgaagccattcaatgacgcccttgcctggcaggttcagcgcgaactggttaacagctacttccgcactcgcacaccgctaacggaaatcgagatgatcgctgcgatagccgccgacgctgttcgtcaacagaagcgcctgaatcatgtggaagaacagctcgaaacagtcacagaagcggtggaaaccatcaaacgcggaaatatgcgcgccggatatgtcggttaccgccaggtggtagccaaaagtggaatgagtgacaccaagtgtcggaatctggtgaacgcatatcaaattcctacagacacccacgaattcatgactccggacggtctgttgtctcgcagggctatcgtcgagcttgagccatttatggcggcgttccaccaaatgatgtcagaggctgacccacgcggcacacgctggtatcacccgaagatggggcttttccaggtgatcggatgggaggataaagcatga

SEQ ID NO: 474353 - DNA, 828 bp, Shigella flexneri
atgaaaaaagttattcctgctttagcccttgttctgctgaccaccggacttgtcggttgcgatcgcgttgagcctggtaatgttggcatcaaggtaaacaaactgggcgacgataaaggcgtcggagaagtggtcggtgttgggcgctactggacgggatggaacactgaggtttacatcttcccgaccttcaaacaaatgaagacctacgatgagccattcagcttccagatgagtgacggtacaaccatcggctatcacatcggcgtggcctacaaagttgatccatccaaagttaccacagtctttcagacctaccgcaaaggcgtggacgacattaccgacaccgacctgcgccagaagatagccgacgcactcaaccgactggccagcaaaatgaccaccgacaaatttatcgacggcggcaagtctgagctgctggatgcagctcttaaagacattcaggaagaaatgacgcccatcggtattcaggtaatgagcctctcatatgtgggtaagccggagtacccgcctactgttatcgacagcattaatgccaaagtcacggcgaaccagaaaaccctgcaatgcgagcaggaagtaaaacagcgcgaagcggaagccaacatgttgcgcgcggaagctgccggacaggcagatgcgattcgcacaaaagcccaggccgaagccgatgctattcgtttacgcggtgaagctctgcgccagaacccaaacgttatggagctggaagccatcaacaagtggaacggtacactgccgcaatacatgaccagcggtgccaacacaccatttattcaggttaagtaa

SEQ ID NO: 474354 - DNA, 189 bp, Shigella flexneri
atgaacatttatttcagaatagttatatcactggcaattatcgcatgtatttacggattaatcgttccggccctcatatcaatgaaggatacggtagcagtgatttctggctttgctctggcgtgtctgaccccgccctgcatttatgccatttataagggtctttctttttctaaggataaaagatga

SEQ ID NO: 474355 - DNA, 273 bp, Shigella flexneri
atgactaccgttactgttcattgtccgcgctgtaattccgatgaagtttatcgacatggccgtagttgttcccggcatgagcgtttccgttgtcgctcatgtaaacgtgttttccagctcacttactcttatgaagccagaaaactcggcgttaaggagcagatcgttgaaatggcacataacggcgcagggggctgttataccgccagaacactgaaaatcggcatcaataccgtcatacggacattaaaaagctctcgccccggcggataa

SEQ ID NO: 474356 - DNA, 1032 bp, Shigella flexneri
atgccgatcatagcaccaatttcccgtgacgaacgacgcctgatgcagaaagccatccataaaacacacgataaaaattatgcccgcagactgactgccatgctgatgctgcaccggggcgaccgtgtcagcgacgttgccagaacgctctgctgcgcccgttcctctgttggacgctggattaactggttcacgcagtcgggtgttgagggactgaaatcattacctgccgggcgtgcccgtcgctggccgtttgagcatatctgcacactgttacgtgagctggtaaaacattctcccggcgactttggctaccagcgttcacgctggagtacagaactgctggcaataaaaatcaatgagataaccggttgccagttaaatgccggaaccgttcgccgctggttgccgtctgcggggattgtgtggcgaagggctgcgccaactctgcgtatccgtgacccgcataaagatgaaaagatggcagcaatccataaagcactggacgaatgcagcgcagagcatccggtcttttatgaagatgaagtggatatccatcttcatcccaaaatcggtgcggactggcaactgcgcggacagcaaaaacgggtggtcacgccgggacagaatgaaaaatattatctggccggagcgctgcacagcgggacaggtaaagtcagctatgtgggcggcaacagcaaaagttcggcgctgttcatcagcctgctgaagcggcttaaagcgacataccgtcgtgcgaaaaccatcacgctgatcgtggacaactacattatccacaaaagccgggaaacacagagctggctgaaggagaacccgaagttcaggggcatttatcagccggtttactcgccatgggtgaatcatgttgaacggctatggcaggcacttcacgacacaataacgcgtaatcatcagtgccgctcaatgtggcaactgttgaaaaaagttcgccattttatggaaaccgtcagcccattccccggaggcaaacatgggctggcaaaagtgtag

SEQ ID NO: 474357 - DNA, 1620 bp, Shigella flexneri
atgttcaccctgtcattactgacaggaaatcctgctatagcgtatgaaacagataaagtatataaaataaccgttctgcatacaaatgaccaccatggacacttttggcgtaacaatcatggtgagtacgggttatcctcccaaaaaactctggtggacaatatccggcagaaagtaataaataatggcggaagtgttctattattatctggtggtgatattaacaccggtgtacctgaatcagaccttcagaaggctgaacccgatattcgtggaatgaatctaattggttatgatgcaatggccgtcggtaatcatgaatttgataatcctctaaatatattacgtcagcaggaaaaatgggccacatttcctttcctttctgctaacatatatcaaaaaagtacagggaggcgtttattcagtccatggaaaattttcatccgtcagaatttgaaaattgcagtcattggcttgacgacagatgatactgcgaaaacaggaaattctgaatattttactgatattgagttccgtcaacctgctgctgaggcgaggagtgtcattgatgaacttaatcagcaggaaaagccagatattattattgcggcaacacatatgggtcactatgacaatggcgagtcaggttcgaatgctcctggtgatgttgaaatggctcgcagtttgccgactggctcattagcaatgattgtgggaggacattcacaagctcctgtctgcatggccagcgataataaaaaacagtggaattatattccggggacaacctgtgtaccagataaacaaaatggcatctggattgtacaagcgcatgagtggggaaaatatgtcggtcaggctgattttgaattctgtaacggtacaatgaaactggttaattatcagttacacccagttaatctcaaaatgagaattaccagagaagatggaaaaacggaattttctttttacacccccgaaattactgaagatccacagatgttatccttactgacaccattccagaataaaggcaaagcacaactggatgtgaaggttggggttgtgaacggacgtctggaaggggacagaagtaaagttcgttttgttcagaccagtatgggccatctgattctgagcgctctgacagaacgtattgacgcagattttgctgttgtcagtggtggggaaattcgagattccatagagagtggtaacatcacatacaaagatatactgaaagttcagccatttggtaatacggtagtaagtattgatttgacggggaaagaagtagctgactacctagctacagtggcacagatgaaaccggattccggagcctacccacaatttttgaataccagctttgtagtcaaaaaaggaaaaatcgaaatgctaaaaataaaaggtaaatcggttgaccttaacaaaaaatatcgtatgacaacatttagctttaatgctactggtggggatggctatccacgtattgataatagacccggatacataaataccggatttattgatgctgaagtacttatcgaatatatacggaaacattcaccgctggatgctgcttcatatgaaccaaaaggtgaagtcagttggcagtga

SEQ ID NO: 474358 - DNA, 186 bp, Shigella flexneri; identical to SEQ ID NO: 462937

SEQ ID NO: 474359 - DNA, 1455 bp, Shigella flexneri
atgaataataagggctccggtctgaccccagctcaggcactggataaactcgacgcgctgtatgagcaatctgtagttgctttacgcaacgccattggcaaatatattacaattggcgaattacctgatgaaaacgcccgtaaacaaggtctttttgtctatccatcactgaccgtaacctgggacggtagcacaacaaatccccccaaaacgcgcgcatttggtcgttttactcacgcaggcagctacaccaccacgattactcgccctactctctttcgttcgtatctgaatgagcaactaacgttgctttatcaggattatggtgcgcatatctctgtgcaaccctcgcaacatgaaatcccttatccttatgtcatcgatggctctgaattgacacttgatcgctcaatgagcgctgatttaactcgctacttcccgacaacagaactggcgcaaatcggcgatgaaactgcagacggcatttatcatccaacggaattctccccgctatcgcattttgatgcgcgccgcgtcgatttttccctcgcacggttgcgccattataccggtacgccagtagaacattttcaaccgttcgtcttgtttaccaactacacacgttatgtggatgaattcgttcgttggggatgcagccagatcctcgatcctgatagtccctacattgccctttcttgtgctggcgggaactggatcactgccgaaaccgaagcgccagaagaagccatttccgaccttgcatggaaaaaacaccagatgccagcatggcatttaattaccgctgatggtcagggtattactctggtgaatattggcgtgggaccgtccaatgctaaaaccatctgcgatcatctggcagtgctacgcccggatatctggttgatgattggtcactgtggcggattacgtgaaagccaggccattggagattatgtccttgcacacgcttatttacgcgatgaccacgttcttgatgcggttctgccgcccgatatacctattccgagcattgctgaagtgcaacgtgcgctttatgacgctaccaagttagtcagcggcaggcctggtgaggaagtcaaacagcggctgcgtacaggtactgtggtaaccacagatgacaggaactgggagttacgttactcagcttctgcacttcgttttaacttaagccgggccgtagcaattgatatggaaagtgcaaccattgccgcgcaaggatatcgtttccgcgtgccatacgggacactactgtgtgtttcagataaaccgttacatggtgagattaagcttcccggccaggctaaccgtttttatgaaggcgctatttccgaacacctgcaaattggcattcgggcgatcgatttgctgcgcgcagaaggcgaccgactgcattcacgtaaattacgaacctttaatgagccgccgttccgataa

SEQ ID NO: 474360 - DNA, 717 bp, Shigella flexneri
gtgggacgtaaatgggccaatattgttgctaaaaaaacggctaaagacggtgcaacgtctaaaatttatgcaaaattcggtgtagaaatctatgctgctgccaaacaaggtgaacccgatccagaattaaacacatctttaaaattcgttattgaacgtgcaaagcaggcacaagttccaaagcacgttattgataaagcaattgataaagccaaaggcggcggagatgaaacgttcgtacagggacgttatgaaggctttggtcctaatggctcaatgattattgctgagacattgacttcaaatgttaaccgtacgattgctaacgttcgcacaattttcaataaaaaaggcggcaatatcggagcggcaggttctgtcagctatatgtttgacaatacgggtgtgattgtatttaaaggaacagaccctgaccatatttttgaaattttgcttgaagctgaagttgatgttcgtgatgtaactgaagaagaaggtaatattgttatttatactgaacctgctgaccttcataaaggaatcgcggcgctaaaagcagctggaatcactgagttctcaacaacagaattagaaatgattgctcaatctgaagttgagctttccccagaagatttagaaatctttgaagggcttgttgatgcccttgaagatgacgacgatgtacaaaaagtttatcataacgtcgcaaatctctaa

SEQ ID NO: 474361 - DNA, 567 bp, Shigella flexneri
atgattagtcccatcaagaatattaagaacgtatttccaataaatactgcaaatactgaatatatagtgagaaatatttatcctagagttgaacatggttactttaatgaatcaccaaacatatatgacaagaagtatatctctggtataaccagaagtatggcacaattaaaaatagaggagtttattaatgagaaatccagacgacttaattatatgaagacaatgtattctccatgtccggaagattttcagcctatttccagagccgaagccagtacaccggaaggaagctggttgacagttatatctggaaaacgtcctatggggcaattttctgtggatagtttgtaccatcctgacttacatgcattatgtgagctcccagagattagttgtaagatcttctctaaagaaaatagtgattttttgtatataattgttgtattcagaaatgattctccccaaggagaactacgggcaaatcggtttatagaactatatgatataaaaagagagattatgcaagtgttaagagatgagtcgccagagattaaagtctattaa

SEQ ID NO: 474362 - DNA, 948 bp, Shigella flexneri
atgaaattaaaattctttgtacttgcactttgtgtacctgcgatctttactacacatgctaccactaactatccactttttataccggacaacatcagtacggatattagtctaggatctctgagtggcaaaacaaaagaacgcgtttatcatcccaaggaaggggggagaaaaattagtcaactggactggaaatacagtaatgcgactattgttagaggtggcatcgattggaagctaattccaaaagtgtctttcggagtttccggttggactactttaggtaaccagaaagcaagcatggttgataaagactggaacaattccaatacccctcaggtatggaccgaccagagctggcatcccaatacgcatctccgtgatgctaacgaattcgagctgaatcttaaaggttggttattaaataatttggattatcgacttggactaatagcaggttaccaagagagtcgttacagttttaatgcaatgggagggagttatatttatagtgaaaacggggggagcaggaataaaaaaggggcacatcctagtggtgaaagaacaataggttacaaacagctcttcaaaataccttatattggattaactgctaattaccgccatgagaattttgagtttggagcagaactgaaatatagtggttgggttctttcatctgatacagataaacactatcagactgagacaatttttaaagatgaaataaaaaaccaaaattactgctctgttgctgcgaatattggatactatgtcacccccagtgcaaaattttatatagaaggctccagaaattacatttctaataaaaaaggtgatacatctctttatgagcaaagtaccaatatatctggcaccattaaaaatagtgcaagtattgaatatattggttttctcacttccgcaggtataaagtatattttttga

SEQ ID NO: 474363 - DNA, 651 bp, Shigella flexneri
atgctaaacgaacgccagttaaagattgtcgatctgctggagcaacagccgcgcacgcctggtgagctggcgcaacagactggcgtttcaggcaggaccatcctgcgtgatattgactatctcaactttacccttaacggcaaagcccgcattttcgccagtggcagtgcgggctatcagctggaaatcttcgagcgccgcagcttttttcagttgctgcaaaagcacgataacgacgatcggctgctggcgctgttattactgaatactttcactccccgtgcgcaactcgcctcggcgcttaatttgccagaaacgtgggtagcagagcgtctgccccagttaaaacagcgttatgaacgcacttgttgcctggccagccgccctggtttgggccatttcattgatgagacagaagagaaactcgttatcttgctggcgaacttgctgcgcaaagatccgtttttaattccgctggcgggcataacacgagacaaccttcagcatttatccacggcctgcgacaaccaacaccgctggccgctcatacagggtgattatctctccagcctgattctggcgatttacgccctgcgtaatcaactgaccgatgagtggccgcaatatccggtaatgctgccaacttactga

SEQ ID NO: 474364 - DNA, 1071 bp, Shigella flexneri
atgaacattgagttactgcaacagttgtgcgaagccagcgccgttagcggcgatgaacaggaagttcgcgacatcctgataaacacgctggaaccttgcgttaatgaaatcacctttgatggtctgggcagctttgttgcccgtaagggaaataaaggtccaaaagttgccgttgtcgggcatatggatgaagtcggctttatggtcacccacatcgacgagagcggttttctgcgtttcaccaccattggtggctggtggaatcagtcgatgctcaaccatcgggtaaccatacgcacacacaagggagtgaaaatccctggtgtgattggtttcgtcgcgcctcatgcgttaacggaaaagcaaaggcaacagccgctgtcatttgatgagatgttcattgatattggcgcaaacagtcgcgatgaggtggaaaaacgcggtgtggcgatgggcgattttattagcccggaagccaattttgcctgctggggcgaagataaagtggtcggcaaggcgctggataaccgcatcggctgcgcaatgatggctgaactattgcagacggtgaataatcccgaaattacgctgtatggcgtcggcagcgtggaagaagaagttgggctacgcggggcacaaacctcggcggaacacattaaaccggatgtagtgatcgtgctggataccgctgtcgcaggcgatgttccgggcattgataacattaaatacccgctgaaactgggccaggggccggggctgatgctgtttgacaagcgctacttccccaaccagaaactggtagcagcgttaaaaaactgtgccgcacataacgatttaccgctgcaattttccaccatgaaaaccggagcgacggatggcgggcgctacaacgtgatgggcggcgggcgtccggttgttgcgctgtgcctgccaacccgctatctgcacgctaacagcggcatgatttcaaaagccgattacgatgctctgctcacgttgatacggggttttctgacgaccttaaccgcggagaaagtcaacgcgtttagccagttccgtcaggtggattaa

SEQ ID NO: 474365 - DNA, 1452 bp, Shigella flexneri
atggagtcatccttacgtattgtcgcgatcaccaactgccccgccgggatcgctcacacctacatggtggcggaagccctggaacagaaagcccgttctctcggccataccataaaagtggaaactcaagggtccagtggcgttgaaaaccgcttatccagcgaagagattgccgctgccgattacgtcattcttgctaccgggcgtggcctgagcggtgatgatcgcgcgcggtttgccgggaagaaagtttatgagattgccatctccctggcgttgaaaaatatcgaccagattttcagcgaattaccgacaaactcgcagctttttgccgcagatagcggcgtgaagcttggcaaacaggaagtgcaaagcggcagcgtgatgagccacctgatggcgggcgtctctgcggcgctgccgtttgtcatcggcggtggtatcctggtggcgcttgccaacatgctggtgcagttcggtttgccgtataccgatatttcgaaaggcgcgccgtcgtttacctgggtagttgaatccatcggttaccttggcttcacctttatgatccccatcatgggcgcttatattgcctcgtcgattgccgataaaccggctttcgctccggcgtttctggtttgctatctggcgaacgacaaagcgctgctcggcacccagtcgggtgcgggattcctcggcgcggtggtgctggggctggcgattggctatttcgtcttctggttccgcaaagtgcgccttggcaaagcattacaaccgctgctcggttcaatgctgatcccgttcgttactctgctggttttcggcgtgctcacttactacgttatcgggccggtgatgtccgacctcatgggcgggctgctccacttcctgaataccattcctccatcaatgaagtttgcggcagcgtttctggtcggtgcgatgctggcgttcgatatgggcggccccatcaataaaaccgcctggttcttctgcttctcactgctggaaaaacacatttatgactggtacgccatcgtcggcgttgtcgcgttgatgccgcccgttgcggcgggtcttgcgacgttcattgcgcccaaactgtttacccgacaggaaaaagaggctgccagtagtgccattgtggtcggtgccacagtcgcaaccgaaccggctataccttacgctctggcagctccgttgccgatgattaccgccaatacgctggcgggcggcattaccggcgtgctggtgatcgctttcggaatcaaacgtctggcacctggtttgggtatctttgacccgctgatcggcctgatgtcgccggtaggttcgttttatctggtgctggcgattggcctcgcgctgaacatttcattcattatcgtcctgaaaggattgtggttacgccgcaaagcgaaagccgcgcaacaggagcttgtccatgaacattga

SEQ ID NO: 474366 - DNA, 306 bp, Shigella flexneri
atgcagtttaaggtttacgcctataaaagagagagtcgttatcgtctgtttgtggatgtacagagtgacattattgacacgcccggacgacggatggtgatccccctggccagtgcccgcctgctgtcagataaagtctcccgtgagctttacccggtggtgcatgtcggggatgaaagctggcgcatgatgaccactgatatggccagtgtgccgatcttcgttatcggggaagaagtggctgatctcagccaccgcgaaaatgacatcaaaaacgccattaacctgatgttctggggaatataa

SEQ ID NO: 474367 - DNA, 219 bp, Shigella flexneri; identical to SEQ ID NO: 461393

SEQ ID NO: 474368 - DNA, 381 bp, Shigella flexneri
gtgaatgacctgtttgcctggcttgaagagcaggagccgtgctgtccgcccgacgggccattaaataaggcgattaactatattctgaaccggcgcgatgaactgagctgcttcctgggtgacggagcggtgcccctggacaacaatatctgcgagcgtgccattcgcccggttgttatgggacggaaagcgtggctgttcgccggttcactgatggccggaaaccgggcggcacagataatgagccttctggaaacagcaaaacgtaatggtctggagccacatgcctggctgacggacgtcctgacgcgtctgccggaatggccggaggagcgactggcagagttgctgcctcttgagggatttaccttcaccgggtga

SEQ ID NO: 474369 - DNA, 492 bp, Shigella flexneri
atggcggatatggtcggtgttgccggagctgcactggccccgctggcgaaactgctacgccatgagcttctgacacgggatgttattcatgcagatgaaacgtccctgaggctccttgatacccggaaaggcggtaaatcctgctccggctggctgtgtgcttacgtcagcggtgaaagaagcggtccgccggtcgtctgttttgactcgcagaccggacgggccctcagataccctgagacctggctgcagtgctggtgtggcagtacgctggtgagtgacggatacagcgtgtacaaatctctggcggataatcaccccggcatcacatcagcctgttgctggagtcacgcagggcgcggcttcgcaaatctgtataaggccagcagggagccccgtgcaggcgtggagctgagaaaaatcgcgggtctttaccgcattgagaaactcatccgtgagcgccctgtggaaaaaatacggcagtggcgataa

SEQ ID NO: 474370 - DNA, 744 bp, Shigella flexneri
gtggctgacgacgctgaccgtacggaacaggtgcaggagaaagcgtcagtggaggaaatcagtctgccactgctgacgaaaatgtcttccgaacgcacgctggcagtccaggcagcactgatgcagcaaccggacaaatccctgacactgctggcatggacgctctgcctgaatgtgtttggcagcggagcgtacagtaaaccagcacaaatcagcctggaatgtaaacattattcgctgaccagcgatgcgccatcggggaaggaaggtgccgcattcatggcgctgatggcagaaaaagcccgtcttgctgccctgttaccggagggatggtcacgggacatgacgacattcctgtcactcagtcaggaggtgctgttatccctgctcagtttctgcaccgcatgcagccttaacggtgtccagacccgtgagtgtggtcacacgtcacgcagtccgcttgacacgctggaaaccgccatcggctttcacatgcgagactggtggcagccgacaaaagcaaacttcttcggacacctgaaaaagccgcagattatcgcagccctgaatgatgccggactgtccggtgccgcacgggatgcagagaagatgaagaaaggtgatgcggctgaacatgcagagcaccatatgaaagacaaccgctgggtgcctggctggatgtgtgcaccacatccacagacagataccactgaacgcactgataacctggctgatgccgcctga

SEQ ID NO: 474371 - DNA, 435 bp, Shigella flexneri
atgaaaactgaactgaccctgaatgtattacagaccatgagcgcacaggaatatgaagatatccgggctgccggaagtgatgaacgtcgtgagctgacacacgccgtgatgcgggaactggatgcgccggacaactggacgatgaacggcgagtacggcagcgagtttggcggatttttccccgtccaggtccgtttcacgcctgcccacgaacgttttcacctggcgttatgttcaccgggcgatgtctctcaggtctgggtgctggttctggtgaatgccggtggtgagccgtttgcggtggttcaggtgcagcggcggtttgcaccggaagccgtcagccattcactggcactggcggcgtcactggatgcgcaggggtacagcgttaatgacatcatccatatcctgatggcggaaggaggtcaggcatga

SEQ ID NO: 474372 - DNA, 720 bp, Shigella flexneri
atgagcgtacattcacgggcactggttcccctctgcacagagcaacaggccgcatggcgggcggtggcggagacggaaaaacgccgccatcagggaaacacgctggcggaatatccgtatgcgggggcgtttttccgctgtctgaacggaagccgccggatttcgctgtctgacctgcgatttttcatgccgtccctgaccgcagaagaactgcacggcaaccgtcttcagtggctgtatgccatcgatgtgctgattgaaacacagggcgaggtctgcctccttccccttcccgacgatgcagcagaacgcttgttcccgtcggtgcggtttcgtgtcagggaacgcagtcgccataaatccgcactggtcatgcagaagtacagccgtcagcaggcgagggaggcagagcagaaagcccgtgcgtaccaggcgctggtcgctcaggctgaaatcgaactggcattccattcgccggaaacagtcggaagctggcatgcacgctggagtgaccgggtggcagagcatgacctggaaaccctgttctggcagtggggcgagcgttttccgtcactgaccgggatggaacgctggcagtggcaggatatgccattctggcaggtcatcgcagaggctggtatggcggcaagggaggccggtcacgctgtccgtgagatggagcggtggatggtcccgaacaaactccgggaggtggcgtga

SEQ ID NO: 474373 - DNA, 519 bp, Shigella flexneri
atgcagaacgccagacacccgaaaacacacagggaactgtgtgaactggcctgccgttttctccgcaacaacggctttaaggtggtgttcagtgaccgttttcacgcatggacgtcctgcggtgaacatcctgatgccctgggcttccgtaacggagcgtcatgtctcattgaggtgaaatgctcacggtctgatttcctggctgaccggaaaaaggtgttccggtcagagccggaaaagggcatgggagactggcgtttttatctctgcgagccgggggtgattaccgtggccgatttaccggcgggctgggggttgctgtatgcgattaacgggcgggtcaggaaagtacatggctggcccggaaatcatcagtgggtggttacggtcgcgaaaccgttcggggcaaacaaacaggctgaatgcgattatctgttcagtgctctgcgtcggctggaaatccggggcgtgacggagaacggtgcagatgctgacagggtgcagacatatgggctatga

SEQ ID NO: 474374 - DNA, 216 bp, Shigella flexneri
atgtctaaccaacaccagtatggcctcttaccgtgcaaattgcaaggaggagtaaaccatgaaactaccgggagacgcccttatctggtgcgtattaatcgtgtgctgcacgttgttgatattcacactcctgacccggaatcgcctgtgcgaagtccggctgaaggacggatacagggaagttacggcaacaatggcttacgaatccggcggtaa

SEQ ID NO: 474375 - DNA, 1089 bp, Shigella flexneri
atgaatatactatttacggaatcatcaccgaatataggtggtcaggaattacaggctgttgctcaaatgaaggccctgaagaaaatggggcattcagttctgcttgtctgcagggagaacagcaaaattgcttttgaagccagtaagtttggaattgatatcacattcgcgttatttcgaaacagtcttcacattcctactgtatggagattactcggaatagttcatagttttcagcccgatgcaatcgtttgtcacagtggacatgatagtaatattgttggtttggtacggttttttacctggaaacatccattcagaattatcaggcaaaagacatatttgacacgaaaaacaaaatttttttcaataaatcatttttgcgatgaggtgattgttcccggaacaaatatgaagacacatctggagcaggaaggatgtcgaactcgggttactgttgtgcctcctggctttgatttccaggaattatacgttgattcccgaaacagtttgcctccgagtgttctttcctggctggcatcccgaagaggatgccccgtaattgctcaggtaggaatgttgcgcccggaaaaagggcacgaatttatgttgaatttactgttccatttaaaaatgaatggacgacagttctgttggttgattgtggggtctggttcgcctgaactgcgggaacatttacagtatcagattgacagtatgggcatgcatgatgatgtttttattgctgacaatgtttttcctgccgcccccgtatatcgggttgccagtctggtggttctgccttcagaaaacgaatcgtttggtatggtactggcagaagcatcggcattttctgtgcctgtactggccagtcagattggtggaatccctgatgttattcagaataaccagaccgggacattgttaccagcaggtaataagcacgcatggatgtgcgccctgaatgatttttttaatgaccctgggcgtttttatcagatggctcgccaggcaaaacaggatatagaagagcggtttgatattaataaaactgcgttaaaaatactcacattagcgaagcacaagtaa

SEQ ID NO: 474376 - DNA, 951 bp, Shigella flexneri
atgttttctgtaagtaacttatcatttatcggtttccttaaaaggattgttttttcctcagattcactcccggggaagtgggaacacagaaaattccggttcatgtacattttgcgatgtgctataaatccggttgccagtattcgatattattacgaactgcgttccttgcagtgcattgaggatattctggcaatacaacccacgttgccagcaagaattcatcgaccttatttgcataaaggggggcgagcctggtcccgggggcaatatattcttgagcattatcgctttgtgcaaaatttgccagaaaaatattctgaatttttgtttccacaaaaatcggtatcattagtccaattcatcgggaaagatggagaggattttgatatccagtgttctcccagtggttttgaccgggaaggagagttgatgttgtcattgtttttcaataaaatagtgattgcccggttaacattttcagtcattctgactcaaaatggacacaccgcttttattggcggattacagggagcccccaaaaataccggacctgatgttattcggtgcgcaacccgggcctgttatgggcttttcccaaaacggattatttttgaagcattttgtgcgttgatgaaagcttgtaatgtctctgagtgtctggcagtcagtgagcacagtcatgttttccggcaattgagatactggtatcagaaacgcaaaacctttgttgctgtctacagtgatttctgggagtctgtagcagggaaaacctgtggtgactggtacaaattaccaacacaggtggttcgaaagccgctaagcaatatagctagtaaaaaacgctctgagtatcgaaaacgatacgctttgctggattatatccatgaaactgctatccgctctttggatgcatatcctgtaaactcagaacatcaggacttaaattaa

SEQ ID NO: 474377 - DNA, 1812 bp, Shigella flexneri
atgccacaacgacaccaccagggacataaacgcacaccgaaacagttggcgctcattatcaaacgttgtttgccgatggtgctcactggcagcggcatgctttgcactaccgctaacgccgaagagtattatttcgaccccattatgctggaaactacaaaaagtggtatgcaaacaaccgatctgtcacgtttttcaaaaaaatacgcacaactaccaggaacttatcaggttgatatctggctgaataaaaagaaggtttcacagaaaaaaattacatttaccgccaatgcagagcaacttctgcagccacagtttacggtagaacaactacgtgagctgggtattaaggtggatgaaatcccggcgctggctgaaaaagatgacgatagcgtgatcaactcgcttgaacaaatcattcccggtacagctgctgaatttgatttcaatcatcagcgacttaatttgagcattccccaaattgcactgtaccgtgatgcaagaggttacgtctccccttctcgttgggacgatggtataccaacgctgtttaccaactactcgtttacaggttctgataaccgttaccgccagggcaatcgtagccaacgacagtacctgaatatgcaaaatggtgctaattttggcccctggcgattacgtaactattctacgtggacacgcaacgatcaggcgtcaagctggaacactatcagtagttatttacaacgtgatatcaaggcgttgaagtctcagttgcttctgggagaaagcgccaccagcggcagtattttttccagctacgcctttactggcgtgcaactcgcttccgacgataatatgttgccaaacagccagcgcggatttgccccaacggtacgcggtatcgcaaacagtagtgcaatcgtgactatcaggcaaaatggttatgtgatctatcaaagcaacgtgccagcgggtgcctttgaaattaacgatctctacccctcttccaacagcggcgatttagaagtcacgattgaagaaagtgacggtacacaacgtcgctttatccagccttattcttcattacccatgatgcagcgacctgggcatctaaaatatagcgcgaccgctggacgctatcgcgctgatgcaaacagtgatagcaaggaacccgaatttgctgaagccacggcaatatatggtttgaataatacttttacgctgtatggcggcctgctcggttctgaagattattatgcgctggggatcggtatcggcggcacacttggcgcactgggcgcgttgtcgatggatatcaacagagctgacacccaattcgataaccagcactcttttcatggctatcaatggcgtactcagtacatcaaagatatcccggaaaccaacaccaatatcgctgttagctactatcgctataccaacgatggctattttagttttgatgaagccaatacccgcaattggggctataacagtcgccaaaaaagtgaaattcaattcaacatcagccagacaatatttgatggggtaagtctgtatgcctccggttcacagcaagactattggggcaataacgagaaaaacagtaatatctctgttggggtttccggccagcaatggggaattggttacagcctgaattatcaatacagccgctacactgatgaaaataatgaccgtgcactctctttgaatctcagtattccgttagaacgctggtggatttgcccctatatttccagacatctgttatcacttaacctattacaagcccgctgccgcagatattcccgtggcgagcgataa

SEQ ID NO: 474378 - DNA, 696 bp, Shigella flexneri
atgtcaaaacgaacattcgcggtgatattaaccttgttgtgtagcttctgtatcggccaggcgcttgcagggggtatcgttttacagcgaacgcgagtgatctatgatgccagccgcaaagaggctgcgttacctgtcgcaaacaaaggcgcagaaacgccttatttactgcaatcatgggtagataatatagatggtaaaagccgtgccccatttattataaccccaccgctatttcgtcttgaggctggcgatgactcatcactgcgaattattaaaacagctgataacctgcctgaaaataaagagtcgctgttctacattaatgttcgtgccattccagcaaagaaaaaatcagatgatgttaatgctaacgagttgacgctggtatttaaaacgcgggtcaaaatgttttatcgccccgcacacctgaagggacgggtaaacgatgcgtggaaatcactggaatttaaacgtagtgaccattcactcaatatatataacccaactgaatattacgtcgtatttgccggactggcagtcgataaaaccgatctcacaagcaaaattgaatatatcgcgcccggagaacataaacagttaccacttccagcatctggcggaaagaacgtgaaatgggctgcgatcaacgattatggcggcagttccgggacagaaactcgtccactgcaataa

SEQ ID NO: 474379 - DNA, 348 bp, Shigella flexneri
gtgactgggtgggagcacgataacggcaacgttgaagcgtctttccgtttatggctggaaacgcgggataatggcaccgtccctaacttccctaatctggcaaaagtgggctcttttgctggcacagcgacaacaggtgtgggtatccgtattgacgatgcggaaagcggaaaccttatgccactgaatgctatggggaatgataacacgatttatcagatcccagcggactccaatggtattgtcaatgttgacctcatcgcttactacgtatcaaccgttgaagcatcagaaatcaccccaggggaagcagacgctgtcgttaacgtaacgctggattaccgttaa

SEQ ID NO: 474380 - DNA, 198 bp, Shigella flexneri; identical to SEQ ID NO: 462554

SEQ ID NO: 474381 - DNA, 210 bp, Shigella flexneri; identical to SEQ ID NO: 462553

SEQ ID NO: 474382 - DNA, 684 bp, Shigella flexneri; identical to SEQ ID NO: 462552

SEQ ID NO: 474383 - DNA, 204 bp, Shigella flexneri; identical to SEQ ID NO: 9795

SEQ ID NO: 474384 - DNA, 222 bp, Shigella flexneri; identical to SEQ ID NO: 9794

SEQ ID NO: 474385 - DNA, 987 bp, Shigella flexneri; identical to SEQ ID NO: 239466

SEQ ID NO: 474386 - DNA, 195 bp, Shigella flexneri
ttggtagaaggtggcattgacctgaaagatgtcaacgtcggcaatatgcatttctcggaagggaaaaagcaaatcagcagtaaagtttatgtcgatgaccaggatctcgcggacttacgttttattaaacaacgtggcgtgaatgttttcattcaggacgtccctggcgatcaaaaagaacaaatccctgactaa

SEQ ID NO: 474387 - DNA, 804 bp, Shigella flexneri
atgcatgaaataaccctacttcagggattatccctagcggcgttagttttcgttctggggattgatttttggctggaagccttatttttattccgcccgataatcgtttgtaccctaactggcgctattctcggtgatattcagactggcttaattaccggtggtctgacagagttggctttcgccggattaacccctgcaggtggtgttcagccgcccaacccgattatggcgggtctgatgaccaccgtcattgcatggtctacgggcgttgatgccaaaacagcaattggtcttggcctgccgtttagtttgttaatgcagtacgtcattctgttcttctattccgctttctcattatttatgaccaaagccgataaatgcgcgaaagaggcggatacggcagcgttttcccggcttaactggacaacgatgctcatcgtcgcttcagcgtatgcggtgattgctttcctctgtacttacctggcacaaggggcgatgcaggcgctggtgaaagcgatgcccgcctggttgacccacggctttgaagtggctggcggtattctgcctgccgttggttttggcttgctgctgcgcgtaatgttcaaagcgcaatatatcccttacctgatcgccggtttcctgtttgtttgctacatccgggtcagcaacctgttgccggttgccgtactgggcgcaggctttgcggtgtatgagtttttcaatgcgaaatcccggcagcaagcgcaaccgcagcccgttgccagtaaaaatgaagaagaggactacagcaatgggatctga

SEQ ID NO: 474388 - DNA, 792 bp, Shigella flexneri
atgggatctgaaatcagtaaaaaagatatcacccgtctgggctttcgttcgtcgctgctgcaagcgagctttaactacgaaaggatgcaggcgggcggttttacctgggcgatgttgccgatcctgaaaaagatttataaggacgacaaaccgggcttaagcgcggcgatgaaagataacctcgaatttattaatacccacccgaatctggtcggattcctgatggggttattaatttcgatggaagaaaaaggagaaaaccgcgacaccattaaaggcctcaaagtggcactgtttggcccaatcgccgggattggcgatgcgattttctggtttactttgttgccgattatggcgggaatttgctcatcatttgccagccagggaaacctgctggggccgattctatttttcgccgtttacctgcttatctttttcctgcgcgtcggctggacccacgtcggttattcagtcggcgtgaaggcgatcgataaagtgcgagagaactcgcagatgattgctcgctcggcaaccatcctcgggatcacggtaatcggcgggctgatcgcttcgtatgtgcatattaacgtggtgacatcgtttgccatcgacagtacccacagcgtcgcgctgcaacaggatttcttcgataaagtcttcccgaacattttaccgatggcctacaccctgctgatgtattacttcctgcgggtgaaaaaagcgcatccggtgctgttaatcggcgtgacttttgtgctctctattgtttgttccgcattcggcattttgtaa

SEQ ID NO: 474389 - DNA, 702 bp, Shigella flexneri
gtgcaaacccttcagcaagttgaaaactatacggcgttaagtgaacgagccagcgaatatttattggctgtgatccgtagcaaaccggatgccgtgatttgcctggcgaccggagccacgccattactgacgtatcattatctggtagaaaaaatccaccagcagcaggttgatatcagccagctcaccttcgtgaagctcgacgaatgggtggatctgccattaacgatgcctggcacctgcgaaactttcctacaacagcatatcgtgcagccgctggggctacgtgaagaccagctcatcagctttcgctccgaagagataaatgagacagagtgcgaacgggtaacgaacctgattgcgcgcaaaggcggtctggatttatgcgttctcggattggggaaaaacggtcatcttgggctgaacgaaccgggagaaagcctacaaccggcctgccatatcagtcaacttgatgccagaacacagcaacatgagatgttaaaaaccacgggtcgccccgtgactcgtgggatcaccttaggcctgaaggatattctcaatgcccgcgaggttttgttattggtgactggcgaaggaaagcaggatgcgacagaacgttttctcacggctaaagtctccaccgctatcccggcttcatttttatggctgcacagtaactttatttgtttaattaatacctaa

SEQ ID NO: 474390 - DNA, 165 bp, Shigella flexneri
atggcgcgatgtatcaaaagccagagcctgacactgcttgaaaaactggatgctctggatgccgacgaacaggcggccatgtgcaaacgactgcacgaactcgcagaagaactccagaacagcatccagattcgctttgaggccgaaagtgaaacaggaacataa

SEQ ID NO: 474391 - DNA, 1110 bp, Shigella flexneri
atgaaaatctcaaaggtctctgacgaacatttttctaattacaacatgttgccgaatggtaatgaagaaattgacctttttggcttgattagcgttttatgggcagcaaaaataaaaattgttggggtgattctattttttgcttgtattggctttcttgtttcttttgttttgccacaaaaatggactagttctgctgtggttactcctgctgagtctgttcaatggagtgaattaaataaggagctttccaagcttcatgttctgggagtggattttgatatcaatcgtgatagcgcatttgctctgtttattaagaaatttcagtccgttaattcgttgaatgagtatatgagatcatctccttatgttatggagattattaaaaagaataacattagcgctctcgaactgcatcgtgcaattgttgagttgagtaaaaatatgaagtcgattgatgataatgccagtaagaaaaacgacaagtcatcattgtatgtatcatggactctgagttttactgctccaacaagtaaagaagctcacgatgtgttgtctgggtatattaattatgtttcttcccttgttgtaagggatttgatggaagatataagaaataaactagaagttaaaactaatgttgaaaaagaaattcttgcactggatgagataaaaattagaaaccagctgaatgcagatattcgacgcctcaattattcactggaggttgctaatgcggctggaataaaaaaacctgtatacagcaatggtcagattatgaaggatgacccagattttcctgtggctctcggttctgatggtatagcaactaaattgaacatcaaaaaatcaatcaaggatgtttcggaattgagtggggagttgcgaaatcgtcaatatgttgtgaatcaattggttgtggcgaaagtgggggatgttgattttatgccatttcagtatcaattgagcccaacgttaccggtcagaaaggatgggccaagtaatgccataattgtaattctttcttctgtcattggagggatgcttgcatgtggctatatacttttacgtcatgccatggaggccagaaagatgagtgtgattgagtaa

SEQ ID NO: 474392 - DNA, 357 bp, Shigella flexneri
atggaagcattacttcagcttaaaggcatcgataaagccttcccgggcgtaaaagccctctcgggcgcagcgttaaatgtctatccgggccgtgtgatggcgctggtgggcgaaaacggcgcgggtaaatccaccatgatgaaagtgcttactggtatctatactcgcgatgccggcacgcttttatggctggggaaagaaacgacatttaccgggccgaaatcttcccaggaagccgggattgggattatccatcaggaactgaacctgatcccgcagttgaccattgccgaaaacattttcctcggtcgtgagtttgttaatcgctttggcaaaattgactggaaaaccaggtaa

SEQ ID NO: 474393 - DNA, 420 bp, Shigella flexneri
atgaaaaaaggcaccgttcttaattctgatatttcatcggtgatctcccgtctgggacataccgatacgctggtggtgtgtgatgctggtttacccatccccaaaagtacaacgcgtatcgatatggcattaacccaaggtgtaccttcttttatgcaggtgctgggcgtcgtcacaaatgaaatgcaggtcgaggctgccattatcgcggaagagatcaaacaacataatccgcaactccacgaaacgttgctcactcaccttgagcagctgcaaaaacaccagggaaataccattgaaattcgttacaccacgcatgaacaattcaaacaacaaaccgcagaaagtcaggcggtaattcgcagcggagaatgttctccgtatgcgaatatcattctctgtgctggcgtgacgttctga

SEQ ID NO: 474394 - DNA, 1869 bp, Shigella flexneri
atgagcactgataataagcaatcattgcccgcgattaccctcgcggcgattggagttgtctacggcgatattggtaccagcccgttatatacacttcgtgaatgtttgtccggccagtttggttttggcgttgaacgcgatgccgtgtttggctttttatcgctgatcttctggctgctaatctttgtggtttccattaaatatctcaccttcgtgatgcgggcagataacgccggtgagggggggatcctgacgttgatgtcgcttgccgggcgtaatacgtcggcgcgaaccacatcaatgctggtgattatggggctaatcggcggcagctttttctatggtgaagtcgtcataacacccgctatttcggtgatgtcagccattgaaggtctggaaatcgtcgccccgcagctggatacctggatagttcccctctcaattatcgttctcactttattatttatgattcaaaagcatggcacggctatggtcggtaagctgtttgcgccgatcatgctgacctggtttttgattctggcaggactggggttacgtagcattattgctaacccggaagtgctgcatgcgctgaatccgatgtgggcggtgcatttcttccttgaatacaaaacggtttcttttattgcattaggggcagtggtgctgtcgattacggggggcgaggtgctgtatgctgatatggggcactttggtaagttccctattcgcctggcgtggttcaccgtcgtattaccttccttgacccttaattacttcggtcagggagcgttgttgttaaagaacccggaagcgattaagaacccgttcttcctgttggcaccggactgggcgctgatcccactgctgatcatcgccgcactggcgacggtaattgcctcgcaggcggttatctctggcgtcttctcattgacgcgtcaggcggtacgtctgggatatttgtcgccgatgcgcattattcacacctccgaaatggagtcagggcaaatctatattccgtttgtgaactggatgctctatgtcgcggtcgtgattgtgattgtcagctttgagcactccagcaacctggcggcggcgtacgggattgcggtgaccggaaccatggtactgacgtctattctctcgactaccgtggcacgtcagaactggcactggaataagtattttgttgcgctgatcctgattgctttcctttgtgtcgatattccattgttcaccgctaacctcgataaactgctctccggcggctggttgccattgagcctcggtactgtgatgtttatcgtgatgaccacctggaagagcgagcgtttccgcttgctgcggcggatgcatgaacatggtaactctctggaagcgatgattgcttcgctggagaaatcaccgcctgttcgcgtgcccgggaccgcggtgtatatgtcgcgtgcaatcaacgtcattccctttgcgctgatgcataaccttaaacataacaaggtattgcatgagcgggtgattctgttaactctgcgcaccgaagacgcgccatatgtccataacgtccgtcgggtacagattgaacaactgtcgcccactttctggcgcgtggtggcaagttatggttggcgagaaacgccaaacgtggaagaagttttccaccgctgcggtctggaaggattaagttgccggatgatggaaacctccttctttatgtcgcatgagtcgttgatcctcggcaaacgcccgtggtatttgcgtctgcgcggcaagctgtacttgctgctgcaacgtaatgcgctgcgtgcaccagatcaatttgaaatcccgccaaacagggttatcgaactgggtactcaggtcgaaatctaa

SEQ ID NO: 474395 - DNA, 1200 bp, Shigella flexneri
gtggaaaggtttgatgccattattataggcgctggtgcggcgggtatgttctgttctgcgctggcaggtcaggtaggacgccgggttctgctgatcgataatggtaaaatactagggcgcaaaatccttatgtctggcggtgggcgctgcaactttaccaacctttatgtcgaaccaggcgcttatctgagccagaatccgcatttttgtaagtctgcactcgcacgttttacccagtgggatttcattgatctggtcaataaacacggtatcgcctggcacgagaaaacgttagggcaactcttctgcgatgactccgcgcagcagattgtcgacatgctggtggatgagtgcgagaagggcaatgtaaccttcagattgcgtagcgaagtgctgagtgtggcgaaggatgaaacaggcttcacgcttgatctgaacggcatgactgtcggttgcgaaaagctggtcatcgcgaccggtgggctgtcaatgccggggctgggcgcatcgccgtttggttataagattgccgaacaatttggcctcaacgtgctgccgacccgcgcgggtctggtgccattcactctgcataaaccgttgctcgaagagttacaggtgctggcgggcgtggcggtgccttccgtgattaccgctgaaaacggcaccgttttccgtgagaacttactcttcacccaccgcggcttatctggaccggcggtgttgcagatttcaagctactggcaaccgggtgaatttgtcagtatcaatctgctaccggatgtggacctcgaaaccttcctgaatgagcagcgtaacgcacatccgaatcaaagcctgaaaaacacactggcggttcatctaccgaagcggttggttgaacgcttacagcaactcgggcaaatcccggatgtttcgctaaaacagctcaacgtgtgtgaccaacaggcactgattagcacattgaccgactggcgcgtacaacccaacggcactgaaggctatcgcactgccgaagtgacgctcggcggcgtggacaccaacgaactttcttcacggacgatggaagcgcgcaaagtgcctgggctgtacttcatcggcgaagtgatggacgttaccggctggctggggggctataacttccagtgggcgtggtcgagtgcatgggcttgtgcgcaggatttggcgtcaattgtgaaataa

SEQ ID NO: 474396 - DNA, 1170 bp, Shigella flexneri
atgctacatttgtttgctggcctggatttgcataccgggctgttattattgcttgcactggcttttgtgctgttctacgaagccatcaatggtttccatgacacagccaacgccgtggcaaccgttatctatacccgcgcgatgcgttctcagctcgccgtggttatggcggcggtgttcaactttttgggtgttttgctgggtggtctgagtgttgcctatgccattgtgcatatgctgccgacggatctgctgcttaatatgggatcgtctcatggccttgccatggtgttctctatgttgctggcggcgattatctggaacctgggtacctggtactttggtttacctgcatccagctctcatacgctgattggcgcgatcatcgggattggtttaaccaatgcgttgatgaccgggacgtcagtggtggatgcactcaatatcccgaaagtattaagtattttcggttctctgatcgtttcccctattgtcggcctggtgtttgctggcggtctgattttcttgctgcgtcgctactggagcggcaccaagaaacgcgcccgtatccacctgaccccagcggagcgtgaaaagaaagacggcaagaaaaagccgccgttctggacgcgtatcgcgctgatcctttccgctatcggcgtggcgttttcgcacggcgcgaacgatggtcagaaaggcattggtctggttatgttggtattgattggcgtcgcgccagcaggcttcgtggtgaacatgaatgccactggctacgaaatcacccgtacccgtgatgccatcaacaacgtcgaagcttactttgagcagcatcctgcgctgctcaaacaggctaccggtgctgatcagttagtaccggctccggaagctggcgcaacgcaacctgcggagttccactgccatccgtcgaataccattaacgcgctcaaccgcctgaaaggtatgttgaccaccgatgtggaaagctacgacaagctgtcgcttgatcaacgtagccagatgcgccgcattatgctgtgcgtttctgacactatcgacaaagtggtgaagatgcctggtgtgagtgctgacgatcagcgcctgttgaagaaactgaagtccgacatgcttagcactgatgaatcccctaatgattttggtaaaaatcattaa

SEQ ID NO: 474397 - DNA, 468 bp, Shigella flexneri
atgtaccgtgaaagcgacatcgtgccgggagagcagaccgccaccagcatactgaagcagcgcacaaaaaatcttgcgccactgcctcacgcccaccagcaacagaatccaccacaggaagagacggtggtcagcattgccgttgatccggaatctccggctcagtatctccagcgccagaaaccacaacgggaagagatgcctgtatacacgcgctgggtaaaaacgcagaaatgcatgacgtgtggcaatcaggcagatgatccgcaccacatcattggtcatggactgggagggatgggaacaaaggctgacgatttgtttgttattccgctgtgtcgtaaatgccataacgaactacacgccggggtaaaagattttgaagaaaaacacggtagtcagttgttgttgctgattcgttttttaatgcacgcgagaaattcgggtgttctgaagtggaaagcataa

SEQ ID NO: 474398 - DNA, 366 bp, Shigella flexneri
atgaccgaacgcatagaatttgttttgccttacccgccaacggtgaacacctactggcgacgtcgtggcagcacatattttgtatcaaaagccggtgagcgttatcgccgtgatgtggcgctaattgttcgccagcagcgactgaaattaaacctgtccggaaggctggcgataaagattattgcagagccaccggataagcgccgtcgtgacctggacaatatcctgaaggcaccgctggatgcgctgacgcatgctggactacttatagacgacgagcagtttgatgaaatcaatattgtgcgcggtcagctcgttcctggtgggcggctggggataaaaatcacagaactggggtgcgcatga

SEQ ID NO: 474399 - DNA, 684 bp, Shigella flexneri
atgaataaccagtatttacagtttgtgcgtgagcagctcattatcgccaccgctgatttgagtggggcaacaaaaggtcagcttgaagcctggcaagagaatgccatgttcgatacagggcgttacaggcgtaaaaaaatccggtaccgcgatgaagtgactggaaaaatgataacgcgggataatccaccaatcccgggaaagcaatcgctggcgaaggggacgtcaattcctctggtcagtccggttgagttttcgacatcatcgtggcggcgggctgttctgtctcttgaagagcactataaagcctggttgttgtggtgttacagcgggagtatttgttgggaatatcagatcgcgataacacagtgggcgtggaatgaatttaatgctcaatccggtaccagaaaaattgcagggaaaacgcaggaacgcctgaaaaaattaatctggctggcggcgcaggcagtaaaagcagaactttttggtggggaaggttatgaataccaggagctggcattactggcgggagtgacaactaaaaactggtccaaaacatttactcgtcactgggttgcaatgaaacacatttttcaccgactggatagtgaggctttattgtttgtaatgagaacacgttcaaaaaaaagacggcattttcaaagcaaagtgttgcaaaagtag

SEQ ID NO: 474400 - DNA, 216 bp, Shigella flexneri
atgaaatccatggacaaaatttcaacgggcattgcctacggcacctccgcaggcagtgctggctactggtttttacagtggcttgatcaggtcagtccgtcacagtgggctgcgattggtgtactggggagtctggttctgggcttcctgacttatctgacaaatctgtacttcaaaatcagagaagacaagcgtaaggctgcgagaggtgaataa

SEQ ID NO: 474401 - DNA, 261 bp, Shigella flexneri; identical to SEQ ID NO: 7695

SEQ ID NO: 474402 - DNA, 858 bp, Shigella flexneri; identical to SEQ ID NO: 461268

SEQ ID NO: 474403 - DNA, 264 bp, Shigella flexneri
atggtgaggtacttcgggttccttgccaaccgggtgtgtggagagaagctgccgcaggtgtaccgtgctctggggatggataaaccggaaccagtggcgaaagtgtgctatgcacaaatggtgaaacagttcctgagtcgtgacccgttcgaatgcgtgctgtgcgggagtcagatgcgttttacggggctgaagcggggctaccgtctggcagagcaggtcctgatgcatgagccgctggcccggatgcggtggtgcggctga

SEQ ID NO: 474404 - DNA, 303 bp, Shigella flexneri; identical to SEQ ID NO: 473532

SEQ ID NO: 474405 - DNA, 510 bp, Shigella flexneri
atggagtggataaatgctttgatgaactattttgtacttcatccatatcgcctatgggggcttctttttataatagcgttcacaaaatccactttactcatttcggcgatattgccaccagcatcaattatgatggccactgtaattacagtcagcaagacgactctttcaccatgggaagctggaatcacggtcatgagtggcgcatggtgcggtactatcgttaattaccatcttggtataataattgggcatatccctcaacttgcatgtataatatcgagccgttccaatacaatagaacgggttcgccttcagttgcaaaataactctgtgtcaatacttttcacttcgcgctttatcgccgtgctgcgttacattgctcctttggtggcaggaatgttgcaacttcatccagtgaaagtgtatacagtgagtctgatttcagctgctagctggtcagcactttatgttggtagttttagcttcgtgttgcctttttttagctaa

SEQ ID NO: 474406 - DNA, 765 bp, Shigella flexneri
atggcaaaaccggactgggaggccatcgaatcggcataccgggccggagtccttagcctccgtgatataggcgagaaatacggcgttacagaaggggctatcaggaagagggccaaaaagcttgattgggcacgcagtggcggtacgcaggtttgcaaaaatggtacgcaaaaaaggaaagtgcgtaccagcagaaagcctgccattactggccttacacaaaaaagtacgcaactaaaaacagaatctacaccggatacgaaaccgatacgcggaatgcgtaccgatcccccgactaacccattccaacccggtaaccagcaggcattaaaacacggtggttatgcccgtcgccttctgctcaaagatgaggtgatagaggacgctaaagcgttgacgctcgaggacgaattatttcgccttcgtgctaacaaccttgtcgctgcagagaatattggtcggtggttggtgtcgctggaagatgctaatggggaccaggaaaggaagatgctgattgaaaatatcagcgccgccgagaaagcaatgatgcgcaatacagttcgtattgagtccatcgttggcacgcttgcgacggtaggaaaaatatttgctgatacagcctaccgcaaggccgccactgataaggtgtctctggaggctgatcgtcttcgccgtgatgcaggtattgatgatggcaatggagagcgtgacctcaatgacttctactctgacatccaaaccgacgctgaatccggctttacgtag

SEQ ID NO: 474407 - DNA, 684 bp, Shigella flexneri
atgacttctactctgacatccaaaccgacgctgaatccggctttacgtagtttctggactatgcgggcacgtaacaaagtgctttatggtggtcggtcatcgtcaaaatcatgggatgccgctggcattgccatatttctgtcgaataaatacaccctgcgtttttgttgtgcccgtcagatccagaataaaatcgaagagtcggtgtataccctgctcaaaattcagatagacaggtttggtctgcggcaccgtttccgtattctgaacaacaaaatcattaaccgggttactggctcggaatttgttttttatggattatggcgcaacatcgaagaaattaagtcactggaggggatcgatatgttgtggctggaagaagcccacgcactgacggaataccagtggaaaattctggagccaacgatccgtaaagagggttcggaatgctggttcatattcaaccccggacttgttactgatttcgtctggcgcaacttcgttgttgatccgcccgaaggcactctcatccgcaaaattaactatgacgaaaatccgtttctgtctgacaccatgcttaaggttatcgacgcggcgcgacgccgtgatccggatggttttaaacatgtgtatgagggcgttccggagtctgatgatgatgcggcaattagactggccccctga

SEQ ID NO: 474408 - DNA, 1167 bp, Shigella flexneri
atgattgaaattaacagtttattattaataacatccgtgatattgatgtcgttattagctgtggggttatttgataaaatttccccaataaatcttgttgagcacggcaggaataatcaaatagatggaatgcgggggttcttagcaattttcgtgcttattcatcacgcagcaatttggaatggatacttgtcatctggagtatgggaagcaccttcatcaaatctgttagcaaatttaggccaagttggtgtgtcattcttttttatgattactggttatctgttcttttcaaagattatctctggagatcaggactggacaaggctttatgtatcaagattactacgattaaccccaatgttcatagttagcctatgtctcatttttatcattgtaggttttaagtctggatggagaatgcaggtatccacagaagagctttttgtgtcaataatgaagtggttgccattcactgcgctaggtatgccgaacattaatgacgtaaaagattcatttactatcaatgccgctgtaacatggacacttgtatatgaatggttcttttatttttctcttccggtaatttccgcgctcataaaaagaaaagtcagtatttacatggttatgattagcgcaatatcgctatttgttttcattttatttttcagtaaaatacacatagcatcatttctttttgggctcctggcatttttgctaaataaatcaaagatagtcaatggaattgccaaagcaaaagtaacaccaattataataactgcgataatggtttttgaaatgacgtatttcaaaacaacttacgcaccgctaccactgattctttgtggaataacatttatcattatcgcatcaggttgtgatttgtatggaatattaagattaaatataaccagaaagctaggagaaactacctacagcgtttaccttctgcatgggatattcctttattgcctaatgacgtggattattcctaataattacactgaaaatacatttatcatactggtaagcacaactgcatttcttattacgttcacatcatgcctaacttttaaattaatagagacgccattcatcaaattaacaaaacaaaccacaactttagtaaaagaattaatgcccacattaacaaacaacaatcaataa

SEQ ID NO: 474409 - DNA, 1605 bp, Shigella flexneri
atgattcagctatccagtagtcacaaacttccagcagtctactatctctaccagcgtaacggcgtctactacttccgtcttagggtcagacaatcaaacaatgatagaatgacctcaatatcattacggaccaaggatagacgcaccgctatggcttactcaaggcacataaaggcagcactcaaggcaatacacgcagacagacccaacgctacctacgaggaaatgagggaacaccttaaggacatcgctgagtgtgaactgtctatgggccgttcagatctctttgagcctgacatgagggatatctaccgggaccaatacggagaacttggtgagagccttaccgatgctctggctagtgagccgctaagcattgaccagcatcgttacatcaatgaggccctgaaggtgctaaaagcctgtatgaggcgtatcgaagcgggagacagtcagcctctgatagattacgtcgatctttttaatgatattgataggcaagataaccaagcagactctgtgtccctatctgttaatgctccagaagtaaaaccagaagttacgcctagcattaccatagcgagcctctttgagcaatacgaagcggagaactatcagaactggaagcctgcaaccttaagggaaaacaaggcgtcacacgctgcgttaatcgaaatattcgaccatctgggtctcaatgcagacgctaacagggctgacatgcttagggtccgtgatgtgctccagcagttacctaggaaccgtaagcagcgcttcaaggatgtcccacttgctgacctgttgagccgtgaagataagacagattgtctggatgtcgttaccatcaacaacaagtatcttattaagatggctgctgtctttaggtgggctgtgcgcaatgacttgattaaaaagaacatgactgagggtctggagcttaaagtccctcagcgtaaagcctcaggggcccgtaacgccttctctacggagcaggtggggcaactactggtcgcagctaagacatactctcagaagacctctggtaagccgtatcattattatgttaccgccttggctgctatcactggggcgagactcaatgaaatagcccaactacaggtcaaagacgtcaggaccactgaggcgggaaccgtttatattcatatcaatgaagacgatagtagtctacccggtaagagcatcaagaacgctcatagtgaccgctgtgtgcctctggtcgatggggcctatggttttatattggctgactttatggcgcttgtagagacccgtagaggcgctgacggtgatgacgctatggtgttcgatggtctgcgtctcatgaagaacggttacggtgagcaggtgagtaaatggtttaatcggacgttgttgcctaaagtcctcgtagaccgtagcggcttagcgtttcactcgtttagacatacagttgcgacccagttaaaacaacatggggtcgagttggcgtatgcacaggcgatcatggggcatagttcagggtctattacgtacgaccgttatgctaaagaggtcgaggttgataggctggtcaatgtgatggctgatgtttataaggagacctag

SEQ ID NO: 474410 - DNA, 210 bp, Shigella flexneri
atgtctcaacaaccacaacaaccacaacaaccacaacaaccacaacaaccacaacaagaaatcagcatcattaacctcgaccagcttgtgtccatgacctcagttgaaattgctgagctgacaggcaaggagcaccgaaatgtccttcgtgatattcgtaagatgctcgaagaacttaacgcgggtaatgctgccaacttactgatttag

SEQ ID NO: 474411 - DNA, 129 bp, Shigella flexneri; identical to SEQ ID NO: 468637

SEQ ID NO: 474412 - DNA, 195 bp, Shigella flexneri
atgaatgagaacaaaataaaaaggctggagcaactgttacaggcacgccaacgggagtttgccactaaatggggacgtgccgcgctgccacatgaacgcctaacctattttccacttgaagacctcattaaaaataatggcaaaaaaatcaggtctgataagaaacacttcttagaatgcaatgaagacaaataa

SEQ ID NO: 474413 - DNA, 180 bp, Shigella flexneri; identical to SEQ ID NO: 13422

SEQ ID NO: 474414 - DNA, 366 bp, Shigella flexneri; identical to SEQ ID NO: 462994

SEQ ID NO: 474415 - DNA, 186 bp, Shigella flexneri
atgtctaacactagttctaattttgagatgactggaactttgctggggctggagcttcgtaaacgtaaaactcctcaggaaaaaattgccattattcagcagacaatggagcctggcatgacggtgtcccatgtggcgcgtttgcatggtattcagcccagcctgttgcttaagtggaaaaaataa

SEQ ID NO: 474416 - DNA, 639 bp, Shigella flexneri
atgattaatggggtgtcgttacagggaactgctggatatgaggcacatacagaggagggaaatgtaaatgttaaaaaattgctggaatctttaaactctaaaagtcttggtgatatggataaagattctgaattggcagcgactttacagaaaatgataaatccgtctggtggggatggtaactgttcagggtgtgcgcttcatgcttgtatggctatgttagggtatggagtaagagaggctcccgtacctaatgaaatatcagagtatatgaccggattttttcataggcatttagagcaaattgatagtgaaggcatagtgtcacatcctaatgaaacttatagtaaatttcgtgagcgtattgcagaaaatattttacaaaatacttcaaaaggaagtgtagtaatgatttctattgaacaggccactcattggatagctggatttaacgatggtgaaaaaattatgtttttggatgttcaaacaggaaagggatttaatctttatgatcctgtagaaaaatcgccagatgcatttgtagatgaaaatagttcggttcaggtaattcatgtatctgatcaggaatttgatcactatgctaacagtagtagttggaaaagtaagaggctttgctga

SEQ ID NO: 474417 - DNA, 273 bp, Shigella flexneri
atggctaccgttactgttcattgtccgcgctgtcattccgatgaagtttatcgacatggccgtagttgttcccggcatgagcgtttccgttgtcgctcatgtaaacgtgttttccagctcacttactcttatgaagccagaaaacccggcgttaaggagcagatcgttgaaatggcacataacggcgcagggggccgtgataccgccaggacactgaaaatcggcatcaataccgtcatacggacattaaaaagctcccgccccggcggataa

SEQ ID NO: 474418 - DNA, 1401 bp, Shigella flexneri
atgatgacgaccagaatagtggttggcctcacggcagggacgtgtctgattttctcgcaaaacctgatggccgaggtcagtgtattcaatccggcgcttctggaaatcaaccatcaatccggagtcgatattcgccagtttaatcgggcaaacctgatgcccccaggtgtttatagcgttgatatttttatcaacggtaaaatgtttgaacgtcaggatgtgacatttgttcaggataatccagatgctgatctgcacgcttgctttattgccattaaaaaaacactgtcctcctttggcataaaagttgatgcgctcaaatcgttcaatgatgtggatgagacggtttgcctcgatcctgctccacgtattgaaggctcatcctggcagtttgacagtgataaattgcagctgaatatatccattcaccaaatctacatggacgcgatggcttatgattacatcagccccacgcgttgggatgaggggattaatgcgctcaccatcaactacgatttttctggttcacatacactacgttcagattatggttcacaagagacagataccagttatctcaatctgcgcaatggactgaatattggaccgtggcggctacgtaattacagtactttaaacaccagcgatggccgtgcggaatacaactccattagtacctggatacagcgcgatattgccgcgttaagaagccagattatgattggtgatacgtggacggcgagcgatattttcgacagtacgcaaattcgcggcgcgcgtttgtatactgataacgatatgctacccgccagccagaatggctttgctcctgtggttcgtgggattgcaaagtccaacgccaccgtcatcattcggcagaatggctacgtgatttatcagtcagccgttccacaaggtgcttttgagatcaccgatctcaacaccgcaagtacaggtggcgatttggacgtaaccatcaaagaagaagacggtagcgaacaacgattcacccaaccttatgcttcattggcgattcttaaacgtgaaggtctgacagatgttgatgtcagcgtgggtgaattgcgcgatgaagacggatttacaccggacgtccttcaggcgcaaatacttcatggtttttcccacgggatcactttatatggaggtatgcaggctgctgaaaattatggttctgcagctctgggtgtcggtaaagatcttggcgctttgggcgcaatttctttcgatgtgacacatgctcgtgcgaattttagccatgatgatacagaaacgggtcagtcatatcgctttctctattcaaaactatttgacgacacagacactagcttgcgcctggttggctatcgttactccaccgagggctactataccactcaatga

SEQ ID NO: 474419 - DNA, 960 bp, Shigella flexneri
atgcaatttggctacagcagtagctggaagcgtctctcgtggaacgtctcctggagttattccaatactgccagacaggggacggggaacaaccatgccagtgataacaccagtgagcagatctacatgctctctttatctgttcctttatcgggctggtggggtaatagttacgccacctattctgtttcgcaaaacgataattccggtagctcacatcaactcggactcagcggtacggcgctggaaagaaataacctttcatggaatttaatgcagtcctataacagtcatgatgatgaggttggcggtaatatgtccctgacctatgatggctcttatggcacggtgaacggcagctataactacagccaaaattcccagaggctgaattatggtatcagagggggaattctggcacacagcgaaggggtaacgttaagtcaggagttaggtgaaactattgctcttgttaaagcacctggggccgccgggttagaaatagataatatgcgcggtgctgcgacggactggcgcggctatacggtcaagacacagctaaacccttatgatgaaaatcgggtagcaatcagcgataactatttctcgaagtcgaatatagaacttgataataccgtcgttacgatggttcccacgcgtggtgcagtggttaaagcggagtttgtgactcatgtgggttatcgcgttctcttcagagtgttaaatgcaaatggtaaaccggtaccttttggagccattgctgcgatacaagatgcaagtttggcagattcaggaattgtcggtgaccgtggcgaactttatctttctggtctaccagaaaaaggacaggttacgttatcctggggagaaaacgcctcaacaaaatgcatcttcaattattcattttcgacaccagaaagtgagagcggattaattgaacagggtgtgacatgtcattaa

SEQ ID NO: 474420 - DNA, 219 bp, Shigella flexneri
atggttacattatttagaaaaaaatatccgcgaaagagtagaacaacagaattcctgtttctcattctgtttatcgtgttgatgacaccgatatccccgcaaatttttgtctggataatcggaaaaataattgagccagttattgaattgtataacgacgtggtatgggcgtcattcaacacactgcacaataaaattaatccgtataaggaaagctga

SEQ ID NO: 474421 - DNA, 366 bp, Shigella flexneri
atggcactgacgaaaaaacaacgtgcagaactgcgcatgaagttcggtggtcgctgcgcttattgcggctgcgaacttggcgaaaagtggcatgcagaccatgtaaaaccggtcattcgttttgatggaaatatgcttcaccaggaacgtgacgatatatccaacatggtaccagaatgccacccatgcaatctgcacaagcattgcagtagcctggaagattatcgacgaattatcagtgatggtcgtcgtgaattccttgcgtccgggaaaggcaaagcgctggttcgtatgggattggttgaaatgaaatctgacccggttgtgttctggtttgaaaaatatcaagaaggggctacggcatga

SEQ ID NO: 474422 - DNA, 666 bp, Shigella flexneri
atgactactattaccaaagagcgactgcaatggctggctaacatttctggccgcgatgatattgacgatatagacggcggtgaaattcgtgaactggcgcttatcgctctggcatcactggaagcagagcctgtagcggaatgcattgttgaagatgggggcatgtgtattgacgggttcggtgagtatgtgggtcactcgctgcctgatggaatgcatgagctttatgctgccccgcgaatgcgacaacctgatggatggaaagccgtagctgtagcgtggaaggtgacgtttactcaagttgaccaggaatctaatacgttcactgctatatatttttacaaagcggaagttgagcgttgggtacgactgcataaagcatgtgattttcgggcagatataacaccgctttacgcagcgccggcagtgccggttgcagtaaacgacgacatggcttacgcattccatcacgcactgtcagattcatcgcttggctctgatgaaatcgaagaaattaaaaccggtttgcgtgctgcctttgccaacgtcactatccaaccagagccgatagtgccggatgaaatcgggccaaacgatagtaatacgtttgattatgttgatggctggaacgcctgccgcgctgccatgcttaagggagataaataa

SEQ ID NO: 474423 - DNA, 366 bp, Shigella flexneri
atgattaatcgaaccaaactggagcacattctcgaatatgccaggcagcagaaatgtattgggcaactttgtaaaattccaccaggagatatggttgaaatcgtggaaatggccatgcgtaaggctggcaactctccggtaactctggctggctggataagctgtagtgatgcagttcctgctgaatattgcgatgtgattcttctcgatgatctcgggaatgtattccccggttcctgggataaggttttttgccccactcgtggcgggaataagatggcttttgtggacaaagacggcgttgaagtagagagctcaactcactggatgccgctaccggaaccaccgcaggaggtgaatcaatga

SEQ ID NO: 474424 - DNA, 213 bp, Shigella flexneri
atgtctcacaaatgtaggttagcctcttacgtgccgaaaggcaaggagaagcaggctatgaagcagcaaaaggcgatgttaatcgccctgatcgtcatctgtttaaccgtcatagtgacggcactggtaacgaggaaagacctctgcgaggtacgaatccgaaccggccagacggaggtcgctgtcttcacagcttacgaacctgaggagtaa

SEQ ID NO: 474425 - DNA, 2031 bp, Shigella flexneri
atgatttataaaaatgataaaacatttcgtaatcttgaaatattcggagacagcggctctggagcatacttatatgataacaaactagaaaaatgggtattagtcggaacaacccatggtattgccagcgttaatggtgaccaactgacatggataacaaaatacaatgataaactggttagtgagttaaaagatacctatagtcataaaataaatctgaatggcaataatgtaaccattaaaaacacagatataacattacaccaaaacaatgcagataccactggtactcaagaaaaaataactaaagacaaagatattgtgttcacaaatgggggaaatgttctgtttaaggataatttggattttggtagcggtggtattatctttgacgaaggccatgaatataacataaacggtcagggatttacatttaaaggagcaggaattgatatcggaaaagaaagcattgtaaactggaatgcattgtattccagtgatgatgttttacacaaaataggccccggtactctgaatgttcaaaaaaaacagggggcaaatataaagataggtgaaggaaatgttattcttaatgaagaaggaacatttaacaatatataccttgcaagcggaaatggtaaggtaatactaaataaagataattcccttggcaatgatcaatatgcggggatattttttactaaacgtggtggcacgctagatttaaatggacacaatcagacttttactagaattgccgccactgacgatggaacaacaataactaactcagatacaacgaaagaagccgttctggcaatcaataacgaagactcctacatatatcatgggaacataaatggcaatataaaactaacgcacaatattaattctcaggataagaaaactaatgcaaaattaattctggatggtagtgtcaacacaaaaaatgatgttgaagtcagtaatgccagtcttaccatgcaaggccatgcaacagagcatgcaatattcagaagcacagcgagtcattgctccctggtatttctttgtggaacggactgggtcaccgttttgaaagaaacagagagttcatataataaaaagttcaattctgattacaaaagtaataatcagcagacctcatttgatcagcctgactggaaaaccggggtgtttaaatttgatacattacacctgaacaatgctgacttttcaatatcacgcaatgccaatgttgaaggaaatatatcagcaaataaatcagctatcacaatcggcgataaaaatgcttacattgataatcttgcagggaaaaatattactaataatggttttgacttcaaacaaactatcagtactaatctatccataggagaaactaaatttacaggtggcatcactgcacataacagccaaatagccataggtgatcaagctgtagttacacttaatggtgcaacctttctgaataatactcctataagtatagataaaggagcaaaagttatagcacaaaattccatgttcacaacaaaaggtattgatatctccggtgaactgactatgatgggaatccctgaacagaatagtaaaactgtaacgccgggtctccactacgctgctgatggattcaggctgagtggtggaaatgcaaatttcattgccagaaatatggcatctgtcaccggaaatatttatgctgatgatgcagcaaccattactctgggacagcctgaaactgaaacaccgactatatcgtctgcttatcaggcatgggcagagactcttttgtatggctttgataccgcctatcgaggcgcaataacagcccccaaagctacagttagcatgaataatgcgatctggcatctaaatagccagtcatcaattaatcgtctagaaacaaaagacagtatggtgcgttttactggtgacaatgggaagtttacaacccttacagtggacaaccttactatagatgacagtgcatttgtgctgcgtgcaaatctggcccaagcagatcagtga

SEQ ID NO: 474426 - DNA, 366 bp, Shigella flexneri; identical to SEQ ID NO: 462994

SEQ ID NO: 474427 - DNA, 465 bp, Shigella flexneri
atggtgtcacgctcctggtattcccaggctgtagaactgctcatgtgccctacggcgacgttattgtctgatgttgaacccattgagaatctggtcaagaccgtacgttccggcaatacgcacgcagagcgtatcagcgccatgctgacctctccggcaatgactgaaactcatgattttagctatcgctccgtcattctcactctttcagagcgcaaggtactgcggctattaggtaaaggatggggcatcaaccagatagcttcattgcttaagaaaagtaataaaactatcagcgcccaaaaaaacagtgcgatgcgtcgactggcaattcacagcaacgctgaaatgtatgcatggataaatagcgcgcagggtgcaagagaacttaacttgccttctgtttatggagatgccgcagaatggaacacagccgaattaagaagagaaatgtcgcactcatag

SEQ ID NO: 474428 - DNA, 678 bp, Shigella flexneri
atggaacacagccgaattaagaagagaaatgtcgcactcatagaaaaatgcgtcatgagtagtatcggtattgagagtttattcagaaagtttgcgggcaacccttataagctccatacctataccagtcaggagtcatttcaggatgccatgtcgcggatctcgtttgcggcggtcattttttctttttctgccatgagaagtgagcgcagagagggattatcttgcctgactgagctggcgattaagtttccgcgtacccggcgtttagttattgtggatgatgatattgaagctcggctgattggttcattgtcgccatcaccgctggacggtgtattaagtaaagcgtcaacgctggagatttttcatcaggaactctttttgtcattaaatggtgtacgtcaggcgaccgaccgactgaacaatcagtggtacattaaccaaagccggacgttaagcccgacggagagagaaatattgcgctttatgtcgcgtggctactcaatgacacaaattgccgagcagcttaaacgtaatatcaaaacgatccgagcgcataaatttaatgtgatgtcgaaactgggcgtcagttctgatgcagggttgttggaggccgcagatattctgttatgtatgcggcattgcgaagcaagtaatgtgttgcatccctattaa

SEQ ID NO: 474429 - DNA, 789 bp, Shigella flexneri
atggcctatcgttccgcaccgctctatgaagatgtcatctggcgaacgcatctccagccgcaggatgctgggcttgcacaagccgtacgggcgatgatcgccaaacatcgtgaacatttgctggagtttatccgcctggatgaacccgctccgcttaacgccatgacgctggcgcaatggtcatcaccgaatgcgctaagttctctactggcggtctattccgatcatatctatcgcaaccaaccaacgatgatccgcgagaacaaaccgctgatctcactatgggcacaatggtatatcggcctgatggtgccaccattaatgctggcgctactgacgcaggaaaaagcattagatgtgtcgccggaacatttccatgctgagtttcacgaaaccggacgcgtcgcctgtttctgggtcgatgtgtgtgaagataaaaacgcaacaccacattcgccgcagcagcgaatggaaacgttaatcagccaggcgctggttccggttgtgcaagcactagaagcgaccggagagatcaacggcaaacttatctggagtaataccggttatttgatcaactggtatctcactgagatgaagcaactgctcggcgaggctactgttgaatcgctgcgccatgccctcttttttgagaaaacgctcacgaacggtgaagataatccactctggcgtaccgtggtactgcgcgacggcctgctggtgcgccgcacttgctgccagcgttatcgcttaccggatgtgcagcaatgtggctattgtacgctgaaatga

SEQ ID NO: 474430 - DNA, 237 bp, Shigella flexneri
atgttgcaacgtacgctgggcagtggctggggagtgttgctgccgggattgctgattgcagggctgatgtatgcggatttatcgccggatcagtggcggattgtcattctgatgggattagtattgacgccggtgatgctgtatcacaaacaattgcggcattacattttgctaccatcgtgcctggcgcttattgctggcatcatgctgatgataatgaatttgaatcagggatga

SEQ ID NO: 474431 - DNA, 216 bp, Shigella flexneri
atgaaatccatggacaaaatttcaacgggcattgcctacggcacctccgccggcagtgccggctactggtttttgcagtggttggatcaggtcaggccatcacagtgggctgcgattggtgtgctgggaagtctgcttctggggcttctgacttatctgacgaatctgtatttcaaaataagagaagacaagcgtaaggctgcacggggagagtaa

SEQ ID NO: 474432 - DNA, 630 bp, Shigella flexneri
atgaagcatgaagaaatgaatcagcgattcaatcacctggaaaatgaaatcactgagcttaataaaaaattgtcggtgttggtgagttctgaagatgaaaacaaacgccgcgatgagcattatgcggcgatttacgattactgccacaaagtcgctcacgagacttttatgaagtttttgcaggaaaagtttttaccggccgcattgtcagaaaaagaggcggcttacctgcggcctgagtacgtcattacggttaacagtgccggagaggaagagcataaaagtgattttattgcgtctgcaccggataaagaccaggaaccccatcggcctttcagggtttcctgtgaagagggtgagttcgtcgtttatgagaacggaaaacctgtccgggcatcgcatcatcactgcctgaaaattattaatctcgctatcagatgcctgaaagacgaaaacaccagagttatgaaacgcattggccgttgcatggggtatttgcaggtggcggcagagattgaagcacttgccagtggtgcagacatggatgctgcggtgcgggaggctcttcttcgtgatttcaatactccccctttaagaaagagcctgatgactggatccagccggggctga

SEQ ID NO: 474433 - DNA, 534 bp, Shigella flexneri
atgagcgcaaaaatcaaatacggcctgtcggctgctgttctggcgctgattgccgcaggcgcgtctgctccccagatacttgaccagtttctgaacgaaaaagagggtaatcacacaacggcataccgtgatggttctggcatatggaccatctgtcgtggtgccacaatggtggatggtaagcctgtcataccgggaatgaagctgtcgaaggaaaaatgtgaccaggttaacgctattgaacgtgataaggcgctggcatgggtggagcgcaatattaaagtacctctgaccgaaccccagaaagcgggtatagcgtcattttgcccctataacattggccccggtaagtgtttcccgtcgacgttttataagcggctgaatgccggtgatcgtaagggcgcatgcgaggcgattcgctggtggataaaagatgttgggcgcgattgccgcatacgttcaaataactgctatggacaggttattcgtcgtgaccaggaaagcgcattagcctgttgggggatagatcaatga

SEQ ID NO: 474434 - DNA, 468 bp, Shigella flexneri
atgagcagagtcaccgcgattatctccgctctggttatctgcatcatcgtctgcctgtcatgggctgttaatcattaccgtgataacgccattacctacaaagagcagcgcgacaaaaacgccggagaactgaagctggcgaacgcaaccattactgacatgcagcagcgccagcgtgatgctgatgcactcgatgctaaatacacgaaggagttagctgatgcgaaagctgaaaatgatgctcttcggcgcaagcttgataatggtggtcgggtgctcgtcaaaggaaaatgccctgtgccatcctcagccgaaacctccagcgcctccggcatgggcaatgatgccaccgtcgaactctctccagttgctggacgaaacgttctcggtatccgggacggaatcatcagcgaccagacagcattgagaatgcttcaggagtacatcaggactcagtgcctgaaataa

SEQ ID NO: 474435 - DNA, 183 bp, Shigella flexneri
atgaacaaatcattaaccgttcttccttctggcgaatacccgaccatgagcagtcttgagatggtggattacattaatgctgatcggaaatccaaagcggaggcggaggggcttgcgttcccctgtaagaaatatcgcaaactcgaacaccgcagtttcatgaagaaagtacccagggtctga

SEQ ID NO: 474436 - DNA, 486 bp, Shigella flexneri
atgggatgtgtaactgcaccagaacctttatcctcatttcatcaggtcgctgaatttgtcagcagtgaagctgtacttgatgactggttaaagcagaaggagctaaaaaatcaggcaatcggagccacccggacttttgttgtatgcagaaaaggtacgcaacaaatagtcggtttttactcactggccactggtagtgtcaatcatacagaagctacaggtaaccttcggcgcaatatgccagaccccattcctgtaattatacttgcacgcctggctgtagatgtgtcatttcgaggaaaagggcttggcgcggatttacttcatgatgcagttcgtcgttgttacagggttgccgaaaatatcggtgtgcgtgcaattatggttcatgcgcttacggaaaacgcaaaacagttttatattcatcatggttttaagccatcaaaaactcaggtgcaaacattgtttcttaaactccctcaatag

SEQ ID NO: 474437 - DNA, 267 bp, Shigella flexneri; identical to SEQ ID NO: 461505

SEQ ID NO: 474438 - DNA, 153 bp, Shigella flexneri
atggcgcaggttgacctgcacttggccaagtggattgcccgcaaacacaagcgagcgcgaggtagtctggtgcgtgcattcgagtggttactgcgaattcgtcacgactgcccgacgctgtttgcacactggtgcttagcttacgatacttga

SEQ ID NO: 474439 - DNA, 144 bp, Shigella flexneri
atgagtcagccaaagccgttcgaggtctctaagtatgcggtttggaaagcataccagcgggtcaaagctaatcgaggtgcggcaggtgtcgatgggcagtcagtcgaggcgtttgaggttaccaatcgaagctatacccggtaa

SEQ ID NO: 474440 - DNA, 252 bp, Shigella flexneri
atgtgtcaggtaggtgttgcggagatgaacgaaagtgaactgtcgatgaagtgtcgaaaggaacctctaggcgatgtcgaaaatgtgctatctacgcagcgcatgacgagtccagcagatatctggtactggctgggcggcatccggcatataggcagcatgaacgcaacacaggctctcgtacggaacgtgggaacctgtcgtctcgatgctaagggagcggcgcggagcagaggcactgcaagcgcctga

SEQ ID NO: 474441 - DNA, 645 bp, Shigella flexneri
atggcttcaaactggataaagctcgaggttattacgccggataagccggaaatattcaggcttgctgagattctgaatattgatccagatgccgcattagggaaggttattcgcttctgggcatgggcggatcaacaaatgatagacggtaatgcagattgtaacgctcgcggcgttacaaaaagtgcaatagatcgcatcacttttatgtctggttttgctgatgcgttaattcaggttggatggctggtcgaaaatgacggtgggctttctctacctaactttgaacgtcataacggaaaaagctctaaaaaacgggcggttacaaacgagcgagtaacaaaaatacgcgaactgaaacgaaaaggtaacgctgccagcgttacacaaacggatcaaaaagcgttaccagtggaagaggaagaggaagaggaagatctaaatactgatctccccctaaatccccctcgccaaaaacgagcgtctaaaaaattcgagccggaggctattgagctgcccgattggttgccggaaacactctggcatgagtgggtccggttcagacaggcattgcgaaaaccgattcgaacggagcagggcgatacgggaactggaaaaattccgtcagcagggttttacacctga

SEQ ID NO: 474442 - DNA, 423 bp, Shigella flexneri
atgaaaatcaggcatgagcacatcgaatcagtgctgttagccttggcagccgaaaaagggcaggcgtgggtcgctaacgcaattactgaagaatatctgcggcaggggggcggcgaattgtctctggtaccaggcaaggactggaacaatcagcagaatatctatcaccgttggttgaaaggtgaaacgaaagcgcaaagggaaaaaattcagaaactgatccctgcggttctggcaattcttccgcgtgagctgcgtcaccgactctgtatcttcgataccctggaacgccgtgcattactggcggcgcaggaagcgttgagtacggcaattgatgcgcatgatgatgctgtccaggccgtttaccggaaagcacatttcagcggtggtgggtcgcccggcgattctgtcgtagtgcattga

SEQ ID NO: 474443 - DNA, 228 bp, Shigella flexneri
atgttgaaaattgatgctatagcgttttttggcagcaaaacaaagcttgccaatgccgcaggagttaggctggcaagcattgctgcatggggggaactggttcctgaaggtcgcgcgatgcgcctgcaagaggcatctggcggggaacttcagtacgaccccaaagtttatgacgaatatcgtaaggcaaaacgacctgggaaggtgattcatgaaaatcaggcatga

SEQ ID NO: 474444 - DNA, 408 bp, Shigella flexneri; identical to SEQ ID NO: 461293

SEQ ID NO: 474445 - DNA, 204 bp, Shigella flexneri
atgaacgagacagaattaaaacacgttatcgctctactcctagaagatgcaaaacgcctccagcaactggagccaaatgcaggcactggggcacgcatctggctggctaaagaagcgctggaatctggcgattatgatagcgaagaagccttctacaaagcagaaggccgtgcaggatattcaccgggtcttggcggggtataa

SEQ ID NO: 474446 - DNA, 213 bp, Shigella flexneri
atggagatggttcgtataatcaactcccggacggaacttatgtttccgaaaagggcggtgatatttatcaaattcgcagccagatatctgactatgcagaccgactatccgggtatcgcgcgtctgtttttgtttgcgaattcagtcaatgcgcatggtatttataccccgccaagacccggtgaatatcctgcacggccttctgctttgtag

SEQ ID NO: 474447 - DNA, 228 bp, Shigella flexneri
atgcgtgtcaaacatgcagtagttctactcatgcttatttcgccattaagttgggctggaaccatgactttccagttccgtaatccaaactttggtggtaacccaaataatggcgcttttttattaaatagcgctcaggcccaaaactcttataaagatccgagctataacgatgactttggtattgaaacaccctcagcgggtaatgctgccaacttactgatttag

SEQ ID NO: 474448 - DNA, 390 bp, Shigella flexneri
atgaaacgttatttacgctggattgtggcggcagaatttctgttcgccgcagggaatcttcacgccgttgaggtagaagtcccgggattgttaactgaccatactgtttcatctattggccatgatttttaccgagcctttagtgataaatgggaaagtgactatacgggtaacttaacgattaatgaaaggcccagtgcacgatggggaagctggatcacaataacggtcaatcaggatgttattttccagacttttttattcccgttgaaaagagacttcgagaaaactgtcgtctttgcactgattcaaactgaagaagcactaaatcgtcgccagataaatcaggcgttattaagtacggacgatttggcgcatgatgaattctaa

SEQ ID NO: 474449 - DNA, 651 bp, Shigella flexneri
atgtttaatgaagtccatagtattcatggtcatacattattgttgatcactaaaccttctttgcaggcgacagctctcttgcagcaccttaaacaatcgctagcaattacaggaaaattacataatattcaacgttctctggacgatatctcttcaggctctattattcttctggatatgatggaagcggataaaaagcttatccattattggcaggatactttgagcaggaaaaacaacaatatcaaaatattgttgctaaatacgcctgaagattacccgtaccgcgacattgaaaactggcctcatatcaacggcgttttttatgccatggaggatcaagaacgtgttgtcaatgggttgcaaggcgtcctgcgtggcgaatgctactttacgcaaaagcttgccagttacctgattacacattctggtaactatcgttataacagcacggaatcagccctccttactcatcgggaaaaagagatcctgaataagctgcgtatcggcgcgtctaataacgagatcgctcgttcgttgttcatcagcgaaaatacggttaaaacgcatctttataatcttttcaagaagatagccgtaaaaaaccggacacaagcggtttcctgggcaaacgataacctcaggcgataa

SEQ ID NO: 474450 - DNA, 456 bp, Shigella flexneri; identical to SEQ ID NO: 262936

SEQ ID NO: 474451 - DNA, 1455 bp, Shigella flexneri
atgaaaatacctgaagcagtaaatcatattaatgttcagaacaatattgatcttgttgatggaaaaataaatccgaacaaagatacaaaagcattacaaaaaaacatatcatgcgtaacaaactcatcctcttctggcataagtgaaaaacatttagatcactgtgctgatactgtgaaaagctttttaaggaagtctatagcagcgcaaagttatagtaaaatgttctctcaagggaccagtttcaaatcattaaatctttctattgaagcgccatctggagcacggtcatcatttcggtcacttgagcacctcgataaggtgtccagacactatctttctgaaataatacaaaaaactcatcctctttcttcggatgaacgtcacttgctctctattattattaattctgattttaacttcagacatcaaagtaacgctaacctgtcaaataatactcttaatattaagtcctttgataaaattaagtctgagaatatacaaacatataaaaacacattctctgaggatattgaagaaatagctaaccacgattttgttttttttggggttgaaatttccaatcatcaagaaacactcccactaaataaaacacatcatactgtggattttggtgctaatgcgtatatcattgatcatgactctccatatggatatatgacattaaccgaccactttgataatgctattccacctgttttttaccatgagcaccaatcatttttcttagataactttaaagaggttgtggatgaagttagcaggtatgtgcatggtaatcagggaaaaactgatgtgccaatatttaatactaaagatatgaggcttggaattgggttgcatcttattgattttataagaaagagtaaagatcaaagattccgagagttttgttataataaaaacattgatcctgttagtctggatagaattataaactttgtgtttcagcttgagtatcatataccaagaatgctaagcacagataacttcaaaaagataagactcagagatatatctttggaggatgccattaaagcatccaattatgaagaaattaacaataaggtgactgataaaaaaatggctcatcaagctcttgcttattctctaggcaatgcaaaatctgatatggcactttatttactatctaaatttaattttacaaaacaagatgtcgcagagatggagaaaatgaacaacaatatgtattgtgagctgtatgatgttgagtatttacttagtgaagatagtgccaactataaagtgctagaatattttattagtaatggattggttgatgtaaacaaaagatttcaaaaagcaaatagtggggacactatgcttgacaatgcaatgaaaagcaaagattcaaaaacaattgattttttattaaaaaatggagcggtatcaggcaaacgatttgggaggtga

SEQ ID NO: 474452 - DNA, 267 bp, Shigella flexneri; identical to SEQ ID NO: 463627

SEQ ID NO: 474453 - DNA, 321 bp, Shigella flexneri
atggacttcctggagcatctgcttcatgaagaaaaactggcacgtcatcaacgtaaacaggcgatgtatacccgaatggcagccttcccggcggtgaaaacgttcgaagagtatgacttcacattcgccaccggagcaccgcagaagcaactccagtcgttacgctcactcagcttcatagaacgtaatgaaaatatcgtattactggggccatcaggtgtggggaaaacccatctggcaatagcgatgggctatgaagcatttaaaattttttatgatataagtaaaatttctttggagttataccataatattcattaa

SEQ ID NO: 474454 - DNA, 705 bp, Shigella flexneri
atgacggttagctcaggcaatgaaactttgactatcgatgaagggcaaattgcttttatagagcgaaatatacaaataaacgtctccataaaaaaatctgatagcattaatccatttgagattataagccttgacagaaatttattattaagcattattagaataatggaaccaatttattcatttcaacactcctattctgaggagaaaagggggttaaacaaaaaaatattcctcctctctgaggaggaggtttctatcgatttgttcaaatctataaaagagatgcctttcggcaaaagaaagatctatagtttagcttgccttttatcagctgtttctgatgaggaagctttatatacttcgatatcgatagcttcttctcttagtttttctgatcagataaggaagattgttgaaaaaaacatcgagaagagatggcgtctttctgatatttcaaataacttgaatttatcagaaatagctgttagaaaacgattggagagtgaaaaattaacatttcaacaaatccttcttgatattcgcatgcatcatgcagcaaagcttttattgaatagtcaaagctatattaatgatgtatcaagacttatcggaatatcaagcccatcttattttataaggaaatttaatgaatattatggtataactccaaagaaattttacttatatcataaaaaattttaa

SEQ ID NO: 474455 - DNA, 267 bp, Shigella flexneri
atgcttacacaaactatattcccttgccttccacaaaaacaagaaaatatcatccttgaagtatcaaatcctgtattattatcttctactgttactacagatggatatactgttttcaataaaaaagcagctatatacgaattacaaatacctgctgccaaccggacgaaaacgttgaaattcactgctacagaaatgcaatggttgacaaagataaatgaagccggaattgatgaaaaacaaagccaacggtattctgatttctga

SEQ ID NO: 474456 - DNA, 564 bp, Shigella flexneri
atgcacagtcagttaagagaacgtatccggctgatgcgcgcaaggctggataacgccgcgccggttgctgaaatccgggctgaatctcagctttttgtgactcctgccccggtctgtgatcgcctggtgacgctggcggaaatcagcaaccgtgatcacattctggaaccctctgccggcaccggggccatactgcgggcgattcgggataccgcgccggaggccatgtgtgatgcggtggagattaacagcgggctggtccggtatctgcgggaaaattttaacggtgtcagggtacagtgtggcgacttcatggaatggcagccggtgcagtattacagccggatcattatgaatccgccgttcatccacgggcaggatatccggcatatcctgcgggctttttccctgttgcgtccggggggcgtgctggttgccgtctgtctgaacgggccgcgccagcaggagaagctgttaccgttttctgacatccgcgaggagctgccgcgcggcacgtttgcttataccgatgtcccgacgatgattattcgtttgcgtgcctga

SEQ ID NO: 474457 - DNA, 1362 bp, Shigella flexneri
atgacattagcagcaatcaccatgaccgccccggaagccgccagccctgtgcagatgtaccgcgcgacctactcaccggatgacaacaaactgcgcctgtatgccgcgtcacgtcttgacccggagacgtataaaaaagtgcatgatgccggttttcgctgggcacccagacaggcgctgtttgtcgcgccagcctggacaccgggccgggaagacgtgctcctctcacttgccggagagattgaggatgaagacagcacgctcgctgaacgtcaggaagcacgggcggagcggtttaccggatacagcggaaagcgggccagtgaatccgcacaggcacttgatgaagtggaaagactggccgcgatgatcccgcccggtcagcccattcttgtggggcatcacagcgaacgccgcgcccgtcgtgatgcacagcgtattgaaaacggtatgaaacgtgctgtgatgctctttgaacgtgcggaatactgggaagagcgggcgcggtcggcactgcttcacgcgaagtataaagaacgtccggacgttcgctggcgtcgtatcaaaaaaatcgaagctgatttgcgcaaggcggaaaagaccatcgcacagtcgcagaaatatctgacgatgtggcgggctgaatcgctggatctgaatatggcaaaactcatcagcagtcatgaccatatcagcgcctgtttcccgctggacaggtatccgcgcccggcagaaaaaagccagtatgaaggaagtcgatcgttatggtcggccctggatgatgacatcatcaccacggagcaggcccgcgaaattgcgatccgctgtcatgaacggcagattcagcatcagcaacgctgggttaaccactatcagaaccgcctgatctatgagcgtgccatgctggacgaaagcggcggcgtggttacccggacacaggattttgagccgggcggacaggttttcagccggggcgagtggctgaccatcatccgcgtgaacaaaagcaacggggcggtgagttcagtcacaacgccgaattacagttttctcgggtacagcggcacgatgaaagtgacgcccgatcgcatcacggactacaaagcaccatcggcagaagaggctgccgtcgccagtcaggccgcgaagcgtccgccggtagtcaactatccgggggacggtttccgggaaatgacaaaggcgcagtgggccgccctgccccgggactgtaaggccgtgcgcagtgtggcagagacagaagaccacggggcataccgctaccgccgcacaatggacaataatttccgcctggtgaatgtgtatattaccgacatgaaaatcacggaaatcccacagaaataa

SEQ ID NO: 474458 - DNA, 231 bp, Shigella flexneri
atgacaataagtattgtttcaccttccgcagcggctgtaaagccccgccgtcatccccgtttcagacgcgaagacatccccgcgccggaaattgaccccgtgctgaaagccttcgggcgacacatagcccggagttttcaccgggggcgtggtgtacacatccccgccatgaaaaacacggccttcgggcaggtgctccgcacactcgaactgaaacgcgcttttaactga

SEQ ID NO: 474459 - DNA, 213 bp, Shigella flexneri; identical to SEQ ID NO: 11486

SEQ ID NO: 474460 - DNA, 678 bp, Shigella flexneri
atggaagaaaataatacgagtacagataaaaacaccctgacagcccttattgattatgaaaactgtggcagtctgaaaaatatttcccttgagcagtatggggaactgattatttttgtcgggccacagcagaacgtcgttgttcttcctgcagactcttttcctgaaggtgcgagaatcactatcaggcaggtgagtggtgtgtccaggaataatgtcgattttcatcttgttctggagctggggcggataagctgttgtgcagcagggaaagataaaacataccacatcatttcatcggataagggatatgacggtgttatcaggacgctgaaagaagccggtattacctgcatccgtcgtgatgtaccggaaagtattgctgctgccggtgagtctggtgcagacaaaagtaactgcctgaaacaaccttctgttcctgaaagtgatatcgtcagccgttgggcaggaaagctgcagcagatagccggcggcggagccggtaatatgcctgtgtccgtcgaaacatttaataattatttaaagtcacacatgcgtgacgaatggaacaaaacccgggcagtggcgataaggaatgaactggttcgtcggggggtcacagaagtcagggagaaaaagataatctggaaaaaggcgaaaaaggagaataaagcatga

SEQ ID NO: 474461 - DNA, 126 bp, Shigella flexneri
atgaggtatcgcagctgtactcagataaaaacagcccccgttgcggttgcggagcgaagggggctgaaaaggggaattaaggatgattgttattatggtgaaccagaaggttatccctgtctgtaa

SEQ ID NO: 474462 - DNA, 234 bp, Shigella flexneri; identical to SEQ ID NO: 21645

SEQ ID NO: 474463 - DNA, 759 bp, Shigella flexneri
atgagccaaattttactgcaacctgctaacgcgatgattacgctggaaaacgtccataaatggtatggacaattccatgttttgaaaaatataaatttaaccgtgcaaccgggagaacggatcgttctgtgtggcccttctggttccggtaaatcgacaaccattcgttgtattaatcatctggaagaacatcaacagggacggattgtcgtagatggcatcgaacttaatgaagatatccgcaatattgagcgcgtcaggcaggaagtgggaatggtatttcagcatttcaatctcttccctcatctgaccgttttacagaactgtaccctggcaccgatttgggtacgcaagatgcctaagaaagaggctgaagctctggcgatgcattaccttgagcgggtgagaattgccgaacatgcgcataagtttcccggacagatttcaggtggtcagcagcaacgcgttgccattgcgcgttcgctgtgtatgaagccgaaaattatgttgtttgatgaaccaacgtcggctctcgatccggagatggtgaaagaggtgctggatacgatgattgggctggcgcagtcgggtatgacaatgttgtgtgtaacacatgagatggggtttgcacgtaccgtcgctgaccgggtaatttttatggatcgtggggagatagtggaacaagctacacctgatgaattttttgcgcatcctaaatcagagcgtacgagggcatttttatcgcaggtaatccattaa

SEQ ID NO: 474464 - DNA, 1104 bp, Shigella flexneri
atgacaaaagtattgctgtctcagccctcgcgcccggcgagccataactcaagccgcgcgatggtgtgggtgcgaaaaaatctgttctccagctggagcaatagcctgctgactattggctgcatatggttgatgtgggaactgatcccaccgttgctgaactgggcatttttgcaggctaattgggttggctcaacgcgtgctgactgcacaaaagccggtgcctgttgggtcttcattcacgaacgatttggtcagtttatgtatggactttacccacacgaccaacgctggcgaattaacctcgcattactgattgggcttgtatcgatcgcaccaatgttctggaaaatactcccgcatcgcggtcgctatattgcggcctgggcggtgatttacccactgattgtctggtggctgatgtatggcggtttttttggtcttgagcgggttgaaacccggcaatggggcgggctgacgctaactttaattattgcatccgttgggattgcgggggcgctaccgtgggggatcttactggcatcaggtcgccgctcccatatgccgattgtgcgtatcttatcggtcatttttatcgagttctggcgcggcgtaccgctgattaccgtattgtttatgtcttcggtcatgctgccgttgtttatggcagaaggcaccagtatcgacaaactgatccgcgcgctggttggcgtgatcctgtttcagtcagcatatgttgcggaagtcgtgcgaggtggattacaggcgctgcctaaagggcaatatgaagcggcagagtcgctggcgttgggttactggaaaactcaggggctggttattctgccacaggcgttgaagctggtaattcctgggctggtaaataccatcatcgcactcttcaaagataccagcctagtgatcatcatcggcttgttcgatcttttcagtagcgttcagcaggcaaccgttgatcccgcctggttgggtatgtcgacggaagggtatgttttcgccgcgctgatctactggatcttttgtttcagcatgtcacgttatagccaacatctggaaaaacgttttaacaccgggcgtacaccgcattga

SEQ ID NO: 474465 - DNA, 612 bp, Shigella flexneri
atggctatagtcctttctgttgggctattccgctttaataaaacataccagataaagaccggacaactgcgccgctcctggccgatcgccgcagtgttgatcattggtttgcctttactggcgcaatggctttttggcgcagcactacactgggatgtcccagccctacaaggctttaacttccgcggcggaatggttttaattcctgaactggcagccttaacgctggcactttcggtttatacctctgcatttatcgccgagattatccgcgctgggatccaggcagtgccttatggtcaacatgaagcggctcggtcactggggttacccaacccggttacgctacgccaggtcattattccccaggcactgcgagtaattattccgccgttaaccagccagtatctcaacatcgtcaaaaactcctctcttgccaccgctattggctatcccgatatggtttcgctgtttgctggcaccgtgctgaaccagacggggcaagccatcgagacgatagccatgatcatgtcggtctatctgattatcagcctgactatctcgctgctgatgaatatctataaccgccgcatcgcgatcgttgaacgctaa

SEQ ID NO: 474466 - DNA, 318 bp, Shigella flexneri
gtgaagtggccttgtgggtatgacctgaatatcagcagtcagggggaaaacttcattcaggtagatttcgacacgccgtggtgtcagccggaaagcgacgttgttgcagaattaagccgccgtttcggctgcacgctggagcactggtacgccgaacagggctgcaatttctgtggctggcagttgtatgagcgcggagagctcgttgatgtgctgtggggggaactggaatggtcttccccgacagatgatgatgagctgccggaagtcaccggacctgcgtggataatcgacaatgtggcgcattatggcggatga

SEQ ID NO: 474467 - DNA, 1017 bp, Shigella flexneri
atgactgttgttactgtcggtattgatttagctaaaaatgtgttcgctgtgcatggcgttaatgctgcaggaaaagctgttttagttaagcctcttgtgcgtcgggctaaattgcttgaattgattgcaacacttccagcatgtctgattggaattgaagcatgtacaggtgcacatttctgggcaagagagttccagaaaatggggcatacagttcgaattatggcgccgcaactggtttctccataccgtatgggtggccgtcatgggaaaaatgatgctgcagatgccgctgccatttgtgaagctgttacccgtcctaatatgcggtttgttcccataaaatcagttgagcagcaagggcagttatttgtacacagagctcatcagggatatgtcagtgagagaacagcattgattaatcgcatccggggattgctcagtgagttaggtattgttctcccgcaggcgtttaaagcgtttttatccggggtggctcaggtccttgaggatttgcccggttactgtaatcaggttattggtgatcttcttaatgagctttatcacatagaagaaaagattaaaaacagtgaaaaactcattcagcaacttgccagagataactcagcagcacaactactaatgcaattcagggggataggcccgatgactgcaacagcaatcgttgccagcataggtaatggtcatgatttcaagaacggacgtcagtttagtgcctggctggggctaacaccaagacaacaaagttccggggggaaagcacggttagggagaataactaaagccggcgacagctatctcagaacacttcttgttttgggggcgagatctgtattgttgggagcagctaaaaatgatgatccggtcagtcgatgggccctgcagttaaaagaaaggcgaggatatggacgagcgcttgttgcgatagcagcaaaaaatgcacgtatgtgctgggcaatgttgcacctgagagatgaattcagatttcctgcctag

SEQ ID NO: 474468 - DNA, 957 bp, Shigella flexneri
gtgtttctcgccgtcgagctttcgttgctgtttatagtgattagtgccggtgtcagcctgataagacaaaaggtgccagaccataaaatccagcagatgatgggggccagaaaagggagaggctatctcctggctgctctgttgggagccgttaccccgttctgtagttgctcgacaatacccatgttacgtggattgttgtcagcgaaagccggggttggtccgactctcacttttttatttgtttcaccattacttaatcccattatcgtcggactaatgtggatgacctttggttggaaagtcaccttgttgtacgcgattatcgcagccggcgtctccgttcttgccagtattatcctggattctctggggtttgaacgtcatatcattgccagtaaaagctcatcagcaaattgttgtgctccagcaaaaacttcgccgggaacgacatatacgcccataaaagtgagttgttgtagtccagcggctaaagccattgagaaccccgtagttacctgttgcagtaccaaagctgtagtaagtattaatcccataaaactagccaccaaagatgcgttgcaacagtttaaagatgtactgccatatcttttgttaggagtattaataggatcttttatttatggctttattccctcagcgtggattgccgctcatgcaggagcagataatcccttcgccatcccattaagcgccgttgtcggtattccgctgtatatccgggctgaggcggttatccctctggcatctgttctgatgacaaaaggaatgggtctgggagcattaatggcattaatcatcggcagtgccggcgcaagcctgacggaagtgatattacttaaatcaatgttcagaatgccgatgatagctgcattcctgacggttatattaggtatggctatcttgatgggctatttgactcaattgctattttaa

SEQ ID NO: 474469 - DNA, 423 bp, Shigella flexneri; identical to SEQ ID NO: 466983

SEQ ID NO: 474470 - DNA, 981 bp, Shigella flexneri; identical to SEQ ID NO: 239462

SEQ ID NO: 474471 - DNA, 336 bp, Shigella flexneri; identical to SEQ ID NO: 26838

SEQ ID NO: 474472 - DNA, 513 bp, Shigella flexneri
atgaagaaaacattgttagcaatcatgctggcggggacagcttttgcttctcaggcgggaactttagtaagccagggtactgaagcgtcagctaatcttactttgaccaagcctatcgttgttaataataccattcaaccagtgaaaggggtatatagcggtacgttaactgcatggacgcctttggcaacaggtattgttggcgcatctgatgggcagagccacgactatgctgtaactttcccggatgatatttatgcggagagcagtacttcagcggatgcagtaatttctggtgacaataacccggaccataaactgaaagtttccctgacaacgcttgagcaggatcctccttcagctgcctccgaagagattggcggtaagcgttatatgatgctgaaaaatactggaacaggtggtgcctatcgcgtcgtttcccatatgaaagaacaggttgttgagccagactcttacaccatccgtacccaggcttatatctacgcagaataa

SEQ ID NO: 474473 - DNA, 729 bp, Shigella flexneri
atgaataatgtcttactcatgagacccgatgactcagaatttatgatacctgatgactggtcagggctaaacgcaaaaggcattacatacgaacaagataatagagtgacagagtcttttctgccttttaaatctttttattgttcaccggtgtgcacgacagttgaactcatctcacaaaataattgttttgctatgggtatccgctaccttctggaaaagaaaagagacttaaggctaaatcactttaaagccttctctcataaatgcgagacaaaacctgacgtgttaattatgaccgggtgcaccgtcgctgatacttatagtatattctcacgcattgttgaagaaaatataatgaaaacgatgacacctatcgtcatcattactgggcatcactcagaagatctttgttctctggcatcgaaactgggaggagttaaaataatatcaccgacagaaaagattgcaaaaatagaaaacgctatcaatgatgcttttaacagcaagcctaaaaaaataagatttttaacagatatactctctcctcaacaaattgagaccatgaaaatggttgcgcagggtagatccgttaatgagatttcagccgcaatgaatattagcatcaagaccgtgtatgcacataaagttcgtgctatcaataagctgggaattaagaaaaaagtttatgaagcgcttttttataaagcgctaattcagttcaactga

SEQ ID NO: 474474 - DNA, 765 bp, Shigella flexneri
atggagcggagatgttttttcattatcaatgacgcgattatttttgatccgaacaaatgctcgctctcgaatgtaaatacccaggatgagataaatttgccagctacggcggggtgtattttggcagtgttactggaaagtaatggtggagcggttgacaggaactcaatcattgatagcgttttggagagattttcatttgatctgtcaaacaacacattgaaccaatatatatccctgttacgcaaaagttttaaaaatattggtgttgaagaaaatgtgattcttacgatacccaaagtaggcttttacatcagtgaaaacataacaataagtaaacaatcttatgatgattctcatttacaagaagatgttgttgaaaaagtagagcgcaaaaggagtattcctctttttcgcattttgatttcgcttgtggtagtaattgttattattgaaatgtttgccgtggcttttaaagatacctacagtataacggattacccattggttaaatcaggtaagattgacacctgtgatttatatctttcagagaatcttaacgagattggcctcgctaaatctcaaatagaggccgctgaaatttcgaaaaagcatttaccctgtgtgccaggtgcaaattttatatatgatgtaaatagtatgcattatttgcttggggaagggcagcggtatttatcaagatgtataaaatcctctaatgacgaaacttatgcaatttgttcagaggtgctattatatgactaa

SEQ ID NO: 474475 - DNA, 237 bp, Shigella flexneri
atggttattgtctggtataattgtaaagataaacgtgttagtagtattatcggcaaaactattatattcttgaatatctatagatggctcactattgtaaaaccatattttctccatctgaagactatgttcatttaccctccagtgaccatgttgcaggaaatagatgatatgcatgccaaaatcgttatctatttgcgaatcattatccagcttatcaatttcaactatctttga

SEQ ID NO: 474476 - DNA, 489 bp, Shigella flexneri
ttgtgctggaaagttcagggcaacgtcacgggtcatgtgctgatttctctggcggccatatgcctggcattattcactaccgcatttattatcatttcgcaactcacgcgcggcgttaatacgttttacaatacattgttccccattattggctatgcggggtcaattatcaccatgatatggggttgggcactgttagcaggtaatgatgtgatggcagacgagtttgttgccggccatgttatttttggcgttggtatgattgccgcatgtgtatcgacggtggcagcgtcgtccggtcactttctgctcattcccaaaaatgcagcggggagcaagagcgacggaacaccggtacaggcttattcttcattaatcggtaattgcctcattgccgttcccgttttactcaccctgctcggtttcatttggtctattacgctgttacatagtgccgacataactccgcattatgtcgccttgggttaa

SEQ ID NO: 474477 - DNA, 294 bp, Shigella flexneri
atgttcgaccgcatggaggcagaactgcaccagaataataccccgtccgctgacaagatgattccgggtaacggtcgcactctggttgtgcacttcgacgaacacggcaatatcagattcaccgaaactgttcctgacggtgcactggtctgtaccctggatactttccagttttatctggaaaaacaggggtgggctcttgtaaaccggagcgcaattaaaaatatgaccgtagagcagctgctagactggccccctgaatctccagacaaccagtatcacttatttaagtga

SEQ ID NO: 474478 - DNA, 633 bp, Shigella flexneri
atgttgaatgtagctattgaaaaccagaacgggtggaattatagtgcatctgcacctcataaaacgggggccgggcgtggaaacccgaacgttactcgagcgcatagccgcgctgaagcggtttttttatgcgtaatgcacagctccattcaaattatggtgggatgtgcagggcagtcgcaagactggccgggttctcgagtgaccggtatttccacccctgtacgtctcaccacccttatggtcgtggaaaacctcggtggtgagttaattaacttatcactcgaggatgccatcatggctactatccctgccctttctcaccctgacgtaaccatcgaaaacggtcgcgctgtcactacgtctgttgcggttgcagagttcttccacaaacgacacgacaatgtgttacgtgccatcgcaaatactgaatgctcacctgaatttaacgccctcaattttgaggacgtcacctacaccgacaccaaaggcgaaaaacgcccaatgtaccaaatcaccaaaaacggcttcgttttcctggtgatgggcttcactgggaaaaaagccgctgcattcaaagaggcctacatcgctgatgttcgaccgcatggaggcagaactgcaccagaataa

SEQ ID NO: 474479 - DNA, 210 bp, Shigella flexneri
atgttaaaattattcaatgaagcaaaaactcaggctgaggttgatcgcgctgtgtctgaaataaactctaagttgtcaagcattcagcttgaatatttgtctctcattgatgagctgacaatctctaaaagcaatgaggctgcgctcaaagcaaaactcacggagatagaaaagtttaagttccaaagtgaagactgcgaacctcgctaa

SEQ ID NO: 474480 - DNA, 267 bp, Shigella flexneri; identical to SEQ ID NO: 462029

SEQ ID NO: 474481 - DNA, 987 bp, Shigella flexneri
atgaaggccagtgataaaccccgccagctggcggtcccctttgcgagtaccggagataaaaaccgtatcccggacaaggcgacacagcagaccagagagagcggtaatgctgcgtatgattcaggttttcctccggtgaccatgacagcggtctcagcgggaggtataccgccacacggcaaggattttaacggtctgatgtacgatattaccgcagcaatacggttcgcccaggctggcggtttgtacacgtataatgccggttttgcgggggccattggtggatatgcaaaaggagccattctcgccggagtcgcaacaacagcggtctggctgaataccacggacgataacctgaccgatcctgaaggctccgacagtgcgggctgggtaaatcttcttgaggatccgaaaaggatattcctgcggcagaagaacaatctgtcagaccttcagaataaagggacggcacgggataatcttcaggtttacagtaaagagcagtcagatcaacgctatgttcatcgggaaggcgataaaataaccggagagctgaaaatccgtggtgttaatgcgctgaggattttcaacgaagcttttggcctgatttttcgtcgttcggaagagtgcctgcaccttattcccaccagtgaaggtcagggggaaaatggcgatattggtcccctgcgcccgttcaccattaatttgcggacgggtgaaatatccatgtcgcataaagtgtctgttggcggtggttcgcaggtcaatggtgcgctgggtatcggcgttcagaacgccctgggggggaattcaattgttcttggtgataatgacaccggatttaaacagaatggagacggtattctggatgtttatgctaatagtcagcgtgtattccgctggatttgcccctatatttccagacatctgttatcacttaacccattacaagcccgctgccgcagatattcccgtggcgagcgataa

SEQ ID NO: 474482 - DNA, 606 bp, Shigella flexneri
gtgcagaatgtggctgccactgtgcttgcgcagtatgctgccagcccccgactcaatgccctcattaacagctttaacgcagcgctttcccccgacagttttatcagtgatttttatggtcttatctggaacatcgataccgcagaaaagtatggtcttgatgtctggggaaagattgtgggtgtcagtcgctggctgacggtaaaggacgattttaattacctgggcttcagcgagtccaggatggacaccccggtaatggatgatccctgtccgtttaatcaggcaccgttttacaacggaaaatcggatacccggactgttgacctgtctgatgctgtataccggcggctgatactgatgaaagccatgtcgaacattactgactgttccgttccggatattaacctgatgctgagatttatgttcggaaaaaaacgccgggcttatgttctgaataatggcgggctgaggatgagttacgtctttgagtccgcgctctcgttggcagaactggcgattatccagtcgtcgggtgcactgccatccccgccgggtgtttatgtttcagtagttttaaaggagtcccgtaatgaaggccagtga

SEQ ID NO: 474483 - DNA, 687 bp, Shigella flexneri
gtgccgggcagcgatgaggaaacccgtgcggactttgaaaaccgccgacgtaattcagttgcccgtaatgcccggaatattctggaagccatccggggtgaaatactctccacggtagaaaacgtggtggatgtttacgtcacccataatccgaaaaaaacagaacaaaaagccggagtcagtcagtatccattaacacccggttcgctttatgttggcgtgtacggcggcagcccggcagatatcgcggcggccatctggcgtaaggctccgccgggtattgatatgaatggcaacacaacgttcactgttgcagataaggagtacgatccgccgtatcctgaatacgtgatcagctggcagacactcaaacccgtcagtctgcatgtcagtgtgacgctgaaaaaaagtgactacctgccttcagatattacccgacaggtacagcaatccgtgctggacgcatttaatggtacagatggtggtctgcgggcaagagttgcctctgttgtctctgccgggcgctactatgccggcatttacaaaaccgatccggaacatattgatattctgggccttactgtgagccgtgatggttcgtcatggacaacggctgtcactttcgggatagatgagattccggttctggatgtgtcggatatcagtgtgaaactccaggaggcataa

SEQ ID NO: 474484 - DNA, 375 bp, Shigella flexneri
atggcgaccattaacgcacgtattgatgatgatataaagaaccaagcagatgaagtgctgaagctgatgaatatcagtcaaactcaggctattgcagctttttatcagtatattactgaacaaaagaaactgccatttgtgatcacctcaattgtaaaaacgccgcatgatttattacgtgaaagtacagacatgttagctgaagctcttgcagtgatttccaatctacaggtgtggactgaacagcaggatgggattggaaaagcaaagctaatggagtattaccgccgcctcgacgcactgtactgttgtgcaaaagagaaaataggtcttctttcagataaccgggatgctgaactaggctgtgtcccttaa

SEQ ID NO: 474485 - DNA, 396 bp, Shigella flexneri
atggaaagcagtgatccaaaaaaaagaaagaaagttgtggcatacctgcacccggcactttatccgcaggacaacctgacacaacaaacaatagactctctcccagtacaaatgcggggagatttctacagacaatcccttatttgcggagcagctctttattctgttgccccccgactgttaacgctaatcagcgtttttttcagtgagaaaatcactgcagaaaatctggtgaaacttatagaacaaacaacaggatacacatccacatcaattgatataagtgtgttaaaaaacatcatagaggcatcttcagaaaacaaatcagagagcatcacttcaaaagatgatttcgaagaacaaaccagacgcaatctttctatgttaaaaaaataa

SEQ ID NO: 474486 - DNA, 960 bp, Shigella flexneri
atgctaaaagtatcatgcgatgatggttcaactaacgtaaaactggcctggcttgaagatggcgaggtaagaaccagtctgtcaggaaacagctttaaagaaggctggaacccgggactgtttaatgccggcaaagtttacaattacgtcgtggatgaaaaaaaatacacctatgatttgggaagcactgctgtcataggtacaacacatgtcagttatcaatacagcaccaccaatctgcttgccatacatcatgcactgctgacatccggccttcagccacaggatgtagaactgacagtaacattacctgtgaccgaattctttgataatgacaatcaaccaaatgaagaaagaatagaaagaaaaaaggcaaatgttctccgtgagatatctctgaataaaggggaaacatttaaaattaaaaaagttaatgtaatgcctgaatctttgccagctgcatttgaatcactaaaaaaagataaagtaaacaaacttgaacgcagcctgattatcgatcttggaggaaccactctggattgtggtttaattctcggtgcatttgaaggcatttctgaaatccgtggctattcagaaatcggaacatcccgcatcactcataccgtcatgaatgcgctgacgaaagcctccacaccatgtaattattttattgctgatgagttaataaaaaacagacacgataatgaatatctccagacattaataaatgatgtagctgaaataaaaaacatttctcatgtaatagacagagaagtgaaatctctggcagaaagcatcaggcaggaaatttcaacattctcaggaatgaaccgaatctatctcactggcggaggagccgagcttatttaccctcacataaagcaatatttcccgaatctgaaagtgaacaaggtggatgaacctcagtttgcattggtgaaagcaatggtgcatgcgtaa

SEQ ID NO: 474487 - DNA, 336 bp, Shigella flexneri; identical to SEQ ID NO: 461644

SEQ ID NO: 474488 - DNA, 249 bp, Shigella flexneri
atgcgttttgaaatctgcatagccaaagagaaaatgactaaaatgccaaccggtgctgtggatgcgttaaaggaagaattaacccgacgcatcagtaaacgttatgacgatgtagaggtgatcgtaaaagccaccagcaacgatggcctttctgttacgcgcaccgccgataaagattcagctaaaacttttgttcaggaaactctgaaagatacctgggagtctgctgacgagtggtttgttcactaa

SEQ ID NO: 474489 - DNA, 186 bp, Shigella flexneri
atgatggcaacgccagtgaagaagtggttattgcgcgttgccccctggtttttaccggtgggcatcgtggcggtgtggcaactggcctcctcggttggctggctgtcgacgcgtattttgccttcaccggaaggagtggtgacggcgttctggacgctctccgccagcggcgaactgtggcagtag

SEQ ID NO: 474490 - DNA, 1146 bp, Shigella flexneri
atgagtctgaatatgttctggtttttaccgacccacggtgacgggcactatctgggaacggaagaaggttcacgcccggttgatcacggttatctgcaacaaattgcgcaagcggcggatcgtctgggctataccggtgtgctgatcccaacggggcgatcgtgtgaagatgcgtggctggttgcagcgtcgatgatcccggtgacgcagcggctgaagtttcttgtcgccctgcgtcccagcgtaacctcacctactgttgccgcccgccaggccgccacgcttgaccgtctctcaaatggtcgtgcgttgtttaatctggtcacaggcagcgatccacaagagctggcaggcgacggcgtgttccttgatcatagcgagcgctacgaagcctcggcggaatttacccaggtctggcggcgcttattgctgggggaaaccgtcaatttcaacggtaaacatattcatgtgcgcggagcaaaactgctcttcccgccgattcaacagccttatcctccgctttactttggcggatcgtcagatgtcgcccaggagctggcggcagaacaagttgatctctacctcacctggggcgaaccgccggaacttgttaaagagaaaatcgaacaagtgcgggcgaaagctgccgcgtatgggcgcaaaattcgtttcggtattcgtctgcatgtgattgttcgtgaaactaacgacgaagcgtggcaggccgccgagcggttaatctcgcatcttgatgatgagactatcgccaaagcacaagccgcattcgcccggacggattccgtaggacaacagcgaatggcggcgctacataacggcaagcgcgacaatctggagatcagccccaatttatgggcgggcgttggcttagtgcgcggcggtgccggaacggcgctggtgggcgatggtcctacggtcgccgcgcgaatcaacgaatacgccgcgcttggcatcgacagctttgtgctttcgggctacccgcatctggaagaagcgtatcgggttggcgagttgctgttcccacatctggatgtcgccattccggaaattccccagccgcagccgctgaatccgcaaggcgaagcggtggcaaatgattttatcccccgtaaagtcgcgcaaagctaa

SEQ ID NO: 474491 - DNA, 960 bp, Shigella flexneri
atgcgtaacatcattaaactggcgctggcgggattgcttagcgtctctacttttgcggttgctgcagaatcctcgcctgaagcgttacgtataggctatcagaaaggcagtattggtatggtgctggcaaaaagccaccagttactggaaaaacgctatccgcaatcaaaaatctcctgggtggagttccccgcgggtccgcaaatgttggaagcgttaaacgttggcagtattgatctcggcagtaccggggatattccgccaatctttgcccaggctgccggggctgatttggtatatgtgggcgtcgagccaccgaagcccaaagccgaagtgattctggtggcagaaaacagcccgatcaaaaccgtagccgatcttaaaggtcacaaagttgcctttcagaaaggttccagttcacacaaccttttactgcgtgcactgcgtcaggccggacttaaattcaccgatatccagcccacttacctgacgcctgccgatgcccgcgccgcgttccagcaaggtaacgttgacgcctgggctatctgggatccctactactccgctgcgttattacagggcggcgtgcgggtgctgaaagacggcaccgatctcaatcaaactggatcgttttatctggcagctcgtccctatgcagaaaaaaacggcgcttttattcagggcgtactggcaacctttagtgaggccgatgcgttaacccgcagccagcgcgaacaaagcatcgctttactggcaaaaacgatgggcttaccggcaccggtgattgcctcttacttagatcatcgccctcctaccaccatcaaaccggttaacgccgaggttgccgccttacagcagcaaacggcagatctgttttatgaaaaccgtctggtgccgaaaaaagtcgatattcgccagcgcatctggcagcccactcaactggaaggaaaacaattatga

SEQ ID NO: 474492 - DNA, 267 bp, Shigella flexneri; identical to SEQ ID NO: 462029

SEQ ID NO: 474493 - DNA, 1038 bp, Shigella flexneri
atggggcaacaaaagcagcgtaatcgacgttgggttctggcctcgcgtccacatggcgcaccggttccggagaatttccgtcttgaagaagatgatgtcgccacaccgggtgaaggacaggtgttactgcgcacagtttatttgtccctggacccgtatatgcgtggacgtatgagcgatgagccatcttattcaccgccggttgatattggcggcgtgatggtcggcggtacggtgagccgtgtcgtggagtcgaatcatcctgattatcagcctggcgactgggtgctgggctacagtggatggcaggactatgacatatccagtggtgatgacctggtgaaacttggcgatcatccgcaaaatccatcgtggtcgctgggtgtgctggggatgccaggctttaccgcttatatggggctgctggatatcggtcagcctaaagagggcgaaacgttggtggtagctgcggcgacagaaccagtgggggcgacggtggggcaaatcggcaaacttaaaggttgcagagtggtgggggtagccggtggcgcggaaaaatgccgccatgctaccgaggtgttaggcttcgatgtttgccttgatcaccacgcggacgattttgccgaacaactggcgaaagcgtgcccaaaaggtattgatatctattatgaaaacgtgggcggtaaggtatttgatgcagtgctaccattacttaatacatctgcgcgcattcccgtttgtggcttagtgagcagctataacgctacagagctaccacccggtccggatcgtttacccctgttgatggcaacggtgctgaaaaaacgtattcgcttgcaagggtttattatcgctcaggattatggtcaccgcatccatgagtttcagaaggagatggggcaatgggtgaaagaggataaaatccactaccgcgaagatattactgatggtttagagaatgcgccacagacgtttatcggcctgctgaagggtaaaaacttcggcaaagtggtgatccgcgtcgcgggtgatgattaa

SEQ ID NO: 474494 - DNA, 666 bp, Shigella flexneri
atgcctggaacgggaaaaatgaaacatgtcagtttgactctgcaggttgagaacgacctgaaacatcagcttagtattggcgcattaaaacctggcgcacgcctgattactaaaaatctggcggagcaattaggtatgagtattacacctgtgcgtgaagcattattacgtctggtttcggtgaatgcgctttctgtcgcacctgcacaagcatttacagtaccggaagtgaggcaaagtcagttagacgaaatcaatcggatccgctacgaactggaattaatggcagttgccctggctgttgaaaacctctcctcgcaagacatagcagaacttcaggaattgctcgggaaattacagcaggcgcaagaaaagggcgacatggaacaaatcattaatgtgaacaggctatttcgcttagcgatttatcatcgctcaaatatgctcatcctgtgtgagatgattgagcaactgtggatcaggatgggacctgctttacattatctttatgaagcgattaacccagcggaattacgggagcgcatagaaaactatcatctattactcgctgcgttaaaagcaaaagacaaagagggatgcaaacattgtcttgctgaaattatgcaacaaaatattgctattttataccagcaatacaatcgttaa

SEQ ID NO: 474495 - DNA, 273 bp, Shigella flexneri
atgagcgcttacccgatttttgatcgtattgaagaaatggcatgggctcgccactaccagcagatcgttcgtgaagaaaaagaaacggaactggcggacgacctggaaaaaggtctgcctcagcacctgtttgaatcgctctgcatcgaccatttgcaacgccacggtgccaataaacaggcaatcagccacgcatttgatgatgatgttgagtttcaggagcgcatggcagaacacatccggtacatggctgaaaccattgcccaccactag

SEQ ID NO: 474496 - DNA, 1098 bp, Shigella flexneri
atggcgctttttcaacgagcaataaacacacaggcctatctaaaagcaggaattatggggtttgctggcgacggcaaaacctacacagcaagcgaactggctattggtctggtaatgcttatgcggcaacggggaattgaagctggtaaccgcccggtaatgtttctggacacagaaacaggctctgactgggttaaaccccgctttgatgcggaaaatatcgaattatttacggcaaaaacccgctcgtttgttgatctgcttgaagccattaatgaagcggaaagcagcggttccgtaatgatcatcgactccatcagtcacttctggaccggattatgcgacgagtatgccagacgccgaaaccgtaaacgaggactggaattttcaggctgggcgtggctcaaacaggagtggcgacgctttaccgatcgatttgttaacagtcaggcgcacattattatgtgcgggcgtgcaggatatgagtatgactttttcgaaggtgatgatggcaaacgccagttggcaaaaaccggtataaaaatgaaagcagaaacagaaaccggttatgaaccctccatcctgatccagatggagaagcaaatgaacatagaaaccggtcaggtgtggcgcaccgccagaatactaaaagatcgctccacccgtattgatggactggtattttcaaacccaacatttaaaaactttcttcctcatatcgagtttcttaacctgggaggtgaacaccccggcatcgatacctcacgggataacagtgaattatttgccaacgacggtacaccgacatggctaaaagaaaagcgtgcaaaagaaatcgcacttgatgaaattatcgagttgctcaacaagcaccatgggggcaccagtaacgacgccaaacgcgcaaaagctgatttgctggaaaaaacattcacctcccgctcatgggaaagaatcaaaggtatggactggccgacaatcaaagctggtcgtaatgcactatggattgaactggaaggcgttgaatatgcattcccggatccacaaacacaaaacgaaacgcaacaagcaggatacgatgagaatattccggtgtaa

SEQ ID NO: 474497 - DNA, 186 bp, Shigella flexneri
atgtacggaacatgcgaaacgctatgccgggcgctggcagcaaagtattcgggagacacgccgctgatgctggttatctggtccccggaagagattcaggccctcgctgacggaatggatatttccctgtccgatcatgaaatcaggaccgtcctggcgcacctggaggacatcccggaagactag

SEQ ID NO: 474498 - DNA, 216 bp, Shigella flexneri
atggagattatcagcaacgtgcgcgaaaaccgccaggtgaccgtccctgctgaactgctggagaccctgactcagatcgctgaacaggcactgtggaaacgtgaatgggctgcccgggatcacggtttccccctcccggaatacgttacccgccgacaggcgatggttgatcaggcccgcagcctgctgaaaaacaacacacacgaaaacgactga

SEQ ID NO: 474499 - DNA, 771 bp, Shigella flexneri
atgaatgaaacgctgaatgctctgatttgtcgtcacgcccgtaacctgctgctggcgcagggctggccggaagagacggatgttgaccaatgtaacccgaactatccgggctggatcagcatttacgtgcggctggatgcgccccggctggcgacgttactcgttaaccgccacgatggcgtgctgccgccgcacctggcctccgccattcagaaactgaccggaaccggagcggaacttgttctgtccggcagtcagtggcagtcgctgccggtacttccggcggacggaacgcaggtgtctttcccgtatgccggtgaatggctgaccgaagacgaaatcagggcagttcttgatgcggtgcgcgatgcagtatgcagtgtcagttgccggggggcagaagatgcgcggcgtatccgggcggcgctgaccacaagcggtcagacgttgctgacccgccagacgcgccgctttcgcctggtcgtgaaggaaagcgatcacccctgctggctcgatgaagacgatgaaaacctgcccgtggtgctcgatgccatcctgaaccggggcgcacgtttttcggcggtggaaatgtatctggtcagcgattgtattgagcatatcctgtccagtgggctggcctgcgatgtgctgcgtataccggatgaaccgccccgccggtggtttgaccgtggtgttctgcgggaagttgtccgggaagcccgggccgaaatccgcagcatggcggatgccctggcaaaaatccggaaatga

SEQ ID NO: 474500 - DNA, 570 bp, Shigella flexneri
gtgaaaacaaccaaccagatccacggtttcctgctggaatttggaatcagcctgccgacaggggatgccgtaataaaacggttgtctctcgtattggctgaacacgaaatccccgaatatctgagccgccttttggtgaggttgcatacccactacctttaccttgttgagcaaatagcagagctggaatcagaattaagtcagtcaatcaacgctgatgataccgctcagcgcattatgacaattcctggtgttgggccgattactgccagcttactatcgtcgcaacttggtgacgggaaacagttttcatgcagcagagattttgcggcttccacagggctcgttccccggcagtatagcactggaggaaaatcgactctgttgggtatcagtaagcgaggtgataaaaatttacgccggttactggttcagtgtgcccgctcattcatgatgcagcttgaacgccagcatggaaaacttgctgagtgggttcgggagcaactcaacaagaagcattcgaatgtggttgcctgcgctctggcaaataaactggcccgaattgcctag

SEQ ID NO: 474501 - DNA, 231 bp, Shigella flexneri
atgcagctcatgttatttaatttgttttccccagcacttaagcttaatactggcctggcaattctttcgcctggtgcatttgaagttcactctgacggaatagatgcggataacgaattgtttcactatactattaaaaaagcatataccccatataatatacacacttacaagacagaggaagttgtaaaccagaggaatataaaagttaaaaacatgaccttagggtaa

SEQ ID NO: 474502 - DNA, 954 bp, Shigella flexneri
atgaaaacaatcactttaaacgacaaccatattgcacatttaaacgccaaaaacactacaaaactggaatatttaaacttaagcaataacaatttactgccaaccaatgacattgatcaactaatatcatcaaaacatctttggcatgtattagttaacggcatcaacaatgatccacttgcacaaatgcagtactggactgcagtaagaaatataattgatgacactaatgaagtgaccattgatttatcaggacttaatttaaccactcaaccaccagggctgcaaaacttcacctctatcaatcttgataataaccaactcacacattttgatgcaaccaactacgatagactcgtaaagctaagtctgaatagtaatgctcttgagtcaataaattttcctcaaggcagaaatgtaagtattacacatatatctatgaataataatgctctcagaaatattgatatagataggctttcatcagttacttattttagtgcggcacataatcaactagagtttgtgcaattagaatcttgcgaatggctgcaatacctgaatctcagccataatcaattaactgatattgttgcaggtaataaaaatgaactcttactgctggatctatcccataataaactaacaagtttacacaatgtcttatttcccaacttgaatacgttacttattaacaacaatttgctttctgaaattaaaatattctatagcaacttccgcaatgttcagacattaaacgctgctaacaaccagttgaaatatataaatcttgatttcctgacttatcttccatctatcaaaagtttaagactggacaataataaaataacccacattgatactaataatacatccgatattggaactttattccccataataaaacagagcaaaaacttaaattttttaaatgtttctgggaagaacaattga

SEQ ID NO: 474503 - DNA, 324 bp, Shigella flexneri
gtggagcgaattaaagaagcttacaattcgaacatggcatctcttgatttgtcatatcttgatttgagtgaattaccgcctatcccctcgacagttaatacgttaaatctggaaaacaattgtctaacttgtcttgacttagctgacaatgccagtctcgttaatatcaacctcagcgttaataaaattaacacgataacctttccaaaagaaccaaaactggaaaacatttatattgatcataacaatctggaaagtttagatttaaaaaatcagcattcattggttaatctggaagcgcaaaataatagcctaaaaaaatga

SEQ ID NO: 474504 - DNA, 246 bp, Shigella flexneri
atggcaaaaaatgatgcagtaatacacgtacataccccgtttgtgctcacgcttcccgacggttctcggcgcgagtttgttaaaggccgtcatgttgtggaggaagacgttgccacgcactggttcactcgtgcgcacgcggaagtatccgttggcaaagccacagacgcgcgtaacgaggtaaaaaatgccaaagaattgaggtgtactggcaatagcggacactaccatttgttctttttttaa

SEQ ID NO: 474505 - DNA, 942 bp, Shigella flexneri
atgattacttttgatcaggcaaccgttgacagctctggtgcctttctcatcggggagctggagagactcgaccagacgctgaacctgccactggtggggtacacctggagccgcgatattcaactgcgtgaagacgcctccatcgcagatgacatttccagctggacgaataccagcttcgccgctgcgggtactggcgcaaatccgaatggaaaaaactgggtaggcaaagactcaaccgctattgctggcgtgaacgtggatatcggcaaatccggtaacccgctgaacctgtgggggatggaacttggctggacggtcatagaattgcaggctgctcagcaggtcggccgcccgattgatacgcagaagtatgacggtatgcaactgaaatggcagatggataacgatgaacaggtatatgttggcgattccgcattaaacctgaaaggccttgttaccctggacggcgtgcctgtcaacaacgctgccaaaacgtgggcaacctcaacaccggacgaaatccgcgcaagcattaaccaggtgctgtctgatgcgtgggccgcttctggttactctgtggttccgcgtgatttgctgatcccgcctgagcagtttgctctgttgtccagcatcatcgtttcatctgcaggtaaccagtccctgttgacgaaccttcagaccaacaccatcagctatcaccagaacggtgttccgctgaatatccgcgcggttaaatggctgaaaggccgtggtgtggggaataaggatcgcatggttgcgtacaccaacgataaaaaatacgtccgctacccgctggttccgcttcagagcgtgccggtgcagtatcgcggtctgtatcagatcgtcacttactacggcaagctgggtgcagtcgagccagtgtacaaagaaaccatttcgtacgttgatggcatttaa

SEQ ID NO: 474506 - DNA, 357 bp, Shigella flexneri
atgaataatgtatttctgtaccggatgcctgttggcattgccggggctgtctctcgcccgcaggacttaaccgtcgaaccggtggtccttaaatccgataacgccttcgctgcctatggcctggctggtaaatacgatgatgacggttttttcgtgccgctggcagatggtgataccgcagacaaggtgaaggggatctacgtgcgcccttatccgaccacgtcgcagccggacatggttcgccaggtgggaacaggcaagaacttcccgggcgacgccatgaagcgtggctacgtgaccgttaatctcggttctgattttgatgccagcactatcaaaaaaggcgatctccactga

SEQ ID NO: 474507 - DNA, 258 bp, Shigella flexneri
atgaaaccgaccgcgttcaaacgcgaggttctggcttctgctgacaaaacgctggttcgccagatagtcggtgatgcggatatccgcaaattaccgaaacaatcggtcgacatggcgtttaatgccgtgtctgaggttgccaaagggcgaaacacccgcgccaccaccggcgatgcacagcgcctaaacatgggcatgaccagtatcgcttccctgaacaaacaaaacgctgaattccgggcaaaccgtaaagggtaa

SEQ ID NO: 474508 - DNA, 267 bp, Shigella flexneri
atgcttacacaaactatattcccttgtcttccacaaaaacaagaaaatatcatccttgaagtatcaaatcctgtattattatcttctactgttactacagatggatatactgttttcaataaaaaagcagctatatacgaattacaaatacctgctgccagccggacgaaaacgttgaaattcactgctacagaaatgcaatggttgacaaagataaatgaagccggaattgatgaaaaacaaagccaacggtattctgatttctga

SEQ ID NO: 474509 - DNA, 276 bp, Shigella flexneri; identical to SEQ ID NO: 469168

SEQ ID NO: 474510 - DNA, 873 bp, Shigella flexneri
atggctgacgttgccgacaggcgggaacttcgccagttcaggcagacaccggaacagcgcttcacgcaggaacaggagcatctgcagccgctgctgggtacggacttcgatatccgtcatgtctcctgggatggctatatcgaggttggcgggaaccgttacagtgtgccggaaagcctgtgtggtcagctggtatcaatacggatctcgctggatgatgaactgcggatctacagtaatgagcaacaggtagcatcgcaccgtctctgttcggctgcatacggctggcagaccgtgccggagcatcacgctccactctggcagcaggcttcggagcgcatggccgaatggctgggggagatacagaaacgggtaatcactgtctgtgaccgggaagcggatatctggcattacctgtattataaagtcagccacggacagcgtggtgcgtgctgcacagaatcgccggctggaagaggcacccggcaagctcttcgaactgccggaagtcctggcaaccgcaggaagccacacgctgaatgtgatgcaaaaaggcggggggcagcccgtcaggcccggatgttcatcagttacagcgaagtcagcataaaaaatcccgacaacagcggccaggcgctcccgctcacgtatgtctgttgccgggagcaggcagaggacgatgcctgctggcatctgctgacgtcaggaaaagcggcgagtgccgccgatgcacgacgtattgtcagccattacgagcgacgctggctgacagaggaataccacaaggcgtggaaaagtggtggtacatggaatcgctgcgaatgcagacccgggataaccttgagcgcatggtggttatccaggcgtttatag

SEQ ID NO: 474511 - DNA, 294 bp, Shigella flexneri
atgcagacccgggataaccttgagcgcatggtggttatccaggcgtttatagcggtacgggtgctgggcctgcggcagggaggtgtcagtgaagaaacacaaaatgacagctgtgagaaaatactgacgccgacagagtggaaactactgtgggttaagctggaaggaaagccgcttccggtgcaggcaccgaccctgaaatgggcctggggcgatggcatgacagcaaacgcacaggtcgtcccggttggggcgtcatgtgggatggctggtcagacttcaggatatggttga

SEQ ID NO: 474512 - DNA, 195 bp, Shigella flexneri; identical to SEQ ID NO: 464447

SEQ ID NO: 474513 - DNA, 156 bp, Shigella flexneri
atggcacaggttaatatgagtgtaagaatcgacgcagaactgaaggatgcttttatggccgctgcaaaaagcatggaccgtaatggctctcagttaatccgggattttatgcgccagaccgttgaacggcagcacaattcttggttccgtgactag

SEQ ID NO: 474514 - DNA, 150 bp, Shigella flexneri; identical to SEQ ID NO: 461565

SEQ ID NO: 474515 - DNA, 591 bp, Shigella flexneri
atgaaaataacatctaccattattcaaacaccttttccatttgagaataataattctcatgctggcatagtaacggagcccattctcggtaagttaataggtcaggggtcgacagcagaaatctttgaagatgtgaatgattcatctgctttgtataaaaagtatgatcttattggcaaccagtacaatgagattctggaaatggcttggcaagaatctgagctttttaatgctttttatggcgatgaagcatccgttgttatacagtatggcggagatgtgtacctccgaatgctgcgcgtgcctgggactccccttagtgacattgatacagctgatatccctgataatatagagagcctttatctacagttgatatgtaaattgaatgagttgagtataatccattacgatcttaatacaggtaatatgctgtatgataaagaaagtgaaagtttattcccaatagattttcgcaatatttatgctgaatattacgctgcaaccaaaaaagataaagagattatcgaccgacgattacaaatgcgtacaaatgatttttattcgttattaaacaggaaatatttatag

SEQ ID NO: 474516 - DNA, 300 bp, Shigella flexneri
atggggcgcttacgccatttcgtgttattgaacgcgcaaaaactttgtgatacccagcacatgatgcagcaaatactgctgagccttgttcatgcgctgtacgaaggtaatccgcagccggtttttgccaatacggaaaaattgaacgatgctgtggaagagctgcgtcagttgctcgataaccaccatgacctgaaagtcgtggaaacaccaatctatggttatgtgtggctgaacatggaaacggcacatcagcttgagttgctatcgaatctgatttgccgggccttgcgcaaataa

SEQ ID NO: 474517 - DNA, 330 bp, Shigella flexneri; identical to SEQ ID NO: 3689

SEQ ID NO: 474518 - DNA, 483 bp, Shigella flexneri
atgcggtatccaacccgcgaatatcagcatgattcaccgtcggatttactgctacgtcgccctcagggaattaaacctaaaaagaaaatcgtcaaaattagagattccggtttgacacggaaagtcatatcagcgtcaacggagcaccgtattgacgcttatttattggtgagaactacgttccatggcaggagttcgtcaacacggttggagggccattcaggcagtatgctcagaatatggcgcagatacgcttccggatcgataccgttcagacggcaggtgcctgcttttccggcaacaagcaggaatctcagcgctgaagcaggaattagaggtaaaaacgccctaccgggccatgaatcacccggtcattggagtagtaaccaaagcagatttagccagcatggaacaaatatctttggtgaaaagttggttacgggaagctggagcgcacaacgtgttagtaaccagtgcagttaa

SEQ ID NO: 474519 - DNA, 435 bp, Shigella flexneri
atgtggcgttcatcattgatgtgtttgccggatacatcgtggggtgccatggaaacgacattcgtgctggatgcactggagcaggcgttatgggcccgtcgaccgtccggcacggtccatcacagtgataaaggttctcagtatgtatcgctggcctacacacagcggcttaaggaagccggattactggcatcaacaggaagtacaggcgactcgtatgacaacgcgatggcggagagcatcaatggtctttacaaagcggaggtaatacaccgtaagagctggaaaaaccgtgcagaagtggaactggccacactcacgtgggtggactggtataacaatcgacgattgctggaaaggctgggccacatccctccggcagaagcagaaaaagcttattatgcttccatcggaaacgatgatctggcagcctga

SEQ ID NO: 474520 - DNA, 432 bp, Shigella flexneri
atgaggggatctctcagcgcagagtatggtcttaccgccgataaaggctacaccgttgccgatccgaatctcgacgaactgtatcaagtgtacagccagcctggccatgcttattgggtggttgaatacaatggcgaagtggtcggcggcggcgggattgcgccattaacaggtagtgaagcggacatttgcgaactgcagaaaatgtactttcttcccgctattcgcggtaaagggctagcgaaaaaactggccttaatggcgatggagcaggcacgagagatgggcttcaaacgctgctatctggaaacgaccgcttttttaaaggaagccattgcgctttatgagcatttgggctttgagcatatcgactatgcgcttggctgcacgggccatgtcgattgtgaagtgcggatgctacgcgaactctaa

SEQ ID NO: 474521 - DNA, 417 bp, Shigella flexneri; identical to SEQ ID NO: 261989

SEQ ID NO: 474522 - DNA, 1014 bp, Shigella flexneri
atgtccgggttttatcataagcatttcctgaaattactcgatttcacgccagctgaactcaacagcctgctgcagttagccgcgaagctgaaagctgataagaaaagcggtaaagaagaagccaaactcactggtaaaaacatcgcgctcatcttcgaaaaagactcgactcgtacccgatgctctttcgaagttgccgcatatgaccagggggctcgcgttacttatcttggcccaagcggtagtcagattggtcataaagagtcgattaaagacactgcccgcgtgcttggtcgcatgtatgacggtattcagtatcgcggctatggtcaggagattgtcgaaacactggcggaatacgctggcgtgccggtatggaacggcctgaccaatgagtttcaccccacgcagttgctggcggatctcctcaccatgcaggagcatttacccggtaaagcattcaacgaaatgacgctggtctatgcaggtgacgcacgtaacaacatgggcaattcgatgctcgaagctgcggcgcttaccggtctggatttgcgtctggtcgcgccacaggcatgctggccagaagctgcgctggttacggaatgccgcgccctggcacaacaaaatggcgggaatattacgctgacggaagatgtagctaaaggagttgaaggtgctgactttatctataccgatgtatgggtgtcgatgggtgaagcaaaagaaaaatgggctgaacgcattgcattactgcgtgattatcaggtgaacagcaagatgatgcagttgaccggtaacccggaggtcaaattcctccattgcctgcccgcgtttcatgacgaccaaacgacgcttggcaaaaaaatggcggaagagtttggcctacatggcggaatggaagtgactgatgaggtcttcgaatctgccgccagcattgtatttgatcaggcggaaaaccgcatgcataccatcaaagcggtgatggtcgcgacgctcagtaaattaaataattaa

SEQ ID NO: 474523 - DNA, 921 bp, Shigella flexneri
atggaattaaaggattattacgccatcatgggcgtgaaaccgacggacgatctcaagacaatcaagaccgcctatcgtcgactggcccgtaaataccatcctgatgtcagcaaagaaccggatgccgaagcccgcttcaaagaggtcgctgaagcctgggaagtgttaagtgatgaacaacgtcgcgctgagtatgatcagatgtggcaacatcgcaacgatccgcaatttaaccgtcagttccatcatggcgacggtcagagttttaatgccgaagattttgacgatatcttctcgtcaattttcggtcagcatgcccgccagagccgtcaacgccccgccgcacgcggccacgatattgaaatcgaagtggcggtattcctcgaagaaacgcttactgagcataagcgtaccatcagctataacctgccggtttataacgcctttggcatgatcgaacaggaaatcccgaaaacgctgaatgtgaagatcccggcaggcgtcggcaatggtcaacgcatccgcctgaaaggccaggggacgccgggcgaaaacggcggtccaaatggcgatttgtggctggtgattcatattgcgccacatccgctgttcgatattgtcggccaggatctggaaattgtggtgccggttagcccgtgggaagcggcgctgggtactaaagtcaccgttccaacactgaaagaaagcattttgctgactatcccgccaggcagccaggccgggcaacgattgcgcgttaaaggcaaaggtctggtgagcaaaaaacagaccggcgatctgtatgcggtactgaaaatcgtgatgccgccgaaaccggatgaaaacactgccgcgctgtggcagcaactggcagacgcccagtcgtcttttgatccacgtaaagattgggggaaagcataa

SEQ ID NO: 474524 - DNA, 306 bp, Shigella flexneri
atggctaatgttacggtgacttttactattaccgaattttgcctgcataccggcatctctgaagaggagttgaatgaaattgtcggtttgggggtggttgaaccgcgtgagatccaggaaacaacctgggtatttgacgaccatgccgccattgtggtgcaacgcgcggtacgcctgcgtcatgaactggctctggactggccggggatcgcggtggcgctgacgttaatggatgatattgcgcacctgaagcaggaaaaccgcctgctacgccagcggctttcccggtttgtagctcatccgtga

SEQ ID NO: 474525 - DNA, 432 bp, Shigella flexneri
ttggcagcattacctgccacgctgacagtacgtgacgatgcccgtctggaactggccgctgacttttgcggcctgtttctgatgaccgacaaacaagcggcgctgccgtatgcatcggcctacaaacaggacgagcaagagattaaacgcttgttagttgaggcagggatggaaaccagtggcaatttcaacgaaccggcagatcatctggcgatctatctcgagttgttgagttatctgcatttttcgctgggagaggggaccgttcctgcgcgaagaatcgacagtttgcggcaaaaaacactgacggcgctgcggcaatggttaccagagtttgctgcgcgttgtcgacagtatgacagctttggtttttacgcggcactaagccagttattgctggtgttagtggagtgcgaccaccaaaacagataa

SEQ ID NO: 474526 - DNA, 450 bp, Shigella flexneri
atgaaacagcctgcgcccgtttatcagagaattgcgggtcatcaatggcgacatatctggctttctggcgatatacacggttgtcttgagcagttgcgccgcaaattatggcattgtcgttttgatccgtggcgagatttacttatctcagtgggagacgttatcgatcgtgggccgcaaagtttacgttgtctgcagttactggaacaacattgggttcgtgcggtaagaggcaatcatgaacagatggcgatggatgcgctggcattccagcagatgtctttgtggttgatgaatggcggcgactggtttattgcgctggcagataatcaacagaaacaagcgaaaacggcgctggaaaaatgtcagcatttgccctttattcttgaagtacacagtcgcaccggcaagcatgttattgctcatgccgattatccagatgatgtttga

SEQ ID NO: 474527 - DNA, 1650 bp, Shigella flexneri
atgctcaatcagaaaattcaaaaccctaatccagacgaactgatgatcgaggtcgatctctgctatgaactggacccgtatgaattaaaactggatgagatgatcgaggcagaaccggaacccgagatgattgaagggctgcccgcctctgatgcgctgacgcctgccgatcgctatctcgaactgttcgagcatgttcagtcggcgaaaattttccccgacagtaaaacctttcccgactgcgcacccaaaatggacccgctggatattttaatccgctaccgtaaagtgcgccgtcatcgtgattttgacttgcgcaagtttgttgaaaatcacttctggctgccggaggtctactccagcgagtatgtatcggacccgcaaaattccctgaaagagcatatcgaccagctgtggccggtgctaacccgcgaaccacaggatcacattccgtggtcttctctgctggcgctaccgcagtcatatattgtcccgggcggccgttttagcgaaacctactattgggattcctatttcaccatgctgggactggcggaaagtggtcgggaagatttgctgaaatgcatggccgataacttcgcctggatgatcgaaaactacggtcacatccccaacggcaaccgcacctattatttgagccgctcgcaaccaccggtttttgcgctgatggtggagttgtttgaagaagatggtgtacgcggtgcgcgccgctatctcgaccaccttaaaatggaatatgccttctggatggacggtgcagaatcgttgatccctaatcaggcctatcgccatgttgtgcggatgccggacggatcgctgctcaaccgttactgggacgatcgcgacacgccgcgtgacgaatcctggcttgaggacgttgaaaccgcgaaacattctggtcgcccgcccaacgaggtgtaccgcgatttacgcgcgggagcggcctccggttgggattactcttcccgttggctgcgtgatactggtcgtctggcgagcattcgtaccacccagttcatccccatcgatctgaatgccttcctgtttaaactggagagcgccatcgccaacatctcggcgctgaaaggcgagaaagagacagaagcgctgttccgccagaaggccagtgcccgtcgcgatgcggtaaaccgttacctctgggatgatgaaaacggcatctaccgcgattacgactggcgacgcgaacaactggcgctgttttccgctgccgccattgtgccgctctatgtcggcatggcgaaccatgaacaggccgatcgtctggcaaacgccgtacgcagccggttactgacacctggcgggattttggcaagcgagtacgaaaccggtgaacagtgggataaacccaacggctgggcaccgttacaatggatggcaattcagggatttaaaatgtatggcgatgaccttctgggtgatgaaatcgcgcgcagctggctgaaaacggtgaatcagttctatctggaacagcacaaaatgatcgagaaataccatattgccgatggtgttccccgcgaaggcggcggtggcgagtatccgttgcaggatgggtttggctggactaacggtgtggtacgccgtttaattggtttgtacggcgaaccataa

SEQ ID NO: 474528 - DNA, 366 bp, Shigella flexneri; identical to SEQ ID NO: 462994

SEQ ID NO: 474529 - DNA, 849 bp, Shigella flexneri
atgttgaatgtagctattgaaaaccagaacgggtggaattatagtgcacctgcacctcataaaacgggtgccgggattgctaccccgacgatgactactgcgcataaccgcgctcaggcggtttttttatgcgtcaagcacagccacattcagattatggtggggcgtgcagggcagccgcaaggctggccggtttcggtagtcaccggttgtagcaaccctgtgcgtctcaccacccatgagattgctacctctggtggtgagtcatttaaactgactatcgaggctgccatcatggctactatccttaccctttctcaccctgacgcaaccatcgaaaatggtcgcgctgtcactacgtctgttgcggttgcggagttcttccggaaaatgcacaaaaacgttattcagaagatcgaaactctcgaatgctcgccggagtttaaccggcttaattttaagcccgtcacctataccgacgccaaaggcgaaaaacgcccaatgtaccaaatcaccaaaaacggcttcgttttcctggtgatgggcttcactggcaaaaaagccgccgcattcaaggaagcctacattgctgagttcgaccgcatggaggccgaactgcgccagaataacaccccacctgctgacaagatgattccgggtgatggtcgcactctggttgttcacttcgacaaattcggcaatgtcgaattcaccgaaaccgttcctgatggcgcactggtctgtaccctggagactttccggttttatctggaaaaacagggatggactcttgttaaccggggcgcaattaaaaatatgactgtggaacaattactttctttaaaataa

SEQ ID NO: 474530 - DNA, 357 bp, Shigella flexneri
atggaaataaaaccagaagatgagttaagcaatatcgttttatttccgataaaagaggatgaccctcgtaatcaggttaattttctttataagccatcggaaagaccatattgccatcacgcctctgtacgggttgacgaaaaagagcgtcaggtccgctgtaaaatctgcggtgcggttgtggagccgtttgactggatgctctctgtggcaaaaagagaaaccagactggcagatgatgtaaggctattgcgccaggaggaacaggaaaggcggagaaatatagaaaagctgatacagattgagcgtaacgcgaaagcgcggatacgcagggcgacaaaatccagaactgaataa

SEQ ID NO: 474531 - DNA, 666 bp, Shigella flexneri
atgacagttgctgatttcaaacggcccaaattggagctcccaaacggggcaaacaaactactactgcactcttgctgtgctccatgttccggtgaggtgatggaggcgcttcaggcctcgggaatcgactacaccatctttttctacaacccgaacattcatcctcagaaagagtatttaattcgtaaggatgagaatattcgctttgctgaacaacacggcgtgccgtttattgatgctgattacgacacagacaactggtttgaacgagccaaaggaatggaatgggagcccgaacgagggatccgttgcaccatgtgttttgacatgcgttttgagcggacagcgctgtacgccgctgaaaatggtttcagtgtgatcagcagttcactgggcatttcacgctggaaaaatatgcagcaggttaacgactgtgggcggcgagccgtcgcgcattatccgggcatggtgtactgggattataactggcgcaagcagggcggctcgtcccgtatgattgaaatcagcaagcgcgaaaaattctatcagcaggaatattgtggctgtgtgtattctctgcgcgataccaatctacaccgcaaatctcagggacgccctcttatcaaaattggtcaactccactacggtaaagaagagaaggagtga

SEQ ID NO: 474532 - DNA, 213 bp, Shigella flexneri; identical to SEQ ID NO: 461425

SEQ ID NO: 474533 - DNA, 597 bp, Shigella flexneri; identical to SEQ ID NO: 17091

SEQ ID NO: 474534 - DNA, 720 bp, Shigella flexneri
atgagcgcacgttcacgggcactgatccccctcagcgcagaacaacaggccgccatgcaggcggtggctgtcacagaacaacgtcgtcgtcagggacgcacactttcagcatggccttatgccaccgccttctttcgctgcctgaatggcagtcgccggatttcgctgaccgatctccgcttttttgcccctgcgctgacgaaggaggaatttcatggcaaccgtctcctgtggctggctgccgtggataaactgattgaaagttttggggaagtctgtgttcttcccctgccatccgatgcggggcaccgtctgttcccgtccgtgccttttcgtgaaggtgagcgtcgtcgtcagaaaaccacgctgacagagcagaaatacagccgccagcgggaacgtgaggcagaacgacgggaactggaataccagacatgttttgctcaggcgcagattgaccttgcgtttcatactcccgccacggtcggaagctggttgtcccgctggtctggtgttgttgaggagcatgatctggaaacgattttctgggggtggtgcgggcgttttccatcactgtcatcatttgaccggtttttctggcaggaggaaccactctggcggctgatttttgaagccggtgaggccggtcgtggtgcaccggtacaggtacgtgcacttgagcagtggatgatcccgaacaagctggagaacgtaatatga

SEQ ID NO: 474535 - DNA, 435 bp, Shigella flexneri; identical to SEQ ID NO: 236353

SEQ ID NO: 474536 - DNA, 1296 bp, Shigella flexneri
gtgtgccacttcaaaatgctgaaccaggggatttcaacgaaaacggcttttgcgaccgttgcagggcattaccaggtcagcgcatccactttgcgggacaagtattaccaggtacagaagtttgcgaagcctgactgggcggctgcacttgttgatggacgtggagcatcccgtcgcaatgttcacaaaagtgaatttgacgaggatgcctggcagtttctgattgcagattatctgcgaccggaaaaacccgccttccgcaaatgttatgagcgtctggaactggcagtccgcgagcatggctggagtattccctcccgtgccacggcctttcgccggattcagcaactggacgaggcaatggttgttgcctgtcgtgaaggtgaacatgcactgatgcatctgataccggcacagcagcgaactgtggaacacctggacgccatgcagtggatcaacggcgacggttatctgcataacgtctttgtacgctggtttaacggtgatgtgatccgtccgaaaacatggttctggcaggatgtgaaaacccgaaaaattctgggctggcgctgcgatgtgagcgagaacattgattcaattcgcctctcgttcatggatgttgtgactcgctacagtatcccggaggattttcacatcaccattgataacacccgtggtgctgcgaataaatggctgacgggaggcgcgcccaatcgctaccgctttaaggtaaaagaggacgatccaaaaggactgtttttactgatgggtgcgaaaatgcactggacaagcgttgttgccggtaaaggctggggccaggcaaaacctgttgaacgtgctttcggtgttggtgggcttgaggaatacgttgataagcatccggcactggctggcgcatatacggggccaaatccgcaggcaaaacctgataactatggcgaccacgctgttgatgcagagctgtttctgaaaacctttgccgaaggtgtggcgatgttcaatgccagaacaggccgtgaaacagaaatgtgcgggggcaaactctcgtttgatgatgttttcgagcgtgaatacgccagaacgattgtgcgtaagccaaccgaagaacaaaaacggatgctgttactgcctgccgaggcggtgaacgtttcacgcaaaggcgagtttacgcttaaagttggcggctcccttaaaggcgcgaaaaacgtttattacaacatggcattaatgaatgccggagtgaaaaaagttgtggtcagatttgatccacagcagttacacagcacggtttattga

SEQ ID NO: 474537 - DNA, 303 bp, Shigella flexneri; identical to SEQ ID NO: 473532

SEQ ID NO: 474538 - DNA, 240 bp, Shigella flexneri; identical to SEQ ID NO: 7038

SEQ ID NO: 474539 - DNA, 288 bp, Shigella flexneri; identical to SEQ ID NO: 84381

SEQ ID NO: 474540 - DNA, 156 bp, Shigella flexneri; identical to SEQ ID NO: 7036

SEQ ID NO: 474541 - DNA, 252 bp, Shigella flexneri; identical to SEQ ID NO: 462175

SEQ ID NO: 474542 - DNA, 201 bp, Shigella flexneri
atggcacgcaacgcaaaatattacaatcatgataattcgaccgttcttgcccacacgcacgagcggtattctcacgcatttaagtcagactggtaccagcatccctcatgcactgaagaacaggccgaatggcttattcagtgttaccgcaggcgcggatgcgaggttaaaaaagcccttagcctcgactaccgtcactag

SEQ ID NO: 474543 - DNA, 1179 bp, Shigella flexneri
atgtgcgtcgcaacaagggagccccccggatgcgacgggcagactttgaaaatgttcgaccagcaacgtgatggcaatctatacaagatctggaaccggctatgttcgggaacatggtttccgccaccagtgctggaaaaacggatcccgaagtcgaatggcaaggaacgcattctggggatcccaacagtatccgatcgaattgctcagggagcgataaaacttttcatggaagaaaagcttgacccgattttccatgctgattcatatggttaccgaccaggcaaatcagctcatgacgctctgaaacaatgtgccatccggtgctggcgttatagctggatactggaagtggacatcagtgcgtttttcgaccatgtgagacatgatctggtgctcaaagctctggaacaccacgggatgcctaaatgggtcatcctgtactgtcgacgctggatggaagcgccaatgcagagttgtgaaaatggagaattaataacccgaacacgaggcactccgcagggcggggtcattagtccgctacttgctaacttgttccttcactatgcatttgatttgtggatggaaagagaatatcggggggtaccgtttgagaggtacgctgacgatattgtagtacattgttcacgaatgagtgatgcaacaaggctaaagaacaggttatcggagcgcttctcggaagtcgggctggtcctgaatgcagggaaaacgaatatcgcctacattgacacgtttaaaaggagaaacgtcgcaacgagtttcacctttctcggatatgacttcaaagtgcgtacgctgaagaatttcaaaggcgaacggtaccgaaaatgcatgccgggtgcgtcaaatgcagcaatgcgcaaaataacagaaacaatcaagaagtggcgtatacatcgctcaacagctgagagtttgctggattttgcgaggcgctacaatgcgatagtgagaggctggatcgagtactacggaaagttctggtccagaaatttcaactatcgactgtggagtgcaatgcagtcacgtctgctcaagtggatgcagtctaaatacagactttcgaaccggaaggctcagcggaagctgacgctggtaaggaaggagtatccgaagctatttgttcactggtatttactacgtgcatcaaatgagtga

SEQ ID NO: 474544 - DNA, 186 bp, Shigella flexneri
atggcgggctgtgtgggggagccgaaaggctcgccggtttccgtacccggttacgccaaccctgcacagttcgccaccagttcgattggcgtcgtcggtggcgataatttccaaatgtacggagttatcgttatgaccactcaaatctctgttgaaactctctccccgatcacccataaccagtga

SEQ ID NO: 474545 - DNA, 555 bp, Shigella flexneri
atgatttacccaacaaatacaggcaaaagcggggaacaccttcgtctcaccacgctggaaagtgtctggattcagggaaaactgcgcatgtgggggcgctggtcgtatattggcggcggtaagacgggaaatatgtttaaccagttgctggcatccaaaaaattgacgaaaacagccgtcaatgaagccctgcgcaggatgaaaaaagcgggaatagagaaacctgagctggaagcgtttttgcgagagatgatcaatggcaagcaaaagacctggctggcgcattgtactgatgcagaggcgttatgtattgatagagtcataagtgaggtgctggcagagcatcctggattgattagtgtcctccggcaacggtatgaagggcgggggatgactaagcgtaaaatggctgaattgctgaatgacgcacaccctgagtggtgtttccggacgtgctgcagtcgggtagatgtatggctaaatcttgctgaatatatgctctatctaccgatgcgtgatgcattctcttccggggatctaaaaaccgtttgttga

SEQ ID NO: 474546 - DNA, 291 bp, Shigella flexneri
atggtggatttacgtaaagcggcgcgggggcagatgtgcaccgtcagaattcctggctactgcaatcacaatcccgaaacttctgtgctggcgcattacaggctggcggggacgtgcggaacagcgacaaaaccacacgatatgcaggcagcgattgcctgtagctcatgccacgatttaatcgacgggcgggtaaaaaccagcgattacaccaaagaagaattacgcctgatgcatgcagaaggtgtttttcgcacacaagaaatctggagaaaggaaggttatttatga

SEQ ID NO: 474547 - DNA, 600 bp, Shigella flexneri
atggcgcatatacaactggtcaaacaaacctcttccggattacttctcccggcgacgccggagagttgcgattttttgcatcaaatcaaaataggtgagtggatacacgcagactttaagcgtgtgcgtaactacgcattccacaagcgttttttcaaactcctgcaactgggatttgattactggactccggtcggtggggcgatcacgcctcgcgaacgaaaactggtatcaggcttcgttgattacctgtgcgaatcagtaggtcgggaacacactccagccctgagtgatgccgcagagcaataccttaatacagttgcgacatgcagaacccgggatacggcattgctaaagtcgtttgacgctttccgcgagtgggtaaccattcaggccggattttacaccgagcatatttatcctgatggtagtcgtgggcgcagggcaaaatctatcgcatttgcgaacatggacgaaaccgagtttcagcaggtttataaatctgtactgaatgtgctgtggaactggatcctgttccgtaaattttcctctccggaggaagtcgaaaatgtggccgcgcagttactggagtttgcgtaa

SEQ ID NO: 474548 - DNA, 1194 bp, Shigella flexneri
atgcctgttcataaagtatgtcagaatttcttccgggatgccttagcaccatttcatcagtaccgacaaaatgccctgatggatgccacaatggcgttaatcaacggagcatctctgacgcagaccagtatcggacgttttttgccgggtaatgcacaagttaagaataagatcaaacgtattgatcgcctcatgggtaatgaggcgctccatcgcgatattccaatgattttcaggaatatcacttcaatgctgacacggcagttatctttatgtgtaatagccgtagactggagtggctatccctcccaggagcatcatgttcttcgtgccagccttctgtgtgacgggcgttccattccgttattgagtaaggttgttccttctgaaaaacaaaataatccattgatacaacatgatttccttgattcccttgctcaatccctgccccccgatgccagggttattattgtcacggatgctggatttcagagcgcatggtttcaccatattacttctctgggctgggattttattggtcggatcagaaataacgttcagtattgcctcgataacgcgcctgaaagatggttaaaagtgtcggatagccctgaatgtaaaacaccggaatatatgggggctggaaggctggttaaagaaaggaaaaaaagcatccgggggcatttttacacctataagaaatcggcaaaagggcgaaaaaagaaacgttcgaaaggtcagagtggtttaaacaaaacagacaaagaacagagcaaatcagcaaaagaagcctggttgatcttcagcagtacaaatgacttcagagcgcgagaaatcatcaagttatacagtcggcgaatgcagatagagcaaaactttcgtgatgaaaagaacgggcgcttcggatttggtcttcgggccagcaaaagtcgttcaacaggaagaattctggttctgagtctgctggcaacgttgagcactatcgtaatgtggttactcggttatcacgctgaaaataaagggttacacctgaaatatcaggctaacagcattaaatcccggcgggttatctcatatctgacgttagcgaagaatgttcttcgacactcgccacttattttaagacgaacagtactgagcacagttctaaaccatctgtccagaacctaccgaaatatggtgctggtttattag

SEQ ID NO: 474549 - DNA, 390 bp, Shigella flexneri
atgctatgtttgtctcgttttctggggattcctcagcccttcagggcacagactaaaggtaaggtggaacggatggtgcagtacacccgtaacagtttttacatcccactaatgactcgcctgcgcccgatggggagcactgtcgatgttgaaacagccaaccgccacggtctgcgctggctgcacgatgttgctaaccaacgaaagcatgaaacaatccaggcccgtccctgtgatcgctggctcgaagagcagcagtccatgctggcactgcctccggagaaaaaagagtatgacgtgcatcctggtgaaaatctggtgagcttcgacaaccccccccagcatcatccactctccatctacgactcattctgcagaggagtggcgtga

SEQ ID NO: 474550 - DNA, 1215 bp, Shigella flexneri
atgaaaattattgctgcagatgtttttgttacttgcccagggcgtaatttcgttacgcttaaaataaccactgaaagcggactttgtggattaggagatgccacgttaaatggtcgcgaattgtcggtcgcttcttatctgaaagatcatctttgtccacaactaattggccgcgatgccagccgtatcgaagatatctggcaattcttttataaaggtgcttactggcgacgtggccccgtcacgatgtcagccatttctgccattgatatggcgttgtgggatatcaaagctaaagcggcaaatatgccattgtatcaactgcttggtggtgcttctcgtgaaggcgtgatggtttattgccacaccaccgggcgtacgattgatgaagtccttgaagactatgcaaagcaccagcagatgggctttaaggcgattcgtgtgcagtgcggtgtaccgggtatgcaaaccacttatggcctggcgaagggcaaaggactggcgtatgaaccggcaaccaaaggcctgtggccagaagagcagttgtggtcttcagaaaagtatctcgattttacgccgaagttattcgaagcggtgcgtaataagttcggttttaacgaacatctgttgcatgacatgcaccatcgcctgacccccatcgaagcggcgcgctttgggaagagcattgaggattaccgcctgttctggatggaagatccgacgcctgccgagaaccaggaatgttttcgtctgattcgccagcataccgtgacgctgattgcggtcggtgaagtgtttaacagtatctgggactgcaagcagttaatcgaagagcagctgattggctatattcgcacgacgatcacccatgcaggcggcattaccgggatgcggcggattgccgattttgcatcgctttatcaggtacgtaccggttcgcatggcccttcagatttatcgcctgtttgtcatgcggcggcgctgcattttgacctatgggtaccaaattttggcgttcaggagtacatgggctattccgaacaaatgcttgaagttttcccgtacagctggcgcttcgaggaaggttatatgcacccaggcgatgaaccggggctgggtatttctttcgatgagaaactggcggcgaaatatccgtatgacccggagtatctccccgtcgcacgactggaagatggcacattgttgaactggtaa

SEQ ID NO: 474551 - DNA, 393 bp, Shigella flexneri
atggacgttgatgtgtcaaccagtgttgcgggtaataaaccgcaacggattcgtcgtattcagacagtgaccctggttttattatttatggcggggatcgttaattttctcgaccgttcgtcattgagcgtggcaggcgaagcgattcgtggcgagttaggattatcggcgacagagtttggtgttttgctttctgcattttctctgtcttatggtttttcacaactaccttccggtattttgctagaccgctttggcccacgaatagttttaggcgcaggcttaatattctggtcattaatgcaggcattaacaggaatggttaattcttttagccactttattttaatgcgtatcggtctggggggtaatgctgccaacttactgatttag

SEQ ID NO: 474552 - DNA, 1026 bp, Shigella flexneri
atgaaaaagatgatgatagccacactggctgccgccagcgtgctgcttgccgttgcaaatcaggcgcatgctggcgcgacgcttgatgccgttcagaaaaaaggttttgtgcaatgcgggatcagtgatggattacctaggttctcttatgccgatgcagacggtaagttttcaggtattgatgttgatgtttgtcgtggtgttgccgctgctgtatttggtgacgacacgaaagtgaaatataccccactcacagcaaaagaacgcttcaccgctttacagtcaggggaagtggatttgctctcccgtaatacgacctggacttcatctcgcgatgccgggatgggaatggcatttaccggcgtcacttattacgacggcattggcttcctgacgcacgataaagcggggctaaaaagcgcgaaagaactggatggcgctaccgtctgtattcaggcgggtactgataccgaactcaacgtcgccgactatttcaaggcaaacaatatgaagtacacaccagtgactttcgatcgctctgacgaatcagcgaaggcactggaatctggtcgctgcgatacgctagcttcggatcagtcgcaactgtatgccttgcgcatcaaattaagcaacccggctgaatggattgtcttaccggaggttatctctaaagaaccgcttgggccggtagttcgtcgtggcgatgatgaatggttctcgattgtacgctggacgcttttcgccatgctaaatgctgaagagatgggcatcaattcccagaacgtcgatgaaaaagcggctaatccagcaacgcctgatatggcacatctgttgggtaaagaaggcgattacggcaaggatctgaagttggataataaatgggcctataacatcatcaaacaggtgggtaactactcggaaatttttgagcgtaacgtaggttcagaaagcccgctgaaaattaaacgtgggcaaaataatctctggaataacggcggtattcagtacgcgccgcccgtgcgttaa

SEQ ID NO: 474553 - DNA, 474 bp, Shigella flexneri
atgtctcatcgccgctcaaccgttaaaggctcactctcctttgccaaccctacggttcgtgcctggttattccagatccttgccgttgttgctgttgtcggcattgttggttggttatttcaaaacactgtaacgaatctcaataatcgtggcattacttcaggttttgcctttctggatcgcggcgctggcttcggtattgtccagcatttgatcgattaccagcagggcgacacctacggacgcgtttttattgtcggcttactcaatacgctactggtttctgcattgtgtattgtgttcgcttctgttttgggcttctttatcggtctggcgagactttcggataactggctgctacgaaagctttccacaatttatattgagatcttccgtaatattgcaaatcttcttctggtactttgccgtgttgcgcaatttgcccggaccacgccaagctgtgagcgcgtttga

SEQ ID NO: 474554 - DNA, 1425 bp, Shigella flexneri
atgaacaccgataaacaagtttacccactgtattacgaagcaaaaaatgacaaagtaagaaaacgtctcggtattaaaggcggtttttactgggctgaagcgaaaaaattatccattgccatctcccgtggtgctgttgcgattgacgatgcaggctacgatgaagatgactttaaaaaacctgttcgcgtcaatttgcccgttgttgatgacctcccgccagaaggcgtatttgatacggaattctgcaaccgttacgaaaaaggcggggaagatggcatcacaatggtatttatcgcatcttctccctctgttcaggacaaaccggccagcactgacaataccaacgtcaacggcgaagacatgacagaaattgaggagaacatgctcctgccagtttccggtcaggaactgcccattcgctggcttgcgcaacacggcagcgaaaaaccagtaacgcacgtttcacgcgacgaactccaggcattacacattgctcgggatgaagaactaccagctgttactgccctggctgtttcccacaaaaccagcctgctcgatccgctggaaattcgcgatctccacaaactggtgcgtgatactgacagagttttccctaatccaggcaattcaagcctggggctgatgactgcttttttcgaagcatacatggacgcagactacaccgatcgcggtctgctgacaaaagagtggatgaaaggaaatcgtgtttcacgcatcacgcgcacggcttccggcgctaatgctggcggcgggaacctcaccgatcgcggcgaaggtttcgttcacgatctgacgtcactggcgcgcgacgtagccactggcgtactggctcgttcaatggacgtggacatttataaccttcatccggcacacgctaaacgtgtcgaggaaattatcgctgaaaataaaccgcccttttctgttttccgcgacaaattcatcaccatgcctggcgggatggattattcccgcgccatcgtggttgcgtcagtgaaagaagcaccgattggtatcgaggtcatccccgctcacgtcactgaatatctgaacaaggtactgactgaaaccgatcatgccaaccctgatccggaaatcgtggatattgcctgcggtcgctcctctgccccgatgccgcaacgtgtaacagaagaaggaaaacaggatgatgaagaaaaaacgcagccatctggcgcaatggcagatgaacaggcaacggctgaaacaatggaaccggatgcaactgaacatcatcagaacacgcagccgctggatgctcagtcacaggtaaattctgttgatgagaaatatcaggaactacgggcagaactccatgaagcccggaaaaacattccgcccaaaaatcctgtcgatgcagacaaattactggctgccttgaggtag

SEQ ID NO: 474555 - DNA, 573 bp, Shigella flexneri
atgaagcgtaatattataggcggtgcattcactctggcatctctaatgctggccgggcatgcactggcagaagatggtgttgttaacttcgtcggtgaaattgtcgacactacttgtgaagttacctccgatacagccgatcaaattgtcccactgggtaaagtcagtaaaaatgcattttcaggtgtaggtagtctggcgtcgccacagaagttcagtattaaacttgaaaattgcccggcaacgtacactcaagcagccgttcgttttgatggtacagaagcgcctggcggcgacggcgacctgaaagtgggtacgccgcttacagcaggcaaccctggtgattttaccggtacaggacaagcgattgcggtaaccggcgttggtattcgtatttttaaccagtccgataattcgcaggttaaactttataacgactctgcttataccgctatcgatgctgaaggcaaggctgaaatgaagtttattgcacgctatgtggcaaccaatgcgaccgtaacggctggtacggcgaacgctgattcacaatttactgtcgaatataagaaataa

SEQ ID NO: 474556 - DNA, 201 bp, Shigella flexneri; identical to SEQ ID NO: 461525

SEQ ID NO: 474557 - DNA, 444 bp, Shigella flexneri
atggcagcaatatggttactaagagtcgatcttttatttgttgcgctctttcttatttttatttcatggggggatatattactcagaattattagccatcgttatttactggtgttaaccgtgcttatttttttggcactcattttacagcatcaaaaacccaatctggttgcagccgggagcgttttgctcgtgggcttctttcttttttccgcagggataattggcggcggtgatgtcaagctgttaactgttctttcgttagctattgatgaacatgaactggctaattttctcgtcgcaatgaccttttgcggcgctctggttgttctggcaggtcttcttttttttcgaaaatcaattcgtgaaaacggtgtgccttatgctgtaccaatttcattggcttttctgcttacatatcctgttttcccattgttttgttaa

SEQ ID NO: 474558 - DNA, 240 bp, Shigella flexneri
atgaatacttttattactaagtactatggtaaaactaaacagtgctttgcgcgtttcgcgaaggatgaacgtggtgttactgcaatcgaatatgcattgattggtgttgctatggcaactctgcttgctttcatctttggcgatcagaactcaggcttcctgggcgcaattaaagatgcattcgacgctatcgctgcagcaattcaacaggtaacgatttccggaacgagtaatccgtaa

SEQ ID NO: 474559 - DNA, 606 bp, Shigella flexneri
atgagcgatgaccgtttttatttttctttagggcagggagttaagttttacccagcgtctcgacgtatcaccaccagtacaggcaatgtaatcaatctgtctgaaaacggctatcgatttttactccttttactacagggagaatccgataagcaacatattatcaatgaggtttggcgggagcagaaaggttcggtaagcgacagcagttattatgggcagatttacatgcttagaaaggcattagacgtcgcaggtttgtcgagttctctaattaaaaccattccgcgaaaaggcgtcagatatctgggaaaggtcgagaaacatgtctgtgagaatgagcgtgacagtgatgaagacagtagtagctataccaacgatagcgaggccagggaagtaaacactgatgcaaacattcctgagaatgataacagccaggaattctctactgaagagctgctcccaataaaacatactgacaaaaatattgaatggtatagaacgaagcagtggagtgtttttattagcgttcttaccgtgttagcagtgtgctggctgacgacgcttgtttttttagtcttactatttcttaatcaagataaatga

SEQ ID NO: 474560 - DNA, 525 bp, Shigella flexneri
atggagaacgcctgtgtcctgttgatgggggtcctgagcacttttctggtcagttggctgggaaaagatgcgatggccggcgtggggttggcggacagcttcaatatggtcattatggctttttttgcagctatcgatcttggtactactgtcgttgtagcatttagtctcggtaagcgggatcgacgacgagcgagggtggcgacgcggcagtcattggtgatcatgacgttgtttgccgtactgttggcaacgctaattcatcattttggcgaacaaattattgatttcgtcgcgggtgatgccacgacagaagttaaagcactggcgttgacttatctggagctgaccgtactcagttatccagccgctgccatcactcttattggtagcggggcacttcgtggtgcagggaatacgaaaataccgctactgattaacggtagcctgaatattcttaatattattattagcggcatattgatttacggccttttctcctggtcggggctgggttgggtttaa

SEQ ID NO: 474561 - DNA, 498 bp, Shigella flexneri
ttgggtttaaccatttctcgttatattggcgcagttgcaattttgtgggtgctggcgattggttttaatcctgcgctaaggatttcgttaaagagctattttaaaccgctgaattttagcattatctgggaagtcatggggattggtattccagcgagtgtcgaatcagtgttatttaccagtggtcggttattaacccaaatgttcgttgccgggatggggaccagcgttattgccggaaattttatcgcgttctcaattgcggctcttatcaacttacccggaagtgcgctcggttctgcttctacgatcattacaggccgaaggttgggggtagggcagatagcgcaagcagagattcagttgcggcatgtgttctggctgtccactcttggattaacggccatcgcctggctaacggctccctttgccggggttatggcatcgttttacacccaggatccacaggttaaacacgtcgttgtgattctgatttag

SEQ ID NO: 474562 - DNA, 1398 bp, Shigella flexneri
atgaaaatggtctcacgtattaccgcgatcggcctggctggcgtcgcgatttgctatttagggttatctggttatgtgtggtaccacgataataaacgcagtaaacaggccgatgttcaggcatctgctgtcagtgaaaataataaggttttaggctttctccgcgaaaaaggatgcgactattgccacacgccttcggcagaattacccgcctattattatattcctggcgcgaaacagttgatggattacgacattaagcttggatataaatcttttaacctcgaggccgtgcgtgcggcactgctggctgataaacccgtttcgcaaagcgatctgaataagattgaatgggtgatgcagtatgaaactatgccaccaacgcgttataccgcgctacactgggcgggtaaggtgagtgatgaagagcgggcggaaatactggcctggattgcaaaacagcgcgcggaatattacgccagcaatgatactgctccggagcatcgcaatgaaccggtgcagcccatcccgcaaaaactgcctaccgatgcgcaaaaagtggcgttgggctttgcgctgtatcacgatccccgtttatcggctgatagcaccatttcatgcgctcattgccatacgttgaatgcggggggcgtcgatggcagaaaaacatcgattggtgttggtggcgcagttgggccgattaatgcgccgacggtatttaactcagtatttaacgttgagcagttctgggatggtcgtgcggcaacattgcaggatcaggcaggtggaccgccgttgaacccgattgaaatggcgtcgaaatcctgggacgaaattattgctaagctggaaaaagatccgcagcttaaagcgcagttcctcgaagtttatccgcaaggtttcagtggcgaaaatattactgatgccattgctgaatttgagaaaacattaattacgccggattccccatttgataaatggttgcgtggagatgaaaatgcgctgacggcgcaacagaaaaaaggctatcaattatttaaagataataaatgtgcaacttgtcatggtggtattattctcggcggacgttcctttgaaccgttggggctgaaaaaagactttaactttggggaaattacggcggcggatattggtcgtatgaatgtgactaaagaagagcgtgataaattgcgtcagaaagtacccggtttacgtaacgttgctttaacggcaccgtacttccatcgcggtgacgtgccgacgctggacggggcggtgaaactgatgctgcgctatcaggtaggcaaagagctgccgcaggaggatgtggatgatatcgtagctttcctgcacagtctgaacggggtgtacacgccgtatatgcaggataaacaataa

SEQ ID NO: 474563 - DNA, 213 bp, Shigella flexneri
gtggctactcagactgaagttgccaggcatttgagtctgaccgatcgccagcttcgcagattacagaaactgccgggtgccccggtttcgaacaagcgaggacaactggatctggatgcctggcgtgatttttacatatcgtatctgagaagaagtaaaaacgatgtgcctgatggtgatccggaagaggattatgaagagaaactgaggtag

SEQ ID NO: 474564 - DNA, 177 bp, Shigella flexneri
atgagggacaaacccgcgaaccataaacgcggtaaaaacccggtgtgcatcgtttttgattattcccgcacactcgcgcagaaggagttccccgtcgggctacggtcatggttaatgcgggaatacagcgacgatacagcgcatgatgtgtcaggcctgaatacctttatccgttaa

SEQ ID NO: 474565 - DNA, 303 bp, Shigella flexneri
atgaaaaaaagaaattttagcgcagagtttaaacgcgaatccgctcaactggttgttgaccagaaatacacagtggcagatgccgccaaagctatggatgttggcctttccacaatgacaagatgggtcaaacaactgcgtgatgagcgtcagggcaaaacaccaaaagcctcccccattaccccggaacaaattgaaatccgtgagctcaggaaaaagctacaacgcattgaaatggagaatgaaatattaaaaaaggctaccgcgctcttgatgtcagactccctgaacagttctcgataa

SEQ ID NO: 474566 - DNA, 138 bp, Shigella flexneri
atggtacccgcgcttcgggaactgatgcaggcgaagcatcgcgcacagaaagcagtagatgagctggtggactgtgtggcagagctggaaaccagagtcggaaagtttgaaaagctggtgcaggaggtgctgcgctga

SEQ ID NO: 474567 - DNA, 360 bp, Shigella flexneri
atgcgccatgagtttattttaccttatccgccgacggtgaatacttactggcgacgtcgtggcagcacatattttgtatcaaaagccggtgagcgttatcgccgggatgtggcgcttattgtccgtcagcagcgactgaaattaagcctgtccggaagactggcgataaagattattgcagagccaccggataagcggcgtcgtgacctggacaatatcctgaaagcaccactggatgcactgacacatgcggggttgcttatcgacgacgagcagtttgatgaaaccaatattgtgcgcggactgcctgttcctggtggtcggttggggataaaaatcacagagctggagtgtgcatga

SEQ ID NO: 474568 - DNA, 690 bp, Shigella flexneri
atgaataaccagtatttacagtttgttcgtgagcagctcattatcgccaccgctgatttgagtggggcgacaaaaggtcagcttgaagcctggcaggagaatgccatgttcgatacagggcgttacaggcgtaaaaaaatccggtaccgcgatgaggtgaccggaaaaatgataacgcgggataatccaccaatcccgggaaaacaatcactggcgaagggggcgtcaattcctctggtcagtcaggttgcgttttcgacatcatcgtggcggcgggctgttctgtctcttgaagagcactataaagcctggttgttgtggtgttacagcggaagtatttgctgggagtatcagatcaccataacccactgggcgtgggaagagtttaaggctcattctggcactaggaaaattgcagagaaaacacaggaacgcctgaaaaaattaatctggctggcggcgcaggcggtaaaagcagaactttttggtggggaaggttatgaatatcaggagctggcattactggcgggagtaacaaccaaaaactggtccaaaacatttactggtcactgggttgtaatgaaacacatttttcaccgactggatagtgaggctttattgtttgtgatgagaacacgttcagaacaaaaagcggcattttcaaagcaaagtattgcaaaagtagattaa

SEQ ID NO: 474569 - DNA, 675 bp, Shigella flexneri; identical to SEQ ID NO: 473842

SEQ ID NO: 474570 - DNA, 366 bp, Shigella flexneri; identical to SEQ ID NO: 462994

SEQ ID NO: 474571 - DNA, 267 bp, Shigella flexneri; identical to SEQ ID NO: 462029

SEQ ID NO: 474572 - DNA, 1044 bp, Shigella flexneri
atgagcgccatagattcccaacttccctcatcttctgggcaagaccgcccaactgatgaggttgaccgcatattatcaccaggaaagctgatcatactcggtctgcaacacgtccttgtcatgtacgcaggtgcagtcgctgttcctcttatgattggtgaccgactgggcctctcaaaagatgctattgcgatgctcattagctcggatctcttttgctgcgggatcgtcacattattgcaatgtatcggtatcggccgctttatggggatccgcctgccggtgattatgtcggtgacctttgctgctgtaacaccaatgatagccattgggatgaacccggatatcggcctgctggggatatttggtgccactatcgccgcgggttttatcaccacattattagcgccacttattggtcgcttgatgcctttattcccgccactggttaccggtgtggttattacttctattgggcttagcatcattcaggtgggtattgactgggccgctggaggtaaagggaatccgcaatatggtaatcccgtttatttaggtatctcctttgccgtcttaatttttatcttgctcattactcgctatgcgaaaggatttatgtccaacgtcgccgtattactggggattgtatttggctttttactttcgtggatgatgaatgaagtcaatttatccgggctacatgatgcctcgtggtttgcgattgtcaccccgatgtcgtttggtatgccgattttcgatcccgtttccattctgaccatgactgccgtgttaatcatcgtgtttatcgagtcgatggggatgttcctggcactgggtgaaatagtcggtcgtaaactctcttcacacgatattatttgcgggctgcgtgtcgatggcgtagggacaatgataggcggcacgtttaacagcttcccccacacgtcattttctcaaaacgttggcctggttagcgtgatgcgcgttcatagccgctgggtgctgagagatcccctcataatttccccaaagcgtaaccatgtgtga

SEQ ID NO: 474573 - DNA, 519 bp, Shigella flexneri
atgccttcgatgatagagataattttactcatcatccttcacatctggctctgtagacagggtggtgatcacttctggagggaatccagattaaacatctcattgctgatgcttaaagttgagcatttggcgcgcggtaaggggctgcgtttagataagagccagtcatcacaaacaccaggatttagcctcgcattcgcggggctttttattgcaacaaaggtaaagacgatggatgaagaatatcgtaaagacctgcaactgtggtttggtcttacgcatgcgtcgttctgcgtgatgccgcgagtattcatggaggctatgcctccagaatggcaagagaagatggctcagttgctttttgagtatagcgacacgatcaaaacggatgtctgcggagttcacagctgttttgttactgccaaagacggcaacaaccgctttatgaggatgccagaagatattctgaactatcgtcatcctcgacgtgaattcatcgaatcatttctgaagaagtag

SEQ ID NO: 474574 - DNA, 207 bp, Shigella flexneri
atgcgaaagctgaaaatgatgctcttcggcgcaagcttgataatggtggccgggtgctcgtcaaaggaaaatgctctgtgccatcctcagccgaaacctccagcgcctccggcatgggcaatgatgccaccgtcgaactctctccagttgctggacgaaacgttctcggtatccgggacggaatcatcagagaccagacagcactga

SEQ ID NO: 474575 - DNA, 366 bp, Shigella flexneri
atggtggatggtaagcccgtcataccgggaatgaagctgtcgaaggaaaaatgcgaccaggttaacgctattgaacgtgataaggcgctggcatgggtggagcgcaatattaaagtaccactgaccgaaccacagaaagcgggtatagcgtcattttgtccctataacattggcccaggtaagtgtttcccgtcgacgttttataagcggctgaatgccggtgatcgtaagggcgcatgcgaggcgattcgctggtggataaaagatggtgggcgcgattgccgcatacgttcaaataactgctatggacaggttattcgtcgtgaccaggaaagcgcattagcctgttgggggatagatcagtga

SEQ ID NO: 474576 - DNA, 381 bp, Shigella flexneri
atgattacggaatcaggcattgcgctggatattagctgtgataacacgccgcgccagcaggttattgggggaacgcaggctgcgttgaatgaatttaccacgctgctgatggccgctggatacgaaccggttaaactcggtgtgagcggtgcctggcacacgcgtttgatggaagacggcgttcaggcaatgcgcgattatcttgccggactggatatcgcttcgccagagcatcaggttctgatgaacgtaacagcaaaaagcgaggtcgctccgtcaattatcaaagaaaatctctcattacacttaactcatacggtgaaatggactgaatctctcgatacatattctgaatatgccaaccccggtagctttccttga

SEQ ID NO: 474577 - DNA, 915 bp, Shigella flexneri
atgattcctgattatttaacttttattcgctttcaggataaacgaaatctgatatacatttatgctattggacttattctgataggcttttattggaaaaatgcagggtttacttttccatcagaggatattggtgtagttagtgggattctggccctggtgctgtataattttatttttgatctcaaggcgtactgggcttataaatgcgtcacgaagaatatcgatttttcgtggtttaagaaaaagcagaaccacaaaatagaattatttcttacacaacctctggtggcaggatttctgtcgttaatcatgttgagtgcaatgagttgggggctataccagcttctaccctcgttatatgcgctgttcctgatttcgttacttgggccgttggtcatctttctgctgtttcggatgatccgcaccagttatgtcaagcaggtcgctatttcagtagcgaaaaaagtaaaatataaaagtctgactcgctatgtgctgctttcggtgtgcatctcaacggttgttaacctgcttactatcagcccgttgcgtaacagtgattcttttgtgacagaggggcagtggttaacgtttaaatcgataattgcattgctcattctttgtggcgtagtgttggcgattaatctgttttttctgcgcttctccaagcggcccgcttttctgggcaggttttttttgcaggaaatcgatctgtttttctccagtgaaaatacgttgtcgaccttttttgccaagccgctttggcttcggttattcatattgcgggttattgaaatgatgtggattacgctggtgtcggtattggcaacgcttgtggaatggcggatttggtttgaagcctattttttactctgctatgtaccgtgcttaatttactattttttccggtaa

SEQ ID NO: 474578 - DNA, 273 bp, Shigella flexneri; identical to SEQ ID NO: 461110

SEQ ID NO: 474579 - DNA, 291 bp, Shigella flexneri
atgtctacagctgcaagcgtccgtaaaacaccgcgagaacatcagattaacatccgggcaactgatgaggaacgagccgttattgattatgctgcgagcttggtcaataagaaccgtaccgatttcatcatggaactggcgtaccaggaagctaaaaacattatcctggatcaacgtttatttgtgctggataacgaacgttatgattcgtttattacgcaactggaagctcctgtgcagaatgcagaagggcgtgaacgtctgatggcggtaaagcctgaatggaaataa

SEQ ID NO: 474580 - DNA, 483 bp, Shigella flexneri
atggaaataaatgtcaccgcgccagcattgttgacggatgagcatatacttcagccatttgactgtggaaatgaggtgctaagtaactggttacgtggtcgggctatgaaaaaccagatgctcaatgcttctcgcacgttcgttatttgcttggaggatactttacgtattgtgggatactactcattagctactggttccgtcactcatgccgagcttggtcgcagtttgcggcataacatgcccaatcctgtccctgttgttctgttagggcgtctggctgttgatgtttgtacccaggggcatggtttcggtaaatggctactaagtgatgccattcaccgggttgtcaatctggctgatcaggttggcattaaggctgttatggtacatgcaattgatgatgacgccagagcattttatgagcgttttggttttgttcagtcagttgtggcacctaataccttgttttataaagtctga

SEQ ID NO: 474581 - DNA, 228 bp, Shigella flexneri
ttgctgaaaccgcaacggacagacggcggtcatcggctgttcaacgatgccgatattgaccggatccgcgagatcaaacgctggatcgacaacggcgtgcaggtcagcaaagttaaaatactgctcagtaatgaaaatgttgatgtgcagaacgtctggcgcgatcagcaagaaacattactgacttacctgcaaagcgtgaaccgccccgggaatcctggagactaa

SEQ ID NO: 474582 - DNA, 327 bp, Shigella flexneri
atgactaaaaatactcgtttttcccccgaagtccgtcaacgggcagtccgtatggttctggaaagtcagggcgaatatgactcacaatgggcgacaatttgttccattgctccaaagattggctgtacgccggagactctgcgtgtctggggtcgccagcatgagcgggataccgggggcggtgatggagggctcaccaccgctgaacgtcagcgtctgaaagagctggagcgtgaaaatcgtgaactgcgccgcagtaacgatatccttcgccaggcttccgcttattttgcgaaggcggagttcgaccgcctctggaaaaaatga

SEQ ID NO: 474583 - DNA, 435 bp, Shigella flexneri; identical to SEQ ID NO: 35931

SEQ ID NO: 474584 - DNA, 771 bp, Shigella flexneri
atgaacgaaacgctgaatgcactgatttgtcgccacgcccgtaacctgctgctggcgcagggctggccggaagagacggatgttgaccagcgtaacccgaagtatccgggctggatcagcatttatgttctgctggatgcgccccggctggcgacgttacttatcaaccgtcacggcggcgtactgccgccgctcctggcctctgccattcagaaactgaccggaaccggggcggaacttgttctgtccggcagtcagtggcagtcgctgccggtacttccggcagacggaacgcaggtgtctttcccgtatgccggagaatggctgaccgaagacgaaatcagggcagttcttgatgcggtgcacgatgcggtacgcagtgtcagttgccgggtggcagaagatgcgcggcgtatcagggcggcgctgaccacaaccggtcagacgttgctgacccgccagacgcgccgctttcgcctggttgtgaaggaaagcgatcacccctgctggctcgatgaagacgacgaaaacctgcccgtggtgctcgatgccatcctgaaccggggcgctcgtttttcgtcggtggaaatgtatctggtcagtgagtgtgtggagcatatcctgtccagtgggctggcctgcgatgtgctgcgtatacctgatgaaccgtcccgtcgctggtttgaccgggatattctgcgggaggtggtcctggaagcccggactgaaatccgcagcatggcggatgcactggcgaaaatccggaaatga

SEQ ID NO: 474585 - DNA, 750 bp, Shigella flexneri
atgaaaagacagctttttactcttagtattgtcggggtattttctttaaatacctttgcatcattccctccgggaaatgatgtgacaacaaaacctgacctttactacctgacaaacgataatgctattgacagtctggcattattaccgcctccaccacaaatcggaagtattgccttcctgaatgaccaggccatgtatgaaaaggggcgtttattgcgaaatactgaaagagggaagctggcagctgaggatgccaatctcagtagtggtggcgtggcaaatgtattttctgctgcttttggttctccgataacggctaaagattcaccagaattgcataaattactgacaaatatgattgaggatgccggagacctggcaacgcgttcagcaaaagaatattatatgcgtattcgaccttttgctttttatggtgtttctacgtgtaatacaaaagaacaggatacattatccagaaatggctcttatccatcaggtcatacatcgattggttgggcaacagcacttgtattgtccgaaataaatccggcacgccaggataccattctgaaacggggttatgaactgggggacagcagggttatttgcggttatcactggcaaagtgatgttgacgcagcacgtattgttggctctgctattgtagcaacactgcactcaaatcctgtgttccaggcacaattacaaaaagcgaaagatgaattcgctaacaatcagaaaaaataa

SEQ ID NO: 474586 - DNA, 285 bp, Shigella flexneri
atgcaaatgaaaaacaataccgcacaagcaacaaaagtaattaccgcgcatgtgccattacctatggctgataaagtcgaccagatggccgccagactggaacgctcccggggctgggttatcaaacaggcgctttctgcatggcttgcccaagaggaggagcgtaatcgcctgacgctggaagccctggacgatgtgacatccggacaggttatcgaccatcaggctgtacagtcctgggcggacagcctcagtactgaccatccgttaccggtgccacgctga

SEQ ID NO: 474587 - DNA, 276 bp, Shigella flexneri
atggaactgaagtggaccagtaaggcactttctgatttggcgcggttatatgattttctggtgctggccagtaaacctgctgccgccagaacggtgcagtccctgacacaggcgccggtcattctgttaactcatccacgtatgggagaacagttgtttcagtttgaacccagggaggtcagacggatttttactggcgagtacgaaatccgttacgaacttactggccagactatttatgtattgcgcctgtggcacacacgagagaacaggtag

SEQ ID NO: 474588 - DNA, 783 bp, Shigella flexneri
atgatttttaccaaaatcattaggggattcatcagtactcagcaggcaaaggccacgcgggataaattcgctaaagagtatcagcgttacgcacgcggcagccaggcgaaagtaaacccgttttcagaacgcgatattgatgtggcgcggcaaaattatctggcgcaggaagcctccgtaaagtcatcggcggcggaacaaaaacagatccagagccagctggatagcctggtgttgggtgaacattctcaaatcgccagcctgaaagcgcagctcgcggaagcaaaatataaccttgagcagacgatagtgcgtgcgccgagcgatggttatgtgacccaggtgctgattcgtccgggtacctatgccgcgtcgctgccgctacgtccggtgatggtgtttatacccgatcagaaacgacaaattgtggcgcagttccgtcagaactccttgctgcgactggcccctggcgacgatgcggaagtggtgtttaatgctctgccaggtaaggtattcagcggcaagctggcagccattagtcctgctgttcccggcggagcttatcagtcgaccggcaccttacagacgttaaacacagcgccgggttcagatggcgttatcgcgaccattgaactggatgagcacactgatttgagcgctttaccagacggtatttacgcccaggtggcggtctactctgatcatttcagccatgtctcggtgatgcgcaaagtgctattacgcatgaccagctgggtgcattacctttatctcgatcattaa

SEQ ID NO: 474589 - DNA, 597 bp, Shigella flexneri
ttggcagcattacccaatcttgagcgtaatgccttttatgaaggcgtcgaatttcctgatgattgtgatgttttaatcagctacgctccaccaaaagatgaatcgctggttgccagttttattacacaatatgccgtaaccgcttatgccagccagcgctatcttgagaaacatcctattagccgtcctgacgaactcgaacatcactcctgtattttgatcgactcgatgatgatcgacgacgcgaatatctggcgcttcaacgtcgccgggagtaaagaggtgcgggattatcgcgtgaagggaaattacgtttgcgataacacgcaatcggcgctggagctggcacgaaatcacctggggattgtgtttgcgccagacaaaagtgtgcagagcgatctgcaagacggcacgctggtgccctgctttcagcacccgtatgaatggtggctggatctggtggctatcttccgtaaacgggaatacctgccctggcgggcccagtatgtgctggatgaaatgctgcgtgaaattcgccaccagcttgctcagtcgcagcaactgcggcctgaacaagcggcggaaagcgaagattaa

SEQ ID NO: 474590 - DNA, 429 bp, Shigella flexneri
atgtcgccatcattacgcaaggctgttgcagttgctattggtggcggggctgttgctatagcatctgtgttaatcactggcccaggtggtaacgatggtctggaaggtgtcagctacataccatacaaagatatcattggtgtatggactgtatgtcacggacacaccggaaaagacatcatgcctggtaaaacgtataccgaagcagaatgcaaagctctcctgaataaagaccttgtcactgtcgccagacaaattaacccgtacatcaaagtcgatataccggaaacaacggtaagcgccccatcagcgacgtcttgtgaaaattgtcctgtctggcaacaatcgcgcccatctatattgatggacacgaacgatgaattcccagacaacaaaagatattccctgcttccgttcttatttgcctga

SEQ ID NO: 474591 - DNA, 675 bp, Shigella flexneri; identical to SEQ ID NO: 473842

SEQ ID NO: 474592 - DNA, 519 bp, Shigella flexneri
atgacttctatgtcacatggtgtcgattcattgaccgatattagttacagggtaagggcgttctttgatgaggtgacattagcttaccgtccactaaatgacactcagaggaaaattgttgatggtttatctggtgggttaattgatggtctgaagatgcttgctgtggctgttactgctcaaaaggctgcaaatgtagcaggaggcttgttaaaccttgcaaacgctgttacttcattcggtgacgctgttaataaagctaaagctggcaaggctggttcttcaggtggtgcgctaaataaagtcggtagagttgtcctttatgctgagttggtaaattttgctcttgataatttaaaccctgaagcagctaagaatccgaacttacatcaatcaggtattggcacagaaacaaacttcaaccctgaatacaaaggtgattcatctaagccaatagttctatcgctgactggtttaatggtgcaactaataaaattgctaacttccaagaaccgatga

SEQ ID NO: 474593 - DNA, 333 bp, Shigella flexneri
atgctcacctcagaacaacacaggtgctccaatgaaaaaagaaattttagcgcagagtttaaacgcgaatccgctcaactggttgttgaccagaaatacacggtggcagatgccgccaaagctatggatgttggcctttccacaatgacaagatgggtcaaacaactgcgtgatgagcgtcagggcaaaacaccaaaagcctcccccattaccccggaacaaattgaaatccgtgagctcaggaaaaagctacaacgcattgaaatggagaatgaaatattaaaaaaggctaccgcgctcttgatgtcagactccctgaacagttctcgataa

SEQ ID NO: 474594 - DNA, 543 bp, Shigella flexneri
atgattggcgtcaagcagcctttaccaaaagcagttttaagaactcagcatgacaaaaataaagaagcaataagtatcctggattttggtgttattgatgatggtgtgacagataattaccaggcaatacaaaatgctatagatgccgttgcttcactaccctccggcggagagctgtttatccctgcgagcaaccaagcggtggggtatattgttggatccactttgcttattcctggcggtgttaacatcagaggagttggtaaggcatcgcaactccgagcaaaaagcggacttacaggatctgtgttaaggctgtcttatgattcagacactatcggccgttatctgagaaatatacgagtaactggtaataacacctgcaatggtattgacacaaacattacagcagaagactctgtcatcagacaggtttatggctgggtatttgataatgtaatggtgaatgaagttgaaaccgcattatttaatgcaagggctctggcactcaaaatttatagcatgtcaggctggaacctgtag

SEQ ID NO: 474595 - DNA, 741 bp, Shigella flexneri
atgcaagggctctggcactcaaaatttatagcatgtcaggctggaacctgtagagtcggtcttcactttttaggccagtgtgtaagtgttagtgtcagctcctgccatttcagcagaggaaattattctgctgatgaaagctttggcatcaggattcagcctcaaacgtatgcgtggtcgtcagaggcagttaggtcagaagcaataattttagacagtgagaccatgtgcattggttttaaaaatgccgtctatgttcatgattgccttgatttgcatatggaacaactggatttagattattgcggctcaacaggcgtggttatagagaatgtaaacggaggattttctttctcaaactcatggatagcagcagatgccgatggcactgaacaatttacggggatatattttagaacgccggcctcaacgcagtcacataaaattgtcagtggtgttcatatcaacactgcaaacaaaaacacggctgcaaacaatcaaagtatagcgatagaacagtcggcgatcttcgtctttgtaagtggttgtacgttaactggtgatggatttgcccctatatttccagacatctgttatcacttaacccattacaagcccgctgccgcagatattcccgtggcgagcgataacccagcgcactatgcggatgccattcgttataatgctcgaacgcctctgcaaggttctttgctgccgttaacccgtctggtttgggcatga

SEQ ID NO: 474596 - DNA, 237 bp, Shigella flexneri
atgatactcaagctgaaacacaaagtttataattctatccagactaacaggatcaatatttttgttataacaaaactctctgaatccttgatctttactctttcttataaaatcaataagatgcaacccaattccaagcctcatatctttagtgttaaatattggaacatcagttttcccctgattaccatgcacatacctgctaacttcatccacaacctctttaaagttatctaa

SEQ ID NO: 474597 - DNA, 141 bp, Shigella flexneri
atgattggaaatttcgaccccaaaaaaaacaaaatcgtggttagagatttctttaatatcctcagagtatgtattcttatgtgtttgtatattttcagactgaattttatcaaaggatttaatattaagaatattatttga

SEQ ID NO: 474598 - DNA, 585 bp, Shigella flexneri; identical to SEQ ID NO: 460740

SEQ ID NO: 474599 - DNA, 273 bp, Shigella flexneri
atggtcacagttaactttcattgcccccgttgccagtccgttcaggtttaccgtcacgggcagaacccaaaaggacatgatcgattccgttgccgtgactgtcaccgggtgtttcagctcacttactgttacgaggcccgtaaaccgggagttaaaaaccaaatcactgaaatggctttcaacggtgccggagttcgcgatactggccgtacgctgaaaatcggcatcaataccgtcatacggacattaaaaagctcccgccccggcggataa

SEQ ID NO: 474600 - DNA, 591 bp, Shigella flexneri
atgaagttgattatttttattctcattgttctgattattgcagcgctacttatccggattatcctcagaagtgtaaatcagcattctcctttgctgatgcaattgcatgcggcaggtatacggactggtgatgcagagcgaatactgtccagcggtgaatactggcaacgtcagaagacgctgctgacagaaagggaagtcagttttatgaaaggactgttcagaattgtggatatgaagcggtggtatctgtgtccgcaggtacgggtagcggatatcgtccagctgaacgggaatatccggccacgatcacgccagtggtggcagttattcaggatggtgtctcagtggcatgttgatgtggttatcgttgagctgcgttcgttcagtattgttgcagcagtagagctggatgatgccagccatttacgaccggaacgcagacgccgggatattcttctggaagaggttctgaggcaggctggtattccgttgctcagaagccacgatgccagaaaactgctgcagatgaccggagaatggctgaatacaacaggggctgatcagcagtccccggaacatcgtagctga

SEQ ID NO: 474601 - DNA, 186 bp, Shigella flexneri
gtgtccgttaaactcaggctacctcagatcagtgaatccggtgaagtggtggatatggccgcttatgaggcatggcagcaggaaaatcatccggacacctggctgcagatgcagcgtcgtgaagaggtgaacatcaatgtgcaccgggaacgcggggaggatgttgagccgggagatgatttctga

SEQ ID NO: 474602 - DNA, 399 bp, Shigella flexneri
atgctgaagtttatgctcgataccaacatctgcatttttacgataaagaacaaacccgccagcgtcagggagcgttttaacctgaaccaggggaaaatgtgtatcagttcggtcaccctgatggagctgatatatggtgcagaaaaaagccagatgcctgaacgtaatctcgctgtgatcgagggatttgtttcccgcattgatgttctggattacgacgctgctgcagccacacacaccggccagataagagcagaacttgcccgtcagggacgccctgtcgggccatttgatcaaatgatcgcaggtcatgcccgcagtcgggggctgattattgtgactaataacacccgggaatttgaacgtgtgggcggcctgagaactgaagactggagctga

SEQ ID NO: 474603 - DNA, 228 bp, Shigella flexneri
atggaaaccaccgtatttctcagcaaccgcagccaggcggtcagactgccaaaagcggttgcattgccggaaaacgtaaaacgcgttgaagtgattgctgtcggacgaaccagaatcattacgccagccggagagacatgggacgaatggttcgacggacacagcgtcagcaccgattttatggataacagggaacagcccggcatgcaggaaagggagtcattctga

SEQ ID NO: 474604 - DNA, 372 bp, Shigella flexneri
atgatgagtatcgcgcaggtcagatcggccggaagtgccggtaattattataccgacaaggataattactatgtgctgggcagcatgggagaacgctgggccggccagggggctgaacaactggggctgcagggcagtgtcgataaggatgtctttacccgccttctggagggcaggctgccggacggggcggatttaagccgcatgcaggatggcagtaacaggcatcgtcccggctacgacctgaccttctccgctcccaaaagtatctccatgatggccatgctcgggggggacaaacgtcttattgaagcacataaccaggccgtggattttgctgtccgtcaggtggaggcactggcctccacctga

SEQ ID NO: 474605 - DNA, 237 bp, Shigella flexneri
atgataaaagaaaaaatattatcaatagtggccttttgctatggtatagcgtacagcaaactatctgaagaaactaaatttattgaagatctttctgccgattctctttctctgattgaaatgctggatatgattagttttgagttcaatctacgtatagatgaatctacattagaacacattattactattggagatcttatttctgtagtcaaaaatagtacaaaatcaatatag

SEQ ID NO: 474606 - DNA, 1197 bp, Shigella flexneri
atgaccgaatccagcgattacgaatccgtccaggtctttatcggcgttgatgtcggtaaagatacgcatcacgctgttgccattaatcgttcaggtaaacgcctgttcgataaagcattacccaacgacgaaaacaaactcaggtcgctaatatctgacctgaaacaacatggtcagatactgctggttgttgatcagccagctaccatcggtgcgttacctgtcgccgttgcccgctcagaaggagtccttgtcggatacctccctggactggccatgcgccgcatagccgacttacacgccggtgaagctaaaactgatgctcgtgacgctgccatcattgccgaagctgcccgtaccctgcctcacgcgctacgcacgctgaaactggctgacgagcaaatcgccgaactctccatgctctgcggcttcgatgatgatcttgccgcacagacaacgcaggccagcaaccgtatccgcggccttctgacccagatacatccggcaccggagcgcgttctcggtccgagacttgagcacccggcggtactcgatcttctccagcgatatccctcaccagaaaaactcgcttcgctgggtgagaagaagctggcagcccagctctgcaaacttgcgcctcgtctgggtaaacgccttgcagcagacatagctcaggcactggccgaacaaaccgtcgtcgttcccggcacgaatgccgctgccgtagtactgccacgtctggcactccagctcatcacgctgcgtaagcaaagagacgaggtggcgcttgaggtagaacagcgagttcttgctcaccctctttacccggtcctgaccagtatgcccggagtcggtgtcaggaccgcagccagactcctcaccgaggtcgcctgccgcgccttcgcctctgccgcacatctcgctgcttatgctggccttgcgccggtaactcggcgatccggctcgtcaatacgcggtgagcatccctcgcgacggggtaataaagctctcaaacgggcgttgttcctgtcggccttcaccgcgctcagggatccgctctccagggcttactacacccgcaaaatgagtcagggaaaacgacacaatcaggcgcttatcgccctggcgagacgacgctgcgacgttctgttcgccatgatgcgcgacgggactttttataccccgcaggggtcataa

SEQ ID NO: 474607 - DNA, 537 bp, Shigella flexneri
gtgatcgctgagatatttcagggaggctttgtagtcttccagcaacagttcagcaaagtccatttcgaagccgcgacgacacataatgcgcatcaccacgatgtcggtggcttcaccgccgagagtgaaggccggaacctgccagccgcgcagacgcagacgttcagagaggtcgtacagggtgtatcccggatcttcaccatctttcagtttgaagcaaaccgccgggatgccttcgtccgggcgaccggtacagatgaactcatacggccccagtttggcgatctcatccgccagataggcagcgacctggtaggaagcattctgtactttggtatagccttcacgaccaaggcgcaggaattcatagtactgtgcaatcacctgacccgccgggcgggagaagttgatggcaaaagtaccaatctgaccaccgaggtagtcaacgttgaacaccagttcctgcggcagcgcttcttcgtcacgccagataacccagccgcagcccagcggagccagaccgaatttatggcctga

SEQ ID NO: 474608 - DNA, 474 bp, Shigella flexneri
gtgcgcaatggcatggaggagtccgcggaatttgaacaacagcaacataatcaagcggccgcgaaaaaacgcatccctgttatcgaagctctgttacgacatcccggtgctttcctgaagattattgcactacgactgtgcgagttgctgacgatgtacattgttactgcctttgcacttaattattcaacccagaatatggggttaccgcgcgaacttttccttaatattggtttgctggtaggtggattaagctgcctgacaattccctgttttgcctggcttgccgatcgttttggtcggcgcagggtttatatcacaggcgcgttgatcggaacgttgagcgcatttcctttctttatggcgcttgaagcacaatctattttctggatagttttcttctccataatgctggcaaacattgcgcatgacatggtggtgtgtgtgcaacaaccgatgtttaccgaaatgtga

SEQ ID NO: 474609 - DNA, 303 bp, Shigella flexneri; identical to SEQ ID NO: 473532

SEQ ID NO: 474610 - DNA, 834 bp, Shigella flexneri
gtgggtatttcagtgccattatcgctgggtgacgaaaatcaaatttatgcgtcttcacagatgagtcgttcgggagagcagggtaataactatcaggtttcattatcaggtcagaatagtggtggtgtatggtgggatgtagcgacaaatataactaacgctcatcagtcacaaccgaagagcacgatgaacattgtgcaagttggcaaaaatggatcatatggtcagtttagtagccattacagctccagcgaaaacatgaaacagctaggtgcaaatttaagcggtgggatacttattacaagggatggacttacatttggtcaaaatgtggatgggacattagcccttatagaggcacccggagcaacgggggttaacgttaatggctggccgggactgagtactgattttcgtgggtatgcaatactgccagtgcagccataccgaagagacgatgttattctggatgaaaaaacgataggtaagaattacgacttaccacaaactagtcaattggttgtaccgacagctggagccgttgtgcctgcgacattggcagtgaagagcggggataaaggattagtaaccttaaaacagaaagagggtaaacccgtccccttcggcgctgtgattagttatagcaaagacactgaaaatatggccggcattgtaggtgaagatggtattgcttatgtttctggcttgagtgcggaaggcgagtttaatgtgaaatggggttattctaaagatcaatcctgtatcgcaaaataccaacttcctgcgaagaaaagtgcatcagggttataccagatagcggcgacatgtttatag

SEQ ID NO: 474611 - DNA, 804 bp, Shigella flexneri
atggctatccctgcatttggtttaggtactttccgtctgaaagacgacgttgttatttcatctgtgaaaacggcgcttgaacttggttatcgcgcaattgataccgcacaaatctatgataacgaagccgcagtaggtcaggcgattgcagaaagtggcgtgccacgtcatgaactctacatcaccactaaaatctggattgaaaatctcagcaaagacaaattgatcccgagtctgaaagagagcctgcaaaaattgcgtaccgattatgttgatctgacgctaatccactggccgtcaccaaacgatgaagtctctgttgaagagtttatgcaggcgctgctggaagccaaaaaacaagggctgacgcgtgagatcggtatttccaacttcacgatcccattgatggaaaaagcgattgctgctgttggcgctgaaaacatcgctaccaaccagattgaactctctccttatctgcaaaaccgtaaagtggttgcctgggctaaacagcacggtattcatatcacttcctatatgacgctggcttatggtaaggcactgaaagatgaggttattgctcgtattgcagctaaacacaatgcgattccggcacaagtgattctggcgtgggctatgggggaaggttactcagtaattccttcttctactaaacgtaaaaacctggaaagtaatcttaaggcacaaaatttacagcttgatgccgaagataaaaaagcgatcgccgcactggattgcaacgaccgcctggttagcccggaaggtctggctcctgaatgggattaa

SEQ ID NO: 474612 - DNA, 1053 bp, Shigella flexneri
atgagttctgccaagaagatcgggctatttgcctgtaccggtgttgttgccggtaatatgatggggagcggtattgcattattacctgcgaacctagcaagtatcggtggtattgctatctggggttggattatctctattattggtgcaatgtcgctggcgtatgtatatgcccgactggcaacaaaaaacccgcaacaaggtggcccaattgcttatgccggagaaatttcccctgcatttggttttcagacaggtgttctttattaccatgctaactggattggtaacctggcgattggtattaccgctgtatcttatctttccaccttcttcccagtattaaatgatcctgttccggcgggtatcgcctgtattgctatcgtctgggtatttacctttgtaaatatgctcggcggtacctgggtaagccgtttaaccactattggtctggtgctggttcttattcctgtggtgatgactgctattgttggctggcattggtttgatgcggcaacttatgcagctaactggaatactgcggataccactgatggtcatgcgatcattaaaagtattctgctctgcctgtgggccttcgtgggtgttgaatccgcagcagtaagtactggtatggttaaaaacccgaaacgtaccgttccgctggcaaccatgctgggtactggtttagcaggtattgtttatatcgctgcgactcaggtgctttccggtatgtatccgtcttctgtaatggcggcttccggtgctccgtttgcaatcagtgcttcaactatcctcggtaactgggctgcgccgctggtttctgcattcaccgcctttgcgtgcctgacttctctgggctcctggatgatgttggtaggccaggcaggtgtacgtgccgctaacgacggtaacttcccgaaagtttatggtgaagtcgacagcaacggtattccgaaaaaaggtctgctgctggctgcagtgaaaatgactgccctgatgatcctcatcactctgatgaactctgccggtggtaaagcatctgacctgtga

SEQ ID NO: 474613 - DNA, 678 bp, Shigella flexneri
atgactattcgtcgcgatctccatcaggaagatgaacctctgccactgaccctactgggtggctatattgtaatggtgaataaacccgcgccatccatgccagtaatccatgacgttccaaaaaatcatcgtgatgacttacctattgcaattctggctgccggaatggttaatgaaaatgatctgatcttctttgataatggccaggagataccactcgttataagcatgatcccggatgcaatcaccttcaccggcatctgttactcacatcgcgtctttgttgcgttgaatgaaaagcctaatgtaacagcaatactttgtggtggtacgtatcgtgccagaagtgatgctttttacgatgccagtaactcttcgccattagactctctcaatccgcgaaaaatatttatttccgccagcggtgtgcataatcactttggcgtcagctggtttaaccctgaagatcttgccactaagcgtaaagtgatgaaccgtggactacggaaaattttgctcgcccgccacgcgttgttcgatgaagtggcctctgccagcctcgcaccgatctctgcatttgacgttctgattagcgatcgtccgttaccggcagattatgttacgcactgccagaatggttctgtaaagatcattacacctgattcagaagacgaatga

SEQ ID NO: 474614 - DNA, 957 bp, Shigella flexneri
atgaatataacaactctgactaatagtatttccaccccatcattcagtccaaacaataccaacggttcatcaaccgaaacagttaattctgatataaaaacaacgaccagttctcatcctgtaagttcccttactatgctcaacgacacccttcataatatcagaacaacaaatcaggcattaaagaaagagctttcacaaaaaacgttgactaaaacatcgctagaagaaatagcattacattcatctcagattagcatggatgtaaataaatccgctcaactattgaatattctttccaggaacgaatatccaattaataaagacgcaagagaattattacattcagctccgaaagaagccgagcttgatggagatcaaatgatatctcatagagaactgtgggctaaaattgcaaactccatcaataatattaatgaacagtatctgaaagtatatgaacatgccgttagttcatatactcaaatgtatcaagattttagcgctgttctttccagtcttgccggctggatctctcccggaggtaacgacggaaactccgtgaaattacaagtcaactcgcttaaaaaggcattggaagaactcaaggaaaaatataaagataaaccgctatatccagcaaataatactgttagtcaggaacaagcaaataaatggcttacagaattaggtggaacaatcggcaaggtatctcaaaaaaacgggggatatgttgtcagtataaacatgaccccaatagacaatgtgctagataatgcaaaatatcaggcatggaatgccggattctctgccgaagatgaaacaatgaaaaacaatcttcaaactttagttcaaaaatacagtaatgccaatagtatttttgataatttagtaaaggttttgagtagtacaataagctcatgtacagatacagataaactttttctccatttctga

SEQ ID NO: 474615 - DNA, 192 bp, Shigella flexneri
atgaatatcagcacagaaacccgcgaaattctgcgtaattacagggccgtgattaatgcgcggcgtcgtgaaatggggcagaaaccgctcaccaccgcgcagattattgatgaaatctgcgattttgtggcgaatcagcaggcggttttcctgggcggtcactacatcttacagggcagcagaaacaggtga

SEQ ID NO: 474616 - DNA, 423 bp, Shigella flexneri
atgtactgtactgttaaagaaattatccgcgaagtgctggatacagacgtgccggacagtgaatgcgtttttgccgtggtgctgacccgtggggatgtgcgtcacatagcccaggactggagtctgacagacgatgagctggaaaccgtcatgcagcggctggacgatgcctttgagcatggtgcggatgtcagcgttgttcacgacgttgttcgtgaactgatggaggaaaagcacgccagccgtcaggtgacagtcccggcggtgatgctggaaaaagtgatggcgctggcaggcagtgaaatgaagcgcctgtatgccgtcgggagtgagaacgggggcgacggtgatgcgttcgtcagggaagaacgcgaagcaatggacgttgtgttacaggcgctggacggggagcacatgtcatga

SEQ ID NO: 474617 - DNA, 426 bp, Shigella flexneri
atgcaatatgcgaaacctgtcactctgaatgttgaagagtgcgaccgtctctcctttctgccttacctgtttggcctggattttctgtatgccgaggcatctgtgtacgcgctggcgaaaaaaatgatgccggaatatgaaggcggattctggcacttcatccgcctgccggacggtggcggttacatgatgccggatggcgaccgttttcatctggtcaacggtgaaaactggtttgaccgtaccgtgagtgctgatgccgcaggcatcattttgacttcccttgtgattaaccgccagttgtggctgtaccacgacagcggggatgcaggactgacccatctttaccggatgcgcgatgcgcagttgtggcgtcacatcgaatttcaccccgaatgcaacgcgatttacgcggcgctggactga

SEQ ID NO: 474618 - DNA, 495 bp, Shigella flexneri
atgcagttcggtaaaagctcagaaaaacttcgcgcaaaaaccgaacggtggatacaggaagcacaggagcgaatcagcgcacttcaggaggaaatggcggaaacactgggtgagcaatatgacccggtactgccatcttccctgcgccagtcttcagcccgtaaaccgttaccagcctcacttccccgtgccccccgggtcatccggccggaagaggaatgctgtccggcctgtggtggtgaactcagtccactgggatgtgatgtgtcagagcagctggagcttatcagcagcgcctttaaggttatcgaaaaacaacgccctaaactggcctgtcgccggtgcgaccatatcgtgcaggcaccggtgccttcaaaacccattgcacgcagttatgccggagcggggcttctggcccatgttgttaccggaaagtatgcagaccatctgctattataccgccaaagtgatctactattccacacagctatttag

SEQ ID NO: 474619 - DNA, 375 bp, Shigella flexneri; identical to SEQ ID NO: 13405

SEQ ID NO: 474620 - DNA, 315 bp, Shigella flexneri
atgtacaatgatgttcttttccctggagaagacataaacaaaccgatcagcatcgctgcagccaaccgattcgtaaatagaataaggggagggatggatctaggttactggcgaacacatgatttcagaagaacgcttgttacacggctgtccgagatgaatgtcgagcctcatgttactgagcgaatgctcggtcatgaacttggcgggataatgtccgtatacaataaacacgactggatagaggctcagcgcaaagcgtatgagcttcacgctgataaattgttctggcacatcaggagcatttctgattaa

SEQ ID NO: 474621 - DNA, 378 bp, Shigella flexneri
atgcagtcgttgtacgactggatacagttgcagaggaaaacgctgtcgaaacatgcggagatggcgaaggcgttcgactatatcctgaatcactggaatgcgctgaacgagttctgtcgtgacggctgggtggaaatagacaacaacatcggtgaaaacgcgttacgatcggtggcggttggaagaaaaaattatctctttttcggctcagacaagggaggagaaagtgcggcgatcatctacagtctgctggtcacctgcaaacagaacgaagtggagccggaggactggttgcgcgaagtgatcgagaagctcaatgactggccgtcgaaccaagtgcatgaactgctgccctggaacttctcgtctgtaaaataa

SEQ ID NO: 474622 - DNA, 657 bp, Shigella flexneri; identical to SEQ ID NO: 9983

SEQ ID NO: 474623 - DNA, 510 bp, Shigella flexneri; identical to SEQ ID NO: 9982

SEQ ID NO: 474624 - DNA, 672 bp, Shigella flexneri
atgttagatgagatgaatgattttcgtctgacaccgacaggaacgctcaaaatcaatgccgcccgggtagctgcacgtatatttttaatgcctttactggttggtttcacacgtgaatatcctgatattaaagtagagctcacaactgacgattctcttatcgatatcgtccaacagggctttgacgctggcgttcgacttagtggcatcgtcgaaaaagatatgatcagcgtggcgatcggcccaccagtgaaattatgtgtagcagcaacgccagagtactttgcaagatatggcaaaccccgccatcctcatgatctgcttaatcatcaatgtgttgtttttcgttatcccagcggcaaacctttccactggcaatttgcaaaggagctggaaattgctgtcgcaggaaatatcattctggatgatgttgatgctgaactggaggccgttttgatgggtgctggtatcgggtatctgctctatgaacagatcaaggagtaccttgatactggtcgtttagaatgtgtactggaagactggatcacagagcgtccaggcttccaagtctattacccaaaccgccagtatatgtcctgcggcttgcgcgcatttctcgattatgtaaaaacgggtcagatctgccagagtcagcgtcaccgaccacaataa

SEQ ID NO: 474625 - DNA, 438 bp, Shigella flexneri
atgccattctatttcaggaaggagtgtccgttaaactcaggctacctcaccctggtgctggtggcaattctgattatgctgccgactctcggcatcggtgatatgaacaatctctataaatggctgttgaatcttaactcggtagtgatgccgctgcgttatttatgggtatttgttgcatttattgcagtcgttcgcctggcgcagaaatataaaccagaatatgtctttattcgtaataagcctctggcaatgaccgtcgggatttggtgttttgcctttaccgcctgtgcctgtttgacggggatcttcccgaaaatggaagccttcactgcagagtggaccttccagttggcgctgaatgttgcaacgccgtttgtgctggtaggattaggactgatattcccgctgctggcgcgtaaagcgaatagcaaataa

SEQ ID NO: 474626 - DNA, 543 bp, Shigella flexneri
atgcggaatggtgatgagaatgctgatgacattgcagggcgcttcaccgggacgtataccggagctgatgcgcgatcttgcaagtatgggacaacttgtgaaattaccgacgagaaggggaagggccttcccgagagtggtaaaggagaggccctggaaataccccacagccccgaaaaagagccagtcagttgcttaactgactggcattacaccgttagtgaaacgtttagtgtagtcatgacaaaagatcctggtgcggcctgtactgagcaattcaatattttagggagctttttcactacggatattttgagtgattatagccatctggatatgggtaatggactgctattgaagatatttcataaagatggaacagcaacggaatttaaccgcttctcacaatttgcttctttttcatcgtctagtgcaccttcggtcaccgcaccattcagggcagaacttagtgcgaacccggcagagactgttgttgagggaccgtttagtaaagacgtaatcctcaaaatcacctataactag

SEQ ID NO: 474627 - DNA, 201 bp, Shigella flexneri
atggatcatagtcttaattctttgaataatttcgatttcctggcgcgtagttttgccagaatgcacgcagaaggtcgcccggtcgatattctggctgttactggtaacatggatgaagaacatagaacctggttttgcgcacgttatgcctggtattgccaacagatgatgcaggcaagagagctggagttagagcactga

SEQ ID NO: 474628 - DNA, 327 bp, Shigella flexneri
atgactaaaaatactcgtttttcccccgaagtccgtcaacgggcagtccgtatggttctggaaagtcagggcgaatatgactcacaatgggcgacaatttgttccattgctccaaagattggctgtacgccggagactctgcgtgtctggggtcgccagcatgagcgggataccgggggcggtgatggagggctcaccaccgctgaacgtcagcgtctgaaagagccggagcgtgaaaatcgtgaactgcgccgcagtaacgatatccttcgccaggcttccgcttattttgcgaaggcggagttcgaccacctctggaaaaaatga

SEQ ID NO: 474629 - DNA, 360 bp, Shigella flexneri
atgatctggcagcctgagttcacagataaaacactctccaggaaacccggggcggttcagaaagtaaatgaaacagatgctgaatacctggtgcgtaaattcgatgagcttgaagctaaatgtgcagcacaggaaaacaaagtaataccagtgtcaactgaactgccaccagcaaatgaaagtgttttgttattcgatgctaacggagaaggctggctaattggctggcgttctctctggtacacctggggacaaaaagaaaccggagaatggcagtggacatttcaggtcggggaccttgaaaacgtcaatatcactcactgggcagtaatgccaaaagcaccggaggctggagcataa

SEQ ID NO: 474630 - DNA, 306 bp, Shigella flexneri; identical to SEQ ID NO: 399824

SEQ ID NO: 474631 - DNA, 351 bp, Shigella flexneri
atggagccatacagcctcacactcgatgaggcctgtcattttctcaagatatccagaccgactgccattaactggatacgcacagggcgtcttcaggcaacacgcaaagatcccactaagaataaatctccttacctcacaacacgacaagcctgcattgcggctcttcagtctccgctgcatactgtccaggtgagcgcgggtgatggcataacagaggaaagaaaatgtcactcttccgcagaggtgaaatatggtacgccagtttcacattgccgaacggtaaaagatttaaacagtctcttggaacaaaggacaaaaggcaggcgacagaactccatgacaagctaa

SEQ ID NO: 474632 - DNA, 327 bp, Shigella flexneri; identical to SEQ ID NO: 474582

SEQ ID NO: 474633 - DNA, 189 bp, Shigella flexneri; identical to SEQ ID NO: 469030

SEQ ID NO: 474634 - DNA, 888 bp, Shigella flexneri
atgactctgaggtgtctgttaaacccgtggcgattcagtgagcgcattctgaccgaccgtgaaaatggtgaaaaaggcgataattctcaagatacctcttatgcccgtgtaggcgtgaaaggtgaaactcagatcaaccctgaaatgactggttacggtcagtttgaactagacctggaagcatcaaacagacacaaccctgaccaaactcgtttggcatatgctggtttgagttacaaagattttggttcattcgactacagtcgtaatgtcggtgtcgcgtatgatgcagaagcatttactgatatgtttgttgagtggggcggtgactcatgggctggtactgacctgttcatgaccaaccgtaccaacggtgttgcaacctatcgtaacacagatttctttggcatggttgaaggtctaaattttgctctgcaatatcagggtaaaaatgaaggtacaggcaactacaaagcaaatggcgatggccatggtttatctgcaacttacactattgacggtttctcatttgctggtgcttatgcaaactctgaccgtactgattggcagtctggtgatggtaaaggcgaaagagccgaagtttgggcgttgtcaacaaaatatgacgctaacaatgtttatgctgctgtgatgtacggtgaatctcacaacatgaattccgacgacggtgatgttgtgaacaaaacacaaaacttcgaagctgttctgcaatatcagttcgactttggtctgcgtccatccatcggttactcctattctaaagcactggacgtagcaggttggatttgcccctatatttccagacatctgttatcacttaacccattacaagcccgctgccgcagatattcccgtggcgagcgataa

SEQ ID NO: 474635 - DNA, 279 bp, Shigella flexneri; identical to SEQ ID NO: 127146

SEQ ID NO: 474636 - DNA, 288 bp, Shigella flexneri
gtgttcactgttaacggacaggtaattccgttaaattacggaaacttcgatgcccgctataaatatcgaacagagggggtacaggatgtacggtatggccatgaaatgtattacagccccggcagtaacaccgtttcgtggagattttgcgcaccttcgggacacgggctgtcagggatggcgatatcggataccggccgtaactcagcggataacgttgacggtgtgtattaccgaccactgcaaaaactgattaatggcacctggtataacgtagcgagtatttaa

SEQ ID NO: 474637 - DNA, 585 bp, Shigella flexneri
gtggaaaaaatcctgaaccgctccggcatccagccgttgcaccggaagtgttcgtttgcgaattaccgggcgcagaacgacggtcagcgacatgcactgagtcaggcgaaatccatagctgacgaactgatgacaggctgtacgaattttgtgttcagcggtaagcccggcaccggaaaaaatcatcttgcagccgcgattggcaaccggctgatggcgaaggggcgtagcgtgattatcgtcaccgtgtccgatgtcatgagcgtgttgcatgagagctacgacaacggcaaatccggtgaaaaatttttacaggagctttgtggtgttgacctgctggtcctggatgaaattggcatgcagcgggatacgaaaaacgagcaggtggtactgaaccagattgttgatcgccggacggcatcgttacgcggtgtggggatgctgacaaatattaaccatgcagcgatgaatacacttctcggcgagcgggtgatggatcgcatggtcatgaaaggcgggcgctgggttaattttaactgggagagctggcgtccgaatgttagccattcgagggttgttaagtag

SEQ ID NO: 474638 - DNA, 423 bp, Shigella flexneri
atggcgaaaccttttactcccgaacagcgggaagaactgaagacgcgaattgtggaactcgtgcatcaggacggtcgggtcacgattcggcagttgtccgatgaaacaggtatcagtcgtgcgtctgtcggtcgcttatgcatagaactggtcgcaagtggtgatgtatataattctggctacggcttattcccgtctgaacaggctcgcaaggactggcaaagcgcccgcaaaaaactctcgagagtaaaggtgaggaaaccggttgttgttgatccggaccttatctggtcattacctgacggagaaatacgccgctacgacaggcgcctgaatataatctgtcgcgagtgccggaagagcgaagctatgcagcgtgtactggctttctatcagggtaattttcaggaggcgatactgtga

SEQ ID NO: 474639 - DNA, 336 bp, Shigella flexneri
atggaacaagccctgaatccgatcatgaaagcagtcattgaacccttaatcaaactcctttcagatgcatttacaaaaatgctcgaaggcttgggcgtcgactcgaaaaaagccaaaatgattggctctattctgggggcaatcgcaggcgctcttgtcctagttgcagcagtcgttctcgtagccactgttggtaaacaggcagcagcaaaacttgcagaaaatattggcaaaataataggtaaaaccctcacagaccttataccaaagtttctcaagaatttttcttctcaactggacgatttaatcactaatgctggcttatggcggatatga

SEQ ID NO: 474640 - DNA, 234 bp, Shigella flexneri
atgcagtctgaacgtatttatttggtatgggcccatcctcgtcatgattcattgaccgcaaatattgctgatgcgatccatcagcgggcaatggagcggaaaatacaggtgacggaactcgatttatatcggcgtaatttcaacccggtgatgacgtcggaagatgaaccagactggaagaatatggataaacgttattctccaggtaagcgccccgagaagtacgtagcgtaa

SEQ ID NO: 474641 - DNA, 147 bp, Shigella flexneri
atgcggatgaatatgtctgactttgccacttcctttgccgtggcccgtaatcaaagctttcgtgcagcaggcgatgagttaggcttatcctcgtccgccattagccatagtattaaaacactggaacaacgtcttaaaattcggtaa

SEQ ID NO: 474642 - DNA, 354 bp, Shigella flexneri
atgccactgctggataagctgcgtgagcagtacggggtcggaccggtatgcagtgaactgcatattgccccgtcaacgtattaccactgtcagcaacagcgacatcatccggataaacgcagtgcccgtgcgcagcgcgatgactggctgaagaaagagatacagcgcgtatacgatgaaaatcacaaggtatacggtgtaaagtctggcgtcagttgttacgggaaggtatcagagtggccagatgcactgtggcacgtctcatggcggttatgggacttgccggtgttctccggggtaaaaaggtccgtacgaccatcagccggaaagccgttgccgcaggcgaccgcgtaa

SEQ ID NO: 474643 - DNA, 327 bp, Shigella flexneri
atgactaaaaatactcgtttttcccccgaagtccgtcaacgggcagtccgtatggttctggaaagtcagggcgaatatgactcacaatgggcgacaatttgttccattgctccaaagattggctgtacgccggagactctgcgtgtctggggtcgccagcatgagcgggataccgggggcggtgatggagggctcaccaccgctgaacgtcagcgtctgaaagagccggaacgtgaaaatcgtgaactgcgccgcagtaacaatatccttcgcctggcttccgcttattttgcaaaggcggagttcgaccgcctctggaaaaaataa

SEQ ID NO: 474644 - DNA, 219 bp, Shigella flexneri
atgcctgtcccggtggcactgactgatacgccggagccgaccagaccagttacaaatcccttctggcgtaacaagcatgatgagcgccctgagggggctcccggaaacgtcccacggtgcgagctgcatcttaaatcaggtgtggtaaaactgtttgaccctctcactccggaactgttacgggcgctaatccgcgaaatgaaagggggtatccgatga

SEQ ID NO: 474645 - DNA, 618 bp, Shigella flexneri
atggtagtgtccgctattgccagtacacctcagtatgtggagcaagcgaaagataattctttgcaaccttcccaaacggtaacggactctctcaaggtagcggacttatccaccattattcaggaacaaccctctttcgtagcagaaacccgtgcggctgacaaaaatacagatgctgttttaccttggctggcgaaagatattgctgtcgtttttccgcccgaagttgtacacaccacgttaagtcatcgccgctttcccggagttcctgttcagcaagcagacaaattgacccaattacgtcgcttagcctgtagcgtgtcgcaacgggataataaaacagccacatttgacttcagcacctgttctttagaatggcaaaacaccgtcgcccaagcgatcagtcagatcgacggcctgaaaacaacacagctaccatcaccagtaatggctgtactcacggcacttgaaatgaaatgcacaagatataaagtgcgtgaggatgttatggatcagatcgtccaggaaggcagtctggaatatgctactgatgtaataatacaccttcaacagattgatattaaatgggatggtaatgctgccaacttactgatttag

SEQ ID NO: 474646 - DNA, 300 bp, Shigella flexneri; identical to SEQ ID NO: 84330

SEQ ID NO: 474647 - DNA, 846 bp, Shigella flexneri
ttgccccattgtgctgatggtgcggcggcaaccacgggcgacaatgccgatgggaggactgctgtaaaatcggcaaagccatttcctgtaagtaaacgacaggtatgggaagcttataaacgagtaaaagccaaccgtggggcggcaggcattgacgggcagacactggccgggtttgacgagaatgttacagacaatctctacaaactgtggaacagaatggcttccggcagttatatgccgcaggcggtaaggcgtgtggacattcccaaagctgacggtggtgtacgtccgctcggtattccggccgtgtcggaccggatcgcccagatggtcgttaagcagatactcgagccggtactggaacccctgttccatgcagactcgtatggttatcgaccgggtaaatccgcacaccaggcgattgcgcaggcgaggaaacgctgctggaagtttgactgggtggtggaagtcgatattaaaggcttctttgatgatatcgatcatgacctgctactgaagacagtgcagcatcatactcaggcacgctgggtggtgatgtacattgagcgcaggctgaaggcaccggtgcaaatgccggatggagcaatgctggcacggggtcgaggaacgccgcagggcggcgtaatctcccccctgctctcaaatctgctcctgcactatgcctttgatatgtggatgcaacgtcagtttcccggcgttcccttcgaaaggtacgccgatgatgttgtatgccactggatttgcccctatatttccagacatctgttatcacttaacccattacaagcccgctgccgcagatattcccgtggcgagcgataa

SEQ ID NO: 474648 - DNA, 186 bp, Shigella flexneri
atgtacggaacatgcgaaacgctctgccgggcgctggcagcaaagtattcgggagacacgccgctgatgctggttatctggtccccggaagagattcaggccctcgctgacggaatggatatttccctgtccgatcatgaaatcaggaccgtcctggcgcacctggaggacatcccggaagactag

SEQ ID NO: 474649 - DNA, 216 bp, Shigella flexneri; identical to SEQ ID NO: 474498

SEQ ID NO: 474650 - DNA, 462 bp, Shigella flexneri
atgctccacacactcactgaccagatacatttccaccgacgaaaaacgagcgccccggttcaggatggcatcgagcaccacgggcaggttttcgtcgtcttcatcgagccagcaggggtgatcgctttccttcacaaccaggcgaaagcggcgcgtctggcgggtcagcaacgtctgaccggttgtggtcagcgccgccctgatacgccgcgcatcttctgccacccggcaactgacactgcgtaccgcatcgtgcaccgcatcaagaactgccctgatttcgtcttcggtcagccattcaccggcatacgggaaagacacctgcgttccgtccgccggaagtaccggcagcgactgccactgactgccggacagaacaagttccgctccggttccggtcagtttctgaatggcggaggccaggtgcggcggcagcacgccatcgtggcggttaacgagtaa

SEQ ID NO: 474651 - DNA, 618 bp, Shigella flexneri
atgtctctggcgcaatgcccgggctttttattcgcacatcgtgaggaatgcaccgtggaaattaaaaaaatcattaatccccgttataccgaaagtggcgcagtagactgtgacgttttttttgacgacagggaccaggcagtcccctacacagccaccgctgatgatgtcgcaccgacgggtcagcgaatctggcaggaactgcaaagtggcaaatggggtgagatagccccattcactgtgacaccagaaatgctggaagcggccagagaggccagacgtcaggaaattgaagcatggcgcacagaacaggaggcgaagccgttcacgtttgaatggaacggtcgtatctggaatgctggccccaactcactgggccgcctgtccccggtagtcatgctggcaaaatctgtcacagcacaaacacatatggcgtggagcgatgccgataatcagcaggtgaaactgtcgatgccggaactggaagaactggcggcagcaatggtgcaggcgcaggtcgatcgcaacgatgagatttatcgccgtcagcgtgaaatgaaagaggagctgagcggtctggatgatttggcttcaattcgggcgtttgacgttgagtaa

SEQ ID NO: 474652 - DNA, 180 bp, Shigella flexneri
atgaataagccgcaactggcggaatcacagaagaccgctttgcttaccgaagcggagtctgtcatccggccgccggggcgtgctgtcaggctgaacagggaaacggatgaatcaggggaggcccgggggcgggcctccgtttttccggagtcagtccggtctgtggtttatgcgatgtga

SEQ ID NO: 474653 - DNA, 816 bp, Shigella flexneri; identical to SEQ ID NO: 6090

SEQ ID NO: 474654 - DNA, 141 bp, Shigella flexneri
atgtcagaagaaaataaagaaaatggatttaatcatgtcaaaacattcaccaaaattatatttattttttctgtattagtttttaatgataacgaatctaaaattaccgatgccgccgtcaatttatttatccagatttaa

SEQ ID NO: 474655 - DNA, 672 bp, Shigella flexneri
atgcagtacccgattaacgagatgttccagaccctgcaaggtgagggttactttaccggcgtccccgccatttttattcgtttacagggatgcccggttggctgtgcctggtgcgacaccaaacacacctgggaaaagcttgaggatcgggaagtctcccttttcagcattctggcgaagaccaaagagagtgataagtggggggcggcgagcagtgaagacttgctggctgtcattggtcgtcagggatataccgcgcggcatgtggtgattacgggtggtgagccttgcattcatgatttgctgccactgactgacctgctcgaaaagaacggttttagctgccagatcgaaaccagtggaactcatgaagtacgctgcacaccgaatacctgggttaccgtatcgccaaagctgaacatgcgcggcggctatgaagtgttgtcacaggcactggagcgagccaacgaaatcaagcatccagtggggcgcgtacgcgatattgaagcactggatgaactactggcaacgctgaccgatgataaaccgcgagtcattgcactgcagccgattagccaaaaggatgatgccacacgattgtgcattgaaacctgtattgcgcgtaattggcgtttgtcgatgcaaacacataaatatttaaatattgcctga

SEQ ID NO: 474656 - DNA, 189 bp, Shigella flexneri; identical to SEQ ID NO: 469030

SEQ ID NO: 474657 - DNA, 321 bp, Shigella flexneri
atgaggaataaggctgataacaaaaaaaggaacttccttacccatagtgaaatcgagtcactccttaaagcagcaaataccgggcctcatgcaacacgtaattattgtctgattttgctttgttttattcatggtttccgggcgagtgaaatttgtcgattgaggatttcggatattgatcttaaagcaaagtgtatatatatccatcgattaaaaaaaggcttttcaacaacgcacccgctattgaacaaagaagttcaggctttaaaaaactggttgagtactgatgaatcccctaatgattttggtaaaaatcattaa

SEQ ID NO: 474658 - DNA, 477 bp, Shigella flexneri; identical to SEQ ID NO: 5326

SEQ ID NO: 474659 - DNA, 891 bp, Shigella flexneri
atgaatagtaatatttacgctgtcattgtgacatataatcccgaacttaaaaatctgaatgcactgatcactgaactaaaggagcaaaattgttacgttgtagtagtcgataataggactaatttcaccttgaaagataaattagcagacattgaaaaagttcatttaatttgtcttggtaggaatgaaggtatagcaaaagcacaaaatattgggattcgatattctcttgaaaaaggggcagagaagataattttttttgatcaagatagccgtattcgcaatgagtttatcaaaaaactttcctgctatatggataatgaaaatgcaaaaatagctggcccagtttttattgatagagataagtcacattattatcctatttgtaatatcaaaaaaaatggtcttcgagagaaaattcatgtcactgaaggacagacaccgtttaaaagttcagtaacaatctcatccggaaccatggtttcaaaagaagtttttgagattgttggaatgatggatgaggaactttttattgattatgtcgatacagaatggtgtcttagatgcttaaactatggcatattagttcatatcattcctgatatagaaatggttcatgctattggggataagtcagtaaaaatctgtgggattaacataccaattcactcgccagtacgtcgttattatcgagtaagaaatgcatttcttttgcttagaaaaaatcatgtgcctcttttactctctattagggaagttgttttttctttaattcatacgactttaattatcgcaactcaaaaaaataaaattgaatatatgaaaaaacatattttggctacgctggatggaataagaggaattactgggggcggtcgttataatgcatag

SEQ ID NO: 474660 - DNA, 645 bp, Shigella flexneri
atgagcacaaaaccactcttcctgttacggaaagcgaaaaaatcatccggtgaacctgacgtcgtcctgtgggcaagcgacgattttgaatcgaccagcaccactctggactatctgctcgttaagtcaggtaaaaaactgagcaactattttaaagctgttgccacaaattttcctgtcgttaatgaccttccccctgaaggtgagatcgattttacctggagtgaacgctatcaactcagcaaagactccatgacatgggaactaaaaccgggagcagcgccagacgacgttcaccaccaggataatgctcaagaaaccaaagaactggcgggaggccaggaagaaaacgcgcaggcagacgcccacgaggattgccaggattgcgaagtctctgtagccactttgcggttcacacagcgtcttctgcacatttttacgtatgctgccggggatcggaaatacctgcatcatgccacccgtgaacaacgcaaacacattactgctcttgagatggatcaggaaaacagctatgtccagaatctgctgttggccatacgcggcatggcagaaccgacaactctggataatgccgccctgctccgcctgactgatgcaattaaggctgaggtgtactggcaatag

SEQ ID NO: 474661 - DNA, 327 bp, Shigella flexneri
atgactaaaaatactcgtttttcccccgaagtccgtcaacgggcagtccgtatggttctggaaagtcagggcgaatatgactcacaatgggcgacaatttgttccattgctccaaagattggctgtacgccggagactctgcgtgtctgggttcgccagcatgagcgggataccgggggcggtgatggagggctcgccaccgctgaacgtcagcgtctgaaagagccggagcgtgaaaatcgtgaactgcgccgcagtaacgatatccttcgccaggcttccgcttattttgcgaaggcggagttcgaccgcctctggaaaaaatga

SEQ ID NO: 474662 - DNA, 219 bp, Shigella flexneri; identical to SEQ ID NO: 474644

SEQ ID NO: 474663 - DNA, 213 bp, Shigella flexneri
atgataacgctgccgaccggtaccaaaatctggatcatcgctggcatcacagatatgcgttgtggcttcaatggcctggcttcgaaggtgcagaacacgctgaaagatgacccgttctccgggcatatcttcgtcttccggggccgcagtggcaaaatggtgaaaatactgtgtgaaccgccccgggtttcctggagagtgttttatctgtga

SEQ ID NO: 474664 - DNA, 372 bp, Shigella flexneri; identical to SEQ ID NO: 467509

SEQ ID NO: 474665 - DNA, 243 bp, Shigella flexneri; identical to SEQ ID NO: 7701

SEQ ID NO: 474666 - DNA, 324 bp, Shigella flexneri; identical to SEQ ID NO: 239471

SEQ ID NO: 474667 - DNA, 396 bp, Shigella flexneri
atgaatgtggtctcaaacacccaactgcttgaacagtgtatcgccgatttttttacgcttagtgatgagcataagaaagccagagtattacttgatactctggcctgttcctgtccggccaggatttttggcgggatggtgcgtgacttaggcttgtatggcgtcgatggattctcttcagaccttgatatcgtcatcggtcgctcccgtgaggaactcttccagacattggctgaactgcccgtcaaacaactgcgttttaataagtttggtgggatccgttttcgttatcacgacttcgaatttgatatctggaacctcaatgagacatgggcattccaggaaaaacttatattttgtgaggatgaatcaagtctgttaaatgaggtagcctga

SEQ ID NO: 474668 - DNA, 303 bp, Shigella flexneri; identical to SEQ ID NO: 473532

SEQ ID NO: 474669 - DNA, 684 bp, Shigella flexneri
atgtcccgttttgtcctcggtaactgcatcgatgttatggcccgtattcctgataacgccattgatttcatcctcaccgatccgccatatctcgtcggttttcgtgaccgtcaggggcgtaccattgctggtgataaaactgatgaatggctgcaaccggcctgtaatgaaatgtaccgcgtactcaaaaaagacgcgttaatggtgagcttctatggctggaatcgcgtcgatcgttttatgtctgcctggaaaaatgcgggattcagcgttgttggtcacctggtcttcaccaaaaactacacatcgaaggccgcatatgtgggctatcgccacgaatgtgcctacatcctggcaaaaggccgtccacgtctgccacaaaacccgctgccggacgtgctgggctggaaatattcgggcaatcgccatcacccgacggaaaagcccgttaccagcctgcaaccactgattgagagcttcacacacccgaatgcgatagtgctggacccgtttgcaggcagcggttcaacctgcgtcgccgccctccagtccggacgccggtatatcggtatcgagctgcttgagcagtatcaccgtgccggacagcaacgactggctgccgtacagcgggccatgcagcagggggccgcgaatgataactggtttgaaccggaggctgcgtaa

SEQ ID NO: 474670 - DNA, 222 bp, Shigella flexneri; identical to SEQ ID NO: 8360

SEQ ID NO: 474671 - DNA, 390 bp, Shigella flexneri
ttgaactataccaacaccgaaatgaaagaagcgatagcgcagcgtaaaccagtggttaccaccgctgggccgcgtagtctgattttccgtggggccattaccggtgtagataccagcaaagaagggctgcaattctatgaagtggttcctgttgcattagtggttgcggggacgcaaatggctacaggccaccgtaccatggatactcgcctctattttgaaggtgagctgattgatgcagcgactaataaaccggttatcaaagtcgttcgtcagggcgaaggtaaagacctgaataacgaaagtacgccaatggctttcgaaaatattaaacaagttattgatgacatggcgaccgatgccaccatgtttgacgttaacaaaaagtag

SEQ ID NO: 474672 - DNA, 135 bp, Shigella flexneri
atgaacaatgaactccccgatgatattgagctgcttaaagccatgttgcgtaagcaacagagtcggcttcgacagtatgcctgtcaggtcgcgggctatgagcaggaaaggtgcacgcagatgacactccggtga

SEQ ID NO: 474673 - DNA, 351 bp, Shigella flexneri
atgataacgctgccgtccggtaccaaaatctggatcatcgctggcatcacagatatgcgttgtggcttcaatggcctggcttcgaaggtgcagaacacgctgaaagatgacccgttctccgggcatatcttcgtcttccggggccgcagtggcaaaatggtgaaaatactgtgggccgatcgtgacgggttatgcctgttcaccaaacgtctggccggtgacccgggaagggaaagtgcacctgacgccagctcagttatccatgctactggaggggatcgcgtggccacatcccaaacggacagaacggcctggcatccggatataacccgtgataaaacaagggaatga

SEQ ID NO: 474674 - DNA, 189 bp, Shigella flexneri; identical to SEQ ID NO: 469030

SEQ ID NO: 474675 - DNA, 168 bp, Shigella flexneri; identical to SEQ ID NO: 461648

SEQ ID NO: 474676 - DNA, 192 bp, Shigella flexneri
atgctggagaatgagtactctcagagggtggctgaccggctgaaagcatcaggtctgagcggtgatgcggatgcggagagggaagccggtgcacaggtgatgcgtgagactgaacagcagatttaccgtcagttgactgacgaggtactggccctgcgattgtctgaaaacggctcaaatcatatcgcataa

SEQ ID NO: 474677 - DNA, 258 bp, Shigella flexneri
atgattaccagttatgaagccactgttgtaactactgatgacattgttcacgaggttaatctggaaggaaagcgtattggctacgtgattaagacagaaaataaagaaaccccattcactgtggttgatatcgacggtccatcaggcaacgttaaaacacttaacgatggtgtaaaaaaaatgtgtctggtgcacataggaaagaatctgcccgcagaaaaaaaagccgaatttctggtaatgctgccaacttattga

SEQ ID NO: 474678 - DNA, 171 bp, Shigella flexneri
atgactaagaaaataaaatgtgcttatcacctttgcaataaagaaattgaagaaagcaaaatcattacaagaccacttcatttcatgcgtggagttataccaacgacggaaatgaaaaaatattgtagtgaaatctgtgccgaaaaagaccagatggcacacgaactttaa

SEQ ID NO: 474679 - DNA, 222 bp, Shigella flexneri
atgattgctcatcacttcggaactgatgaaataccacgtcagtgtgtgactcctggcgattatgttcttcatgaaggtcggacatatatcgcctcggcaaacaatattaaaaagcgaaaactttatattcgtagcctgactacaaaaacatgcatttctgactgcatgattaaagtcttcctcggtcgtgatggtttacctgtaaaggcggagtcatggtaa

SEQ ID NO: 474680 - DNA, 279 bp, Shigella flexneri; identical to SEQ ID NO: 236361

SEQ ID NO: 474681 - DNA, 276 bp, Shigella flexneri; identical to SEQ ID NO: 236360

SEQ ID NO: 474682 - DNA, 303 bp, Shigella flexneri
atgagcagaaaaacccaacgttactctacggagtttaaagccgaagccgtcaaaacggttcctgaaaatcagctttcgatcagtgaaggcgcttcccgattatctgttcctgaaggcactttaggacaatgggttaccgccgcaagaaaagggctcaatacaccaggctcccgcacagtggctgagctggaatctgaagttatgcaactgcgtaaggctttaaatgaagcacgacttgagcgagatatattaaaaaaagcaacagcgtattttgcacaggagtcgctgaaaaatacgcgttag

SEQ ID NO: 474683 - DNA, 180 bp, Shigella flexneri
atgaataagccgcaactggctgaatcacagaagaccgctttgcttaccgaagcggagtctgtcatccggcagccggggcgtgctgtcaggctgaacagggaaacggatgaatcaggggaggcccgggggcgggcctccgtttttccggagtcagtccggtctgtggtttatgcgatgtga

SEQ ID NO: 474684 - DNA, 366 bp, Shigella flexneri
atgctggaagcggccagagaggccagacgtcaggaaattgaagcatggcgcacagaacaggaggcgaagccgttcacgtttgaatggaacggtcgtatctggaatgctggccccgactcactgggccgcctgtccccggtagtcatgctggcaaaatctgtcacagcacaaacacatatggcgtggagcgatgccgataatcagcaggtgaaactgtcgatgccggaactggaagaactggcggcagcaatggtgcaggcgcaggtcgatcgcaacgatgagatttatcgccgtcagcgtgaaatgaaagaggagctgagcggtctggatgatttggcttcaattcgggcgtttgacgttgagtaa

SEQ ID NO: 474685 - DNA, 243 bp, Shigella flexneri
atgaggaaatatattccactggtattatttatcttttcatggccggtattgtctgcagatattcatggacgggttgttcgtgtactggacggtgataccatcgaggtcatggactcactgaaggcggtgcggatcaggctggtaaatattgatgcaccggaaaagaaacaggattatggccggtggtcaacagacatgatgaaatcactggtcgcaggaaaaacggttaccgtcacatattga

SEQ ID NO: 474686 - DNA, 402 bp, Shigella flexneri
atgcggtacggttcactggccggatggcgttattccgcctttctgatgcttccccgttttgccgatatttttcagcagggaaaccgatggcttaactggctggagaagcagccggtgcagatgagccgcctggaacattatgccggtcaggatgaaattggcctgcgttacaacagccaccggacaaaacgagaagaaaaccttgtgatgagtggcgacgagtttatggaaaggttctcctggcatgtggcggataaggggttccggatggtgatacggggtcctgagtccggtgaagcggcgattactggaagatgtggtgtacgccataacggagacagtgagaaaaacggcgaggcaaatcacaaggagagggatgtatcagcagtgactgaaggttga

SEQ ID NO: 474687 - DNA, 369 bp, Shigella flexneri
gtgtccgttaaactcaggctacctcagagcgcttatccgatttttgatcgtattgaagaaatggcatgggctcgtcactaccagcagatcgttcgtgaagaaaaagaaacggaactggcggacgacctggaaaaaggtctgcctcagcacctgtttgaatcgctctgcatcgaccatttgcaacgccacggtgccaataaacaggcaatcagccacgcatttgatgatgatgttgagtttcaggagcgcatggcagaacacatccggtacatggctgtgaagtggcacactgaatttggccacctgaacagaggtgatatgctcacctcagaacaacacaggtgctccaatgaaaaaaagaaattttag

SEQ ID NO: 474688 - DNA, 303 bp, Shigella flexneri; identical to SEQ ID NO: 473532

SEQ ID NO: 474689 - DNA, 186 bp, Shigella flexneri
gtggccgccggagaacaggttgttcctgcctctgaacttgctgccgccatgaagcagattaaagaactccagcgcctgctcggcaagaaaacgatgaaaaatgaactcctcaaagaagccgttgaatatggacgggcaaaaaagtggatagcgcacgcgcccttattgcccggggatggggagtaa

SEQ ID NO: 474690 - DNA, 381 bp, Shigella flexneri; identical to SEQ ID NO: 472764

SEQ ID NO: 474691 - DNA, 327 bp, Shigella flexneri
atgactaaaaatactcgtttttcccccgaagtccgtcaacgggcagtccgtatggttctggaaagtcagggcgaatatgactcacaatgggcgacaatttgttccattgccccaaagattggctgtacgccggagactctgcgtgtctgggttcgccagcatgagcgggataccgggggcggtgatggagggctcgccaccgctgaacgtcagcgtctgaaagagctggagcgtgaaaatcgtgaactgcgccgcagtaacgatatccttcgccaggcttccgcttattttgcgaaggcggagttcgaccgcctctggaaaaaatga

SEQ ID NO: 474692 - DNA, 366 bp, Shigella flexneri; identical to SEQ ID NO: 474684

SEQ ID NO: 474693 - DNA, 180 bp, Shigella flexneri
atgaataagccgcaactggcggaatcacagaagaccgctttgcttaccgaagcggagtctgtcatccggcagccggggcgtgctgtcaggctgaacagggaaacggatgaatccggggaggcccgggggcgggcctccgtttttccggagtcagtccggtctgtggtttatgcgatgtga

SEQ ID NO: 474694 - DNA, 195 bp, Shigella flexneri
atgctggagaatgagtaccctcagagggtggctgaccggctgaaagcatcaggtctgagcggtgatgcggatgcggagagggaagccggtgcacaggtgatgcgtgagactgaacagcagatttaccgtcagctgactgacgaggtactggccctgcgattgcctgaaaacggctcacaactgcaccattcataa

SEQ ID NO: 474695 - DNA, 267 bp, Shigella flexneri; identical to SEQ ID NO: 462029

SEQ ID NO: 474696 - DNA, 570 bp, Shigella flexneri
gtgataacagatgtctggaaatataggggcaaatccactgattgtgctgatcgtgcggatgattactaccatgaccgtctggcgctgactgttgataattcaacgatcgacgacaactacgaacactacacatataacggcacttacaataatgccgctgatactcatgttgtagacgtttacaacattggtacggctattactctggatcaggaagttgatctgtccatcactaataactctcacgttgcgggtattacgttgactcagggttatgagtgggaagatattgacgacaacactgtcagcactggcgtaaacagcagcgaagtgtttaataacaccatcactgttaaagattctaccgtaacctctggttcatggactgatgaaggtactactggttggttcggtaatacaggtaatgccagcgattatagtggtaaatctaactttgtcaccgtagatactgacggagatggtgttgctgatagcactattgcaagctgggatgatgttgcattagctgtagttgcacatccgaatgttgataatgctatgcagacctga

SEQ ID NO: 474697 - DNA, 180 bp, Shigella flexneri; identical to SEQ ID NO: 474693

SEQ ID NO: 474698 - DNA, 195 bp, Shigella flexneri
atgctggagaatgagtactctcagagggtggctgaccggctgaaagcatcaggtctgagcggtgatgcggatgcggagagggaagccggtgcacaggtgatgcgtgagactgaacagcagatttaccgtcagctgactgacgaggtactggccctgcgattgtctgaaaacggctcacaactgcaccattcataa

SEQ ID NO: 474699 - DNA, 282 bp, Shigella flexneri
gtggagagggatatttgcaattttcccaagcgtgaagcttgcctcatggcaatgagctacagctatgagcttcaggcgcaggtgtatgaccacatgacggagcttgagggcgggaaggacattaacctcctcgatttctctggcctgaccgatatggcaatcagcgaaatgcaaaaccgtgtcgcggctgctgagaagttctcatttgaaatgcacggtcaagcaggtagcgctctcatgactcgtcgtgaagtggtcaacaaaaactggccaccgagttag

SEQ ID NO: 474700 - DNA, 303 bp, Shigella flexneri; identical to SEQ ID NO: 21213

SEQ ID NO: 474701 - DNA, 366 bp, Shigella flexneri; identical to SEQ ID NO: 462994

SEQ ID NO: 474702 - DNA, 282 bp, Shigella flexneri
ttgttgaccacttcaggtcaggagattgtcgtcgaaccgattgaacaggctattctcatctctgagcagactaagctgtgggacgccaagtcatccaccggattcactcagggcacacttcagcaggacgctatgaacatctgtgagaatgtggtccgtaccatcaacgctcgcatggtcgacgttctggaatcctctaagctgctgaagaccgtagagcttcctgtcctgactggtagcctgaccgctaaggcagacgctatcatggacgctctgtactga

SEQ ID NO: 474703 - DNA, 303 bp, Shigella flexneri; identical to SEQ ID NO: 473532

SEQ ID NO: 474704 - DNA, 168 bp, Shigella flexneri
atggcactcccccgtattacccaaaaagagatgactgaacgcgagcagcgtgaacttaaaacactgctggatcgggcgcggattgcgggtaatgactccaacttactgatagtgttttatgttcagataatgcccgatgaccttgtcatgcagctccaccgattttga

SEQ ID NO: 474705 - DNA, 288 bp, Shigella flexneri; identical to SEQ ID NO: 474636

SEQ ID NO: 474706 - DNA, 267 bp, Shigella flexneri
ttgcagcgtaaaatctcaaaaatggcagaacttgctattgaactcgatgatatgacaattatcacagagaaattacgcgacatgaagaatgcgctttcaaaactcaatcatgatatcgaagaggaaacaaagcggataaaggccatcacaactggaagcctcaaagatattgacaggacaacaaaggaagggatggtagagacacagctacttatcaagggcgtactcaaagaaatagttatagatgccgctaaacgtcgatgttga

SEQ ID NO: 474707 - DNA, 333 bp, Shigella flexneri; identical to SEQ ID NO: 474593

SEQ ID NO: 474708 - DNA, 249 bp, Shigella flexneri; identical to SEQ ID NO: 462412

SEQ ID NO: 474709 - DNA, 705 bp, Shigella flexneri; identical to SEQ ID NO: 8686

SEQ ID NO: 474710 - DNA, 303 bp, Shigella flexneri; identical to SEQ ID NO: 474565

SEQ ID NO: 474711 - DNA, 483 bp, Shigella flexneri
ttggcgcagctttacggcactgagccggtgcgtattcgccagaatcatcatgagaacaaagtacgcttcgttgaagggaaacactttttcaaagttgttggtaatgaccttaaagaattgcgggtcgctttaaactactcacaaaatccagtttcacccaaagcccgctccctcatcctctggacagaacgaggcgcagcacgccacggcaaaatgctcgaaaccgatcaggcgtgggatgtgttcgaaaaactggaagactgctatttcagtcaaagggatccgtcaacgccagtttcatgccagaaaagttacgacacgcgagttctctgttatcagagaggcggtgtcactgtttccacaattcagttacgggatgatgatattgttatttcccttgagtcatggctggaactggcgagagccaatggttggtttgttgttcgcagagataaactggtggaaaggttgatgcagctttaa

SEQ ID NO: 474712 - DNA, 231 bp, Shigella flexneri; identical to SEQ ID NO: 129443

SEQ ID NO: 474713 - DNA, 516 bp, Shigella flexneri
atgtgccgccggtgctcaaaaaaacatcccgatatcgacggagataatgggccgggtcgctctcgcggcggttttggcaccaaaatccatctggcaacagacggaagtggcctcccgttaaatatcgtgctaagccccggacaagctcatgaaagccagttcgcgcaacgacttctggacgggattggcgttcagcgtcagaacggcagcatgaaacgccgtggacatgcggtactggctgataaagcgtattcagggcgcgcattgcgcaacgagctgaaaaataacggtataaaggcagtaatcccccgaaagtcaaatgagaaaatggcatcggatggacgtgcacagcttgatcgtgatgcgtactgcaatcgtaatgtcgttgaacggtgctttgggcggctgaaagaatatcgccgcatcgccacgcgttacgacaaaacggcgagaaattacctggcgatggtgaaactgggctgcatccgactcttttatcaacgcttacgtaattaa

SEQ ID NO: 474714 - DNA, 267 bp, Shigella flexneri; identical to SEQ ID NO: 463627

SEQ ID NO: 474715 - DNA, 645 bp, Shigella flexneri
atggaagttggccttcaacgtgcaagtgctgaacgttcaattgatttcgtattttctaaagatgcaaatcaagtaaaagatttcacaaagtcattagctcaaacaacgggtttagatatcgctgaactgcaatcacagtttgctggtttcggtgcttcagctagagagtctctaggcattcaaggttctgaagaactttttagaaatatgattggctattctcgtctgatggggcgaagtgaagaagagattaagcgagcactgacagcattatcacagatggctggtaagggtcagattatggctgaagagcttaaggggcaactagctgaagctgttcctggtatggttcaggtattcgctaaagcaaccggaaagactgaacaggaattatttgatgctatgaagaagggggctttaaaatctgccgatactcttcagaaggtcactcaggaactgaataaacaaatcaccgctaaaggtggctggaaagctatttcagaaagtacacaggcacaactagggaacttgaaaaactcttggaataccacgcttgatagtatcttcagaggttctgaaaatggtctgcaagattttacaagaagcttaactgaagtggtcaacaaaaactggccaccgagttag

SEQ ID NO: 474716 - DNA, 552 bp, Shigella flexneri
atgaaagggaaatctgcattaactcttctgctcgctggtatattttcgtgcggcacatgccaggcgacagaggcagaagtgacaagcgaatctgtatttaacattcttaattccaggggggcagcaacagataaaagttatttatcgttaaatccagataagtatcctaattatcgtcttctgattcactcagccaaattaaaaaatgaaataaagagtcactataccaaagacgaaactcaaggattgctaacattaacagaaaacacacgaaagttaacgttgacggagaaaccctggggaacgtttattcttgcttctactttcgaagatgacaaaacagcggcagaaacccactatgatgctgtctggctgagggatagtttatggggctatatggcattagtatcagaccaaggaaatagtgtagccgcaaaaaaggttctgctcaccctgtggggttatatgtctacgcccgaccagattaagcggatgcaggacatcattagcaacccaaaacgactggatggaattctgatcctacccacgtaa

SEQ ID NO: 474717 - DNA, 303 bp, Shigella flexneri; identical to SEQ ID NO: 474682

SEQ ID NO: 474718 - DNA, 708 bp, Shigella flexneri
gtgattgaacgggcacgcgccggtatcgatgaggccatcagccgtgagcagcttatccccctcgatcgtgagaaggggctgttcacgttcgggattcatatgctcgatgagctgtcagtccgggcactcagtcgtgacatcatgaaacagaaccgggtgaccgtacatccggagaaaagtgtcccccggacggccggttacagcgatgccgtcagtgttctggcacaggaccgtccgtcgctggccattgtgtccgggcagggcggtgcagccgggcagcgtgagcgggtggctgaactggtcatgatggcccgggagcaggggcgggaggtgcagattatcgctgctgaccgtcgctcgcagatgaacctgaagcaggatgaacggctgtccggtgaactgataaccggacgtcgtcagttgctggaaggaatggccttcacgccgggcagtaccgttatcgtcgaccagggcgaaaaactctccctgaaagagacgttaaccctgctggatggtgccgcacgtcataacgtacaggtcctgataaccgacagcgggcagcgaaccggtacaggcagtgcactgatggccatgaaggatgccggggtgaacacatatcgctggcaggggggagaacagcgaccggccaccatcatcagtgaaccggaccgtaatgtcggctggccggagattttgcggccagcgtga

SEQ ID NO: 474719 - DNA, 273 bp, Shigella flexneri
atgcttgattattgttttacctctgcacctcagcagaccataacacacaccggaatcaaaaatttgttatggataatcaaaaaaaacctccagcagaaaggtgatcccgatttaattccctgtgcttatggcctgtgtgacagacaagtaagccctgataaggcttacactgctgaacttatttacatgcacggaaccatgatgaggaaaaagaaacgcaaatattgtagtgaaatctgcgccgaaaaagaccagatggcacacgaactttaa

SEQ ID NO: 474720 - DNA, 318 bp, Shigella flexneri
gtgaagtggccttgtggatatgacctgaatatcagcagtcagggagaaaacttcattcaggtggatttcgacactccgtggtgtcagccggaaagcgacgttattgcagaattaagccgccgtttcagctgcacgctggagcactggtatgccgaacagggctgtgatttctgtggctggcagttgtatgagcgtggagagctcgtcgatgtgctgtggggggaacttgaatggtcttccccgacagatgacgatgagcagccggaagtcaccggacctgcgtggatagtcgacaatgtggcgcattatggcggatga

SEQ ID NO: 474721 - DNA, 474 bp, Shigella flexneri
atgtcctggttaatatctcagtgtgctcatcagtgcactgataataaaaagacggagacagatgccatttacgataaagttcggagttcttatttgctttcatgtattctgaaaaaaaacaaaaatgttgggcttattcttcatgcaccatcatttgtttctgtgtctgaaaaaatcgccagaattgtgatggcaaattactcccgtaactggagtaattccgagttggccagtgcggttttaatgagtgaatcttctttaaaaagaagaatgtacaaagaggtcggttctataagtacatttgtacataaaataaagcttacagaagctatcaggaaattacgaaggacaaatactcccatttctgtcatatcatctgagttaggttacagttcaccatcgtatttttctaaagtcttctttaaatatttaaagacataccctcaaaacataaggaagaaaaatggtcggtaa

SEQ ID NO: 474722 - DNA, 219 bp, Shigella flexneri; identical to SEQ ID NO: 474644

SEQ ID NO: 474723 - DNA, 504 bp, Shigella flexneri
ttgcgtgcgacggcagaagaagccctgaagcgaatcagtgaactgtacgccatcgaggatgaaatacggggattaccagagtcagagtgtcttgcagtcaggcagcagcgaagcaaagcgttactgacgtcgctgcatgaatggatggtggagaagaatggcacgctgtcgaaaaaatccagactgggcgaagcattcagctatgtactgaatcagtgggacgccctctgttattacagtgatgacggtctggcggaggcggacaataacacagcggaaagagcgcttcgtgcagtctgtctcggaaagaaaaattacgtgttcttcggtagcgatcacggcggcgagcgtggtgcactgctgtacgggctgatcggcacctgccgtctgaacggtatcgatccggaagcgtatctgcgccatattctgagcgtactgccggaatggccttccaaccgagttgacgacctcctgccatggaaggtggtgctaccatcaggataa

SEQ ID NO: 474724 - DNA, 327 bp, Shigella flexneri
atgactaaaaatactcgtttttctcccgaagtccgtcaacgggcagtccgtatggttctggaaagtcagggcgaatatgactcacaatgggcgacaatttgttccattgctccaaagattggctgtacgccggagactctgcgtgtctggggtcgccagcatgagcgggataccgggggcggtgatggagggctcaccaccgctgaacgtcagcgtctgaaagagctggagcgtgaaaatcgtgaactgcgccgcagtaacgatatccttcgccaggcttccgcttattttgcgaaggcggagttcgaccgcctctggaaaaaatga

SEQ ID NO: 474725 - DNA, 288 bp, Shigella flexneri; identical to SEQ ID NO: 474636

SEQ ID NO: 474726 - DNA, 267 bp, Shigella flexneri; identical to SEQ ID NO: 463627

SEQ ID NO: 474727 - DNA, 327 bp, Shigella flexneri
atgatttttaccaaaatcattaggggattcatcagcgctctgtatgagaacaccgagccttctttcggttctgaggtgtctgactacggtattatcgcccatgagagccaactgaaagcactgtcccgtctggctgctaaacagggcttctctggtgaagacgctatcgtggatatgctgggtaccgacatcgcgtattacaacggtgaggacaaaggtgtgttcatgttggctaaacgcttcacggccctgagcttcggctgcttccgtcacgacggtgagaatattacggtcgtcctttcacgtgatggcgactctcagtcctga

SEQ ID NO: 474728 - DNA, 366 bp, Shigella flexneri; identical to SEQ ID NO: 462994

SEQ ID NO: 474729 - DNA, 282 bp, Shigella flexneri
atgaaggcgctgatacttatctcttcgggccaggaatcgatgattctgttgatttatccagatattccccagaactcgatagtcacggacaatactcactccctgcttctggcaaatatgagctgcgagtgctgcaaactcgaaacgacgcccgtaaaaacaaaactaaaaaatataacgtcgatattcaaattaagtaaatgtcaaccgacggggactatccccgtcatagacgttaacgccccactcctctctgtcgctcaagaggttaatgacgaatag

SEQ ID NO: 474730 - DNA, 285 bp, Shigella flexneri
atgtacatgcggatgccagttgagacgacggccatacgtgtggatggcgcagaagataccgggttcctgcccccgtttccgggcggcatacagcagattctccaccgccagacggcacacgtcattcagcagccaccggttgctttcgaacaccggccactgcgtgtccggcagggtgaagaccaggtgtacccagtcgcagtcaggaagacgattcagctgtgtcgctatccacaggtctgtggccttttttccgcaggacgggcaggcacggctgccgcatga

SEQ ID NO: 474731 - DNA, 267 bp, Shigella flexneri; identical to SEQ ID NO: 462029

SEQ ID NO: 474732 - DNA, 267 bp, Shigella flexneri; identical to SEQ ID NO: 463627

SEQ ID NO: 474733 - DNA, 327 bp, Shigella flexneri
atgactaaaaatactcgtttttcccccgaagtccgtcaacgggcagtccgtatggttctggaaagtcagggcgaatatgactcacaatgggcgacaatttgttccattgccccaaagattggctgtacgccggagactctgcgtgtctgggttcgccagcatgagcgggataccgggggcggtgatggagggctcaccaccgctgaacgtcagcgtctgaaagagccggagcgtgaaaatcgtgaactgcgccgcagtaacgatatccttcgccaggcttccgcttattttgcgaaggcggagttcgaccacctctggaaaaaatga

SEQ ID NO: 474734 - DNA, 153 bp, Shigella flexneri
atgttgcatttaaaaaatattactacgggtaatccgaaaacagcagaacaatatcagatgacaaaacgatattcggtcacctggcttttttcagaagacggaaaaaactggtatgaagagctgaagaatttcgccaggacacaattaaaataa

SEQ ID NO: 474735 - DNA, 327 bp, Shigella flexneri; identical to SEQ ID NO: 473546

SEQ ID NO: 474736 - DNA, 234 bp, Shigella flexneri; identical to SEQ ID NO: 466988

SEQ ID NO: 474737 - DNA, 354 bp, Shigella flexneri; identical to SEQ ID NO: 466835

SEQ ID NO: 474738 - DNA, 327 bp, Shigella flexneri; identical to SEQ ID NO: 474724

SEQ ID NO: 474739 - DNA, 156 bp, Shigella flexneri
atgctggagaatgagtactctcagagggtggctgaccggctgaaagcatcaggtctgagcggtgatgcggatgcggagagggaagccggtgcacaggtgatgcgtgagactgaacagcagatttaccgtcagttgactgacgaggtactggcctga

SEQ ID NO: 474740 - DNA, 291 bp, Shigella flexneri
gtgaacgctcactggagttcgaaaaagagtaattttttcaggaaaaacataaaattactgactaaatatttattttttgaatcgcagggcattccggataaggttgatatcgtgtcacggctgaagacctatggatacagtatttctggtgtggagacggatgacggatataaggcgcttgtccgcgcttttcagcttcatttccggcagaaaaattatgacggcataatggatgctgaaaccgctgccatcctgtatgcattgctggagaagtatttcccgggtaaataa

SEQ ID NO: 474741 - DNA, 294 bp, Shigella flexneri
atggtggcgaaaattaatctcttattacggcttacgccgcttttattcgtgttcgctccttttttggcacagtcaaatatgactgtttatcctatgcctgtttccattaatagtcagggtgaaggcaacgttcgcgtaatatctaaaagtaatgaagttcagtacatcaaggcgacagtattccgtatcgataatccatcgacgcctcaggaaaatgaagttgagattaaatccggtgatgcaaatcatctggttgttatgccacctaaattcgctttaccagccggtaggtaa

SEQ ID NO: 474742 - DNA, 267 bp, Shigella flexneri
atgttgggacttgaaccgaagaacacggcggtgcggagtccggagagtaacggaatagcagagagcttcgtgaaaacgataaagcgtgactacatcagtatcatgcccaaaccagacgggttaacggcagcaaagaaccttgcagaggcgttcgagcattataacgaatggcatccgcatagtgcgctgggttaccgctcgccacgggaatatctgcggcagcgggcttgtaatgggttaagtgataacagatgtctggaaatatag

SEQ ID NO: 474743 - DNA, 249 bp, Shigella flexneri
atgtctggaaatataggggcaaatccagtcaccgcgattatctccgctctggttatctgcatcatcgtctgcctgtcatgggctgttaatcattaccgtgataacgccattacctacaaagagcagcgcgacaaaaacgcaagagaactgaagctggcgaacgcaaccattactgacatgcagcagcgccagcgtgctgctgatgcactcgatgctaaatacacgacggagttagccaatgcgaaatga

SEQ ID NO: 474744 - DNA, 219 bp, Shigella flexneri; identical to SEQ ID NO: 474644

SEQ ID NO: 474745 - DNA, 444 bp, Shigella flexneri
gtggggaaaacccatctggcaatagcgatgggctatgaagcagtccgtgtaggtatcaaagttcgcttcacaacagcagcagatctgttacttcagttatctacggcacaacgtcagggccgttataaaacgacgcttcagcgtggagtaatggccccccgcctgctcatcattgatgaaataggctatctgccgttcagtcaggaagaagcaaaactgttcttccaggtcatcgctaaacgttacgaaaagagcgcaatgatcctgacatccaatctaccgttcgggcagtgggatcaaacgttcgccggtgatgcagcactgacctcagcgatgctgggccgtatcttacaccactcacatgtcgttcaaatcaaaggagaaagctatcgactcagacagaaacgaaaggccggggttatagcagaagctaatcctgagtaa

SEQ ID NO: 474746 - DNA, 225 bp, Shigella flexneri
gtgggctcggagatgtgtataagagacagcctttatgctgtcgcttttgcattaggaaaaaatgactatacaccagtattccatactggacaatgccagcttcggttgaaagcccccttaaaagctaaagagtgcttcgaactcgtaattcaacacagcaatgatgaaaaattaaaaataaaagcacaatcatacttggacgcaattcaggatatcaaggagtaa

SEQ ID NO: 474747 - DNA, 189 bp, Shigella flexneri; identical to SEQ ID NO: 469030

SEQ ID NO: 474748 - DNA, 312 bp, Shigella flexneri
atgccatggtccccagagggagaaccagtccgtaaattcattctcttcacggcttctgaccatggcttcggcagtgcggaggtcatttgctgtcactcccgacacgccatagaaacgcatttccttcacggcagtagagagctgaagtttctctgcgagcatggtctggaaggccaggtagacttctatctcatccacaaaatggagagttctgactttatcccgggcaatgtcctccagaatttcgaggcggaacatttccctgcccagggagagcagagcgccggtatcattatcgaaaaggccttctga

SEQ ID NO: 474749 - DNA, 285 bp, Shigella flexneri
atggaataccggacctggatcactgaagctttacgccttcatttcgaagaacatttaccacgggttgtagccggacgtcgcctgggcgtaccaaaatcaactgtctgtggtatgttcgtgcgcttccgcaacgctggcctttcatggcctctgcccgcaggtatgtcggagcaggaacttgatgcccttctttacggaagtacctccacagtacctgtcgtacttactgaaagcaccgttatgcccaaactcccggtggtaaaaaaacgtccccggcggccttaa

SEQ ID NO: 474750 - DNA, 303 bp, Shigella flexneri; identical to SEQ ID NO: 474682

SEQ ID NO: 474751 - DNA, 423 bp, Shigella flexneri; identical to SEQ ID NO: 474638

SEQ ID NO: 474752 - DNA, 303 bp, Shigella flexneri
atgagcagaaaaacccaacgttactctacggagtttaaagccgaagccgtcaaaacggttcctgaaaatcagctttcgatcagtgaaggcgcttcccgattatctgttcctgaaggcactttaggacaatgggttaccgccgcaagaaaagggctcaatacaccaggctcccgcacagtggctgagctggaatctgaagttatgcaactgcgtaaggctttaaatgaagcacgacttgagcgagatattttaaaaaaagcaacagcgtattttgcacaggagtcgctgaaaaatacgcgttag

SEQ ID NO: 474753 - DNA, 411 bp, Shigella flexneri
atgttgttcggccagagttcagagaaaaagcgtcataagcttgaaaatcagatccgacaggcagaaaaacgactgtcggaactggaaaaccggctgaacacagccagaaatcttctggaagatgcatcgtcagtcacagattcacctgacaccagtcccccgtcagaaaacccgatcgccagtaagcctgaattcccgggacgaaaatcttcacgaaaaccgctgccggcagaacttccccgggagacacatcgccttctgcctgctgaaaccagttgcccggcctgtggaggtgttctgaaagaaatgggggaaacaatctcagagcaactggatatcattaataccgcctttaaagttatcgaaaccatacatcccaaactggcctgtagccggtgtgaggtagcctga

SEQ ID NO: 474754 - DNA, 303 bp, Shigella flexneri; identical to SEQ ID NO: 473532

SEQ ID NO: 474755 - DNA, 279 bp, Shigella flexneri; identical to SEQ ID NO: 236361

SEQ ID NO: 474756 - DNA, 225 bp, Shigella flexneri
atgtcgcgtaaaggtaactgttacgacaacgctccgatggaaagcttctggggaacgctgaaaaatgagagtctgagccactatcgttttaataaccgggatgaagccatctcagtaatacgggaatacattgagattttctacaatcgtcagcgtcgtcactctcgtctggggaatatctccccggcagccttcagggaaaaatatcatcagatgactgcttaa

SEQ ID NO: 474757 - DNA, 279 bp, Shigella flexneri; identical to SEQ ID NO: 127146

SEQ ID NO: 474758 - DNA, 315 bp, Shigella flexneri; identical to SEQ ID NO: 474620

SEQ ID NO: 474759 - DNA, 357 bp, Shigella flexneri; identical to SEQ ID NO: 474530

SEQ ID NO: 474760 - DNA, 288 bp, Shigella flexneri; identical to SEQ ID NO: 474636

SEQ ID NO: 474761 - DNA, 180 bp, Shigella flexneri
atgaataagccgcaactggcggaatcacagaagaccgctttgcttaccgaagcggagtctgtcatccggcagccggggcgtgctgtcaggctgaacagggaaacggatgaatcaggggaggcccgggggcgggcctccgtttttccggagtcagtccggtctgtggtttatgcgatgtga

SEQ ID NO: 474762 - DNA, 378 bp, Shigella flexneri; identical to SEQ ID NO: 474621

SEQ ID NO: 474763 - DNA, 249 bp, Shigella flexneri; identical to SEQ ID NO: 18900

SEQ ID NO: 474764 - DNA, 240 bp, Shigella flexneri; identical to SEQ ID NO: 12429

SEQ ID NO: 474765 - DNA, 231 bp, Shigella flexneri; identical to SEQ ID NO: 129443

SEQ ID NO: 474766 - DNA, 189 bp, Shigella flexneri
atgtataaaattacagccactattgaaaaggaaggtggttctcctaccagctggacaagatattcaaaatctaaactaacgaaatcagaatgcgaaaaaatgctctcagggaaaaaagaagcaggcgtttccagagagcagaaagtaaaactgataaattttaattgcgagaaacttctgtcctcgtga

SEQ ID NO: 474767 - DNA, 123 bp, Shigella flexneri; identical to SEQ ID NO: 463327

SEQ ID NO: 474768 - DNA, 222 bp, Shigella flexneri
atgaactatgccggacacgaaaaacttcgcgccgaagtggcggaggtggccaatgccatgtgcgacctgcgtacaaccatgaatgagatggagcggcggtacagctttaatgctgacaccctgccggaacgtctggtgcgtcagacgttgtttcgcgcaaaccgcctcttgatggaggcatataccgaaattctggaactggattcctgcttcaaagattga

SEQ ID NO: 474769 - DNA, 222 bp, Shigella flexneri; identical to SEQ ID NO: 8360

SEQ ID NO: 474770 - DNA, 189 bp, Shigella flexneri
atgagcagaaaaacccaacgttactctaaagagttcaaagccgaagctgtcagaacggttcttgaaaatcaactttcaatcagtgaaggcgcttcccgattatctcttcctgaaggcactttaggacaatgggttaccgcacggtggctgaactggaatctgaaattctgcaactgcgtaaggcgttaa

SEQ ID NO: 474771 - DNA, 159 bp, Shigella flexneri
atgagcagaaaaacccaacgttactctaaagagttcaaagccgaagctgtcagaacggttcttgaaaatcaactttcgatcagtgaaggcgcttcccgattatctcttcctgaaggcactgaaccgccccgggtttcctggagagtgttttatctgtga

SEQ ID NO: 474772 - DNA, 123 bp, Shigella flexneri; identical to SEQ ID NO: 463321

SEQ ID NO: 474773 - DNA, 1179 bp, Shigella flexneri
atgatctggataatgacgatggctcgccgtatgaacggtgtttacgcggcatttatgctggtcgcttttatgatgggggtggccggggcgctacaggctcctacattgagcttatttctgagtcgtgaggttggcgcgcaacctttctggatcggactcttttatacggtgaatgctattgctgggatcggcgtaagcctctggttggcaaaacgttctgacagtcagggcgatcggcgaaaactgattatattttgctgtttgatggctattggcaatgcgctactgtttgcatttaatcgtcattatctgacgcttatcacctgtggtgtgcttctggcatctctggccaatacggcaatgccacagttatttgctctggcgcgggaatacgcggataactcggcgcgagaagtggtgatgtttagctcggtgatgcgtgcgcagctttctctggcatgggtaatcggtccaccgctggcctttatgctggcgttgaattacggctttacagtgatgttttcgattgccgccgggatattcacactcagtctggtattgattgcatttatgcttccgtctgtggcgcgggtagaactgccgtcggaaaatgctttatcaatgcaaggtgactggcaggatagtaacgtacggatgttatttgtcgcctcgacgttaatgtggacctgcaacactatgtacattattgatatgccgttgtggatcagtagcgatttaggattgccagacaaactggcgggtttcctgatggggacggcagctggactggaaataccagcaatgattctggctggctactatgtcaaacgttatggtaagcggcgaatgatggtcattgcagtggtggcaggagtgctgttttacactggattgattttctttcatagccgtatggcgttgatgacgctgcaactttttaacgctgtatttatcggcattgttgcgggtattgggatgctatggtttcaggatttaatgcctggaagagcgggggcagctaccaccttatttaccaacactatctctaccggggtaattctggctggtgttattcagggagcaattgcacaaagttgggggcactttgctgtctactgggtaattgcgattatttctgttgtcgcattatttttaaccgcaaaggttaaagacgtttga

SEQ ID NO: 474774 - DNA, 489 bp, Shigella flexneri
atggcgattgcaattggcctcgattttggcagtgattctgtgcgagctttggcggtggactgcgccagcggtgaagagatcgccaccagcgtagagtggtatccccgttggcaaaaagggcaattttgtgatgccccgaataaccagttccgtcatcatccgcgtgactacattgagtcaatggaagcggcactgaaaaccgtgcttgcagagcttagcgtcgaacagcgcgcagctgtggtcgggattggcgttgacagtaccggctcgacgcccgcaccgattgatgccgacggtaacgtgctggcgctgcgcccggagtttgccgaaaacccgaacgcgatgttcgtattgtggaaagaccacactgcggttgaagaagcggaagagattacccgtttgtgccacgcgccgggcaacgttgactactcccgctatattggcggtatttattccagcgaaggttctgggcaaaaatcctgcatgtga

SEQ ID NO: 474775 - DNA, 1287 bp, Shigella flexneri
atgtccgaagatatctttgacgccatcatcgtcggtgcagggcttgccggttcggttgccgcactggtgctcgcccgcgaaggggcgcaagtgttagttatcgagcgtggcaattccgcgggtgccaagaacgttactggcgggcgtctctatgcccacagtctggaacacattattccaggtttcgccgattccgcccccgtagaacgcctgatcacccatgaaaaactcgcgtttatgacggaaaagtcagcgatgactatggactactgcaacggtgacgaaacctcgctatcccagcgttcttactccgttttgcgcagtaaatttgatgcctggttgatggagcaggccgaagaagcgggcgcgcagttaattaccgggatccgcgtcgataacctcgtacagcgcgatggcaaagtcgtcggtgtagaagccgatggcgatgtgattgaagcgaaaacggtgctccttgctgatggggtgaactccatccttgccgaaaagttggggatggcaaaacgcgttaaaccgacggatgtggcggttggcgtgaaggaactgatcgagtcaccgaagtcggtaatcgaagaccgttttcagttgcagggtaatcagggcgcggcttgtctgtttgcgggatcacccaccgatggcctgatgggcggcggcttcctttataccaatgaaaataccctgtcgctggggctggtttgtggtctgcatcatctgcatgacgcgaaaaaatcggtgccgcaaatgctggaagatttcaaacagcatccggccgttgcaccgctgatcgcgggcggcaagttggtggaatattccgctcacgtagtgccggaagcaggcatcaacatgctgccggagctggtcggtgacggcgtattgattgccggtgatgccgccggaatgtgtatgaacctcggttttaccattcgcggtatggatctggcgattgccgccggggaagctgcagcaaaaaccgtgctttcagcgatgaaaagcgacgatttcagtaagcaaaaactcgcggaatatcgtcagcatctggagagcagcccgctgcgcgatatgcgcatgtaccagaaactaccggcgttccttgataacccacgcatgtttagcggctacccggaactggcggtgggcgtggcgcgtgacctgttcaccattgacggcagtgcgccggaactgatgcgcaagaaaatcctccgccacggcaagaaagtgggcttcatcaatctgatcaaggatggcatgaaaggagtgaccgttttatga

SEQ ID NO: 474776 - DNA, 294 bp, Shigella flexneri
gtgacgcacgtcttcggtgaacgcactctggccacactggagcgtcttctgagcctgctgtcggcctttgaggtcgtggtatggatgacggatggctggccgctgtatgaatcacgcctgaagggaaagctgcacgttatcagcaagcgttacactcagcgcattgagcgacataatctgaatctgagacaacatctggcaaggctgggacggaagtcactgtcgttctcaaaatcggtggagctgcatgacaaggtcatcgggcattatctgaacataaaacactatcagtaa

SEQ ID NO: 474777 - DNA, 393 bp, Shigella flexneri
ttgttgcagcatatccgcgcggtacaggcagccttgcagtcgcccggcgagggcttccagcggcgcggggttgaggctgtcggtaaatacctgggcgcgggtgatatggcctttttcaacgtcgaaatgcagttccacgccgccccagctaaagcgttcatccagcagatgcgagaatgccggagcctgaccgaagttccactctcagctactctgacgggcaaaggtttcggcgaagtttggcaagtctggcgttttgtccggggagatgatttccgcttccacgtgctcgccataatgggcgaaaaaggcctcggttatggcctcgcaaacctgctcatgggtgagccccggcagcagctcggtgaggttggtcacgcgggaacgcactga

SEQ ID NO: 474778 - DNA, 855 bp, Shigella flexneri
atgcccacttctcatgaaaatgcactgcaacaacgttgccagcaaattgtcaccagcccagtgcttagcccggagcagaagcgccattttctggcactggaagcagaaaacaatctgccttacccacagcttcctgccgaagcccgccgcgcgctggatgaaggtgtaatctgcgatatgtttgaaggtcatgcgccgtacaaaccgcgctatgtcttacccgattacgctcgttttctggcgaacggttccgaatggctggagctggaaggcgcgaaagatcttgatgacgcactctctctgctgaccattctttaccaccacgtaccgtcggtcacatcgatgccggtctacctggggcaactggatgcgttgttgcaaccgtatgttagaattctaacacaaaacgagatcgatgttcgaataaaacgtttctggcgttacctcgacagaaccctgccagatgcctttatgcacgccaatatcggcccgtctgattcgcccattacccgcgcgatcttacgtgcagacgcgcaggtttcaccgaacctgacctttatctacgatcctgaaatcacccctgatgacctgctgctggaagtggcgaagaacatctgtgaatgtagcaaaccgcacatcgccaacggtccggtgcatgataaaattttcacaaaagggggctacgggattgtgagctgttacaactcactgccgctggcgggtggtggcagcacgctggtacgccttaacctgaaagccattgccgagcgcagcgaatcgctggatgacttctttacgcgcactctaccgcactactgccagcagcagatcgccatcatcgatgcgcggtgctga

SEQ ID NO: 474779 - DNA, 1806 bp, Shigella flexneri
atggaaggttccgattttttactcgcaggagtgctgtttctcttcgcggcggtggctgcggtgccgttggcatcgcggctggggattggcgctgtgttgggatatttgctggcagggattgcaattggcccgtgggggctggggtttattagcgacgtcgatgagatcctccacttttcggaactcggcgtggtattcctgatgtttatcatcggccttgagttgaatccctccaaactttggcaactgcggcgttcgatttttggcgtaggcgtggcacaggtgctgttaagcgcggcgttgctggcgggattattgatgctgacggatttcgcctggcaggcggcggtggtcggtggcattggccttgcgatgtcttcaactgcaatggcgttgcaattgatgcgtgagaaagggatgaatcgcagcgaatccggccagctcgggttttcggttctgctgtttcaggatctggcagtgatcccagcactggcgttagtgccgttgttggcggggtcggcagacgaacatttcgactggatgaagatcggcatgaaggtgctggcgtttgtcggcatgctgattggtgggcgctatttactgcgtccggtattccgctttattgcagcttctggcgtgcgggaagtgttcaccgccgcgacgctgctgctggtgttgggttccgcattgtttatggatgcgctggggctgtcgatggcgctcggtacatttattgcgggcgtgctgctggcggaaagtgaatatcgccatgaactggaaacggctatcgatcccttcaaaggcttgctgctcggtttgttctttatctctgtcggcatgtcgctcaacctcggggtgctttatacccatctgttgtgggtagtgataagcgtggttgtgctggtggcggtgaaaattctcgtgctgtatctgctggcgcgattgtatggcgtgcgtagctcagagcggatgcagtttgctggcgtgttgagtcagggcggtgagtttgcctttgtcctcttttctaccgcttcttcacaacgtttattccagggcgaccagatggcgctgttgctggtgacggtgacgctttccatgatgaccacgccgttgctgatgaagctggtggataaatggctatcccgccagtttaacggaccggaagaagaagacgaaaaaccgtgggtcaacgatgataaaccccaggtcattgtcgtgggcttcgggcgttttggtcaggtgattggtcgtttgctgatggcaaataaaatgcgcattaccgtgctggagcgggatatcagcgccgttaacctgatgcgtaaatatggctacaaagtttattacggcgacgccacgcaggtcgatcttttacgttctgcgggtgcagaggccgctgagtctatcgtcattacctgtaacgagccggaagacaccatgaagctggtggaaatatgccagcagcactttccgcatttgcatattcttgcgcgagtgcgcggacgtgtggaagcgcatgagttattacaggcaggggggacgcagttttcccgtgaaacattctccagtgcgttagagctggggcgcaagacgctggtcacgcttggcatgcatccgcatcaggcacagcgggcgcaactgcattttcgccgcctggatatgcgaatgctgcgggagttaatcccgatgcatgctgataccgtacaaatttctcgcgccagggaagcccgacgcgaactggaagagattttccagcgtgaaatgcaacaagaacgacgccagctggacggctgggatgaatttgagtag

SEQ ID NO: 474780 - DNA, 129 bp, Shigella flexneri
atgggaagccaggaactccaacgcaagctcggattttgggccgttcttgcaatcgccgtcgggacaaccgtcggctccggtatttttgtatctgtgggtgaagtggcaaaagcagcgggcacgccgtag

SEQ ID NO: 474781 - DNA, 393 bp, Shigella flexneri
atgaaaacaggtatgtttacctgcggccaccagcggctgcctattgaacacgcatttcgtgatgcaagcgagctgggttacgacggcatcgaaatttggggcggtcgcccgcacgcgttcgcgccggacttaaaagcgggcggcatcaaacaaatcaaggcgctggcgcagacgtatcagatgccgattatcggttacacgccagaaaccaacggctatccgtataacatgatgctgggcgatgaacatatgcgtcgtgaaagcctggacatgatcaagctggcgatatatatggcaaaagagatgaacgcgggttatacgctgatttctgcggcccacgcgggctatctcacgccgcctaacgttatctggggcggctggcagagaacttaa

SEQ ID NO: 474782 - DNA, 438 bp, Shigella flexneri
atgtttgtagaagcattgaaacgccagaacccggcgctgatttccgccgcactaagtttgtggcagcagggcaaaatcgccccggacagctgggtgatcgacgtggatcagatactggaaaacggtaagcggctcattgagacggcgcggctttacggcattgaactgtatctgatgaccaagcaatttggtcgtaatccgtggctggcggaaaaattgctggcattaggctacagcggcattgtggcggtggattacaaagaggcgcgagtcatgcgccgcgctggtttgccagtggcgcatcaggggcatctggtacaaatcccttgtcatcaggttgctgacgccgttgaacagggcaccgacatcatcaccgtgtttactctcgacaaagcgcgggaagtttctgcggcagcggttaaggccggacgggtctag

SEQ ID NO: 474783 - DNA, 504 bp, Shigella flexneri
atgggaatgattggctattttgcagaaattgactcagaaaagattaaccaactgcttgagtctactgaaaaacctttgatggataatatacatgacacgctttcaggattacgccgactggatattgataaacgctgggattttttacactttgggctgacaggcacctctgcttttgatcccgcgaagaatgatccgctgagtcgtgccgtgcttgatgaacacagcctcgaagatggcatagatggcttcctgggattgacctggaatcaggaattagccgcgacaatcgaccgactggaatcactggatcgaagtgagctgcgtaaacagttttccattaagcgactcaatgaaatggagatttatccgggagtgaccttttcagaagagttagaggggcaactctttgcctcgatcatgcttgatatggaaaagctgattagcgcgtatcgacgtatgctgcgacaagggaatcatgcgctgacggttattgttgggtga

SEQ ID NO: 474784 - DNA, 2145 bp, Shigella flexneri; identical to SEQ ID NO: 473706

SEQ ID NO: 474785 - DNA, 675 bp, Shigella flexneri
atgatcttcagcgcattaaaagaaatatatgatggagatcctggttttatcttcgataagatatcacacaaactcagacatacggtaacggaatttgatgagagcgggaaaagcgaaccaacggacttatttacctggtacggtaaagataaaaaaggcgactctctcgctattgtaattaaaaataaaaacggaaatgattacttatctctcggttactacgatcaggacgactaccacattcaaagaggaattcgtattaatggtgatagtctcacccaatattgtagtgaaaacgccaggagtgcttcagcgtggtttgaaagcagtaaagctatcatggcagaatcatttgcaactggttccgatcatcaggttgtaaacgagctcaacggggaaagactgagagaacctaacgaagtttttaaacgtttaggtcgagcaataagatataattttcaagtggacgatgcaaaatttagacgcgataatgtaaaagaaataatttctactttattcgctaacaaagttgacgttgaccatcctgaaaataaatacaaagactttaaggatctcgaagataaagttgaaaaaagacttcaaaattgccaggcgaaatatcaaaatgaaattaatcaactatctgcactaggtgttaattttgatgatatttaa

SEQ ID NO: 474786 - DNA, 918 bp, Shigella flexneri
atgtaccaatcagcaaccgcctacgtggcgaaaccaggcgaaacactggtcaaacacaaaattgcaacactccaagcacttcaaacactccaagcccttccggaacaggttcaggccgcctttcgtgatggcatgaacatcatccgcttcgatgggtatcgctgggaatacaagccagcaactggattcgtgcgcatagatcaaatcttgtcgccagccaatgaagagccagcgctagccaatgcagaaccagcgcaggagcaggagcaggagcaggaacaggaacaggaacaggaacaggaacagaataaagcggcggctattgccgagttcaaggagctgcaaagacaacaaatcacagcgcagcaagaagaatgccgccacccgctggcaatgcccaagccagtagcgaaagccaacacagacaagccgacttcatggtttaacgaagaagcggaagaagatttgcgttttgatagtaaagaggagcagttgcctgaagagcgggaacaggtggaaacggaagaccagcaaaacgattatcgcaaccttccagccgtcaataacgctatggcttacctcttcaaaagcgggctgtttcacaagctgaaaggcgatgagttaaagctatatacgtggatggtatccaagtgcaggtatcgcggtaacgacaaatatgagatttggtattcccgcaccaaaatggcaaaagcgttaggtaagagcgttgacacgatagatcgccacctggaagcgttgagaaagctgggacttatccaggaaatgcgccaggcactgaggggcaaatgtggaaaaacctacagactgcgaatcccgtcaaaaggcacagcagaagaggcctcaatgacggcacagcagcacgaaagagaagcaaaagtcagctacctggtacactag

SEQ ID NO: 474787 - DNA, 1206 bp, Shigella flexneri
ttgagcaaaacaccactcacagcaaaggccatagacgccgcacaaccaaaggacaagcaatacaaactcaccgcttcactgacgcccggcctgtttttgctggtgcatcccaacggcagcaaatactggcgattccggtactggatagacaagaaagagcggttacaggctattggggtatatccgctgattagcctcaaggaagcccgcaaacgcgccacagagagccgtttactgatagcccagggaattgacccaatggatttggcacgcaaggagaaagccattgatgcactcaacatggcggcaggttttaagacggtagcggaggactggctggctaccagggtaggcggctggagtgagagctatacaaagcaggtcaaatcagcactggagaaagacgtttatccggtacttggcaagcgttcaatcgttgatataaccgcccgtgacgtgctggcattactccagaagaaagaacgtaccgcaccggagcaggcccgcaagctacgccagcgcatcggtgagatcttcaagtttgccgttatcaccgaactggtaacgaggaatccggttgcagatcttgatacggcactgaaggctcgccgacctggtcacaacgcgtggataccgattagtgaaattccggccttctacaaagcccttgagagggccgggagcgtccagattcaggcggcaatacgtttgcttatattaacggcattaaggaccgcagaactgcgtttgtgccgttgggaatgggtaaacctggaggacgcaacaatcacattgcccgctgaagtcatgaaggcccgccgcccgcatgtggtcccgctatcacggcaggcggtcgagctattgcaggaccagttcacacgcagcggatacagtgttttcgtgttcccgggccgattcatggataagccattatcagccagcgcgatactcaaggcgcttgagcgtatcggatacaagtcaatagccacaggccacggctggcgcacaacgttcagcaccgcacttaacgaaagcggcaggtataaccctgattggattgagatccaactagcccacgtcccgaagggaattaggggagtttacaaccaagcggcctatctcaaaatgcgccgtcaaatgcttcaggactacgccgacgcgattgattcgatactggctgatggtatcaatccgcttgaactgtaa

SEQ ID NO: 474788 - DNA, 1362 bp, Shigella flexneri
atgaaactaaagaccacattgttcggcaatgtatatcagtttaaggatgtaaaagaggtgctggctaaagccaacgaactgcgttcgggggatgtgctggcgggcgttgcagcggcaagctcacaggagcgcgtggcggcaaagcaggtgttgtcggaaatgaccgtagcggacatccgcaataatccggtgattgcctatgaagatgactgcgtgacgcggctgattcaggacgacgttaacgaaacggcctacaaccagattaaaaactggagcatcagcgaactgcgtgagtatgtgctgagcgatgaaaccagcgtggacgacattgcctttacccgcaaagggctgacctcggaagtggtcgcggcgatagcgaagatttgctccaacgcggacctgatctacggcgcgaagaaaatgccggtaatcaaaaaggccaataccaccatcggtattccgggcacctttagcgcccgtttgcagccgaacgatacccgtgacgacgtgcaaagtatcgctgcgcaaatctatgaagggctttccttcggggtgggcgatgcggtgatcggcgttaacccggtaactgacgacgtggaaaacttaagccgcgtgctggataccatttatggcgtgatcgacaaattcaacatcccaactcagggctgcgtactggcgcacgtcaccacccagatcgaagcgattcgtcgcggcgctcctggcggactgattttccagagtatctgtggcagcgaaaaagggctgaaagagtttggcgtggaactggcgatgctcgacgaagcgcgcgcagtgggcgcagagttcaatcgtatcgccggggaaaactgcctctacttcgaaaccggacaaggctctgcgctatccgctggcgctaacttcggcgctgaccaggtgacgatggaagcacgtaactatgggctggcgcgtcattacgatccgtttatcgtcaacaccgtggtcggctttattgggccggagtatctctacaacgaccgccagattatccgtgctggcttagaagatcactttatgggcaagctgagcggcatctctatgggctgtgacggctgctacaccaaccacgctgactctgaccagaacctcaacgaaaacctgatgatcctgctcgccaccgcaggctgcaactacatcatggggatgccgctgggtgatgacatcatgctcaactaccagaccaccgcattccacgataccgccactgtgcgtcagttactcaacctgcgcccgtcaccagagtttgaacgctggctggaaagcatgggcattatggcaaacggtcgcctgaccaaacgggcgggcgatccgtcactgttcttctga

SEQ ID NO: 474789 - DNA, 888 bp, Shigella flexneri
atggatcaaaaacagattgaagaaattgtacgcagcgtgatggcgtcaatgggacaagcggcccccgcgccgtcagaagcaaagtgcgccaccaccaactgtgcggcaccggtgacctcggaaagctgtgcgctggatttaggttccgctgaagcaaaagcgtggattggtgttgaaaacccgcatcgcgcagacgtattaacagaactgcgccgcagcaccgtggcccgcgtttgtaccggtcgtgccggtccgcgtccacgtactcaggcgctgctgcgtttcttggccgatcactctcgttcgaaagataccgtactgaaagaagtgccggaagagtgggtgaaagcgcagggcttgctggaagtacgctctgaaattagcgacaaaaatctctacctgactcgcccggatatgggccgccgcctgtgtgcagaagctgttgaagcgctgaaagcacagtgtgttgctaatccggacgtacaggtcgttatttctgatggcctgtcaactgatgccatcaccgtcaactacgaagagatcctgccgccgctgatggcgggcctgaaacaggccgggctgaaagtcggcacgccattctttgttcgttatggtcgcgtgaagattgaagatcagatcggtgagatcctcggcgcgaaagtggtgatcctgctggtgggggaacgtccggggttagggcagtcagaaagcctctcctgctacgccgtttactcgccgcgtatggcgaccaccgttgaggccgatcgcacctgtatctctaacattcaccagggcggcacgccgccggttgaagccgcagccgtcattgtggatttggcgaaacgtatgctggagcagaaagcatccggcatcaacatgacccgataa

SEQ ID NO: 474790 - DNA, 537 bp, Shigella flexneri
atgaaaaagacccgtacagccaatttgcaccatctttatcatgaacccttacccgaaaacctgaagctcacgccgaaggtcgaagtggataatgttcatcaacgacagacaacggatgtctatgaacatgctttgacgattaccgcctggcagcagatttacgatcagctgcatccgggcaagtttcatggtgaatttacggaaattctactcgatgatattcaggtttttcgtgaatacaccggtctggcgctgcgtcagtcgtgcctggtctggccgaactcgttctggtttggcattccggcgacgcgcggtgagcagggatttatcggttcgcaatgtctgggaagcgcagaaatagcaacgcgccccggtggaaccgagtttgaattaagtacgccggacgattatacgatcctgggcgtagtgctgtctgaagatgtcatcacctgtcaggctaactttttgcacaatccggatcgggtattacatatgctgcgtagccagtcggcgctggaagtgaaagaagcagcataa

SEQ ID NO: 474791 - DNA, 888 bp, Shigella flexneri
atgatgcaggatttgcgtctgatattaatcattgttggcgcgatcgccataatcgctttactggtacatggtttctggaccagccgtaaagaacgatcttctatgttccgcgatcggccattaaaacgaatgaagtcaaaacgtgacgacgattcttatgacgaggatgtcgaagatgatgagggcgttggtgaggttcgtgttcaccgcgtgaatcatgccccggctaacgctcaggagcatgaggctgctcgtccgtcgccgcaacaccagtaccaaccgccttatgcgtctgcgcagccgcgtcaaccggtccagcagccagtttcgccacaggtcgcgccagcgccgcagccagtgcattcagcaccgcaaccggcacaacaggctttccagcctgcagaacccgtagcggcaccacagcctgagcctgtagcggaaccggctccagttatggataaaccgaagcgcaaagaagcggtgattatcatgaacgtcgcggcgcatcacggtagcgagctaaacggtgaactgcttcttaacagcattcaacaagcgggcttcatttttggcgatatgaatatttaccatcgtcatcttagcccggatggcagcggcccggcgttattcagcctggcgaatatggtgaaaccgggaacctttgatcctgaaatgaaggatttcactactccgggtgtcactatctttatgcaggtaccgtcttacggtgacgagctgcagaacttcaagctgatgctgcaatctgcgcagcatattgccgatgaagtgggcggtgtcgtgcttgacgatcagcgccgtatgatgactccgcagaaattgcgcgagtaccaggacatcatccgcgaagtcaaagacgccaacgcctga

SEQ ID NO: 474792 - DNA, 126 bp, Shigella flexneri
atgggttaccgcacggtggctgaactggaatctgaaattctgcaactgcgtaaggcgttaaatgaagctcgccttgagcgagatatattaaaaaagcaacagcgtattttgcacaggagtcgctga

SEQ ID NO: 474793 - DNA, 189 bp, Shigella flexneri; identical to SEQ ID NO: 470416

SEQ ID NO: 474794 - DNA, 1239 bp, Shigella flexneri
atgctggcgattctgaccggtaacgttggtattaatggagggaacagcggcgcgcgtgaaggttcatacagcttaccgtttgtccgtatgccgaccttggaaaacccgatccagaccagcatttcgatgtttatgtggaccgatgccattgaacgtggcccggaaatgacggcgctgcgtgatggtgtgcgcgggaaagataagctggatgtgccgatcaaaatgatctggaactatgccggtaactgcctgattaaccagcattctgaaatcaaccgtacccatgaaatcctccaggatgataagaagtgcgagctgattgtggttatcgactgccacatgacctcatcggcgaaatatgctgacatcctgctgcctgactgcaccgcttccgaacagatggactttgcactggatgcatcctgcgggaatatgtcttacgtgattttcaacgatcaggtgattaaaccgcgctttgaatgtaagaccatctatgaaatgaccagcgaactggcaaaacgtcttggcgttgagcaacagtttactgaaggccgtacccaggaagagtggatgcggcatctgtatgcccagtcgcgggaagcgattcctgaactgccaacgtttgaagagttccgcaagcaggggatctttaaaaagcgcgacccacaagggcatcacgttgcttataaagccttccgtgaagatccgcaggcaaacccactgactacgccatcgggcaaaattgagatttattcgcaggcgctggctgacattgccgctacctgggaattgccagaaggcgatgtgatcgatccactgccgatctacacgccgggctttgaaagttatcaggatccgctgaacaaacagtatccgctgcagcttacaggtttccactataaatctcgcgttcactcaacttacggcaacgttgatgtgctgaaagcggcttgccgtcaggaaatgtggatcaacccgcttgatgcccaaaaacgcggtatccacaacggcgataaagtcaggatctttaacgatcgtggtgaggttcatattgaggcgaaagtgacgccacgaatgatgccgggcgtggtcgcactgggtgaaggcgcctggtatgacccggatgcaaaacgtgtcgataagggcggttgtatcaacgtactgaccactcaacgtccgtctcctctcgctaaggggaatccgtcacatacaaaccttgttcaggttgaaaaggtgtaa

SEQ ID NO: 474795 - DNA, 1116 bp, Shigella flexneri
atgaaaaagcggaaaaccgtgaagaagcgttacgttattgcgctggtgatagtcatcgccggactgattacgttatggagaattcttaacgcacccgtgccgacttatcagacactgattgtgcgccccggtgatttacagcaaagcgtgctggcgaccggaaagctggacgcgctgcgtaaggttgacgtaggcgcgcaggtcagcggtcagttgaaaacgctgtcggtggcgattggcgataaagtaaaaaaagaccagcttttaggggtcattgatcctgaacaggctgaaaaccagatcaaggaggtcgaagcaacgctgatggagctacgcgcgcagcggcagcaggcggaagcggagctgaaactggcgcgggtgacgtattcccgtcagcaacgtctggcacaaacgcaagcggtttcactgcaggatctcgataccgccgcgacggagatggctgtgaaacaggcgcaaattggcaccattgacgcgcaaatcaagcgcaatcaggcctctctcgatacggctaaaaccaatctcgattacacccgtatcgttgccccgatgggcggggaagtgacgcaaatcaccactctgcaaggccagacggtgattgccgcacagcaagcaccgaacattctgacgctggcagatatgagcactatgctggtaaaagcgcaggtttctgaagcggatgtaatccacctgaagccggggcaaaaagcctggtttacggtgcttggcgatccactgacgcgctacgaggggcaaatcaaggatgtgctaccgacgccggaaaaggtaaacgacgctattttctattacgcccgttttgaagtacccaaccccaatggtttgctgcggctggatatgaccgcgcaagtgcatattcagctcaccgatgtgaaaaatgtgttgacgatccctctgtcggcgttaggcgatccggttggcgataatcgttataaagtcaaattgttgcgtaatggtgaaacacgcgagcgtgaagtgacgattggcgcacgtaacgataccgatgttgagattgtcaaagggctggaagcgggcgatgaagtggtgattggtgaggccaaaccaggagctgcacaatga

SEQ ID NO: 474796 - DNA, 210 bp, Shigella flexneri; identical to SEQ ID NO: 9340

SEQ ID NO: 474797 - DNA, 201 bp, Shigella flexneri
atgcacgcgccagaaagcatggtgctggcagccagctttaaaacgccgtgtcaggcgctggactgtttactggcaggatgtgaatccatcaccctgcccttagatgtagcgcaacaaatgctcaacacccctgcagtagagtcagctatagagaagttcgaacacgactggaatgccgcatttggcactactcatctctaa

SEQ ID NO: 474798 - DNA, 459 bp, Shigella flexneri
atgttccggggagcaacgttagtcaatctcgacagcaaagggcgcttatcagtgcctacccgttatcgggaacagctgcttgagaacgctgccggtcaaatggtttgcgccattgacattcatcacccgtgcctgctgctttaccccctgcctgaatgggaaattatcgagcaaaaattatcgcgtctgtcgagcatgaacccggttgagcgccgtgtgcagcgcctactgttaggtcatgccagcgaatgtcagatggatggcgcaggtcgattgttaatcgcgccagtactgcggcaacatgccgggctgacaaaagaagtgatgctggttggacagttcaacaagtttgagctgtgggatgaaacaacctggcatcaacaggtcaaggaagatatcgacgcagagcagttggctaccggagacttatcggagcgactgcaggacttgtctctataa

SEQ ID NO: 474799 - DNA, 483 bp, Shigella flexneri
atgcaacgtcgtgatttcttgaaatattccgtcgcactgggtgtggcttcagccttgccactgtggagccgtgcagtctttgcggcggaacgcccaacgttaccgatccctgatttgctcacgaccgatgcccgtaatcgcattcagttaactattggcgcaggtcagtccacctttggcgagaaaactgcaactacctggggctataacggcaatctgctggggccggcggtgaaattacagcgcggcaaagcggtaacggttgatatctacaaccaactggcggaagagacgacgttgcactggcacgggctggaagtaccgggtgacgtcgacggcggcccacagggaattattccgccaggtggcaagcgctcggtgacgttgaacgttgatcaacctgccgctacctgctggttccatccacatcaacatggcaagaccggcgacaggtggcgatggggctggctggtctggtggtga

SEQ ID NO: 474800 - DNA, 927 bp, Shigella flexneri
atgaccattgcactggaacttcaacagcttaaaaaaaactatccaggcggcgttcaggcgcttcgtggaatagatttgcaggtcgaagcgggtgatttttatgcgcttctcgggccgaacggggccgggaaatcgaccactatcggtattatcagctctctggtaaataaaacctccgggcgggtcagcgtatttggttacgatctcgagaaagatgtcgtgaacgctaaacgtcagttgggactggtgccgcaggaatttaacttcaacccgtttgaaaccgtgcagcaaattgtggtgaatcaggcagggtactacggtgtggagcgcaaagaggcgtacatccgcagcgaaaaatatcttaagcagctcgatttatggggaaaacgcaacgaacgtgcgcgtatgttatctggcgggatgaagcgccgtttaatgattgcccgtgcgttaatgcatgaacctaaactactgattctcgacgaaccgaccgcaggcgtggatattgaacttcgccgctcaatgtggggctttttgaaggatttaaacgacaaaggcaccaccatcattcttaccacacactacctggaagaagcagaaatgctgtgcctcaatatcggcattattcaacatggtgagctggtggaaaatacctcgatgaaggcgctgctggcgaagctgaaatcggaaacctttattctcgatctcgcaccgaaaagtccgttaccgaagctcgatggctatcagtatcgactggtcgatactgcgacgctggaagttgaagtgctacgtgagcaggggatcaacagcgtatttacgcagttaagtgagcagggcattcaggtattaagtatgcgtaacaaagctaaccgtctggaagagctgtttgtttcactggttaatgaaaaacaaggagatcgcgcatga

SEQ ID NO: 474801 - DNA, 876 bp, Shigella flexneri
gtgggcagtgcgccatttggggtactggcggacaatttgcgctacccgattttgcataaactgaaagacaggttaaatcaaacctggtatcagatccgtattggcgatcgactggcctatatcagcgcgctggatgcccaacccgataatggcctgccggtgctaacttatcaccatattctgcgcgacgaagaaaacacccgttttcgccatacttcgacgaccacctcggtacgcgctttcaataaccaaatggcctggctgcgcgacaggggatacgcgacactgagcatggctcagctggaaggttacgtgaagaatacgatcaatctccctgcgcgagcggtggtgattacctttgatgatggcctcaagtcggtgagccgctatgcgtatcctgtgttgaaacaatatggcatgaaggcgacggtgtttattgttacctcacgcatcaaacgtcacccgcagaagtggagcccaaaatcgctgcaatttatgagcgtttctgagcttaacgaaattcgcgatgtttttgatttccagtcacatacccattttttgcatcgggtagatggttatcgccgacccatattactgagccgtagtgagcacaatattctgtttgattttgcacgttcacgccgcgctctggcgcaatttaatccacatgtctggtatctttcgtatccgtttggcggctttaatgacaaagccgtgaaggcagcaaacgatgccggatttcacctggcggtgacaaccatgaaaggcaaagtaaaaccgggggataatccgttgttactaaaacgactttatatcttaagaacggattcgctggagaagatgtcgcggctggtgagtaaccagccgcagggataa

SEQ ID NO: 474802 - DNA, 483 bp, Shigella flexneri
atgagagcagagatagcgctgatgtccggcagtgcttttgccgttacgcaccacgccttcagtagcggagcaggaaggacatctgatggaaatggaagccacgcaagcaccttaaaatcaccatcatacactaaatcagtaagttggcagcattacccaacaaaggttggtactgaaaacgggcaactccttggtaatactctcacaggtaatgacgcagcaaaaggagtcggtgtactcatagaaggtttagcaactagtaaaaatcctctaatgacattgaaacctaatgattcaaattctgtttataaagattacgacccgagaggcaaagacgatacaacaggaggagtttacccggatcaagatacaggtataacataccctctccatttccaggccacgctacaacaggatggaactataccaatagaagctggtgagtttaaagccaccagtactttccaggtaacctacccttaa

SEQ ID NO: 474803 - DNA, 294 bp, Shigella flexneri
atggctccgtcaggcaatggcgtgatgcagccgctgcgtgtggtcttctctgcgttatttcgtctacgacaacagctcgaccctacgctgaggctaaataaaggtcttgcgcacgtcaccgccagggctcagagcacagaacccttctgggatgagcgggtgatccgccccatcgtgagcgccacccaacggctggtcaaagaaatacagcatctgcaaagcggcgactttcgtctctattgcctgtatgtggtcgccgcactggttgtgctgctaatcgctattgccgtctaa

SEQ ID NO: 474804 - DNA, 294 bp, Shigella flexneri
atggctatgtcagacgaagcgatgtttgccccgccgcaaggaataacaattgaagcggtaaacggaatgctcgcggagcggttagcgcagaaacacggcaaggcgtctttattacgcgccttcatcccgctgccgccgccgttcagcccggtacaacttattgaactgcatgttctcaaaagcaacttctattaccgctaccatgatgatggcagcgatgtgacggcaacaacagagtatcagggcgagatggtcgattattcgcgtcacgccgtccttctcggcagtagttga

SEQ ID NO: 474805 - DNA, 132 bp, Shigella flexneri
atgagcagaaaaacccaacgttactctaaagagttcaaagccgaagctgtcagaacggttcttgaaaatcaactttcgatcagtgaaggcgcttcccgattatcccttcctgaaggcactttaggacaatag

SEQ ID NO: 474806 - DNA, 279 bp, Shigella flexneri; identical to SEQ ID NO: 12949

SEQ ID NO: 474807 - DNA, 276 bp, Shigella flexneri; identical to SEQ ID NO: 12948

SEQ ID NO: 474808 - DNA, 156 bp, Shigella flexneri; identical to SEQ ID NO: 12946

SEQ ID NO: 474809 - DNA, 885 bp, Shigella flexneri
ttgcagattttcagcgtcaaaactgtcgacgtcgccgcatcgctcacgcgtaactaccagcgaagctatatcaatattaatcgccatgctttcgacttgtggatgaaatcgctgatccccgccagcgttgaggtttatcacgatagcctgtgccgaaaaatctggcgtgaggatgataaatggcatgtcatttttcgtgcagacggctgggagcaacatattaccgcccgctatctggtcggtgccgatggcgcaaactcgatggtgcggcgacatctctacccggatcatcaaatccgtaaatatgtcgctatccagcagtggttcgcagagaaacatccggtgccgttctactcctgcatctttgataatgcgataactgactgttactcatggagtatcagcaaagatggttattttatctttggcggtgcctatccaatgaaagacggtcagacgcgtttcacgacgctgaaagagaaaatgagcgcctttcagttccagtttggcaaagcggtgaaaagtgagaaatgcacggtgttgtttccctcacgctggcaggattttgtctgtggtaaggacaacgcctttctgattggtgaagcggcgggatttatcagcgccagctcgctggaggggattagctatgcgctggatagcgcagagattctgcgtgcggtgttcctgaaacagccggagaagagcaacgccgcttactggcgcgccacacgcaaactgcgtttaaaactcttcggcaagatagtaaaaagccgatgcctgaccgcaccggctttaagaaagtggattatgcgcagtggtgtggcgcatattccacagttgaaagattatccaacgcgcttcacatcacccaccagcaggatgtaa

SEQ ID NO: 474810 - DNA, 306 bp, Shigella flexneri
atgcgtgatgataacggcattgtgcaactgtggcttatctcgccacagggcggcgaaccgcgcaagttaacccataacaaaacggatattcagtctgcatttaactggcatccgtcaggagaatggttgggctttgtgctggataatcgaattgtttgtgcccatgcgcaaagcggcgaggttgagtatttaaccgaaaaccacgccaatccaccttctgcggacgccgtggtcttctcgccggatggtcaatggctggcgtggatggaaggtggccagctgtggatcaccgaaaccgatcgctaa

SEQ ID NO: 474811 - DNA, 261 bp, Shigella flexneri
atgtcccataccggggggaaagaaggaacgtatcccggcacccgcgccagcgccaccatgattggcgacgatgaaaccaactggggcactaagtcgctggcgattctcgatatgccgtttaccgctgtgatggacacgcttttactgccgtgggatgtgttccgcaaagacagctcggtgcgctcgcgcgttgaaaaaagcgaagccaacgcgcaagccaccaatgcggttattccaccggccagaatgcctgataactga

SEQ ID NO: 474812 - DNA, 1563 bp, Shigella flexneri
atgttaaccaacctttccacggaacaactggttggtctttccgggcaggcctacaaaagcggcatgtcggtgatgggctgggaagtgacttcagcggtgacgctgatcttcctcgcgctaatctttttaccgcgctatctgaagcgcggcattgccaccatccccgattttctggaggaacgttatgataaaacgacgcgtattatcatcgacttctgcttcctcattgccaccggcgtctgctttctgccgattgttctctactccggcgcgttggcgctcaacagcctgtttcacgtcggggaatcgctacagatttctcacggtgcggctatctggctactggtaattttgcttggtctggcgggaattttgtatgcggtgatcggcggactgcgcgcaatggcagtggcggactccatcaacggtattgggctggttatcggcgggttgatggtgccggtatttggcctgatcgcgatgggcaagggcagctttatgcagggcattgagcaaattaccaccgttcacgccgagaaattaaactcagtcggtggcccgaccgatcccttgccgattggcgcggcatttaccggtttaattctggtgaacaccttttactggtgtacaaatcagggcatcgtgcaacgcacgctggcgtcaaaaagcctggcggaagggcaaaagggggcgctgttaacggcggtgctgaaaatgctcgacccgctggtactggtgctgccagggttgattgcgtttcatctgtatcaggatctaccgaaagcagacatggcctacccgacgctggtcaataacgttctgccagtgccactggtgggtttcttcggcgcggtgttatttggtgcggtgatcagtaccttcaacggctttctgaatagcgccagtacattattcagtatgggtatttaccgtcgcatcattaaccagaatgccgagccgcagcagctggtcaccgtcgggcgcaaatttggtttctttatcgctatcgtttcggttttggtagcgccgtggatcgccaacgcgccgcaggggctgtatagctggatgaaacagctcaacggcatttacaacgtgccgctggttaccatcatcattatgggctttttcttcccgcgcatcccggcgctggcggcaaaagtggcgatggggattggcataatcagctacatcaccatcaactatctggtgaagttcgacttccatttcctctatgtgctggcctgtacgttctgcatcaacgtggtcgtgatgctggtgatcggttttatcaaagcgcgcgccacgccgttcaccttcaaagatgcgtttgcggtggacatgaaaccgtggaaaaacgtcaagatcgcgtcaattggtatcctgttcgcgatgattggcgtctatgtcgggttggctgaattcggcggctacggtacgcgctggttagcgatgatcagttatttcatcgctgccgtagtgattgtctacctgatttttgacagctggcggcatcgtcacgacccagccgtaacctttactcccgacgcgaaggatagcctatga

SEQ ID NO: 474813 - DNA, 819 bp, Shigella flexneri
atgaaactgacaacacatcatctacggacaggggccgcattattgctggccggaattctgctggcaggttgcgaccagagtagcagcgatgcaaaacacattaaagttggcgttataaatggcgcagaacaagatgtcgcggaagtcgctaaaaaggtggcaaaagagaaatatggcctcgatgttcaactggtaggatttagcggttcgttgctaccgaacgatgcgacaaatcatggcgaacttgatgcgaacgtcttccagcatcgaccctttcttgaacaagataatcaggcgcatggttataaactggtagcggtgggaaatacgtttgtcttccccatggcgggttattccaaaaaaatcaaaaccgtggcgcaaataaaagaaggcgcgacagtggcgatccccaacgacccgaccaaccttggtcgtgcgcttttactgttgcaaaaagagaagctaattactctgaaagagggaaaagggttattacctaccgcgctggatataaccgataatcctcgtcatttgcagattatggaactcgagggggcgcagctcccgcgcgtactggatgatcccaaagttgatgtggcgattatcagcaccacttacattcagcagaccgggctttctccggtgcacgacagtgtatttattgaagataaaaattcgccgtatgtgaatattttggtggcacgggaagataataagaatgcagaaaacgtgaaggaatttctgcaatcttatcaatcatccgaagtcgctaaagcggcagaaaccatctttaacggtggcgcggtgcctggctggtaa

SEQ ID NO: 474814 - DNA, 924 bp, Shigella flexneri
atgggttccaccagaaaggggatgctgaacgttctgattgccgccgtgttgtggggaagttcaggggtctgtgcgcaatacatcatggagcaaagccagatgtcgtcgcagtttttgactatgacgcgtttgatattcgccggtttgattctgctgacgctgtcatttgttcatggcgataaaatcttttctattattaacaatcacaaagatgccattagtctgctgattttttccgtggttggcgcgctaaccgtacagctcacttttttgctaaccatcgaaaaatcgaacgcagccacggcaacggtgctgcaattcctctcaccgacgattatcgtcgcctggttctcactggtacgtaaatcgcgcccgggcattctggttttctgcgctattttgacatcgctggtcgggacttttttattggtgacacacggtaatccgacgtcattatcgatctctcctgccgcgttattctggggcattgcctcggcatttgctgctgcattctataccacctatccctcaacgctgattgcccgctatggcacgttgcctgtcgtcggctggagtatgctgatcggcggtctgattctattgcctttttatgccagacaagggacaaactttgtcgttaaaggcagtttgattttggcgtttttttatttgatcgtcattggtacgtccctgacatttagtctgtacctgaaaggagcacaattaattggcggtccaaaagccagcattttgagctgtgcagaaccattaagtagcgcgctactctctttgctgttgctggggatcacgttcacattaccggactggctgggaacgctgctgattctgtcatcggtaattttgatttcaatggattcccgtcgccgcgccagaaaaataaatcgtccggcgcgggatgagtga

SEQ ID NO: 474815 - DNA, 357 bp, Shigella flexneri
atgaaacgtattggcaagcgactattaatgctcattgctatcgtgagtggtatgtgtttttacgccagcgtactcatggcgacgactccggcggttgagctggaattgcaaattctaaatgccatcttccttggtattctctgtggtatcggcatgctttattttcaggacttgatgcctgaaaaaataggctctgcgacaacgttatatgcaaatacttcacgcgtcggctggattatcgccggctctgttgacggaattatggttgaaatctggagctaccatgcgttgttctggctggcgatagggatgttgggtattgcgatgatttgcctgctgtttattaaagatatttag

SEQ ID NO: 474816 - DNA, 552 bp, Shigella flexneri
atgagcacagaaaaagaaaagatgattgctggtgagttgtatcgctcggcagatgagacgttatctcgcgatcgcctgcgcgctcgtcagcttattcaccgatacaatcattccctagcggaagagcacacattacgccagcaaattctcgctgatttattcggtcaggtgacagaggcttatattgagccaacgtttcgctgtgattatggctataacatttttctcggcaataattttttcgccaacttcgattgcgtgatgcttgatgtctgccctattcgcatcggtgataactgtatgttggcaccaggcgttcatatctacacggcaacacatcccatcgaccctgtagcacgtaatagcggtgctgaactggggaaacccgtcaccatcggtaataacgtctggattggcggacgcgcggtcattaaccctggtgtgaccattggtgataacgtcgtggtagcttcaggtgcagttgtcacaaaaggtgtcccggacaacgttgtcgtgggcggtaatccagccagaataattaaaaaattgtaa

SEQ ID NO: 474817 - DNA, 444 bp, Shigella flexneri
atggttactatcaatacggaatctgctttaacgccacgttctttgcgtgatacgcggcgtatgaatatgtttgtttcggtagctgctgcggtcgcaggattgttatttggtcttgatatcggcgtaatcgccggagcgttgccgttcattaccgatcactttgtgctgaccagtcgtttgcaggaatgggtggttagtagcatgatgctcggcgcagcaattggtgcgctgtttaatggttggctgtcgttccgcctggggcgtaaatacagcctgatggcgggggccatcctgtttgtactcggttctatagggtccgcttttgcgaccagcgtagagatgttaatcgccgctcgtgtggtgctgggcattgctgtcgggatcgcgtcttacaccgctcctctgtatctttctgaaatggcaagtacgttcgcggtaagatga

SEQ ID NO: 474818 - DNA, 129 bp, Shigella flexneri
atgatcagtatgtaccagttgatggtcacactcggcatcgtgctggcgtttttatccgatacagcgttcagttatagcggtaactggcgcgcaatgttggggttcttgctttaccagcagttctgctga

SEQ ID NO: 474819 - DNA, 423 bp, Shigella flexneri
atgctgaaaacaatttcgccgttaatttctcccgaactattgaaagtgctggcagagatgggacatggagatgaaattattttttccgatgctcactttcccgcccattcgatgggaccgcaggtgatccgcgctgatggcctgttggtgagcgacttgctccaggcgattatcccgttatttgagctggacagttatgccccgccgctggtgatgatggcggcggtagagggtgacactctcgatcctgaagtagaacgacgttaccgtaatgcgctttcactacaagccccgtgtcctgacatcatccgcatcaatcgttttgcgttttatgaacgggcgcaaaaagcctttgcgatcgttatcacaggcgaacgagcgaagtacgggaatattcttttaaaaaaaggggtaacaccgtaa

SEQ ID NO: 474820 - DNA, 522 bp, Shigella flexneri
atgcaatggctggcatccggcgtgctggaatgggtgagaaaactgttctggacggctgaaacaccctggcaaatgttgattgaagaagctcgtctgatcgcacctggcgcggatggtgtgaaaatgcagtgtgatttattgtcgtgtcagaacgctggctggcaaggagtgacgcttaataccacgcgggggcatttctatcgcgcggcgctggaagggttaactgcgcaattacagcgcaatctacagatgctggaaaaaatcgggcactttaaagcctatgaattattgttagtcggtggaggaagtcgcaacacattgtggaatcagattaaagccaatatgcttgatattccggtaaaagttctcgacgatgccgaaacgaccgtcgcaggagctgcgctgttcggttggtatggcgtaggggaatttaacagcccggaagaagcccgtgcacagattcattatcagtaccgttatttctacccgcaaactgaacctgaatttatagaggaagtgtga

SEQ ID NO: 474821 - DNA, 681 bp, Shigella flexneri
atgatcatcgtggctatcgtgttactggtcgccctgctgatcatgctgacgaaattcccggcattgcagagtgataatcacagtgacgccaaacaaggatcgttctccgcatcgctttctcgtctggcgcgtattcgtcactggcgctgggcggtattagcgcaattctgctatgtcggcgcacaaacggcctgctggagctatttgattcgctacgctgtagaagaaattccaggtatgactgcaggctttgccgctaactatttaaccggaaccatggtgtgcttctttattggtcgtatcaccggtacctggctcatcagtcgcttcgcaccacacaaagtcctggccgcctacgcattaatcgctatggcactgtgcctgatctcagccttcgctggcggtcatgtgggcttaatagccctgactttatgcagcgcctttatgtcgattcagtacccaacaatcttctcgctgggcattaagaatctcggccaggacaccaaatacggttcgtccttcatcgttatgaccattattggcggcggtattgtcactccggtcatgggttttgtcagtgacgcggcgggcaacatccccactgctgaactgatccccgcactctgcttcgcggtcatctttatctttgcccgtttccgttctcaaacggcaactaactga

SEQ ID NO: 474822 - DNA, 696 bp, Shigella flexneri
atgtccattgcggtaaccaccaccgatccgacaaataccggcgtcagtaccaccagcagtagttcgctcacgggcagcaacgccgcagatttacaaagcagttttctgactttgctggtggcgcagctgaaaaaccaggacccgaccaatccaatggaaaacaacgagctgacgtcgcaattggcacaaatcagcacggtcagcgggattgaaaaactcaataccacgctcggatctatttccggacagattgataacagccagtcgttacaggccagtaacctgatcggtcacggcgtgatgatccccggcacaactgttcttgcgggaaccggcagtgaagaaggggctgtgaccacgaccacgccgtttggtgttgagctgcaacaggcggcagacaaagttacggccaccatcaccgataaaaatggcgcggttgtgcgcaccattgatattggtgaactgaccgccggagttcacagtttcacctgggacggtacgttgactgatggcagcactgcgccgaacggttcttacaatgtagcgattagcgccagtaacggtggtacacaactggttgcccagccgctgcagtttgctctggtgcagggtgtgatccgcggcaacagcggtaatacgctggatctcggcacttacggcaccaccaccctcgacgaagtacggcagataatttga

SEQ ID NO: 474823 - DNA, 345 bp, Shigella flexneri
atggccttttctcaagcggttagcggattaaacgctgccgccaccaacctcgatgttattggcaacaatatcgccaactccgccacctacggctttaaatcaggcacggcctcttttgccgatatgtttgccggttcgaaagtgggactgggggtaaaagttgccggtatcactcaggactttaccgatggcacgaccaccaacaccgggcgaggtctggacgttgctatcagccagaacggttttttccgtctggtagacagcaacggttcggtgttctacagccgtaacggacaatttaagctggatgaaaaccgtaacctgttgaatatgcaaggtttatag

SEQ ID NO: 474824 - DNA, 135 bp, Shigella flexneri
atgattatctatttacacggttttgactctaacagtccgggtaaccacgagaaagtcttacaattgcagtttattgacccggatgtacgcttgataagctacagtacgcggcatccgaaacatgatatgcactga

SEQ ID NO: 474825 - DNA, 432 bp, Shigella flexneri
atgatgacattgccctacccatattcttcctccgcacgcttttacgcactgcgcctcctccccgggcaggaagttttttcccagctacacgcttttgcacagcaacatcaacttcatgccgcctggattgcaggctgtaccggtagcctgactgacgtcgccttgcgctatgccgggcaagaaggcaccacgctcctgaacggtacattcgaagtgatctcactaaacggcacgctggaacagagtggtgagcatcttcatctctgcgtttccgatccacacggcacgatgcttggcggtcatatgatgcccggctgtaccgtgcggaccacgcttgaactggtgatcggtagccttgaggaactggcgtttagccgccaaccttgcgcgctttctggttacgacgagttgcatatttcccccgttaaataa

SEQ ID NO: 474826 - DNA, 678 bp, Shigella flexneri
atgttaacgttaaataagatatcttatcgctggccaggcgcggcaacggattgtctttgcggcatttctctgcaactcaaacaaggtgaatggttggcgctgaccggtgacaatggcgcagggaaatcgacgctgttacgagtaatggcaggtcttcttacgcccacagccggtacggttatgctgcaacaacaggcgatgaaaaacctgaaaaaccgccagcgcgcggcaaaggttggcgtactgtttcaggaagcggaaaaccaactttttcacagcaccgtcgctgacgagatcgcatttggtttgaaactgcaaaaatgcccggcggatgaaatcactcaacgtacccatgctgccctgcaatgttgtcagttagcagacactgccaactcgcacccgttggatctgcatagtgcgcagcgacggatggtcgccgtcgcctgcctggaagcactctctccgccactattactgctggacgagccgagtcgggattttgacgaaaattggttgagcgtgtttgaaagctggctggagaagtgccgccagcgaggcacgagcgtggtagcaatcagtcatgacgccgcatttacccggcgtcatttctctcgtgtggtgcgactggaagatggtgtaatcaggaacgttaatccaccagacgatattcacccgtag

SEQ ID NO: 474827 - DNA, 501 bp, Shigella flexneri
atgaaaaaggtatttgcaaaatctcttctggtcgcagcgatgttttctgttgcaggctccgcattggcagtacaaaaggatattactgtaacggccaacgttgatgccgctctggatatgacacagaccgataacaccgcgttgccgaaagcagtagaaatgcaatatctgccggggcagggtctgcaatcttaccagttgatgaccaaaatctggtctaacgacgttaccaaagatgtaaaaatgcagttagtgtccccagcgcaactggttcaaagcctggatgctagcgagattgttccgctgacagtaacctggggtggtgaagaaattaaagctgatgcggcaaccacttttaccgcaaccaaaatctttgcttccgatgcgttaactaacggttctctggctaaaaacctgatgtttgctcaaaccaccaaaggtgttctggaaacaggcatctaccgtggtgtagtaagcatttatctgtctcaggatatttaa

SEQ ID NO: 474828 - DNA, 1914 bp, Shigella flexneri
atggataaaaaattactggctcttttgatcctggcgagtctcagcccggcagaggcgacattaaccaaaattcccgcagggtttgaggttattgctcagggacagcaggagtatatcgaggtttatttttcagggaaaagtctcggtaaatattatgcaatggttaatcttgataccgtaacatttcttgatccagcaagtctatataacaagctggaactggatgtagacgatcagaaaatcgcgcatatagtgaaagaaaaattatcgcagccgctagctcgccacggtgaattggcttgcggttatgtacgtactgactcagggtgtggttttctgaataccgatacgctggaaataatctataatgatgaagaaagttcggcaacgttgtttattaatccgcaatggaattcagctttcgatgcgaagtcattatatttaaatccagacaaaaatactgttaacgcttttatacatcagcaagacatcaatgttctggcacaggatgattaccaatcgttgtctattcagggaaacggtgcgctgggaataacagaaaatagctatattggtgcacactggaatttcaacggttatgatgcagatgatgtcagtgacagtaatactgacgtcagcgatctctattatcgttatgattttttacgtcgttattatgtgcaggcgggtcgcatggacaaccgcacactatttaatgcacaaggcgggaactttacctttaactttctgccactcggtgcaatcgatgggatgcgtatcgggtcgacactgagctatttaaaccaggcgcaaagccagcaaggaaccccagtaatggttctgctttcgcgcaattctcgtgttgacgcttatcgtaatgagcaacttttgggatcgttttatctcaatagtggttcgcaatttattgataccagttcctttccgccaggcagctacagcgtggcattaaaagtctacgaaaataaccaactcacccgcaccgagcttgtgccgtttaccaaaaccggcggtctgactgacggaaatgcgcaatggttcttacaggcaggtaaaactacatcacaggtttctgatgatgaaagttcagcttatcagctaggagtacgcctgccattacatccgcaatatgagctctacgcagggctggcgaatgccgatgatgtgagtgctttcgagttaggtaataactggacggcagatttaggcggggtggggaatcttgcaatcagcgccagcgtgttccgtaacgatgacggcggcaaaggtgatatgcaacaggccaactggagtaatccgggatggccgacgttgggcttttatcggaccaactctgacggcgatgcttgtacaaccgacagcagagagagctataacgccttaagctgttatgaaagtatttccgcgacagtttcactgaattttgtcggctggaatatgatgctgggttatacctgcacacaaaataacactgatgatagtttgcgttgggataaacagcagagctttgaaaataactatcttcgccagacaacagcgcaaagtatctctgaaactgtacaacttagcgcttcccgcgctattgtgatgcgtgactggattttgagtacgtcagtcggtgttttccatcgtaatgacaacggtggcgataacgacgacaacggcttgtacttatcgttttcgttatctgacacgccaacgatggatagcaataacaacagccattcaaccaatgtgtctacggattatcgttatagcgaacaggatggcgatcaaacgtcatggcagttatcgcataccttttataacgattcattcagccataaagaacttggcgtaaccgtcggaggcctgaacaccgagacgatttgctgggtgcggtactggtggatgtga

SEQ ID NO: 474829 - DNA, 465 bp, Shigella flexneri
atgaataacaccccccgctacccgcagcgcgttcgcaatgatctgcgcttccgtgaactgactgtgctacgcgttgagcgcatcagcgccggttttcagcgcattgtccttggcggcgaggcgttggacggttttacatcgcgcggctttgacgatcacagcaaactcttctttcctcaacctgacgctcactttgtgccgccaacggtaacggaagagggcatcgtctggccggaaggaccacgcccaccgtcgcgtgactatacgccactgtatgacgaactacgccatgaactggcgatcgatttctttattcacgacggtggggtcgccagcggctgggcgataaacttacggtggcaggtccgcgcggttcgctggtggtgccggaagattacgcgtatcagctgtatgtctgcgatgaatccggaatgcccgcactgcgccgccgcctggaaacgttga

SEQ ID NO: 474830 - DNA, 405 bp, Shigella flexneri
atgtctaataaaatctttacgcattccctacctatgcgctatgccgattttccaacgctggttgatgctttggactacgccgctctgagtagagccggaatgaatttttatgacagacgttgccaacttgaagatcaactggaatatcagacattaaaaacgcgtgccgaagctggtgcgaagcggttgttatcgctgaacctgaaaaaaggcgaacgcgtggcgctgattgccgaaacgagtagcgggtttgtagaggctttttttgcctgtcagtatgctggcttagtcgccttcccgttggcgattccaatgggcgtcggtcagcgggattcctggagcgccaaactccagggtttactggcaagttgccagcccgcagccattatcactggtgatgagtag

SEQ ID NO: 474831 - DNA, 951 bp, Shigella flexneri
atgtggtctggtaaagttattttattatcattgggtttatctctggcttctttttgtcatgcttcaacagatattgatcaactgtatgaacgtattgtcaataaagatcagacggcgttaaaagaactgaaaaaattagctgataccaataacacgcaggcgctagtgctactgggatttatttatgaacacggagtgacagtatctgttgacatcccaaaggcgattcagtggtatgagaaagcctgtaaccaggggggcgaatacggttgttataatgcacgttatttctttcaatatggtaaaggcgtcaccctagatgtgacacgagcacagaagtatgccagtaagtcgaaaactgacgatcttaatattccgcctgatttgatgaataaaataatcaatcaggcctatgaattgaaatccggggctgagacagacaaaacgaaacgggcgagtttaattgaatttgtcagtcgttatgtcggtcaggcacccgagaatgatttgcttttttgggggcgaattggtttcagtaaacctgaaattctgcgtctggcgactctatgggcgcaggaaggcgaccccgaaatggattatattgtcggaaatctttatctcgatgatttttcaccttctgatgatagacgttctttagacaccataaagaaagcactgcaatggtttcgtactgcggcagaaaaaggttatccgatggcgcagtataccatgggcgatacctacgaaaatggcagtgctggtttaaagattgatgctgtcgaagccaaaaaatggtacgaattagctgcaaataagaatgacgaaaaagcattagtggccctggggaatatatactattctggtttgaccggtgaggttgattattctaaagcgagcatgctttttgacaaggctgaacagcaaggggcaaaaaagccgcattgtggttaa

SEQ ID NO: 474832 - DNA, 1371 bp, Shigella flexneri
atgaacgattataaaatgacgccaggtgagcggcgcgcgacctggggtttagggaccgtattttcattgcgcatgctgggcatgtttattgtactaccggttctgactacgtacggtatggcactgcaaggcgccagcgaagcattaatcggtattgccattggtatttatggtctgacccaggccgtttttcagattccgtttggcctgctttccgaccgcattggtcgaaaaccattaattgtcggtgggctggcagtgtttgccgccggtagcgttatcgctgcgctttctgactccatctggggaattattctgggccgggcgctacaaggctccggtgcgattgccgctgccgttatggcgctgctttccgatctcacgcgcgaacaaaaccgtaccaaagcaatggcgtttatcggcgtgagctttggcattacctttgccattgcgatggtgcttggcccgatcatcactcacaaacttgggctgcacgcgctgttctggatgatcgctattctggcaacgaccggcattgcgttgaccatttgggttgtgcccaacagtagcactcacgtacttaatcgtgagtccggaatggtgaaaggcagtttcagtaaagtgctggcggaaccgcggctgctgaaactcaactttggcattatgtgtctgcatattttgctgatgtcgacgtttgttgccctgcccggacaactggctgatgcggggttcccggcggctgaacactggaaggtctatctggcgacaatgctaatcgcctttggctcggtcgtgcctttcattatctacgctgaagttaagcgcaaaatgaagcaagtctttgtcttctgcgtcgggttgatcgtggttgcggaaattgtgttgtggaacgcgcaaacgcagttctggcaactggtggtcggcgtgcagcttttctttgtggcgtttaatttgatggaagccctgctgccctcacttatcagtaaagagtcgccagcaggttacaaaggtacggcgatgggtgtttactccaccagccagtttcttggcgtggcgattggcggttcgctgggcggctggattgacggcatgtttgacggtcagcgggtatttctcgctggcgcaatgctggccgcagtgtggctggcagtcgccagtaccatgaaagaaccgccgtatgtcagcagtttgcgcattgaaatcccagaaaacgtaatggcagatgaaaaactggaaaaatgcttactgacaacgcctggtgtcaaagatgtactgctggcgaagttagaacattgcgtctatgtgaaagtagacagtaaaatcaccaatcgttttgaaatagagcgagtaatcaacgaagtatcttattaa

SEQ ID NO: 474833 - DNA, 282 bp, Shigella flexneri
ttgctgcaaagtcgcaatgatcatttgcgccaaacggcattacgcaacgcacataccccggcgtcgttgttaacgacattgactgagcctcaggatcggtcgctggctattaataatccacagctggctgccgatgtgaaaacggcgtggttaaaagaggatccatcattactcttatttgtcgaacaacccgatctttcgcagttacgtgatttagtgaaaaccggggcaacgcggaaaattcgcagtgaagcgcgtcaccggcttgaggaaaaacaatga

SEQ ID NO: 474834 - DNA, 375 bp, Shigella flexneri
atgaccaacctgaaaaatggcaatctcgccactgcttccactgaaaaatgggaacctgcaacctggccgacagagtgccgtggcgtcggctttaccgaagcgccgcgcggagcgttaggccactgggccgccattcgcgatggcaagattgatctctaccagtgcgtggtgccgaccacctggaacgccagcccgcgcgatcccaaagggcagattggcgcttatgaagcggcgctgatgaacaccaaaatggcgatccccgagcaaccgctggagatcctgcgtactctgcacagctttgatccgtgcctcgcctgttcaactcatgtgctgggcgacgacggtagcgagctgatctccgtgcaggtgcgttaa

SEQ ID NO: 474835 - DNA, 528 bp, Shigella flexneri
atgagcactcagtacgaaactcagggatacaccatcaataatgccggacgccgcctggtggtcgacccgattacgcgcatcgaaggccacatgcgctgcgaagtgaatattaacgatcagaatgtgatcaccaatgccgtctcctgcggcaccatgtttcgcgggctggagatcatcctgcaagggcgcgacccgcgcgatgcgtgggcgttcgttgaacgtatctgcggcgtctgtactggcgtacacgccctggcttcggtttacgccatcgaagatgccatcggtattaaagtgccggacaacgccaatatcatccgcaacattatgctgacaacgctctggtgccacgatcatctggtgcacttctatcagcttgccgggatggactggatcgacgtgttagatgcgctgaaagccgacccgcgaaaaacctccgaactggcgcaaagtctctcctcttggccgaaatcatcccctagctatttcttcgacgtacatatttcttcgacgtacaaaatcgcctga

SEQ ID NO: 474836 - DNA, 816 bp, Shigella flexneri
atgtcattaatcagtatgcatggcgcatggctgtcgttcagcgacgcgccgcttctcgataacgcagaactgcatatcgaagataacgaacgtgtttgtctggtgggccgcaacggcgcaggaaaatcgacgttaatgaaaatcctcaaccgtgaacaagggctggatgacggtcgcattatttatgagcaagatttgattgtagctcgtctgcaacaggatccgccgcgtaacgttgagggtagcgtttatgatttcgttgccgaaggcattgaagaacaagcggaatatctgaaacgctatcacgatatttcgtgcctggtgatgaacgacccgagcgagaaaaatctcaacgaactggcgaaggttcaggaacagctggatcaccacaacctgtggcagctggaaaaccgcatcaacgaagtgctggcgcaactggggttagatcctaacgttgcgctgtcgtcgctttccggcggctggttgcgtaaagcggcattaggacgcgcgctggtgagcaatccgcgcgtattgctgctggacgaaccgactaaccatctggatatcgaaaccatcgactggctggaggggttccttaaaaccttcaatgggacgattattttcatctcccacgaccgttcgtttatccgcaatatggcgacgcgcattgttgatctcgatcgcggcaagctggtgacctatccagggaattacgaccagtacctgcaggaaaaagaagaagccctgcgcgtggaagaactacaaaatgccgagttcgatctcaaactggcgcaggaagaagtgtggattcgctag

SEQ ID NO: 474837 - DNA, 783 bp, Shigella flexneri
atgacctctaacaccagtatcgataacgaagggcacattacacaaaacctgggtttaacggagacactactcgatgacggtaacctgagctacagcgtgcaacagggatataacagcgaggggaaaacggctaatggtagcgccagcatggactacaaaggggcgtttgcagatgcccgagtgggctacaactacagcgataacggcagtcaacaacaactgaactacgctctttcaggcagtttagttgcccattcacagggcattaccctggggcaatcgctgggggaaactaacgtgctgattgcagcaccaggcgcagagaatactcgtgtggcgaacagcaccgggctgaaaactgactggcgcggatataccgttgtcccctatgccacttcttatcgggaaaatcgaatcgcacttgatgcggcatcgttaaaacgtaacgtggatcttgaaaatgcagtagtcaacgaggttcccaccaaaggggcgttggttctggcggagttcaatgcccatgcgggagcaagggtattaatgaaaacatcaaagcagggtataccgctgcgttttggcgcgatagcgacgctggacggcatacagactaatagcggcattattgatgatgatggctcgctctatatgtccggtttgcccgctcagggagcgataactgtacgctggggcgaagctcccgatcaaatttgtcatatcagttaccagcttaccgaacaacaaattaactctgcgattacgcgaatggatgccatatgcagataa

SEQ ID NO: 474838 - DNA, 1821 bp, Shigella flexneri
atgtatagaactcatcgacaacacagcctgttaagctctggtggagtgccatcgtttattggtgggctggtggtgtttgtgtcggcagcgttcaatgcacaagctgaaacctggttcgatcctgcttttttcaaagatgatccctcaatggtggccgatttgtctcgtttcgaaaaaggacaaaaaataacgccaggggtttatcgtgtcgatattgttctgaatcagacaattgtagatacgcgcaacgtcaattttgttgagataacgccagagaaggggattgccgcctgtttgacgactgaaagcctggatgcaatgggtgttaatactgatgcgtttccggcttttaaacaactggacaaacaagcgtgtgtgccattggcggagattattccggatgccagcgtaacgtttaatgtgaataaactccgtctggaaatttcagtaccgcaaatcgccatcaaaagtaatgcccgtggttatgtcccccctgaacgttgggatgaagggatcaacgcgctattactgggatattcgtttagcggggctaacagtattcatagcagcgcagacagtgattctggcgacagctattttctgaatttaaacagtggcgttaatttaggcccatggagattgcgcaacaattcaacatggagtcgcagtagtggccaaaccgcagaatggaagaatctcagcagctatttgcagcgggcggttattccactaaaaggcgaactgaccgtaggtgatgattatactgcaggcgattttttcgatagtgtcagctttcgtggtgtgcagctggcgtcagatgacaacatgctgccagacagcctgaaagggtttgcgcctgtggtgcgtggtatcgccaaaagcaatgcccagataacgattaagcaaaatggttacaccatttaccaaacttatgtatcgcctggtgcttttgaaattagtgatctctattccacgtcgtcgagcggtgatttgttagttgaaatcaaagaagcggacggcagcgtcaatagctacagcgtaccgttttccagcgtgccattactccagcgtcaggggcgaatcaaatacgcggtgacactggcgaaatacagaaccaatagtaatgaacagcaggagagcaaatttgcccaggccacgttgcagtggggcggaccgtggggaacgacatggtatggtggtggacaatatgctgaatattaccgtgccgccatgtttggtctgggatttaaccttggcgatttcggagcaatttcgttcgatgcgacccaggcgaagagtacgctggcagagcaaagcgaacataaaggtcagtcatatcgttttctgtatgccaaaacgctcaaccaattgggcactaattttcaattgatgggctatcgctattcgacgtcgggtttctacaccctttccgacaccatgtataaacatatggatggctacgaatttaatgacggtgatgatgaagatacgccgatgtggtcgcgttattacaatttgttttacaccaaacgtggcaaactgcaggtcaatatctcccagcaattaggcgagtacggttcgttttatttaagtggtagccagcaaacttgctggcataccgatcaacaggatcggctattacagtttggctacaacacgcaaattaaagatctctcgctgggggtttcctggaactacagtaagtcccgtggtcaacctgatgctgatcaggtgtttgcactaaatttttccctgccgctcaatctgttgctccccagaagtaatgatagctataccaggaaaaaaattacgcctggatga

SEQ ID NO: 474839 - DNA, 411 bp, Shigella flexneri
atgtacattggtgcgccgttggcgaaagacagagaaacccttttcttcactagcgtacgggcagtcccttcaacaacgaagcgggaagagggaaataccctgaagattgccacacaaagcgtcatcaaacttttctggcgaccaaaaggtttagcgtatcccttaggcgaggctccggcgaaactgcgttgcacttcgtcagctgacatggttacggtcagtaacccaacaccttatttcattaccctgacagacctgaaaataggtggaaaagtagttaaaaatcaaataatttccccctttgataaataccaattctctctgccaaagggggccaaaaatagcagcgtaacgtatcgaaccatcaatgactacggggcggaaacgccgcaactcaactgtaaatcgtaa

SEQ ID NO: 474840 - DNA, 318 bp, Shigella flexneri
atggctgaacacgatattacgccagaagtcaccatttccaaaacacagcgccgctataaagtcggctatgtcagagcccgccaccaggaccgcaaaaccggtatagcccggtattatagcctgcaccttaagggcgactggctgaaagaggccggatttgataccggacggggtgtcacggtgaagatttcggaggggggcctgaccatcatcgctgacagtgacgaggtgcaggaactgcgggaggaactttatcaggttaaacaggtagttaaggggatgcgggatgggatgtttagtgtgctgaacgaaagttaa

SEQ ID NO: 474841 - DNA, 2451 bp, Shigella flexneri
gtgaatatttatcgactctcttttgtatcctgcctggtcgtggcgatgccttgcgcattggcggtcgaattcaatctgaatgttctcgataaatcaatgcgcgaccgcattgatatttcattattaaaggaaaaaggagtcattgctcccggtgagtattttgttagcgttgcggtaaataataaccaaatcagtaacgagcaaaagattaactggcacaaaaatgacgataaaaccattccgtgcatcaatgatttactggtcgataaatttggcttaaaacctgaagtccgtcagtcattaccattgataaatcagtgcgtcgattttagctcccgacctgaaatgctcttcaatttcgatcaagccaatcagcaactgaatattagtattccgcaagcctggctggcgtggtactcagaaaactggaccccaccctccacatggaaagaaggtgtcgccggtgtcctgatggattacaacttgtttgccagcagctaccgcccacaggatggcagcagcagcactaatcttaacgcctatggaacagccggaatcaacacgggggcatggcgcttacgcagtgattatcagttgaatcatactgatagcgatgataaccatgaacagtcaggcgaaatatcacgtacctatctttttcgcccgttaccgcaattaggttcaaaattaaccctcggcgaaacggattttagttccaatattttcgacggtttttcttataccggcgcggcactggcaagtgacgatcgaatgttgccatgggaactacgcggctacgccccacaaattagcggtattgcacagaccaatgccacggtgacgatcagtcaatcaggccgcgtcatttaccagaaaaaagtcccaccaggcccatttatcattgacgaccttaatcagtctgttcaggacacactggatgtcaaagtgacggaagaagatggtcgggtgaacaatttccaggtttcagcagcatcgacgcccttcctgactcgtcagggacaggttcgctataaactggccgcgggtcagccacggccctccatgtcacatcaaactgaaaatgaaaccttttttagcaatgaagtttcctgggggatgctgtcaaacacctcgctgtacagcggcctgctgctttctggtgatgactaccattctgccgcaatgggtattgggcaaaatatgctgtggcttggtgcgctgtcgtttgatgtcacgtgggccagtagccattttgatactcagcaggacgagcggggcttaagctaccgttttaattacagcaaacaagtggatgccactaacagcacgatttccctcgccgcttatcgtttctccgatcgtcattttcacagctacgccaactatctggatcacaaatacaacgacagcgatgcgcaggacgaaaaacagacgatcagcttatctgtgggccaaccgattaccccactaaacctcaatctttacgccaacctgctacatcaaacctggtggaatgcagacgcctccacgaccgccaacatcacggcaggttttaatgttgatattggtgactggagagatatctctatttctacgtcattcaatacaacccattacgaagataaagatcgcgacaaccagatttacctgtcgatttcgctccccttcggtaacggtggtcgggttggctatgacatgcaaaacagtagccacagcaccacacaccgcatgtcgtggaacgatacgctggatgaacgtaatagctggggcatgtctgccggactgcaatccgaccgtcctgacaatggagcccaggtgagcggtaactatcagcacctgagttcagcgggtgagtgggatatttctggtacctatgccgccaatgattacagttccgtcagcagcagctggagcggttctttcaccgcaacccaatatggtgcagcgtttcatcgccgcagctccaccaatgaaccacgcctgatggtcagcaccgatggcgtggcagatattccggttcagggcaatctcgactacaccaaccattttggcattgcggtggtgccgttgatttccagttaccagccttccaccgtggcggtgaacatgaatgacttacccgacggcgtaacagttgcagaaaacgttatcaaagaaacgtggattgaaggcgcgataggttacaaatcactggcttcccgttccggtaaagacgttaacgtcatcattcgcaacgccagcggtcagtttcctcccctcggagcggatatccgccaggatgacagcggcattagcgtggggatggttggcgaggaaggacatgcctggttaagcggagtcgctgaaaatcaaaagtttaccgtggtctggggtgatagccagcattgctcgctccatcttcctgaacatatggaagacaccgcaaatcgcctgattttaccttgtcattaa

SEQ ID NO: 474842 - DNA, 927 bp, Shigella flexneri
atgtccgcccagaaaccggggttgcatccgcgcaaccgtcatcacagccgctacgatctcgccacgctttgtcaggtcaatcctgaactcaggcaattcctcacgcttacacccgcaggggagcaaagcgtagactttgccaatccgctggcggtgaaggcgctcaataaggcgttgctggcccatttttacgccgtagcgaactgggatatccccgacggttttctctgcccaccagtaccgggccgggcggattatattcatcaccttgccgatttactggctgaagcaagcggaacaattccagcgaatgccagcattctggatatcggcgttggtgcgaactgtatttatccgctgattggcgtacatgaatatggctggcgttttaccggtagtgaaaccagcagccaggcgttaagcagtgcgcaggcgattatcagtgctaatccggggcttaaccgcgccattcgtctgcgtcggcaaaaagagagtggggcgatttttaacggcatcatccacaaaaacgagcaatacgacgcgaccttgtgtaacccgccattccacgattccgccgctgcggcgcgggcaggtagtgagcgtaaacgccgtaacctggggctgaacaaagacgatgcactgaactttggtggtcagcaacaggagttgtggtgtgaaggcggtgaagtcaactttatcaaaaagatgattgaagagagcaaaggcttcgcgaagcaggtgatgtggtttacctcgctggtatctcgtggtgaaaacttaccgccgttgtatcgtgctctgaccgacgtgggcgcggtgaaggtggtaaaaaaagagatggcccaggggcaaaagcagagtcgctttattgcctggacctttatgaacgacgagcagcgccgccgttttgttaatcgccaacgttaa

SEQ ID NO: 474843 - DNA, 639 bp, Shigella flexneri
atgagcgatttcgcaaaagtagagcagtctttgcgagaggagatgacgcggattgccagttcattctttcagcgcggctatgcaaccggttcggctggcaatctgtcgctgcttttacctgacgggaatttactggcgacaccgacaggttcatgcctgggcaatctcgatccgcagcggctttccaaagtcgccgcggatggcgaatggttaagtggtgacaaaccctcgaaagaggtgctctttcatctggcgctgtatcgcaacaatccgcgctgtaaagcggtggtgcatttgcacagcacatggtcgacggcgctttcctgcctgcaagggctggacagcagcaacgttattcgtccgttcacaccatacgtggtgatgcggatgggaaatgtcccgctggtgccctattaccgaccgggcgataaacgcatcgcacaggatctggcggaactggcagcagacaatcaggcttttttactggcaaatcatggcccagtggtttgcggtgaaagcctgcaagaagccgccaacaatatggaagagctggaggaaacggcaaagctgatttttattctcggtgaccgcccgatccgttatctgaccgcaggtgaggtaatgctgccaacttactga

SEQ ID NO: 474844 - DNA, 465 bp, Shigella flexneri
gtggcacattaccgtcaaattgcaccagcccgtgaagttgatgtggcacgctgcctctcaaccgaaactctggccgcttatgcacacgaactggcagagtgggttctgggccaggaaagtgtacttgctccactggtttttgccaccgccagcactgacgcattggcagcaattcaacagcaatacggtgcacaaaaagccagtcaggcagtagaaactctgttttctcaactagcggcgcggttagcagcggaaggcatgacacgctttattgtcgcaggtggtgagacctccggcgtagtcacacagagcctgggcataaaagggtttcatattggcccaaccatttcccccggcgtgccgtgggtaaacgcactggataagcctgtctcactcgcccttaaatctggcaacttcggtgatgaagcctttttttcacgagcccaaagagagtttttatcatga

SEQ ID NO: 474845 - DNA, 1902 bp, Shigella flexneri
atgagcgcaatttccctgatcaatagcggcgtggcatggtttgtcgccgccgctgttctggcatttctcttttcttttcaaaaagcgctaagtggctggatagccggaattggcggcgcggttggtagtctgtatacggcagccgcgggcttcactgtactgactggctcggttggcgtgagcggtgcgatgtcgctggtaagctacgatgtgcaaatctccccgcttaacgcgatttggctgattaccctcggcctttgcggtctgtttgtcagcctctataacattgactggcatcgccacgcgcaggtgaagtgcaacggcttgcagatcaatatgttgatggctgccgccgtctgcgccgtcatcgccagcaacctcggcatgttcgtggtaatggccgaagtcatggccttgtgtgcggtgttcctcaccagcaacagcaaagagggcaaactgtggtttgcgctggggcgtcttggcactctgctgctggtgattgcttgctggctgctgtggcagcgttatggcacgctggatctgcgcctgctggatatgcgtatgcaacagctgccgctcggttccgatatctggctgctcggttccgatatctggctgctcggtgtgattggctttggcctgctggctgggattattccgctgcacggctgggtgccgcaggcacatgctaacgcctctgcgccagctgccgcgttgttttctacggtagtcatgaaaattggcctgctgggcatgttaaccctgtcactgctgggcggtaatgcaccgctgtggtgggggatcgcgctgctggtgctcggcatgatcaccgcgttcgtcggtggtctgtatgcgttgatggaacacaacatccagcgcctgctggcttaccacaccctggaaaatatcggcattatcctgctagggctagggctagggctagggctagggctagggctagggctggggctggggctggggctgggcgctggcgtaacgggtatcgcgctcgaacaaccggcgctgattgctcttggcctggtcggtggtctgtaccatctgcttaaccatagcctgttcaaaagcgtactgttcctcggggcggggagcgtctggttccgtaccggtcatcgcgatatcgaaaaactcggtggtattggcaagaaaatgccggttatctccatcgccatgttagtcgggttgatggcaatggctgcgctgccgccactgaacgggtttgccggggaatgggttatctatcaatccttcttcaaactgagcaatagcggcgcgtttgttgcccgtctgctggggccgctgctcgctgtgggtctggcaattaccggtgcgctggcggtgatgtgtatggcgaaagtctatggcgtcacgttcctcggcgcgccgcgtaccaaagaagccgaaaacgccacctgtgcgccgctcctgatgagcgtaagcgtagtggcactggcgatttgctgcgtaattggcggtgttgctgcgccgtggctgctgccgatgctctctgctgctgtacctctgcctctggagcctgctaacaccaccgtttctcaaccaatgatcacattgctgctgattgcctgcccgctgctgccattcatcattatggcgatttgcaaaggcgaccgcctgccgtcacgttcccgcggtgcggcctgggtgtgcggctacgaccatgaaaaatcaatggtgattaccgctcacggttttgccatgccggttaaacaggcgtttgcgccagtgctgaaactgcgcaaatggctgaatccggtgtcgctggtgccgggctggcagtgcgaaggtagtgcgttgctgttccgccggatggcgctggttgaactggcggtactggtggtgattattgtttcacgaggagcctga

SEQ ID NO: 474846 - DNA, 543 bp, Shigella flexneri
atgtttacctttatcaaaaaagtcatcaaaaccggcacggcgacctcgtcttatccgctggagccgattgcggttgataaaaacttccgtggtaagccagagcagaacccgcagcagtgcatcggctgcgcggcttgcgtcaatgcctgcccgtcaaacgccttaacggttgaaactgacctcgccacaggagagctggcgtgggagtttaatctcgggcgctgcatcttctgtggacgctgcgaagaagtttgcccgacggcggcgatcaaactgtcgcaagagtacgaactggcggtgtggaagaaagaagacttcctgcaacagtcccgcttcgcgctgtgcaactgccgcgtctgcaatcgtcctttcgccgtacagaaagagatcgactacgccattgcgctgcttaagcacaatggtgacagccgcgcggaaaaccaccgcgaaagctttgagacttgcccggaatgtaagcgccagaaatgcctggtgccgtccgaccgtattgaactgactcgccatatgaaagaggccatctga

SEQ ID NO: 474847 - DNA, 768 bp, Shigella flexneri
atgagcaatttattaggcccccgtgacgccaacggcattccggtcccgatgacggtggatgaatccatcgccagcatgaaggcgtcgttactgaaaaaaatcaaacgttctgcctatgtttaccgcgtggactgcggcggctgcaacggctgcgaaatcgaaattttcgccacgctttctccgctgttcgatgcagaacgcttcggcattaaagtcgttccttcaccgcgtcatgcggatattttactgtttaccggcgcggtcacccgtgcaatgcgatcccctgcgctgcgtgcgtggcagtccgcgccggacccgaaaatctgtatctcatacggtgcctgcggtaacagcggcgggatcttacacgatctctactgcgtgtggggcggtacggataaaattgtccctgtggatgtttatatccctagctgcccgccaacgcctgccgccacgctgtacggctttgcaatggcgctcggcctgctggagcagaaaattcacgcccgtgggccgggtgaactggatgaacaaccggcggagatcctgcatggcgatatggtgcagccgctgcgcgtgaaagtggatcgcgaagcacgtcgcctggcgggttatcgttacggtcgtcagattgccgatgattaccttacacagttagggcagggcgaagaacaggttgcacgctggctggaagcggaaaacgatccgcgtctgaacgagattgtcagccatctgaatcatgttgttgaagaggcgcgtatccgatga

SEQ ID NO: 474848 - DNA, 411 bp, Shigella flexneri
atgagtgaaaaggtggtgttcagtcaactgagccgtaaatttattgatgagaacgatgccacgcccgccgaggcgcagcaggtggtctattacagcctggcgattggtcaccaccttggggttatcgattgcctggaagcggcgctcacctgcccatgggatgaatatctggcatggattgccactctggaggcgggcagcgaagcccgccacaaaatggaaggcgtaccgaaatatggcgagatcgtcatcgacattaaccatgtgccgatgctggccaacgcattcgataaagcccgggcagcgcaaacttcgcagcagcaggaatggagtacaatgctgttaagtatgctgcatgatattcatcaggaaaacgccatctatttgatggtgaggagactgcgtgactga

SEQ ID NO: 474849 - DNA, 471 bp, Shigella flexneri
gtgactgacgttttactctgtgttggcaatagcatgatgggcgatgatggcgctggcccgctgctggcggaaaagtgcgccgccgcgccgaaaggtaactgggtggtgattgacggcggtagtgcaccggaaaacgacatcgtcgccatccgtgaactgcgcccgacacgactgctgattgtcgacgccacggatatggggctaaaccccggcgaaatccgcatcatcgacccggatgatatcgccgagatgtttatgatgactacccataacatgccgttgaattaccttatcgaccagttaaaagaagacattggtgaagtgattttcctcggcattcagccggatatcgtcggcttttactacccgatgacccagccgattaaagatgcggtagaaaccgtttatcaacgactggaaggctgggaaggaaatggtggatttgcgcagttagcggtggaagaagaataa

SEQ ID NO: 474850 - DNA, 744 bp, Shigella flexneri
atgtgcgcttttttattgagcttagtgctgcctgcacaggccaccagctttaccgaatatctgccaatgagtgacagcgaatacgcgcaaaagcgggcgctgaaacctctcctgaccatgccttatgatgccgagcaaacctggcattttaggaaagtgggcgttgctggcgtgacgcttgagaagatgccaaatgaagaagattactggcaattaaccgctaaagaccgcgccggtaaatcctggactgtgcctgtgggtatgctggcaaacatagcgggcaaagggcaactctatcgcgccgatcttgatcgtaacggcattcaggatctggttatctggttaccaagtaccggtaatggtctggctccttatgcacatttaattcttatgacgttcacgcgcgaaggccgtccctgtgtctttgaacccaggggattctacaccgcaagcaaaactggcgtagatgatttgctggatttgcaaggcaatggtcacacgcaattgctggatatgcagtttaattctggttactggataaccagtctgtatcaggtaaaagacgccaaatggcagcgtgttcacggctggtttgacaagttaagctatcccgcgctcacgcgttttacttatacccccaaccgtaaactcgtcctcaaacccatcgccgggcgcgacccgcaaacggaagatctggcgcagacgcagcgttgcttgataaagggggatgtgcttgaggggtga

SEQ ID NO: 474851 - DNA, 312 bp, Shigella flexneri
atgcacatcatttctaaagcgccatttgaagagtctgcgcgtaaatatcctaacgacgctctggctcttcaggcattgtatcgggttattaaggaaacggatttttctacgccagaagagatgcgaacggcgtttcccaacctcgacaattttaaatatcgcaacaaatggtacgttctggatgtaggtgggaacaacctaggggtgattgcctacataaactttgttaataagcggttctttgtgaagcacataactaatcacgccgagtatgacaaactgacacgttactacagagagaacaaagaatga

SEQ ID NO: 474852 - DNA, 420 bp, Shigella flexneri
atgactgctaatgctgcacacgctgttaaagcaacaagagaactggtcaatgcagtcccctttctgggaggtagtgactcagaagatgattatcgtgaagcactggaactggtcgaatatttgattgaagaagatgacaccaatccacttatcgactttctggcgagccgcattgcagaatatgaaaacaacaaccaagagtttgcagagttcgacaaagccgttgcggcaatgcctgttggcgtggcgttacttcgcacgctgattgatcaacataatctgacctatgcggatttgaagaacgaaatcggctctaaatccctggtcagtcagattttgtctggacaacgatccctgacgatatcccacattaaggcactttcagcccgatttggcgttaagccggaatggtttctttga

SEQ ID NO: 474853 - DNA, 1425 bp, Shigella flexneri
atgtcagtatttccagaaggttttttatggggcggcgcgcttgccgccaaccagtctgaaggtgcgttccgtgaaggcggaaaagggctgaccaccgtcgatatgatcccacacggcgagcatcgaatggcggtgaaactggggctggaaaaacgttttcagttgcgcgatgacgagttttatcccagccatgaggcgacggatttttatcatcgttataaagaagatatcgccctgatggcagagatgggattcaaggttttccgtacctcaattgcctggagccgtctctttccgcaggacgatgaaatcacgcccaatcagcagggcattgctttttatcgtcctgtctttgaagagtgtaaaaagtacggtatcgaaccgctggtcacgttgtgccacttcgatgtgccgatgcatctggtcaccgaatatggctcctggcgtaaccgcaagctggtggagtttttcagccgctacgccagaacctgctttgaagcatttgatggtctggtgaaatactggctaaccttcaatgaaatcaacattatgttgcatagcccgttctccggcgcgggtctggtgtttgaagaaggtgaaaatcaggatcaggtgaaatatcaggccgcgcatcaccagctggttgccagtgcgctagccaccaaaatcgcccatgaggttaacccgcaaaatcaggtgggctgtatgctggcgggcggtaacttctacccttacagctgcaaaccggaagatgtctgggcggcgctggagaaagatcgggaaaacctgttttttatcgatgtgcaggcgcgcggcgcgtatccggcttactctgcccgcgtatttcgcgaaaaaggggtaaccatagataaagcgctgggcgatgatgagatcctgaaaaacaccgtcgattttgtctctttcagctattacacctcgcgctgcgcctcggcggagatgaacgccaacaacagcagtgcggcgaacgtggtgaaatcgctgcgtaacccgtatctgcaagtgagcgactggggctggggaattgatccactcggtctgcgtatcaccatgaatatgatgtacgatcgttatcagaagccgctgtttctggtggaaaacggcctcggcgcaaaagatgaacttgctgccaatggcgagattaacgatgactatcgcatcagctatttacgcgaacatatccgcgcaatgggcgaagcgattgcagatggcattccgctgatgggctacaccacatggggctgtattgatttagtttccgcctctacgggtgaaatgagcaaacgctacggttttgtctacgtagaccgtgacgacgcaggcaacggcacgctgacgcgcacacgtaagaaatcgttctggtggtataaaaaagtgattgccagtaatggggaagatttagagtaa

SEQ ID NO: 474854 - DNA, 1458 bp, Shigella flexneri
atggccaaaaattatgcggcgctggcacgctcggtgatagcggcactgggcggcgttgataacatctcggcagtcacgcactgtatgacgcgtttgcgctttgttatcaaagatgaccagcttatcgacagcccgacgttaaaaaccatccccggcgtgctcggcgtggtacgtagtgacaaccagtgtcaggtaattatcggcaatacggtttcgcaggcctttcaggaagtcgtcagcctgctgccgggagatatgcagcccgcacagcccgtgggtaaacccaaactcacgctgcgtcgcattggtgcggggatcctcgatgcgctgatcggcaccatgtcaccgctgatcccggcgattatcggcggatcgatggtcaaactgctggcgatgatcctcgagatgagcggcgtgctgacaaaaggatcgccgaccttaaccattctgaatgtgattggtgacggtgctttcttcttcctgccgctaatggtcgcggcatctgccgccatcaaatttaaaaccaatatgtcgctggcgattgccatcgcgggtgtgctggtacatccgagttttattgaattaatggcgaaagcggcccagggtgaacatgtcgaatttgccctgatcccggtcaccgcggtgaaatacacctacacggtgatcccggcgctggtgatgacctggtgcctgtcatatatcgaacgctgggtggatcgcattacaccggcggtgaccaaaaacttcctcaagccaatgctgattgtgttgattgccgcaccgctggcaatcctgctgattggcccgattggtatctggatcggtagcgccatttcggcgctggtttacaccattcatggttatctgggctggctttcagtcgccattatgggcgcgctgtggcctctgctggtaatgaccgggatgcaccgcgtctttacgccaaccatcattcagaccattgccgaaaccggcaaagaaggaatggtcatgccatcagagatcggcgctaacctgtcgctgggcggttcatcactggcggtgccgtggaaaacgaaaaacccggaactgcgccagacggcgctggctgcggcggcatcagccattatggcggggatttccgaaccggcgttatacggcgtggcgatccgcctgaaacgtccgcttatcgccagtcttatcagcggttttatttgcggcgcggttgccggtatggcggggcttgccagccactcaatggcagcgccggggctatttaccagcgtgcaattcttcgatccggcgaatccaatgagcatcgtctgggtgttcgcggtcatggcgctggcggtggtgctgtcgtttatcctcacactgttgctcggctttgaggatattcctgttgaggaagcggctgcccaggcgcgaaagcatcagagcgtacaaccgaccgtcgccaaagaagtaagtcttaattga

SEQ ID NO: 474855 - DNA, 309 bp, Shigella flexneri
atggttacgttttggggaaattatgaggggatctctcagtactacgcggcggcctcttatagctgccactcaatgaatggcctcttcccccatatcaaccctggcgaactgtttgtttatcttggcattgccagcggtctgacaacgctgaacctgccacttggcccactggcggtgagttatctgctggttggtctggtcaccaatttcttccgcggctgggtgaccgatctgaccaccgccatttttgagaaaaagatgggcattcaacttgaacaaaaagttcacctggcaggagcaacatcatga

SEQ ID NO: 474856 - DNA, 477 bp, Shigella flexneri
atgttttcagaagtcatgcgttatattctcgacctcggccctacagtgatgctgccggttgtcatcattattttttctaaaatattaggcatgaaggcaggcgattgctttaaagcgggtctgcatatcgggattggctttgttggcattggccttgtgattggcttaatgctggattccattggtccggcggcgaaagcgatggcggaaaatttcgacctgaatctgcatgtggtcgatgtcggctggccgggctcttcaccaatgacctgggcgtcgcaaattgcgctggtggcgattccgattgcgatattggttaacgtggcgatgttactgacccgtatgacgcgggtggtaaatgttgatatctggaatatctggcatatgaccttcaccggcagcgttgctgcacctggcaaccggttcatggatgatagggatggcgggtgtggtaattcacgcggcgtttgtttataa

SEQ ID NO: 474857 - DNA, 1263 bp, Shigella flexneri
atgaaaacgttaattgcccggcataaagctggtgaacatatcggcatatgttcagtctgttctgcccatccgttggttatcgaagcggcgctggcatttgatcgcaacagcacgcgcaaagtgctgattgaagcaacgtcaaaccaggtcaatcaatttggcggttataccggaatgacaccggcagactttcgcgaatttgtttttacgattgccgataaagttgggtttgcacgcgaacgcattattctcggcggcgatcatctggggccaaactgctggcagcaagaaaatgcggatgcggcgatggaaaaatccgtcgagctggtaaaagcatatgttcgtgctggcttcagtaaaattcatcttgatgcgtcaatgtcctgcgcgggggatcccataccgttagcaccagaaacggttgcggaacgagctgttgtgctttgctttgctgcggaaagtgtggcgacagattgccagcgtgagcaactgagctatgtcattggcactgaagttccggttccgggcggtgaggccagcgccattcagtcagtacacatcacccatgttgaagatgccgccaatactttacgtacgcatcaaaaggcctttattgcccgtgggctgacagaggcgttaacacgtgtgattgccatcgtggtgcagccgggtgtggaatttgatcacagcaatattatccattatcagccgcaggaagcgcaggcgctggcgcaatggatagaaaacacccgaatggtttatgaagcacattctaccgattaccagacccggacggcttattgggaattagtccgcgatcactttgcaatattgaaagtcggtcccgcattaacctttgctttacgcgaggcgatatttgcactggcacaaattgagcaggaacttatcgcccccgaaaatcgcagcggttgcctggcggtaattgaagaagtgatgctcgacgaaccgcaatactggaaaaaatattatcgcacgggttttaacgattcattactggatattcgttacagcctgtcggatcgtattcgttattactggccgcatagtcggattaaaaatagcgttgaaacgatgatggtgaatctgcaaggcgtggacatcccactgggcatgattagtcagtatcttcccaaacaatttgaacgcattcagtccggggaattatcagcaatgccgcatcagcttattatgaataaaatttatgatgttttgcgcgcctatcgctacggctgtgcggaataa

SEQ ID NO: 474858 - DNA, 1761 bp, Shigella flexneri
gtggagtacttcggagaaacgctgttccgttccgacttatgcaacgcagacgtagcaatgggcgatctgctgattcacgaaggcgcgccatgcattgcacagcaacatgcggcaaaagtgtttaatgccgataaaacatacttcgttctaaatggcacttcatcttctaacaaagtggttttaaacgccctgctaacaccgggtgatctggtgctgtttgatcgcaataaccacaaatctaaccaccacggagcgttgctacaggctggtgcaacaccggtttatctggaaacggcacgtaacccgtatggctttatcggtggcattgatgcgcactgttttgaagaaagttacctgcgtgagctgatcgcggaagtcgcaccgcagcgggcaaaagaggctcgtcctttccgcctcgctgtgattcagttaggcacctacgacggtacgatttataacgcccgccaggtggtggataaaattggtcatctgtgtgactacattctgtttgactccgcatgggttggctatgagcaatttatcccgatgatggctgactgttcgccgctgttgctggatcttaatgagaacgatccgggtattctagttacgcaatccgtacataaacagcaggctggtttttctcaaacttcacaaatccataaaaaagacagccacatcaaagggcaacagcgttatgtaccgcacaaacgcatgaacaacgcctttatgatgcacgcctccaccagcccgttctatccgctgtttgccgcactggatatcaacgccaaaatgcatgaaggtgtcagcggtcgtaatatgtggatggattgtgtggtaaatggcattaatgcccgcaaactgatcctcgataactgtcagcatattcgtccgttcgtacctgaactggtggatggtaaaccctggcagtcgtatgaaacagcgcaaattgcggttgatctgcgcttcttccagtttgtaccaggggaacactggcattcttttgaaggctatgcagagaatcaatactttgtcgatccttacaaactgttgctgacaaccccaggtattgatgcacgtaacggcgaatatgaagcgttcggtgtacccgcgacgattcttgctaacttcctgcgcgaaaatggcgtagtgccggaaaaatgcgatcttaactccatcctcttcctgctgactccggcagaagatatggccaaacttcagcaacttgttgccctgctggtacgcttcgaaaaactgcttgagtccgacgcgccattagcagaagtgctgccttccatctacaaacagcatgaagagcgctacgccggttataccctgcgtcagttgtgccaggaaatgcatgatttgtatgcccgccacaacgtgaaacaactgcaaaaagagatgttccgcaaagcgcacttcccacacgtcagcatgaatccgcaagaagccaactacgcctatttacgcggtgaagtggagctggttcgtctgccggatgccgaaggtcgtatcgctgccgaaggggcgcttccttatcctccgggtgtgctgtgtgttgttccgggtgaaatctggggtggtgctgttttgcgttacttcagcgctctggaagaagggatcaacctgctgccaggttttgcaccggagctgcagggtgtctatatcgaagaacatgatggtcgtaagcaagtttggtgctatgtcatcaagcctcgtgatgcgcaaagcaccctgttgaaaggggaaaaattatga

SEQ ID NO: 474859 - DNA, 189 bp, Shigella flexneri
atgcaggcgcattcggaagaaacagtgattgtcggcgataacctgcgtaccgatattctggcgggcttccaggccggtctggagacgattctggtgctttctggtgtttcatcgctcgacgatatcgacagtatgccgttccgcccaagctggatttacccgtcagtcgctgaaatcgacgttatctga

SEQ ID NO: 474860 - DNA, 414 bp, Shigella flexneri
atgcaattacgtaaacctgccacagcaatcctcgccctggcgctttccgcaggactggcacaggcagatgacgccgccccggcagcaggcagtacgctggacaaaatcgccaaaaacggtgtgattgtcgtcggtcaccgtgaatcttcagtacctttctcttattacgacaatcagcaaaaagtggtgggttactcgcaggattactccaacgccattgttgaagcagtgaaaaagaaactcaacaaaccggacttgcaggtaaaactgattccgattacctcacaaaccgtattccactgctgcaaaacggcactttcgattttgaatgtggttctaccaccaacaacgtcgaacgccaaaaacaggcggctttctctgacactattttcgtggtcggtacgcgcctgttga

SEQ ID NO: 474861 - DNA, 1452 bp, Shigella flexneri
atgaaaacatgttggcaaatcctcgaaattgaaagcacgacgcaaatagacattatccgccaggcttatcttgctcgcttaccgttgtgtcatcccgaaaccgatccgcaggggtttaaagcattacgccaggcctatgaagaggcgctgcgactggcggtaaatcctgtcgaggaagcagatgatgaagaaaaagatgccaccgctgaacatgaaatactacgtgcattcaggacattactggattcagaaagtgatcgttttcagccctccgcttggcagaaatttattcagcaattaaatacctggaacatggaggatgtcgatcaattacgctggccgctgtgtgcaatcgctatagaagcgcgatatctgtcattaaattgtgcttctttgttggcagagcgtttgaactggcattcgtttaatgacagcgaaggaatggatgaggaagaaagggaggcttttcttgaggccattcaggctggtgattgtttcgatttccttagccttctggaatatcccgtcgcgttacagaaccagactgttgaatattacttcgcgctggaacgttgctgccgttaccatcctgactatgtcactgcgtttttggcgatggaaggaccgtggttcattcctgatgatgcaaagttacatcgcaaactgttgcgctggtacagctcggtgcaaacaggtatggtggaactcattcctgtagccaaacagtggcaagcggaagaaccagaaagcgaagatgcccggtattaccagtgtgcacaacgtttgtactgcggcgagggggaaagcctgcttgctgatctcggcgcgtactgggaaagttacccatctacacaagctgataatttgttgttgcagtggagcaagcgtcattgcccggattatttcgcgttattagtgatggttatcgaagcgcggagcatggtagatgcgcaaggtcaaccgctgaaatatgttcctggtgagagcgcccggacgcggctgttatgggcggaaattttacatagcggaaaattatcgccgttaggtcaatcgtttattgagtcgttattcttcaaacgcaaagcatgggcgtggtggaaatcgagagtcggtagcgagacagaagaagattcaccgttactggatttgtatcgggtagcggaacaggtagtacttgaagcgtttccgaaacaagagatgctggcccgtcttaatacaaggctggaaggcggagatgctcatccattagaggccattatcaaccggatgctgttgacgaaagtaaaactcgagccggaggatgaagatgtcgatgagccaacacctgaaaaccatgaagaaaaaaatgatgagggtgaaaaaccacagagcattaccagcattatcaaaatcagtttaacggtgctggttataggttatgctctcggcaaaatcgcgatgttgtttagttga

SEQ ID NO: 474862 - DNA, 477 bp, Shigella flexneri
atgaaacccgtcgtgctggtggtggatgatgacacggctatctgcgcactgttgcaggacgtgttaagtgaacatgtctttacggtttcagtcagccataccggacaggaggccatatcgcgtattgagggcgagcctgacattgcgctggtggtgctggatatgatgctgcccgataccaacggcctgagggtattgcagcaaatccagaaactgcgtccggcattgcctgtggtgatgttgaccggaatggggagtgagtctgatgtggtggtcgggctggaaatgggcgcggatgattacatctgcaagccgttcaccccacgggtggtggtcgcacgactgaaagcgtgttgcgacgggttggcgcgctggcggttaatgaggagaaaaacgccgggctgtcattcaatggctggtatctcgataccattcgctgccaactgcatagtccgctacaacaacatgtcgagctga

SEQ ID NO: 474863 - DNA, 1002 bp, Shigella flexneri
atgatggaacgtaaagggattatcgccgcaggcaatatgctggttgaccacgtccaccagattatccagtggccagagcgcggctggctggcggagattacccacagcgaacgctccaccggcggcgcgccgcttaacgtcctgctgacactggcgaaaatgcgcaccgggttgctgttacaggcggtcgggctaatcggtcaggacagcgacggcgattacattatggcgatgcttgagcaatatcacgtcaatcgtcagcatgtgcagcgcactacctttgccccgacgtcaatgtcgcaggtaatgactgatccaagcgggcagcggacgtttttccattcgccaggtgcaaacagacttttggatcttccggcgttcgatcagctcgataacaccatgaagattttccatctcggctatttactgttgctcgacagcctggatatgccggacgatgtttacggcacccgtagcgcacgcctgctggcgcaaatgcgtgatactggctttgaaacctcactcgacctggtctcccgcaagggcgatccgcgttatcagccgctggtgttgcccgcgttgcgccatctggattacctggtaattaacgaactggaggccggggagtttagcgggctggaaattcggttacccaacggcgaaccgcatatcgcgcatattgctgccgccgcgcgtgaactgttagatgcgggcgtgcgccagcgtgtggtgatccactgcccggaaggggcgtggggagagaccccggaacagtgcggcgtgtggatcccttcgcaaaagttagaacaacgggaaattatcggcagcgtcggtgcgggcgatgtattttgtgccggatttttatatggctgccatgaacgctggacgcttaccgagagcatcaaactggcacacgcctgcgcgcgagcaagcctgttatgcgccaatgccatcgacggggcgaaaacgctggaagagctgcaaacagaaatgtcggattaa

SEQ ID NO: 474864 - DNA, 861 bp, Shigella flexneri
atgccgttgatttctctcgctgaagggctggcacatgcccgcgaacatcactatgcgttaggtgcgtttaatgtgctggactcacactttttacgcgccttgtttgctgctgccagacaagaacgttcgccctttattatcaacattgccgaagtacattttaaatatatctcgctggattccctggtcgagacagtgaaatttgaagcggcgcgtcaagcgattccggtggtattaaatctcgatcacgggctgcattttgaatcggtggcgcaagcgttgcggctgggattcagctcggtaatgtttgatggctccacgctggggtatgaagagaatatccgccagacgcgggaagtggtgaaaatgtgccatgccgttggcgtatcggtagaagctgaactgggcgcggtgggtggtgacgaaggcggtgcgctttacggtcatgccgatgaatctctgtttaccgatccgcagctggcgcgtgattttgtcgaccgtaccggcattgacgcgctggccgtggcgattggcaatgcgcacggcaaatatcgcggcgaaccgaaactcgatttcccgcgcctcgacgctatccgccagcaggcggctatcccgctggtattacacggcggttcagggattagagatgccgatttccgccgcgccatcgaactgggtatccacaaaatcaatttctacaccggcatgtcacaagcggcgctggctgccgttgaggcccgaatggcgcaccgtcagccgatgtatgacgagtttgccgagttactactagcagtggaagccgccatcagcgatacggttgcacaacagatgcgtattttcggcagtgcggggcaggcatga

SEQ ID NO: 474865 - DNA, 684 bp, Shigella flexneri
atgaaacgctccgctataaacaacattctcggccatacacggcaattcttttcgcaacatgacgtacatctgccgccctttgccagtttctctcctgctcaatggcagcagctcgacaccgccgcgtgggaggtggtttttgatctcaaactcggctgggatgttaccgcttttggtggtaacaactttgcagcacaggggctgatgctgtttaccctgcgtaacggctcagcaaaaggaatgccgtatgtgaaatgttacgccgagaagatcatgcatgtgcgcgatgcgcaggtcacgccaatgcattttcactggcgtaagcgtgaggacatcatcaatcgcggcggcggcaatttgattgttgaactgtggaatgccgatagcaacgagcaaacagttgataccgacgttacggtggtgatcgacggctgccgccagactcatgtcgcaggcagtcagttacgcctgtcccccggcgaaagtatctgcctgccgcccggcctgtatcacagcttttgggcggaaaccggttttggcgatgttctggttggcgaagtctcttctgtcaatgacgacgaccacgataaccactttttacaaccgctggaccgctacaacctgattgacgaagacgaaccggcccagctggtgttgtgtaacgaataccgccagttcctctga

SEQ ID NO: 474866 - DNA, 942 bp, Shigella flexneri
atgagattgaagcccttagtgaccgcgctctgtgcaggcgcgctgctggccgcagcaccgttcgcccaggcgaaagatctgaaatcgataggcgtaacggtaggtgacctggcgaacccgttcttcgtacagatcaccaaaggcgcggagctggaagcacgcaaactggcgggcgataacgtcaaagtgacgctggtttccagcggctacgatctgggtcagcaggtctcgcagatagacaactttatcgccgctaacgtcgatatgatcatccttaacgctgccgattcaaaagggatcggcccggcggtgaaacgggcaaaagacgccgggatcgtggtggtggcggttgacgtggcggcagaaggtgccgatgccaccatcacttccgataacacccaagcaggcgaaatggcctgtaaatacatcaccgatcgcctgaaaggcaaaggcaacgtggtgatcatcaacggaccgccggtgtccgccgtgcaaaaccgcgtcgaaggctgccagaccgaatttaaacgccatcctgacatcaaggtgctctctgacaacaagaacgccaaaggcagtcgtgagggcgggctggaggtgatgaccgggctgctggcggcaaatccgaagatcgacggcgtatttgcgattaacgatccgacagcgatcggtgccgatctggcagcaaaacaggcgcaacgtaacgagttctttattgtcggcgtggatggaagcccggacgccgaagaggcgctcaagcgtgagaactcgttgtttgtcgctactccggcgcaagatccacaggtgatggcagcgaaagcggttgagatcagttatgacattttgcagggcaaacctgcgccgaaagagccggtgctgatcccggtgacgatgatcgataaaaacaacgtcggcaattacaaaggctggacggtgaaataa

SEQ ID NO: 474867 - DNA, 975 bp, Shigella flexneri
atgacgacctctgcaaaaacctctgccaaaaaaatgctgatgagcgatctgatgcaaacggtcggcattttgcccattttgatcctgatcgtagcggtatttggctttatcgcgccaaacttttttaccgaaagcaacctgctaaatattacccgccaggcgtcgatcaacattgtgctggcggcggggatgaccttcatcattttgaccggtgggatcgatctttctgtaggttcaatcctcggcaccacggcggtggcggcaatggttgtctcccttagcccggagttcgccatgttgtctatcccggcggcgctgatgctcggcctgctgctggggctgttcaacggcgcgctggtggcctttgccggattgccgccgtttatcgtcacgcttggcacctatacggcgctgcgcggggcggcgtatctgctggctgatggcaccacggttatcaactccaacattaatttcgagtggataggcaataactatctcgggccggtcccgtggctggtggtgattgcgctggcggtgatcgtgctgtgctggtttattctgcgtcgcaccacgcttggcgttcatatctacgccgtcggtggcaatatgcaggcggcgcgtcttaccggcattaaggtctggctggtgctgctgtttgtttatggcatgagcggcctgctttcagggcttggcgggattatgagcacctcgcggctgtacagcgccaacggcaacttaggtatgggttacgaactggatgccattgcggcggtgatcctcggcggcaccagttttgtcggcggcatcggcaccatcaccggcacgctggtgggggcgctaattatcgccacgctcaacaatggcatgaccttaatgggcgtctcttacttctggcagctggtgatcaaaggggcggtgatcatcattgcggtgcttatcgacaaataccgtacccgacatcatcaaagtgcataa

SEQ ID NO: 474868 - DNA, 1521 bp, Shigella flexneri
atgaacagcacgccggttcttgagatgcgcaatattgccaaagccttcggcaaattttatgcgctcaaaggggtggatttgacggtctaccctggcgagatccatgccctgatgggggaaaacggcgcgggaaaaagcacgctgatgaaggtgctggcgggggcgtataccgccaccagcggcgagatcctgatagacggcaagccctttcacattcgcacgccaaaagatgccttaagcgccggtattacgctgatttatcaggagatgcagctggcacccaatttgacggtggcagaaaatattttcctcggcagcgagctttcccacggcgggctggtgcagcgaaaagagatgctggtgcaggcgcaaagagtgatcgaccgcctcggcgcgcagtttaacgccagcgataaggtcatgacgctgaccattgccgaacaacagcaggtcgaaatcgcccgcgcgctacatcgcaacagccgcattctggtgatggacgaacccaccgctgccctctcctcccgtgaaactcaccgtctttttgaactgattatgcggctgcgcgatgaagggatggcgattatctacatcagccaccgtatggcggaagtgtatgagctttccgatcgcgtcagcgtgctgcgcgacgggcaatacgttggcagcctgacccgcgataacctcaatgccggggagctggtgcggatgatggtcggcaggccactgagcgatctgttcaataaagagcgcgatatcccgctcggtaaagcccgcctgaatgttcaccacctgaccgacggcggcaaagtccagccgagctgcctgcaggtgctttccggcgaaattgttggcctcgccgggctggtgggagccggacgttccgaactggcgcagttaattttcggcgtgcggaaagcgacaggcggaatgattgaagtcgatggcgaaccggtggtgatccactccccgcgcgaagccatcgatcttggcattggttttctcaccgaaaaccgcaaagaacaaggcttattccttgaaatggcggcagtcgaaaacatcactatggcaaccctggagcgcgatgccagctggggaatgctcaatcgcaaaaaagcgcaaaccatttccgatgacgccattaagttgctcaacattcgcgtgcctcatgcccaggtacgcgcgggcgggctttccggcggcaatcagcaaaaactgttgatctcccgctgggtggcgattggcccgcgcattttactgctcgatgaacccacccgcggcgtggacgttggcgcaaaaagtgagatctaccggatcatgaacgagatggcgcgcaagggcgtggcgatcctgatgatctccagcgaactgccggagatagtgggaatgagcgatcgcgtccatgtgatgcgcgaaggcagcattgccggtgagctaaatggcaaaaacatcacccaggaaaacattatgaccttagcgactggcgtcaacgacgcccattcccaggcggtgacctcatga

SEQ ID NO: 474869 - DNA, 2040 bp, Shigella flexneri
atggcgcaccccggacgtcacttttttgccagcgcgcgcgggcgattgctgcttttgaatttgctggtggtggcggtgacgttgatggtcagcggcgtggcggtaatgggctttcgtcatgccagccagatgcaagagctggtgcagcagcaaactgtagatgatatgaccggcagcctgaatctggcgcgcgacacggcaaacgtggcaacggcggcagtgcgattgtcgcaggtggtgggagcactggaatataaaggcgaagccgagcggttgcaggagacacagcgggcattaaaaagctcgcttgcacaactggcgaacgcgcctttagcgcagcaggaagccgggctggtgacgcgcatcatcacgcgtagcaacgaactgcaaaccagcgtcggcggaatgctggaacgcgggcaaaggcggcatctggagcgtaacgcgctgttaagttcgctgtatcaaaacttaagttatctgcggcatctgcaaaaagtcactcacgcgcaagataatattttgcttaacgagatgaaccgactgattgttgccgccattgccacccccgcgccgcaggcgattattcatcaactggtcggagtgatgtctgccttgccaactcacagcgatacgccattggttaatacgctactcgctgattttaatcgtgaactgcgtaaactcgcgccactttcggcggctctggagcaaagcgatctggcaatcagctggtatatgtttcacatcaaagcgctggtggcgatccttaatggcgacatcaaccgttacgccgaacaggtggcgacgctctctggtcagcgggtggagcaaagttaccaggatttgcgctccggcgagaggctgatcatgattttcgccctgttagcggtggtgatcaccgcgtttgcaggttggtatatctatcgcaatctcggctctaacctgacggcgatttcccgcgcgatgagccgcctggcgcacggcgaagcggacgtcacttttccggcgttacagcggcgcgatgagttgggtgaactggcgcgcgcctttaacgtttttgcccgcaataccgcatcacttgaacgaacgtcacggctgttgaaagagaaaaccacgcagatggagattgcccaaaccgagcggcaggggctggaagaggcgctattgcacagccagaagttaaaagcggtcaggcaactgacgggcgggctggcccatgattttaataatctgctggcggtaattattggtagcctggaactggtgaacacgaactcacccgacgcgccgcgaatacagcgggcgcagcaagccgccgaacgtggcgcgctactgacccagcgattgttggcattttcccgcaagcagtccttacatccgcaagccgttgaactaaaaacactgctggaagagttaagcgaattaatgcgccactccttaccggcgacgctgacgattgagattgaagcgcagtctccggcgtggtccgcgtggattgacgtcagccaactggaaaacgccatcatcaacctggtgatgaacgcccgcgacgcgatggaagggcagacgggaattatcaaaattcgtacctggaatcagcgtgttacccgcagcagtgggcagcgtcaggacatggtggcactggaggtcatcgatcatggcagcggtatgtcgcaggcggtgaaaagccaggtgttcgagccgttctttaccaccaaacagacggggagcggcagcgggctgggcttgtcgatggtctatggtttcgtgcgccagtccggcgggcgcgtggaaattgaaagcgcgccggggcaggggacaacggtcagattacagcttccccgcgcgctgacggcggcgaaaaacctatcgccagcggcggtagaacagacagctgttaatggcgataaactggtgttagtgctggaagatgaagccgcggtgcgccagaccatctgcgagcagttgcacctgctgggctatttgacactggaagcgagcagcggcgaacaggcgctggacctgctggcggcatga

SEQ ID NO: 474870 - DNA, 180 bp, Shigella flexneri
atgagcggcgcagaagtggtcaatgcggcccgcaaactttacccgcacctgacgctgctactcatcagcggtcaggatttacgccccagccataaccccgcgctgccggacgtggcgctgctgcgcaaaccctttacccgcgcgcagctggcgcaggtgctggggcaaattgagggatga

SEQ ID NO: 474871 - DNA, 633 bp, Shigella flexneri
atgatcgtgatgccaaccacctatagccctatgacggttgctcgttcttttcgcgtggtggaagagatcgagctttctggacgtctgttacaggtaatttatgacaaccagacgccaagagtggccatcattgaagcggacattgaagtttttgcaggcgtgccgcgtcatcgggtacttgccgctctcgatctgcagcgtaaaaaagagttcggcagcgatatcattgccgttgaacgctggtgggaagactcggatctggtacaggtggaaggtatttgtgtctctccaggtgagcgcgataagggtctggcaactcggctgtatgaagcgctaatcctgcaatgcggtatcacgctaatcagcgattttgatcaatatgatggcgggaagatgctctggcagaagatcgcgcgcgagtccgatcagatttccgtgtttgtattagacactgaacaaggggcattttggccctacgatggcacgaaagtgatctacgatggcggctgcattccggaagagcgtatctggagtatttcaccggatcaaaaatgtcatggcattgtattggtggcggaaaataaacagcgagctaaccagctaatggaagagtctgcgccttaccgaatttga

SEQ ID NO: 474872 - DNA, 330 bp, Shigella flexneri
atgaaaccttactccacgctttttcttttcaccctgctcacgctgtccaccgttccggcccaggccgatattatcgacgatactattggtaatattcagcaggcgattaatgacgcttataactctgaccgtgggcgagactatgaagattcgcgcgacgacggctggcagcgtgaagtgagcgacgatcggcgcagacaatatgacgaccgccgctgccagtttgaagatcgccgcaggcagctggacgatcgccagcgccagcttgatcaggagcgtcggcagctagaagatgaagagcggagaatggaagatgagtatgggcgatga

SEQ ID NO: 474873 - DNA, 360 bp, Shigella flexneri
ttgcaggtcacgccgctgccgcttaaccactcaaaactgaccttcggttatctgctggaaacggcacatagccgggtggcgtggctatctgacaccgctggcctgccggaaaaaacgctgaaatttttacgcaataatcagccacaggtaatggtgattgattgcagccacccgccgcgcgcggatgcgccgcgtaatcactgtgatttaaataccgtgcttgcgctgaatcaggttatccgctcgccacgggtgattctgacccatatcagccaccagtttgatgcgtggctgatagaaaacgcactgccgtcggggtttgaggcggggtttgatgggatggagattggggtggcgtga

SEQ ID NO: 474874 - DNA, 396 bp, Shigella flexneri
atgagcctgaccctcacgctcaccggcactggcggcgcacagggcgttccggcatggggctgcgagtgcgcggcctgcgaccgagcgcagcgctcaccgcagtatcgccgccagccatgcagcggcgtagtgaagtttaacgacgcaatcaccctgatcgacgccgggctgcacgatctcgccgatcgctggtcgcccggatcgttccagcagtttttgctgacgcattatcatatggatcacgcccaggggctgtttccgctgcgctggggcgtgggcgatccgatcccgatctacggcccgccggatgaccagggttgcgacgatctgtttaaacatccgggcctgcttgatttcagccacacagtggaaccgtttgtggtgtttgatttgtag

SEQ ID NO: 474875 - DNA, 435 bp, Shigella flexneri
atgcctgcttgtgagcttcgcccggctacgcagtacgacaccgacgcagtttacgcgctgatttgtgagctaaaacaggcggagtttgaccaccatgcgtttcgcgtgggctttaacgccaacctgcgcgacccaaacatgcgctaccatctggcgctgctggatggcgaagttgtcagcatgatcggcctgcatttgcagtttcatctgcatcatgtcaactggatcggcgaaattcaggaactggtggtgatgccgcaggcgcgcggtctgaacgtcggcagtaaattactggcatgggcagaagaagaagcccgccaggccggggccgaaatgaccgcgctttcgaccaacgtgaaacgccacgacgcgcaccgtttctatctgcgagaaggctacgagcagagtcacttccgcttcaccaaggtgctgtaa

SEQ ID NO: 474876 - DNA, 558 bp, Shigella flexneri
atgatgggaaaactgatttggttaatggggccgtccggctccgggaaagacagcctgctggcggaaatccgcctgcgggaacaaactcagttactggtggcgcatcgctacattacgcgcgacgccagcgccggaagtgaaaaccatatcgccctgagcgagcaggagttttttacccgcgcggggcaaaatctgttggccttaagctggcacgctaacagtctgtattatggcgtcggcgttgagattgatctctggctgcacgccggattcgacgtgctggtcaacggctcacgcgcccatctgccgcaggcgctggcgcgctatcaatcggcgctgctgcccatttgcttacaggtttcgccggagatcctgcgccagcgcctcgaaaaccgtggtcgtgaaaatgccagtgaaattaacgcccgactagcacgcgctgcccgctatactcctcaggattgtcttacgctcaataatgacggcagcctgcgccagtcggtcgacaagctgctgacgctgattcatcagaaggagaaacaccatgcctgcttgtga

SEQ ID NO: 474877 - DNA, 1137 bp, Shigella flexneri
atgattatcaataacgtcaaattggtgctggaaaacgaagtggtacacggttcactggaggtgcaggacggcgaaatccgcgcctttgccgaaagccagagccgcctgccggaggcgatggacggcgaaggcggctggctgctgccggggctgattgagctgcataccgataatctggataaattcttcaccccgcgcccgaaagtcgactggcccgcccattcggcgatgagcagccacgacgcgctgatggtggcaagcggcatcaccaccgtactggacgccgtggcgattggtgatgtgcgcgacggcggcgatcggttggagaatctggagaagatgatcaacgccatcgaagagacgcagaaacgcggcgtcaaccgcgccgagcaccgtctgctcctgcgctgcgaactgccgcatcacaccacgctgccgctgtttgaaaaactggtgcagcgcgagccggtgacgctggtgtcgctgatggaccactcgccgggccagcgccagttcgccaaccgcgagaagtatcgcgaatattatcagggcaaatactcgctcaccgatgcgcagatgcagcagtacgaagaagagcaactggcgcttgccgcacgctggtcgcagccgaatcgcgaatccatcgccgccctgtgccgcgcgcgacaaattgcgctcgctagccatgatgacgccacccacgcccacgttgccgaatcccacctgcttggcagcgtgatcgccgaatttcccaccacgtttgaagcggcggaagcctcgcgcaagcatggcatgaacgtactgatgggcgcgccgaatatcgtgcgcagcggttcgcactccggcaacgtggcggccagtgaactggcgcagcttggcctgctggatatcctctcttccgactactaccccgccagcctgctggatgcggcatttcgcgtcgccgatgaccagagcaaccgctttacgctgccgcaggcggtgaagttagtgacccaaaatccggcgcaggcgcttaatcttcaggatcgcggggtgattggcgagggcaaacgcgcggacctggtgctggcacatcgcaaggacaatcgtattcatatcgaccacgtctggcgtcagggtaaaagggtgttctga

SEQ ID NO: 474878 - DNA, 681 bp, Shigella flexneri
atgattaacgtacaaaatgtcagtaaaaccttcatcctgcaccagcaaaacggcgtgcgcctgcccgtcctcaaccgcgcctcgctcaccgtcaacgcgggcgaatgcgtggtgctccacggccactccggcagcggcaaatcaaccctgctgcgctcgctgtacgccaactatctgcccgatgaagggcaaatccagatcaaacacggtgacgagtgggtagacctggtcaccgcgccagcgcgcaaagtggtggagatccgcaaaaccaccgtcggctgggtgagccagtttctgcgcgtcatcccgcgtatttcagcactggaagtggtgatgcagccgctgctcgataccggcgtaccgcgtgaagcctgcgccgctaaagccgcgcgtctgctcacccgcctgaacgtgccggaacgcctgtggcacctggcgccatcaaccttctccggcggcgaacagcagcgcgtcaacatcgcccgcggctttatcgtcgactacccgattctgctgctcgacgaacctaccgcctcgctggacgccaaaaacagcgccgcggtggtggaactgatccgcgaagccaaagctcgtggcgcagccattgtcggcatcttccatgacgaagccgtacgtaatgacgttgccgaccgcctgcacccaatggaagcctcttcatga

SEQ ID NO: 474879 - DNA, 759 bp, Shigella flexneri
atgaatcaaccgttactttcggtcaataacctgacccacctttacgcgccgggcaaaggctttagcgatgtctcttttgatttatggccgggggaagtgctgggcatcgtcggggaatccggctccgggaagaccacgctgctgaaatcaatctccgcgcgcctgacgccgcagcagggggagattcgctacgagaatcgttcgttgtatgcgatgagcgaggccgaccgccgtcgcctgctgcgcaccgaatggggcgtggtgcatcagcatccactcgacggcctgcgtcgccaggtctcggcaggcggcaatatcggcgagcggctgatggcgaccggggcccgtcattacggcgacatccgcgccaccgcgcagaagtggctggaagaggtggagattcccgccaaccggatcgacgacctgccgaccaccttttccggcggcatgcagcaacgtttgcagattgcccgcaacctggtgacgcatccgaagctggtgtttatggacgagccaaccggtgggctggatgtgtcggtgcaggcacgcctgctcgatctactgcgcggcctggtggtggagctgaacctggcggtggtgattgtcacccatgatttaggcgtcgcccgcctgctagcggaccgtttgctggtgatgaagcaggggcaagtagtggagagtgggttaaccgaccgcgtgctcgacgacccgcaccatccgtatacccagctgctggtgtcatcggttttgcagaattga

SEQ ID NO: 474880 - DNA, 846 bp, Shigella flexneri
atggctaatctgagcggctacaactttgcctacctcgacgagcagaccaaacgcatgatccgccgcgccatcttaaaagcggtggctatccccggttatcaggtgccgtttggcgggcgcgagatgccgatgccctacggctggggaaccggcggcattcagctcaccgccagcgtgattggcgaaagcgacgtgttgaaggtgattgaccagggcgcagacgacaccactaacgccgtgtcgattcgcaacttcttcaagcgcgtgaccggggtgaacaccactgaacgtacggacgatgcgacgcttatccagacgcgccatcgcatccccgaaacgccgctgaccgaagatcagatagttattttccaggtgccgatccccgaaccgctgcgctttatcgagccgcgcgaaacggaaacccgcactatgcacgtgctggaggagtacggcgtgatgcaggtgaaactgtatgaagatatcgcccgcttcggtcatatcgccaccacctatgcttatccggtgaaggtgaacgggcgctacgtgatggacccgtcgccgatcccgaaattcgataacccgaaaatggacatgatgcccgccctgcagctgttcggcgcagggcgcgagaagcgcatctatgcggtgccgccgtttacccgcgtggaaagtctcgatttcgacgatcacccgttcaccgttcagcagtgggatgagccatgcgccatctgcggatcgacccacagctatctcgacgaagtggtgctggatgacgccggaaaccgcatgtttgtctgctccgataccgattattgccgccaacagagcgaggcaaaaaaccaatga

SEQ ID NO: 474881 - DNA, 1065 bp, Shigella flexneri
atgtacgttgccgtgaaagggggcgaaaaggcgatcgacgccgcccacgccctgcaagagagccgacgccggggcgataccgatttgcccgaactgagcgtcgcccaaattgaacagcagcttaatctcgcggtggatcgcgtgatgaccgaaggcggcgttgccgaccgcgaactggcggcgctggcgctgaaacaggccagcggcgataacgttgaagcaattttcctgctgcgcgcctaccgcaccacgctggcgaaactggcggtaagcgagccgctcgacaccaccgagatgcgtctcgaacggcgtatttcggcggtttataaagacattcccggcggccagctgcttggcccaacctacgactacacccatcgcctgctcgatttcaccctgctggcaaacggtgaagcgccgacgctgaccaccgccgacagcgaacaacagccgtcgccgcacgttttcagcctgctggcgcgtcaggggctggcgaagtttgaagaagatagcggcgcacagccggatgacatcacccgcacgccgccggtttacccctgctcacgctcctcccgcctgcaacaattaatgcgcggggacgaaggctatttgctggcgctggcctactccacccagcgtggttacggacgcaatcacccgttcgcgggcgagatccgcagtggttacatcgacgtgtcgattgtgccggaagagctgggatttgcggtaaacgtcggcgaactgctgatgaccaagtgtgaaatggtcaacggttttatcgacccgccggatgagccgccgcacttcacgcgcggctacgggctggtattcggcatgagcgagcgcaaagcgatggcaatggcgctggttgaccgtgcgttgcaagccccggaatacggcgagcacgcgacaggcccggcgcaggatgaagagttcgtgctggtgcatgccgacaacgtcgaagccgcaggctttgtctcgcacctcaaactcccccactacgtcgatttccaagccgaactggagctactcaaacgtctgcaacaggagcagaaccatggctaa

SEQ ID NO: 474882 - DNA, 585 bp, Shigella flexneri
atgaccctggaaaccgcttttatgcttcccgtgcaggatgcccagcacagttttcgtcgcctgttaaaggccataagcgagccgggcgtgattgtcgccctgcatcagctcaagcgcggctggcagccgctgaatatcgccaccaccagcgtgctgctgacgctggctgataacgacacgccggtgtggcttgccgcgccattgagtaacgatatcgtcaatcagagcctgcgttttcataccaacgcgccgctggtcagccagccggaacaggcgaccttcgcggtgacggatgacggaatttccagcaaacagctcaacgccctttccaccggcaccgccgttgcgccggaagcgggcgcgacgctgattttacaggtcgccagcctgagcggcgggcgcatgttgcgtctcaccggcgcgggtattgccgaagaacgaatgatcgctccgcagctgccggagtgcattctgcacgaactcaccgagcgcccgcacccgttcccgctcggcatcgacctgatcctgacctgcggcgaacgcctgctggctattccgcgaaccactcatgtggaggtgtgctga

SEQ ID NO: 474883 - DNA, 453 bp, Shigella flexneri
atgcacgcagataccgcgacccgccagcactggatgtccgtactggcgcacagccaaccggctgaactggcagcccgcctgaacgcgctgaacatcaccgccgactatgaagtgatccgcaccgccgaaaccggcctggtacagattcaggcgcgaatgggcggcaccggcgaacgcttttttgccggcgacgccacgctgacccgcgccgccgtacgcctgactgacggcaccctcggctacagctgggtgctggggcgtgataaacagcacaccgaacgctgcgcgctgattgatgcgctgatgcagcaatctcgccactttcaaaacttatcagaaacccttattgccccgctggacgctgaccgtatggcacgcattgccgcacgccaggccgaagtgaacgccagccgggtcgacttctttacgatggttcgcggagacaacgcatga

SEQ ID NO: 474884 - DNA, 726 bp, Shigella flexneri
atgcacttgtctacacatccgaccagctacccaacacgctatcaggagatagccgcaaaacttgagcaggagcttcgtcaacactaccgctgcggcgactatcttcccgccgagcagcaactggcggcgcgctttgaggtgaaccgccacaccctgcgccgcgccatcgaccaactggtggaaaaaggctgggtacagcgccgtcagggcgtcggcgtgctggtgctgatgcgcccgttcaattacccgctcaacgcccaggcgcgttttagccagaacctgctggaccagggcagccatcccaccagcgaaaaactgctgtcggtattgcgccccgcgtccggtcacgttgctgacgcgctggggattaccgagggcgagaacgttatccatttgcgcaccctgcgccgggtcaacggcgtcgcgctctgtttaatcgaccactactttgcggacctcaccctttggccgacgctgcaacgcttcgacagcggttcgctgcacgattttctgcgcgagcaaaccggaattgcgctgcgccgcagccagacgcggatcagcgcccgccgcgcccaggccaaagagtgccagcgccttgaaatcccgaatatgtcgccgctgctgtgcgtgcgcacccttaaccaccgtgacggtgaaagcagcccggcggagtactccgtcagcctgacgcgcgccgacatgattgaattcactatggagcactga

SEQ ID NO: 474885 - DNA, 2271 bp, Shigella flexneri
atgatgaaagtattaattgttgaaagcgagtttctccatcaagacacctgggtcggtaacgccgttgagcgtctggcagatgctttaagccagcaaaatgttaccgtgattaaatccacctcctttgatgatggttttgccattctctcttcaaacgaagccattgactgcctgatgttcagctatcaaatggaacatccggacgaacatcaaaacgtcagacaattgatcggtaagcttcatgagcgccaacaaaacgtgccggtcttcctgttgggcgatcgggaaaaagccctcgccgcaatggaccgggatctgctggagcttgtcgatgaattcgcctggattctggaagataccgccgactttatcgccggacgcgccgttgccgcgatgacccgctaccgccagcagctgttgccgccactgttcagcgcgctgatgaaatatagtgacatccatgaatattcctgggcagcgccaggccaccagggcggcgttggttttaccaaaacacccgccggacgtttctaccatgactactatggtgaaaatctgttccgcaccgacatgggcatcgaacgaacttccctcggttctttgcttgaccatactggcgcatttggcgaaagcgaaaaatatgccgcacgcgtatttggtgccgatcgctcctggtcggtagtcgtcggtacttccggctctaaccgcaccatcatgcaggcttgcatgaccgataacgatgtcgtggtcgttgaccgtaactgccataaatccatcgaacaaggtttgatgctgacaggcgcgaaaccggtctatatggtgccaagccgcaaccgctacggcattatcgggccaatctatccgcaggaaatgcaacctgaaaccttgcaaaagaaaatcagtgaaagcccgctgaccaaagacaaagccgggcaaaaaccgtcttactgcgtggtaaccaactgcacctatgacggcgtgtgttataacgctaaagaagcgcaggatctgctggaaaaaacctccgatcgtctgcactttgacgaagcctggtacggctatgcacgtttcaacccgatctatgccgatcactatgccatgcgcggcgaacctggcgatcacaacggtcctaccgttttcgccacccactccatccacaaactgctgaatgcgctgtcacaggcttcttatattcatgtacgtgaaggtcgtggggcgattaacttctcccgcttcaaccaggcctacatgatgcatgccaccacctccccgctgtatgccatctgcgcatccaacgacgtggcggtgtcgatgatggacggcaacagcggcctgtcactgacacaggaagtgattaacgaagcggttgatttccgtcaggcgatggcgcggctatataaagagttcaccgctgacggtagctggttcttcaaaccgtggaacaaagaagtcgtcaccgacccacaaaccggcaaaacctatgactttgctgacgcaccaaccaaactgctgaccaccgttcaggactgctgggtaatacatccgggcgaaagctggcacggcttcaaagatattccggataactggagtatgctcgacccaattaaagtcagcatccttgctccgggaatgggtgaagatggtgaactggaagaaaccggtgttccggcggcgctggtcactgcctggcttggtcgccacggcattgtgcctacccgcaccactgacttccaaattatgttcctgttctctatgggcgtaacccgtgggaaatgggggactctggttaacaccctttgctccttcaaacgccactatgacgccaacacaccgctggcgcaggtgatgccggaacttgttgaacaatatcctgacacttacgcgaacatggggattcacgatctgggtgacaccatgtttgcctggctgaaagaaaacaaccctggcgcacggttgaacgaagcctattccggcctgccggtggcggaaatcaccccgcgtgaagcgtacaacgcgattgtcgacaacaatgtcgaactggtatccattgaaaatctgccaggacgcatcgcggcaaactcagttatcccgtatccgccaggaatcccgatgctgctgtctggtgaaaacttcggcgataaaaacagtccgcaagtaagttatttacgctcgctgcaatcctgggaccaccatttccctggatttgaacacgaaactgaagggactgaaattattgacggtatttaccacgttatgtgcgtgaaagcgtaa

SEQ ID NO: 474886 - DNA, 291 bp, Shigella flexneri
atgcgccgccagcttgagtacaagcagctctggagtggcggtcaggtgcttgctgttccgccagcgtacacaagccagcgttgcgcgtgctgtggtcatacagcgaaagaaaaccgcctgtcacaaagtaaattcagatgccaggtatgtggatatacagcgaacgccgatgtaaatggcgctcgtaacattttagcggcggggcacgccgttcttgcctgtggagagatggtgcagtcaggccgctcgttgaagcaggaacccaccgaaatgattcaggcgacagcttga

SEQ ID NO: 474887 - DNA, 783 bp, Shigella flexneri
atgaaacgtgtttctcaaatgaccgcgctggcaatggctttagggctggcttgcgcttcttcgtgggccgctgaactggcgaagcctcttacacttgaccaacttcagcaacaaaatggcaaagcgatagatactcgccccagcgcgttttataacggctggccacaaaccttaaatggcccttctggtcatgaacctgccgccttaaacctctctgctagctggctcgacaaaatgagcaccgaacagctcaacgcgtggatcaagcaacataacctgaaagccgatgccccggtggcgctgtacggtaatggcaaagatgtcgacgccgtcaaaacgcgactgcaaaaagcaggttttacgcatatctccattctgagtgacacgctaagcgaaccttcccgtctacaaaaactgccgcactttgagcagctggtttatccgcaatggctgcatgacctgcaacaaggtaaagaggttacggcgaaacctgtcggtggctggaaagtcattgaagcggcctggggcgctcctaagctttaccttatcagccatattcctggcgctgactacatcgataccaacgaagtggaaagcgaaccgctgtggaacaaagtttctgatgaacaactaaaagcgatgctggcaaaacacggcattcgccatgacaccacggtcattctgtacgggcgtgacgtatacgctggagcgcgtgtggcgcaaattatgctctacgcaggcgtgaaagatgtgcgtctgctggatggcggctggcaaacctag

SEQ ID NO: 474888 - DNA, 1344 bp, Shigella flexneri
atggatcagacatattctctggagtcattcctcaaccatgtccaaaagcgcgacccgaatcaaaccgagttcgcgcaagccgttcgtgaagtaatgaccacactctggccttttcttgaacaaaatccaaaatatcgccagatgtcattactggagcgtctggttgaaccggagcgcgtgatccagtttcgcgtggtatgggttgatgatcgcaaccagatacaggtcaaccgtgcatggcgtgtgcagttcagctctgccatcggcccgtacaaaggcggtatgcgcttccatccgtcagttaacctttccattctcaaattcctcggctttgaacaaaccttcaaaaatgccctgactaccctgccgatgggcggtggtaaaggcggcagcgatttcgatccgaaaggaaaaagcgaaggtaaagtgatgcgtttttgccaggcgctgatgactgaactgtatcgccacctgggcgcggataccgacgttccggcaggtgatatcgacgttggtggtcgtgaagtcggctttatggcggggatgatgaaaaagctctccaacaataccgcctgcgtcttcaccggtaagggcctttcatttggcggtagtcttattcgcccggaagctaccggctacggtctggtttatttcacagaagcaatgttaaaacgccacggtatgggttttaaagggatgcgcgtttccgtttctggctccggcaacgtcgcccagtacgctatcgaaaaagcgatggaatttggtgctcgtgcgatcactgcgtcagactccagcggcactgtagttgatgaaagcggattcacgaaagagaaactggcacgtcttatcgaaatcaaagccagccgcgatggtcgagtggcagattacgccaaagaatttggtctggtctatctcgaaggccaacagccgtggtctgtaccggttgatatcgccctgccttgcgccacccagaacgaactggatgttgacaccgcgcatcagcttatcgccaatggcgttaaagccgtcgctgaaggggcaaatatgccgaccaccatcgaagcgactgaactgttccagcaggcaggcgtactgtttgcaccgggtaaagcggctaatgctggcggtgtagcaacgtcgggcctggaaatggcacaaaacgctgcgcgcctgggctggaaagccgagaaagttgacgcacgtttgcatcacatcatgctggatatccaccatgcctgtgttgagcatggtggtgaaggtgagcaaaccaactacgtgcagggcgcgaacattgccggttttgtgaaggttgccgatgcgatgctggcgcagggtgtgatttaa

SEQ ID NO: 474889 - DNA, 141 bp, Shigella flexneri
atggataatctcgacgttatttgtataggtgccgctattgttgatattccattacaaccggtcagtaaaaatatctttgatgtagattcttatcctcttgaaagaatcgcaatgagcaccggggggcgatgcaataaatga

SEQ ID NO: 474890 - DNA, 777 bp, Shigella flexneri
atgaaaaattcaaaagcaatattgcaggtgccgggcacaatgaaaattatttcagcagaaataccagtgcctaaagaagatgaagttttgattaaagtagaatatgtcggtatttgtggttcagatgtacatggttttgaatcaggcccgtttattccgcctaaagacccaaatcaagaaattggcctgggtcatgaatgcgccgggacggttgtggctgtgggaagccgcgtgcgcaaatttaaaccgggggatcgggtaaatatcgaacctggcgttccttgcggtcactgtcgttactgtctggaaggcaaatataacatctgcccggacgttgattttatggcgacacaacccaactaccgcggcgcattaacgcactatctgtgtcatccggagagctttacttacaaactgcccgacaatatggacacgatggaaggggcgctggtggagcctgccgcagtcgggatgcatgccgcgatgctggcagatgttaaaccgggtaagaagataattattctgggagcaggttgtattggtttgatgacgttgcaagcgtgcaaatgcctgggcgcaacggaaattgccgtcgttgatgtactggaaaaacgtctggcaatgggggaacagcttggtgcgacagtggttattaatggcgcaaaagaggacactattgcacgctgtcagcaatttaccgaagacatgggcgcagatattgttttcgaaacagcgggttctgcggtcaccgttaaacaggcacctttaatctggtaa

SEQ ID NO: 474891 - DNA, 1380 bp, Shigella flexneri
atggaacagataacaaaaccgcattgtggtgtacggctggatcgcttaccggattgccgctggcattcgtcaatgtttgccatcgtcgcgtttggcttgcttgtctgctggagtaatgccgttggtggcttgatcctcgcgcagctgaaagcgttgggctggacagataattccaccacagccacattctcagcaatcacgaccgccggaatgtttctcggtgcgctggtgggcggcatcattggcgacaaaaccggtcgcagaaatgcgttcatcctctatgaggccattcatattgcctcgatggttgtcggtgctttctcaccgaatatggattttcttattgcctgccgttttgtgatggacgttgggctgggagctttactggttacactgtttgctggtttcaccgaatatatgcccggtagaaatcgcggaacgtggtccagtcgggtttcctttattggcaactggtcatatccgctctgctcactgattgcgatgggactcacgccgctgattagtgcagagtggaactggcgggtacaactgcttattcctgcaatattgtcgcttatcgctacggcgctggcctggcgctactttcctgaatccccgcgctggctggaatcgtgcggacggtatcaggaagccgagaaagtcatgcggagtatagaagaaggcgtcatacgccagacgggtaaacctttgccgcctgtggttattgctgatgacggtaaagcgccacaagcggtgccgtattcagccttactgacaggagtattactgaaacgcgtgatattaggctcttgtgtgctgattaccatgaacgttgtgcagtacacactaattaactggttgccaacaatattcatgacccaggggattaatttaaaagactcgattgttttaaataccatgagtatgtttggcgcgccatttggtatttttattgccatgctggtgatggataaaattccgcgtaaaacaatgggtgtggggctattaatcctgattgcggtgctcggatatatctattcactgcaaaccagtatgttgctcataacgctgattggtttcttcctgattactttcgtctatatgtacgtttgctatgcctcggcagtgtatgtccctgaaatctggccgacagaggccaaactccgtggctccggtctggcgaatgcggtagggcgaatcagtggtattgccgcaccttatgccgttgcagtgctgctcagtagttatggtgtaacgggagtctttattcttctgggggctgtttcaattattgtcgcaattgctatcgccaccattggaattgaaaccaaaggtgtctccgttgaaagtttaagtattgatgcagtagccaataaataa

SEQ ID NO: 474892 - DNA, 1284 bp, Shigella flexneri
atgacctggtttattgaccggcgtctgaacggcaaaaacaaaagcatggtgaatcgccagcgttttttacgccgttataaagcgcaaattaaacagtcgatctccgaggccattaataagcgttcggtgactgacgtcgacagcagcgaatccgtatccattcccacggaagatattagcgaaccaatgtttcatcaggggcgtggcggtctgcgccaccgcgtgcatccgggcaatgaccatttcgttcagaacgaccgaattgaacgtccccagggtggcggcggaggttccggcagtggtcagggccaggccagccaggatggtgaaggtcaggatgaatttgtctttcagatttcgaaagatgagtatcttgatctgctctttgaagatttggccttaccgaatctgaaacaaaaccaacaacgccagctgaccgaatataaaacgcatcgggcgggttataccgctaacggcgttccagccaatatcagcgttgtgcgttccttgcagaactcactggcgcgacgcacagccatgacggcaggcaagcggcgggaacttcatgcactggaagagaatttggccatcatcagcaacagtgaacctgcgcagctgctggaagaggaacgtctgcgcaaagaaattgcagaattacgtgccaaaattgaacacgtcccttttattgacaccttcgatttacgttacaagaactacgagaagcggcccgatccctccagccaggcagtgatgttttgcctgatggacgtttccggttcaatggatcaatccactaaagatatggctaagcgtttttatattctgctgtatctgttcctcagcagaacgtataagaacgtggaagtcgtatacatccgccatcatacccaggcgaaagaagtcgatgaacatgagtttttctactcgcaggaaacaggcggcaccattgtttccagcgccctgaaactgatggatgaggtagtgaaagagcgttataacccggcacagtggaatatttacgctgcacaagcatcggacggcgataactgggccgatgactctccgctttgccatgaaatcctggcgaaaaaattattacctgttgttcgttattacagctatatcgaaattacccgtcgtgcacatcagacattgtggcgagaatatgagcatctgcaatctactttcgacaactttgcgatgcagcacatccgcgaccaggatgatatttatccggtgttccgtgaactgtttcataaacaaaatgcaacagctaaagactaa

SEQ ID NO: 474893 - DNA, 1476 bp, Shigella flexneri
atgattcagtcaacacgtatttccctggggttattctttaaatattttttatcgttaccgaaaattgatcttggtcaaaactatatatctctgccatcaataaaatccagcactcacattgctctcctttttatggtttctatgggcacacaaaaattaaaagctcaaagcttttttattttcagtttattgctgacgttaattttattttgcatcaccacattatataacgaaaagacgaatgtaaaactcatcccacaaatgaattatctgatggtcgttgtggctttgtttttccttaacgccatcatttttcttttcatgttaatgaaatatttcactaacaaacaaattctaccaacactcattttaagtcttgcacttttaagtggccttatctatttagttgaaactattgttgttatccataaacctatcagcgacagtacactgatccagacaaagtcgaatgatgtttctattttctatattttccgccaactcagttttatttgtttaacctcgttggcgctcttttgttatggtaaagacaacatccttgacaacaataagaaaaaaactggcattctgttgctggcgctgattccttttttagtttttccccttctggcacacaatctgagcagttataacgctgactattctttgtatgtcgtcgattactgtcctgacaaccatactgcgacctggggaatcaactatacaaaaatattggtttgtctgtgggcatttttactgttctttattatcatgcgtacacgattagccagcgaactatggccattaatagcattattatgtctggcatcgctatgctgcaacttacttctactgactctggatgagtataattacaccatctggtacatcagtcgcgggattgaagtctccagtaaactgtttgttgtgtcttttctgatttataacatttttcaggaactgcaactctccagcaaactggcagttcatgatgtgctgaccaatatttataatcggcgctactttttcaacagcgtagagtcattattgtcgcgacctgttgttaaggacttctgtgtcatgctggttgatattaatcagttcaaacgcatcaatgcccaatggggacatcgtgtgggtgataaagtgctggtttcaattgtcgatattatccagcaaagcatccgccccgatgatattttagcgcgactggagggtgaggtgtttggcttgctatttaccgaactcaatagtgcccaggcaaaaatcattgcggaacgtatgcgtaaaaatgtcgaactcctgaccggcttcagtaacagatatgatgttcctgaacaaatgaccatcagtattggcacgtttttttcaacgggtgacactcgtaatatctcgcttgtcatgacggaagcagataaagccttacgcgaagcgaaaagcgaggggggcaacaaagtgattattcataatatttaa

SEQ ID NO: 474894 - DNA, 225 bp, Shigella flexneri
atgaaattgcaccatagaatgctccggcattttatcgccgcaagtgtcattgtgctgacatcttccttccttatttttgaacttgtcgccagcgacagagcaatgagtgcctatctgcgctatatcgtgcagaaagcagactcctcctttctttatgataagtatcagaatcagagtattgccgcgcatgtgatgcgcactctcgctgaggtgtactgtcaatag

SEQ ID NO: 474895 - DNA, 522 bp, Shigella flexneri
atgaaatcggtacgttaccttatcggcatcttcgcgtttattgcctgctattacctgttaccgatcagcacgcgtctgctctggcaacccgatgaaacgcgttatgcggaaatcagtcgagaaatgctggcatccggcgactggattgtgccccatctgttagggctacgttatttcgaaaaacccattgccggatactggattaacagcattgggcaatggctatttggcgcgaataactttggtgtgcgggcaggcgttatctttgcgaccctgttaactgccgcgctggtgacctggtttactctgcgcttatggcgcgataaacgtctggctctactcgccacagtaatttatctctcattgtctatgccatcggcacttatgccgtgctcgatccgtttattgcattctggctggtggcgggaatgtgcagcttctggctggcaatgcaggcacagacgtggaaaggcaaaagcgcaggatttttactgctgggaatcacctgcggcatgggggtga

SEQ ID NO: 474896 - DNA, 969 bp, Shigella flexneri
atgtttgaaatccaccctgttaagaaagtctcggtggttattcccgtttataacgagcaggaaagcttaccggaattaatcaggcgcaccaccacagcctgtgaatcgttggggaaagagtatgagatcctgctgattgatgacggcagtagcgataattccgcgcatatgctggtcgaagcctcacaagcggagaacagccatattgtgtctattttgcttaaccgcaattacgggcaacattcagcgattatggcgggattcagtcacgttactggcgacttaattattacccttgatgccgatctccagaatccgccagaagaaatcccccgcctggtggcaaaagccgatgaaggttacgacgtggtagggactgtacgccagaaccgccaggacagctggtttcgtaaaacagcttcgaagatgattaaccggcttattcagcgcaccactggcaaagcgatgggtgactacggttgtatgctgcgcgcctatcgccgtcatattgtcgatgcgatgttgcactgccatgaacgcagcacctttatcccgattctggcgaatatcttcgcccgccgtgcaattgaaattccagtacatcatgccgagcgtgagtttggtgaatccaaatacagttttatgcgcctgattaatttgatgtacgacctggtgacctgccttaccacaacgccgctacgtatgctgagtctgctcggcagcattattgcgattggaggttttagcattgcggtgctgctggtgattttacgcctgaccttcggaccacaatgggcggcagaaggcgtctttatgctatttgccgtgctgtttacttttattggcgctcagtttatcggcatgggattactcggtgaatatatcggcaggatctacaccgatgtccgcgcccgcccccgctattttgttcagcaagttatccgtccatccagcaaggaaaatgaataa

SEQ ID NO: 474897 - DNA, 222 bp, Shigella flexneri
atgactattgctgaacggctacggcaggaaggacatcaaattggctggcaagaaggtaaattagtaggtttgcagcaaggtaaattagaaggtttgcagcaaggtatgcatgaacaagccattaaaattgctttgcgcatgctggaacagggcattgatcgtgaccaagtgctcgcggccacccagctaagcgaagccgatctggcagcgaataaccactaa

SEQ ID NO: 474898 - DNA, 1359 bp, Shigella flexneri; identical to SEQ ID NO: 473134

SEQ ID NO: 474899 - DNA, 984 bp, Shigella flexneri
ttgcagacctttaatccgctgaccataggcgctaacatagcgcctcatttttttgcgggtgatgatatacgtgtgttactggcaccgatggagggagtgcttgactctctggtgcgtgaattgctgaccgaagttaacgactacgatctgtgcatcaccgagtttgtccgcgtggtggatcaactgctgccggtaaaagtctttcatcgcatttgccctgagctacaaaacgccagccggacaccatctggtacgctggtgcgcgtgcagttgttaggtcagttcccacaatggctggcagagaacgccgcccgtgcggtggagttaggttcctggggcgtggatctcaattgcggctgcccgtcgaaaacggttaacggtagcggcggcggggcgacgttactcaaagatcctgaactcatctaccagggggcaaaagcgatgcgtgaagctgtaccggcgcatttgcctgtcagcgtgaaagtgcgtctgggctgggacagcggtgagaagaaatttgaaatcgccgatgcggttcaacaggctggcgctacggagctggtggtgcatgggcggacgaaagagcagggttaccgcgcggagcatattgactggcaggcgattggcgagattcgccagcggctgaatattccggtgattgccaacggtgaaatctgggactggcagagcgcgcaacaatgcatggcgatcagcggctgcgacgcagtgatgattggtcgcggggcgctcaatattcccaacctgagccgggtggtaaaatataacgaaccgcgaatgccgtggccggaggtggttgctttgctgcaaaaatatacccgtctggaaaagcagggcgataccgggttatatcacgttgcgcggattaaacagtggttgagttatttgcgtaaagaatacgatgaagcaacggaattatttcagcatgttcgggtgttgggtaatgctgccaacttactgatttag

SEQ ID NO: 474900 - DNA, 1992 bp, Shigella flexneri
atgtttaggttgaaccctttcgtacgggtcgggctgtgtttgtccgctatttcttgtgcatggcctgtgttagcggtcgatgatgatggcgaaacgatggttgtcactgcatcttccgtggaacaaaatcttaaagatgcacccgccagtatcagcgtcattacccaggaagacctgcagcgaaaaccggtacagaatctgaaggatgtcctcaaagaagtgcctggcgtacaactgacgaacgaaggggataaccgtaagggcgttagtattcgtggtctggacagcagctacaccctgattcttgtcgacggtaaacgcgttaactcccgcaatgccgtcttccgccacaatgatttcgatctgaactggatcccggtcgattccatcgaacgtattgaagtggttcgtggcccgatgtcgtcgctatacggctccgatgcgctcggcggtgtagtgaatatcatcaccaaaaaaatcggtcagaaatggtcgggtaccgttaccgtcgataccaccattcaggaacatcgcgatcgcggtgatacctataacggtcagttctttaccagtggaccattaattgatggtgtgctgggaatgaaagcttacggcagcctggcaaaacgtgaaaaggatgacccgcaaaactcaacgaccaccgataccggagaaacgccgcgtattgaaggattctccagccgcgacggcaatgtcgaatttgcctggacaccgaatcaaaatcacgattttactgccggatacggtttcgaccgtcaggatcgtgattccgactcgctggacaaaaaccgcctggaacgccagaactactgcgtcagccataatgggcgttgggattacggcaccagcgaactgaaatcctacggtgagaaagtcgagaacaaaaaccctggcaacagcagcccgataacttccgaaagcaatacggtcgacggcaaatacacgttgccgctgacggcgattaatcagtttctcacggttggcggtgaatggcgtcacgacaaacttagcgatgcggtgaacctgaccgggggaaccagctccaaaacgtctgccagccagtacgcgctgtttgtggaagatgaatggcggatcttcgagccgctggcgctgacgaccggcgtgcgtatggacgatcacgaaacctacggtgaacactggagtccgcgtgcctacctggtttataacgccaccgacaccgtaacggtgaaagggggctgggcgacggcatttaaagcaccttctctgttgcaacttagccctgactggacgagcaattcctgccgtggcgcatgtaagattgtgggtagcccggatctgaaaccagaaaccagcgaaagttgggagctggggctttactacatgggtgaagaaggctggctggaagggggtgaatccagcgttatcgttttccgtaacgatgtgaaagatcgtatcagcatcagccgtacgtctgacgtcaacgctgcaccgggctaccaaaactttgttggttttgagacgggcgctaacggacggcgcataccggtatttagctactacagcgttaacaaagctcgtattcagggcgtggaaaccgaactgaaaattccgttcaacgatgaatggaaactgtcgatcaactacacctacaacgatggtcgtgatgtcagcaacggcgaaaacaaaccgctatccgatctgccgttccatactgctaacggtacgctggactggaaaccgctggcgctggaagactggtcattctatgtttctggtcactataccgggcagaaacgcgccgacagcgcgacggctaaaacaccgggcggttataccatctggaataccggcgcggcctggcaggtgactaaagacgtcaaactgcgcgcaggcgtgctgaaccttggcgacaaggatctcagtcgtgacgactacagctataacgaagacggacgtcgttactttatggcagtggattatcgcttctga

SEQ ID NO: 474901 - DNA, 1458 bp, Shigella flexneri
atgatctttacttccgtatttggatttgccaatagcccatcggcttattacttaatgggttatagtgcgattcccttttatatattttctgcattgttattctttattccattcgccttaatgatggctgaaatgggagctgcttatcgcaaagaagaaggtggtatctattcctggatgaataatagtgtcggaccacgttttgccttcattggtacgtttatgtggttttcctcttatatcatctggatggtgagtacctccgcgaaagtttgggtaccgttctcaacattcctctatggtagtgacatgacccagcactggcgtattgccggactggagcctacgcaggtggttggtctgctggcagtagcatggatgattctggtcaccgtcgttgcttcaaaggggattaataaaattgcccgcattactgcggtgggcggtattgcagtaatgtgtctgaatttagtattgctgttagtaagcattactattttgttattaaatggtgggcatttcgcgcaggatattaatttccttgcatcaccgaacccgggttatcagtccggtctggcaatgctatcgtttgtggtatttgctatttttgcctatggcggaattgaagcggttggtggtctggtcgataaaacggaaaatccagaaaagaactttgccaaaggtattgtttttgccgctattgttatttcaatcggttattcgctggcaatatttttatggggcgtcagcacaaactggcagcaggtattaagtaatggttccgttaaccttggcaatattacctatgtgctgatgaagagcctcggggtgacgctgggtaacgcactgcatttgtcacctgaagcgtcattgtcgctgggcgtatggtttgcgcgtattaccggactttcgatgttcctcgcttataccggtgcgttctttacgctttgctattcaccgctgaaagccatcatccaggggacgccgaaagcgttgtggccggaaccgatgacgcgcctgaatgcgatggggatgccgtctatcgccatgtggatgcagtgcgggttggttactgtcttcattctgctggtttcgtttggtggcggtaccgcatcggcgttctttaacaagctgacgctgatggcgaacgtgtctatgacgcttccttacctgttcctcgcgctggctttcccgttttttaaagcacgtcaggatctcgacagaccatttgtgattttcaaaacgcgtatgtcggcaatgattgcgacggtggttgtcgttctggtggtgacatttgcgaacgtcttcaccattattcagcctgtggttgaagccggagactgggacagcacattgtggatgattggcggccctgtcttcttctcgctgttagcgatggcgatttaccagaactattgcagtcgcatggcgaataaacctgagttagctctcgactga

SEQ ID NO: 474902 - DNA, 252 bp, Shigella flexneri; identical to SEQ ID NO: 464088

SEQ ID NO: 474903 - DNA, 492 bp, Shigella flexneri
atgctgatttcccgtcattatctgccggagttccagctacagaaccccgccaataaaaaccgcgctgtctatcgccagtgggctaaagcgggctggatacgcacaacgccaggtgactgcattgattacgaccggatcagagatgacatcatgcaggatgcggagaaatttaatatcaggctggtgggctttgatacgtggaacgccacgcatctcaggacgcaattacagggggctggttttgaggtggagccgttcccgcaaacctacctcagattcagtccggcggcgaaatcgttcgaagtttttgttaaccgcagggtgattgtgcatcgtggcgatccggtgttgtcctggtcgatgagtaacgtcgtgatgcagagtgacgcgaacgccaatatcaagccgaacaagaaaaaatcaccgaacaagatagacccgagcgtggcggcgctgatggcgtttggtacattccaggcagagcatgggtaa

SEQ ID NO: 474904 - DNA, 1479 bp, Shigella flexneri
atgtcgaaaaaatacatcatagggattgatggcggaagtcagagcacaaaagtggtgatatacgatctggaaggtaatgtggtttgcgaagggaaaggcttattgcagccgatgcacacgccagatgccgatactgcagaacatcctgacgacgatttatgggcatcattatgttttgccggtcacgatttgatgagtcagtttgccgggaataaagaagatattgtcggtattggtctgggatccatccgttgctgccgtgcgttattgaaagccgatggcacgcccgctgcgccgttgattagctggcaggatgcacgcgtaacgcgtccctacgaacacactaatcctgacgtggcatatgtcacctctttttcgggttatctgacgcatcgcttaaccggcgagtttaaagacaatatcgccaactattttggtcagtggccggtggattataagagctgggcatggagcgaagatgctgcggtaatggagaagtttaatatcccccgtcatatactgtttgatgtgcaaatgccaggcactgttcttgggcatatcacaccacaaggcgcgctggcgacacatttcccagctgggctgccggttgtttgtaccaccagtgataaaccggtagaagctctgggggccggattactggatgatgaaacggcggtgatttcactcggtacttatatcgcgctgatgatgaacggcaaagccttgccgaaagatccggtggcgtactggccgattatgtcttctattccgcaaacattgctgtatgaaggttacggtattcgcaaaggtatgtggacggtgagctggctgcgcgacatgttaggcgagtcgttaattcaggatgccagggcgcaggatctttcaccggaagatttactcaacaagaaagcctctagtgtgccacctggctgtaatgggctgatgacggtgctggattggctgaccaatccgtgggaaccgtacaaacgcgggattatgatcggctttgattccagcatggattacgcatggatatatcgttcgatactggaaagcgtggcgctgacgctgaagaacaattacgacaatatgtgtaatgaaatgaatcactttgcgaagcatgtgatcattactggcggcggttcgaacagcgatctgtttatgcagatttttgccgacgtgttcaaccttccggcacgacgtaacgccattaacggttgtgcaagcctgggggcagcgattaatacagcggtaggtctggggctatacccggattacgcaacggctgtcgacaaaatggttcgcgtgaaagatatctttatgcctgttgagagcaatgccaaacgctacgacgcgatgaataaaggtattttcaaagacctaaccaaacatactgatgtgatcctgaaaaaatcgtatgaagtgatgcatggggaattggggaatgcggattcgatccagagctggtcgaatgcgtaa

SEQ ID NO: 474905 - DNA, 1278 bp, Shigella flexneri
atgcaacacaactcatatcgccgttggataaccctcgcgataattagttttagcggcggcgttagttttgacctggcttatttacgttatatttatcaaattcccatggcgaaatttatgggattcagcaataccgagataggtttaataatgagtacctttggtattgcggctattattctttatgcccccagcggcgttattgccgataaattttcacaccgcaaaatgattacttccgcgatgatcattaccggattactgggtctgttaatggcaacgtatccaccgctgtgggtaatgctctgtattcaggtcgcctttgcgataacgacgattttaatgctgtggtcggtgtcgattaaagccgcctcgttgcttggcgatcatagcgagcaagggaaaattatgggctggatggaagggctgcgcggcgtcggtgtaatgtcgctggcggtgtttaccatgtgggtcttttctcgctttgcaccggatgacagcgccagcctgaaaacagtcattatcatctacagtgtggtttacatcttgttggggattctgtgctggttttttgttagcgataacaacaacctgcgcagtgccaataacgaagaaaaacagtcattccagcttagcgacatccttgccgttttgcgtatcagcaccacctggtattgcagcatggtgatttttggtgtcttcacaatctacgccattctgagttactccaccaactatctgaccgaaatgtacggcatgtcgctggtggcagcgagctacatggggattgtgatcaacaaaatcttccgcgcgctgtgcggcccacttggaggcattatcaccacctacagtaaagtgaaatcccctacccgcgtgattcaaatcctttccatcatcggtttgctggcgttgacagccctgctcgtcacgaactctaacccgcaatcggtcgcgatggggattggcctgattttactgctgggattcacctgttacgcctcacgcgggctgtactgggcctgccccggcgaagcgagaacaccgtcttacattatgggcaccacggtaggtatttgttcggtgattggattcctgccggatgtcttcgtttacccgattatcggccactggcaagacaccctgcccgctgcagaagcctaccgcaatatgtggctgatgggcatggcggcgcttgccatggtgatagtctttacctttttgctgttccaaaaaattcgtactgctgatagcgcccccgcaatggctagcagcaagtaa

SEQ ID NO: 474906 - DNA, 630 bp, Shigella flexneri
atgtcaatcgaatctctcaatgcgttctcaatggattttttctccctgaaaggtaaaacagcaattgttaccggcgggaatagcggtttaggtcaggcatttgcaatggcgttggccaaagctggcgcaaatatttttattcctagcttcgtcaaagataacggcgaaacaaaggaaatgattgaaaaacagggtgttgaagtggacttcatgcaggtggatattaccgcagaaggcgcaccgcagaagattatcgctgcctgctgtgagcgcttcggtactgtcgatattctggttaacaatgccggtatttgtaagctgaataaggtgctggacttcggtcgtgccgactgggatccgatgattgatgtgaacctgaccgccgcattcgagttaagctatgaagcggcaaaaattatgatcccgcagaaaagcggcaaaattattaatatctgttcattgttctcttacttaggtggacaatggtcacctgcatattctgccactaaacatgctcttgccgggttcaccaaagcttattgtgatgaactaggtcaatataatattcaggtaaatggtatcgcccctggctattatgcaacagcatattatgctggcgacacgcagtaa

SEQ ID NO: 474907 - DNA, 213 bp, Shigella flexneri
atggtatcgcccctggctattatgcaacagcatattatgctggcgacacgcagtaatccagaaaccaatcagcgcgttcttgatcatattccggcaaaccgttggggcgatactcaggatttaatgggcgcagccgtgtttctcgcaagtcaggcatcgaattatgtcaacgggcatttattagtggtcgatggcggttatttagtgcgctaa

SEQ ID NO: 474908 - DNA, 186 bp, Shigella flexneri
atgtctttatctcgcgcagcgattgtcgaccagctaaaggaaattgttggtgcagatcgcgtaattaccgatgaaacagtattaaagaaaaacagtattgaccgttttcgtaaatttccggatattcatggcatttatactttgccgattccggcagcggtcgtaaaactcggttccacagagtaa

SEQ ID NO: 474909 - DNA, 1521 bp, Shigella flexneri
gtgagaaccgtaataacatacttgagattctcatcagccacacaaggtgctgaaggtgctgattcaaccagacgacaaaatgagctattcaaacagtggttaaggaagaatagcgatgctcaggtagtggcatctttcaatgatgaaggtctatccggttacaaaggtaaacacttatcagggcaatttggggatatgctctcccgcattgaatcaggggagtttccagaagggacaattttactagtcgaagctatcgaccgcataggccgccttgaacatcttgaaacagaagccttgatgaatcgcattattgctcatggtatcgagattcacactctacaggatgggctaatctacacaagggatgctctatccgatgatttaggaatctcaatcattcagcgggttaaaagctacatagcgcatcaggagagtaaacagaagtctttccgtgttagtcagaaatgggaacaacgtgcaaagcttgcccttgctggtgaacaacgtttaacaaggaatgttcccggatggattgaccctgagacttttaaactcaatgaacatgctgaaactgtacgcttgattttcaagctgctgctagatggtgaaagtctgcataacattgcacgtcacctacaggctaataacattagttcattctcacgacgtaaagatgctaatggatttagcgttcattctgtgcgtactatcttaaggtcagagacaacgataggtacactaccagcatcacagcgcaatgaccgccccgctataccgaactactacgaagccgctatagatgctgcaacgttcaataaagctcaagagattcttgataagaatcgtaaaggccgtacacctgcaagtgacaacccactaacgattaacatcttcaaaggtctgtttaggtgtcagtgtggggctagtgtccatcctaccggaacaaagaataagtatgctggggtctacaggtgcaataaccacttagacggtcgctgtgatgttccaccgttgaagcgtaaaccgtttgaccgatggatgattgataattttctggggatgattgacgtggggaatgatggagaatcagagaggaagattgcagcgttacagcatgaggttgaaattgtcacagccagaatcaagaaagctaccgccctacttcttgagatggatgatattgatgaactaaaaattcagcttaaggaacttaaccagaagcgcacagaactacagaccacgattgatactatgaagcgtaaggcttcactcactgataaggaactaccccagcttaaagatattgacctgacaactaaagcgggtcgtgtcgagtgtcaattaattttgtccaaacatctaaaagggcttacattgggtaagggttcagtaactataacgctacagaacgacactgaaatcaccatacctacagacccgctaccgctaaatgatgggtcaccaatctttgaaattgctgataaagagctactggatattgatgcttatcaactgtaa

SEQ ID NO: 474910 - DNA, 771 bp, Shigella flexneri
atgtttgacacaaagcaaattagatactcaggtaaagatggtatctattttcaccttagagataatgtagaatcttttcttgccttaacagctactgaacagatggactatgactcaccgatgatggtgacaactcaggctatgcaatcggggcaaactatcactgataatgttcagagagcacctaagaccatctctattagcggtgttgtagtggttgattcgacgggttcagttctattaaccagacaggggcaacttgtagagacctttatttctacggttgaacaatggcgagaccagaagcaaatcatcactattgtttgtaaagatggaatatctatcactgatagtatcattactcagtttaaagcgagtaaagagcataccattgctaatggtcttcgtattcagatgaccttccaaggtgtagaatttcgttcaatcgtagggcaaactgatatttcagcagctactggcaagaccgctaccacgaatgatggtggtgctaccagtaaaaagaacactggcaacactacaacgagtcttggaagccctatgctgacctgtaaagagctttttagctattcggcaagtgagttatcagatgaagcgctaaaagcccgtgtaacgtgctctaagagcgttagcgttaaaaatggtgagagcaccttcacagcctcagctaatgagcgagcttcaaaagtgcttaagtcgggtaatgctttacggaagtactctgtgaatccgaataagaagggcacttattga

SEQ ID NO: 474911 - DNA, 396 bp, Shigella flexneri
atgatgatcctctgcatgggcttgctgaaagcgattccggacgatttgtatgaagcctcagcaatggatggcgcaggtccgttccagaacttctttaagattacgctgccgctgctgattaaaccgctgacgccgctgatgatcgccagcttcgcctttaactttaacaacttcgtgctgattcagctgttaaccaacggcggcccggatcgtcttggcacgaccacgccagccggttataccgacctgcttgttaactacacctaccgtatcgcttttgaaggcggcgggggtcaggacttcggtctggcggcagcaattgccacgctgatcttcctgctggtgggtgcgctggcgatagtgaacctgaaagccacgcgaatgaagtttgattaa

SEQ ID NO: 474912 - DNA, 1191 bp, Shigella flexneri; identical to SEQ ID NO: 471569

SEQ ID NO: 474913 - DNA, 270 bp, Shigella flexneri
ttggagtcattaccagaactcccgcagtttaactcgccaactattctactggcggagaacatttatccttccacagtactgcaactggatccggcggttgtaaaaggtatctgccttagcgccggaagtccggtatcccacagcgccctaatcgcccgtgaactggggattggctggatttgccagcagggtgagaaactgtatgcgatacaaccagaagaaacgctaacgctggacgttaaaacgcaacgtttcaaccgtcagggttaa

SEQ ID NO: 474914 - DNA, 1326 bp, Shigella flexneri
atgagcgcgctcaactccctgccattaccggtggtcaggctgctggcgttctttcatgaagagttaagcgagcggcgacccggccgcgtgccgcagatcgtgcaactctgggtaggctgcctgctggtgattctgatctcgatgacttttgagatcccttttgtggcgttatcgctggcagtgctgttttacggtattcagtcgaacgcgttttacaccaaatttgtggcgatcttgtttgtggttgccacggtgctggagatcggcagcctgtttttgatctacaaatggtcatacggcgaaccgttgatccgattgatcatcgccgggccgatcctgatgggctgcatgtttttgatgcgcacccatcggctgggactggtctttttcgctgtcgccattgtcgccatttacgggcaaaccttccccgccatgctcgactatccggaagtagtcgtgcgcttaacgctgtggtgtatcgttgttggcctctatccaaccttgctgatgacgttaatcggcgtgctgtggtttcccaatcgtgccattacgcaaatgcatcaagcgcttaatgatcggcttgatgatgccattagccacctgacggacagcctcgcaccgctacccgaaacgcggattgaaagagaggcgctggcgctgcaaaaactgaatgtcttttgtctcgcggacgatgccaactggcgaactcaaagcgcatggtggcaaagctgcgtggcaacggtaacctacatttactcgacgctgaatcgctacgatcccacctcttttgctgattctcaggcaattattgaatttcggcaaaaattagcctcagaaatcaacaagctgcagcatgccgttgctgaaggtcagtgctggcaaagcgactggcggatcagtgaaagtgaagcggtggcggcacgggaatgtaacctggagaatatctgccagacgttgttacaactgggccagatgaacccgaatacgccgccaacgcccgccgccaaaccgccatcaatggtcgccgatgcttttaccaatccagactatatacgctacgcggtaaaaacattgctcgcctgtttgatctgttacaccttttacagcggcgtggactgggaaggcattcacacctgtatgctgacctgcgtgatcgtcgctaatccaaatgtcggttcgtcgtaccagaagatggtgctgcgttttggcggggccttttgcggcgcgattctggcgctgttattcacgctactggtcatgccctggctggacaatattgtcgaattgctgtttgtgctggcaccgattttcctgttgggcgcatag

SEQ ID NO: 474915 - DNA, 276 bp, Shigella flexneri
atgccaacagttctctctcgcatggcgatacacctcaaaaaaacagcctggataattcccgtcttcatggtttcgggatgctcattatctccggcaatcccggtgatcggcgcttattatcccagctggtttttctgcgccattgccagccttattttgacgctcatcacgaggcgagttattcagcgggcaaatatcaatctggcatttgtcggaattatttataccgccctttttgctctctacgccatgctgttctggctggcatttttctaa

SEQ ID NO: 474916 - DNA, 276 bp, Shigella flexneri
atgctacaaaattgcgcacaatcaaattgccgcattattcctaagaaattacgcgatatgaaacgtgaagagatttgtcgcttgctggcggataaagttaataaactgaaaaataaagaaaatagtttgtcagaactgttgcccgatgtgcgtttgttgtatggcgagacgcctttcgcacgtacaccggtgatgtacgagcctggcatcataattctcttttccgggcataaaatcggttatatcaatgaacgggtaatgactccaacttactga

SEQ ID NO: 474917 - DNA, 483 bp, Shigella flexneri
atgacaaacctgacactggatgtaaacattatcgatttcccatcaatccctgtggcgatgttgccgcaccgctgtagccctgagttgctcaactacagtgtggcgaaatttatcatgtggcgtaaagagacggggctttctcctgttaaccaaagccagacttttggcgtcgcctgggacgaccctgccaccaccgcaccggaagcgtttcgctttgatatctgcggcagcgttagcgaaccgattcccgataatcgttatggtgtgagcaatggtgaacttaccggtggacgttatgccgtggcccgccacgttggcgagctggacgatatttcacacacgatatggggcattattcgccactggctgcctgcaagcggcgagaaaatgcgtaaagcaccgattctgtttcactacaccaatcttgccgaaggggtgacagagcagcgactggaaacggatgtttatgtgccgttggcgtga

SEQ ID NO: 474918 - DNA, 774 bp, Shigella flexneri
atgaaatttacccaacgtcttagtctgcgcgtcaggctgacgctaatctttttaattctggcctcggtgacctggctgctttccagctttgtcgcctggaaacaaacaacggataacgtcgatgaattgttcgacacccaactgatgctgtttgccaaacggttaagtacgcccgatctcaacgaaatcaacgcggcggatcgcatggcacagacgccaaataaattaaaacacggtcatgttgatgacgatgcgctgacctttgccatctttacccacgacggcagaatggtccttaatgatggcgataacggagaagatattccctatagctatcaacgggaaggttttgctgacgggcaactgatcggtgaagacgatccttggcgttttgtctggatgacctcacctgatggcaaatatcgcatcgttgttggccaggaatgggaataccgtgaagacatggcgctggcgattgttgccgggcaattgatcccgtggctgctcgcactgccgattatgttaatcatcatgatggtactactgggtcgtgaactcgcgccgctgaacaaactggcgctggcactacgtatgcgtgaccctgactcggaaaaaccactaaacgcgactggcgtacccagcgaagtgcggccactggttgagtcgctaaatcaactgttcgcccgcacacatgcgatgatggttcgagaacgacgctttacctccgatgcagctcacgaactacgtagcccgttaacagcgctgaaagtgtaa

SEQ ID NO: 474919 - DNA, 240 bp, Shigella flexneri
atgaccgaatccagcgattacgaatccgtccaggtctttatcggcgttgatgtcggtaaagatacgcatcacgctgttgccattaatcgttcaggtaaacgcctgttcgataaagcattacccaacgacgaaaacaaactcaggtcgctaatatctgacctgaaacaacatggtcagatactgctggttgttgatcagccagctatcatcggtgcgttacctgtcgctacacgccggtga

SEQ ID NO: 474920 - DNA, 999 bp, Shigella flexneri
atgtctgcttcgtcattaccattgccgcagggcaagagcgtctcgctcaaacaatttgtcagtcgccatattaatgagatcggtttgctggtggtgattgccattctttatctggtcttctccctgaacgcgcctggctttatctcattgaataaccagatgaacgtgctgcgcgatgccgccaccattgggattgccgcctgggcgatgacgctgattattatctccggtgaaattgatgtcagcgttgggccgatggtggcttttgtctcggtgtgcctggcatttttgctgcaatttgaagttccgttggcgattgcttgtctgctggtgttgctgttaggcgcgctgatgggaacgctcgccggggtgctgcgcggcgtgtttaacgtaccaagtttcgttgccacactggggctgtggagcgctctgcgcggaatggggctgtttatgaccaacgcacagccagtgccgattgacgaaaacgaggtgctggactggctgggcggacaatttctcggtgtgccagtatccgcgctgatcatgatggtgttgtttgcgctgtttgtgttcattagccgaaaaaccgccttcgggcgctcggtttttgccgttggcggtaatgccacggcggcgcagttgtgcggtattaacgttcgtcgagtgcgcattcttatctttaccctttcgggattattagcggcggtgaccggcattttgttggcggcacgcctcggttccggtaacgcaggtgccgcaaacggtctggagtttgacgtcatcgccgcggtcgtggtcggcggtacggcactttccggcggtcgcggttccctgttcggtacattgcttggtgtgctggtgattacgctaatcggtaacggtctggtgctgctcggtattaactcctttttccagcaggtggtacgcggcgtcatcatcgtggtggcggtgctggcgaatatcttgctgacccagcgaagcagtaaagcgaaacgctaa

SEQ ID NO: 474921 - DNA, 1035 bp, Shigella flexneri
atgatgaacagcaccaataaacttagtgttattattccgttatataatgcgggcgatgatttccgcacttgtatggaatctttaattacgcaaacctggactgctctggaaatcattattattaacgatggttcaacggataattctgttgaaatagcaaagcattacgcagaaaactatccgcacgttcgtttgttgcatcaggcgaatgctggcgcatcggtagcgcgtaatcgtgggatcgaggtggcgacgggcaaatatgtcgcttttgtcgatgctgacgatgaggtctatcccaccatgtacgaaacgctgatgaccatggcgttagaggacgacctcgacgtggcgcagtgcaacgctgactggtcttttcgtgaaacgggagaaacctggcaatccatccccagcgatcgccttcgctcaaccggtgtattaaccggcccggactggctgcggatggggctttcttcgcgccgttggactcacgttgtctggatgggggtttatcgccgtgatgttattgttaaaaataacattaaatttattgccggattacatcatcaggatattgtctggacaacagaattcatgtttaacgcgctgcgtgcgcgatataccgagcaatcattatataaatattatctgcataatacgtcagtgagtcggttgcatagacaagggaataaaaaccttaattatcaacgtcactatattaagattacccgcctgctggagaaattaaatcgaaattatgccgacaaaattacgatttatccggaatttcatcagcaaataacttacgaagcattgcgtgtttgccatgcggtgcgcaaagagccggatattcttacccgccaacggatgattgccgagatatttacttccggtatgtataagcgcctgattaccaatgtgcgcagcgtgaaggtcggttaccaggcgttactgtggtctttccgcttatggcaatggcgcgacaaaacgcggtcgcaccatcgcattacgcgtagcgcctttaatttgcgctag

SEQ ID NO: 474922 - DNA, 291 bp, Shigella flexneri
atgcgccgccagcttgagtacaagcagctctggcgtggcggtcaggtgcttgctgttccgccagcgtacacaagccagcgttgcgcgtgctgtggtcatacagcgaaagaaaatcgcctgtcacaaagtaaattcagatgccaggtatgtggatatacagcgaacgccgatgtaaatggcgctcgtaacattttagcggcggggcacgccgttcttgcctgtggagagatggtgcagtcaggccgctcgttgaagcaggaacccaccgaaatgattcaggcgacagcctga

SEQ ID NO: 474923 - DNA, 2061 bp, Shigella flexneri
atgctaccaaaagccgcccgcattccccacgccatgacgcttcatggcgatacgcgcatcgataattactactggctgcgggacgatacgcgttctcagccagaagtcctggactacctgcaacaagaaaatagttacggtcatcgggtgatggcctcacaacaagccttgcaggatcgcatcttaaaggaaatcatcgaccgcattccgcaaagagaagtttctgcgccctacataaaaaatggctaccgctatcggcatatttatgaaccaggctgtgaatatgctatctaccagcgtcaatcggcattcagcgaagagtgggatgagtgggaaacattgctcgatgccaacaagcgcgcagctcatagtgagttttattcgatgggcggaatggcgattacgcccgataacaccattatggcgctggcagaagattttctttcccgacgccagtacggcattcgttttcgtaatctggaaacaggtaactggtacccggaactgctggataacgttgaacccagctttgtctgggcaaatgactcctggactttctactatgttcgcaagcatccggtgacgctgctgccttatcaggtctggcgtcacgccatcggtacgccagcatcgcaagatacactgatctacgaagaaaaagacgatacctattatgtcagcctgcataaaacgacgtcgaagcactatgtcgtcattcatctggccagcgccaccaccagtgaagttcgcctgctggacgcggaaatggccgatgccgagccgtttgtttttctgccgcgccgcaaagatcacgaatacagccttgatcactaccagcatcgtttttatctgcgttccaatcgccacggcaaaaactttggcttataccgtacccgtatgcgtgatgagcaacagtgggaagagttaattccgccacgtgaaaacatcatgctggaagggtttacgctgtttaccgactggctggtggttgaagagcgtcagcgcgggttaaccagtttgcgccaaattaaccgcaagacccgggaagtcattggcattgcctttgatgatccggcctatgtgacctggattgcctacaatccagaacctgaaaccgcgcgattgcgttatggttattcttccatgaccacaccagacactttgtttgaactggatatggataccggtgagcgtcgtgtattaaaacaaacagaagtgcccggttttgatgcggcgaattaccgcagtgaacacctgtggatagtcgcccgtgatggcgtcgaagttccggtttcgctggtctatcatcgcaaacattttcgcaaaggacacaacccgttgctggtgtatggctatggttcttacggcgcaagtattgatgccgatttcagttttagccgcttgagtttgttagatcgtggctttgtctacgccattgtccatgttcgcggcggtggtgagctggggcaacaatggtacgaagacggtaaatttctgaagaagaaaaatacgtttaatgattatcttgatgcctgcgatgcattgttaaaactgggctatggctctccttcgctctgttatgcgatgggcggaagtgcggggggcatgttgatgggcgttgcaattaatcaacgcccggaattattccacggcgttatcgcccaggtaccgtttgttgatgttgtaacaacgatgcttgatgaatcaattcctcttaccactggtgagtttgaagagtggggaaatccgcaggatccgcaatattacgagtacatgaaaagctacagcccgtatgacaacgtcaccgcacaggcttatccgcatttactggtaacgaccggtttacacgattctcaggtgcaacattgggaaccggcaaaatgggtcgctaaattgcgcgagctgaaaaccgatgaccatcttttattgctctgtaccgacatggactcaggccatggcggtaaatctggccgctttaaatcgtacgaaggcgtagcgatggaatatgcttttctggtcgcgctggcgcagggaacattacccactacgcctgcggattaa

SEQ ID NO: 474924 - DNA, 465 bp, Shigella flexneri
atgcgattgctcaaccgtcttaaccagtatcaacgtctgtggcaaccttcagccggaaagccgcaaaccgtcaccgtcagcgaactggccgaacgctgtttttgcagcgaacgccatgttcgtacgctgttgcgtcaggcacaggaggcgggatggctggagtggcaggcgcagtcaggacgcggaaagcgcggacaattacgctttctggtcacgccggaatcgctacgcaatgcgatgatggaacaggcactggaaaccggaaagcagcaagatgtgctggagctggcgcaactggccccaggtgagctgcgcactctgttacagccgtttatgggcggacaatggcaaacgatacacccacgttgcgtattccctactatcgcccgctcgaaccgctacaaccaggctttttgcccggccgtgccgagcagcatctcgccgggcagatattttccggcctga

SEQ ID NO: 474925 - DNA, 873 bp, Shigella flexneri
atgcgctatttcatactaatgttcactttcgtatgttcctttgttgcagcccaaccaactattgtcccacaattacagcaacaagttacgggtcttacgagtagcttaaactcacaagaaaagaaagaactgacgcacaagttagaatctattttcaataatacccaagtgcaaattgctgtattaattgtttccacaaccaaagatgagacaattgaacaatatgctacaagagtttttgacaattggcgtttaggagatgccaaacgtaatgatgggatactgatcgttgttgcctggtcggatcgcactgtccgcatccaggtaggttatgggctggaagaaaaggtaaccgatgctctggctggagatatcatccgtagcaacatgatacccgcatttaaacaacaaaaattagctaagggattagagttagctataatcgctttgaataaccaactcacttcacaacaccaatatccggctaatccttcagaaagtgaatcaacgtcttccactgatcattattactttgctattttttgggtatttgcagtgatgttcttccctttctggttttttcatcaaggcagtaatttttgtcgcgcatgtaaaagtggagtctgtatttcagcaatccatcttttagatttattcctgttctccgataaaactttttccattgctgtattttccttcttttttactttcaccatatttatggtctttacctgtttatgtgtacttcagaaaagagcatctggtagaagttatcattcagacaacagcggttccgctggaggctcaagtggcggcggatttagcggcgggggaggttcttctggcggtggcggcgcatccggccgctggtaa

SEQ ID NO: 474926 - DNA, 1515 bp, Shigella flexneri
atgaaactcgccgcctgttttctgacactccttcctggcttcgccgttgccgccagctggacttctccggggttccctgcctttagcgaacagggaacgggaacatttgtcagccacgcgcagttgcccaaaggtacgcgtccactcacgctaaattttgaccaacagtgctggcagcctgcagatgcgataaaactcaatcagatgctttccctgcaaccttgtagcaacacgccgcctcaatggcgattgttcagggacggcaaatatacgctgcaaatagacacccgctccggtacgccaacattgatgatttccatccagaacgccgccgaaccggtagcaaacctggtccgtgaatgcccgaaatgggatggattaccgctcacgctggatgtcagcgccactttcccggaaggagccgccgtacgggattattacagccaacaaattgcgatagtgaagaacggtcaaataacgttacaacccgctgctaccagcaacggtttactcctgctggaacgggcagaaactgacacatccgcccctttcgactggcataacgccacggtttactttgtgctgacagatcgtttcgaaaacggcgatcccagtaatgaccagagttacggacgtcataaagacggtatggcggaaattggcacttttcacggcggcgatttacgcggcctgaccaacaaactggattacctccagcagttgggcgttaatgctttatggataagcgccccatttgagcaaattcacggctgggtcggcggcggtacaaaaggcgatttcccgcattatgcctaccacggttattacacacaggactggacgaatcttgatgccaatatgggcaacgaagccgatctacggacgctggttgatagcgcacatcagcgcggtattcgtattctctttgatgtcgtgatgaaccacaccagctatgccacgctggcggatatgcaggagtatcagtttggcgcgttatatctttctggtgacgaagtgaaaaaaacgctgggtgaacgctggagcgactggaaacctgccgccgggcaaacctggcatagctttaacgattacattaatttcagcgacaaaacaggctgggataaatggtggggaaaaaactggatcagaacggatatcggcgattacgacaatcctggattcgacgatctcactatgtcgctggcctttttgccggatatcaaaaccgaatcaactaccgcttctggtctgccggtgttctataaaaacaaaacggatactcacgctaaagtcatcgaaggctttacacctcgcgattacttaacccactggttaagtcagtgggtccgcgactatgggattgatggttttcgggtcgataccgccaaacatgttgagttgcccgcctggcagcaactgaaaaccgaagccagctccgcgcttcgcgaatggaaaaaaactaaccccgacaaagcattagatgacaaacctttctggatgaccggtgaagcctag

SEQ ID NO: 474927 - DNA, 291 bp, Shigella flexneri
atggttattagtattcgccgctcacggcatgaggaaggggaggaactcgttgcgatttggtgtcgatctgtcgatgccacccacgattttttatcagcagagtatcgggccgagctggaagagctggtgcgttcctttctgccggaagcaccgttgtgggtcgcggttaatgaacgggagcaggcggttgggttctataagaaggtgggttttaaggttacgggacgctctgaggtggacgatttggggaaaccgtatccgttgctgaatctggcgtatgtgggggaataa

SEQ ID NO: 474928 - DNA, 243 bp, Shigella flexneri
atgtccgtgcctgtttatcagattatgggtaaaggatgccacagacaggatgaaaacatgagtttttcaccgcttttcgtgaaaatcttttgtagatctgctggatcgctcgcaaatcgtcatgtggataactttgtgcataaattatttacatcgcttttaatttattatcatgctttttacagcatgatgtttgtctttatttttcatgcagttaaaaataaatccatccctaataattga

SEQ ID NO: 474929 - DNA, 162 bp, Shigella flexneri
atgatacgtaagtcagctacaggtgttattgttgcgttagccgtaatctggggtggtggcacatggtacacaggtacgcaaattcagcctggtatcgaaaagtttattaaagattttaacgatgcgaaaaagaaaggttcaaatgcaaatgacattcgataa

SEQ ID NO: 474930 - DNA, 1008 bp, Shigella flexneri
atgaccgggtacacctttacgttgatgaatcacccgacggcagaaattaatcaggaatatctgctggtacagaccactctgtttttacgggataatgcgcagcacagcggtcaggatcagcattttacctatgtcaccacgtttgaactgccccccaccagcgaagtttaccgcccacaacgaaccctgagcaaaccccacaccaaaggcccgcagagcgccatcgtcaccggcccggcggggcaggaaatctggacggataaatatggccgggtgaaggtgcagtttggctgggaccgttacggaaagaatgacgaaaacagttcctgctggatccgcgtcagctatccgtgggcgggtaaaggattcggcatgatccagatcccgcgtattggccaggaagtactggtggatttcaaaaacggcgatccggatttgcccatcatcgtggggcgcacctataaccaggacaccatgccgccgtgggggctgccgggcatggcgtcgcagagtgggatattcagccactcattgcagggagggccgactaacggaaatatgctgcgcttcgatgataaaacgggtgcggaagaggtgaagttccatgcggaaaaagacctcaataccacggtaaaaaacaatgaaacccacacggtcatggtcgatcgcataaaaaccattgtcaaaaatgaaaccatcagcgtgggagaagaccgtaatgccaccatcacaaaaaatgatggtctttccgtcaaactggctcaaaccatcaatgtcggaacgacatatcgtctggatgttggcgatcaatttacccttcgttgcggcaatgcagcgcttgtattacacaaggatggctcgattgagttttgcggaaaacaactgttactgcacaccagcgatgttatgcaactcattggcagtggcattgatatgaatccggatggcggcacagccatgactgcggatgatattgccccgttacctacccccgacgtttctgaataa

SEQ ID NO: 474931 - DNA, 351 bp, Shigella flexneri
atgttggcaatggctatcattttccccatggttcttactggtggtatggtgattaaacgcctggcgaacgttgccagtaatgtgtgtatgtgctggccgctgtggcaaaaacctcgacctgacgagtggcagctgtacatgcttgatgtcgggcaagggctggcaatggtgatagccagaaacggcaaagcgattctctatgacacaggactggcctggcctgaaggggatagtgggcaacaactgattatcccctggctccactggcataatcttgaaccggaaggcgttattctgagccatgaacatctggatcaccggggagggctggattcaatattgcatatatag

SEQ ID NO: 474932 - DNA, 948 bp, Shigella flexneri
atgcaaaatcggctgaccatcaaagacatcgcgcgcttaagcggcgtggggaaatctacggtttcccgggtgctgaataacgaaagcggcgtgagtcagcgcacgcgcgagcgtgttgaagcagtgatgaatcagcatggattttccccttcccgctctgcgcgcgctatgcgtgggcaaagcgataaagtggtcgccatcattgttacccgtctggattcgttgtcagaaaatctcgccgttcaaaccatgctgccagcgttctatgaacaaggttacgatccaatcatgatggaaaatcagttttccccacaattagttgccgaacatttgggggtgctgaaacggcgtaatatcgacggcgtagtgctgttcggttttaccggcataaccgaagaaatgttagcccactggcagtcatcgctggttctgctggcgcgtgacgcaaaaggctttgcttcggtctgttatgacgacgaaggggcaatcaagattctgatgcaacggctctatgaccaggggcatcgcaatatcagttatctcggcgtgccgcatagtgacgtgacgaccgggaagcgacgtcacgaagcctacctggcgttctgcaaagcgcataaactgcatcccgttgccgctctgccagggcttgctatgaagcaaggctatgaaaacgtagcaaaagtgattacgcctgaaactaccgcgttactgtgcgcaaccgacacgctggctcttggcgcaagtaaatacctgcaagagcaacgcatcgacaccttgcaactggcgagcgtaggtaatacgccgttaatgaaattccttcatccggagatcgtcaccgtagatcctggctacgccgaagctggacgccaggcggcctgccaattgatcgcacaggtaaccgggcgcagcgaaccgcaacaaatcatcatccccgccaccctgtcctga

SEQ ID NO: 474933 - DNA, 309 bp, Shigella flexneri
atgatgagcaaaataaaccaaacggatatcgatcggttgattgaactggtcggcgggcgcggcaatattgcgacggtgagccactgtattactcgcctgcgctttgtcctcaaccaaccggccaatgccagaccgaaagaaattgagcaactccccatggtgaaaggctgtttcaccaatgccgggcaatttcaggtggtgattggcaccaacgtgggtgattactatcaagcactaatagcgtcaaccggacaggcgcaggttgataaagagcaggtaaaaaaagccgcccggcaaaatatgaaatag

SEQ ID NO: 474934 - DNA, 294 bp, Shigella flexneri; identical to SEQ ID NO: 25632

SEQ ID NO: 474935 - DNA, 273 bp, Shigella flexneri; identical to SEQ ID NO: 468624

SEQ ID NO: 474936 - DNA, 225 bp, Shigella flexneri
atgtcgcgtaaaggtaactgttacgacaacgctccgatggaaagcttctggggaacgctgaaaaatgagagcctgagccactatcgttttaataaccgggatgaagccatctcagtaatacgggaatacattgagattttctacaatcgtcagcgtcgtcactctcgtctggagaatatctccccggcagccttcagggaaaaatatcatcagatggctgcttaa

SEQ ID NO: 474937 - DNA, 162 bp, Shigella flexneri
atgacccgtatgatgtgcgctaacccgcagcttaatgaactcgataacaccattagcgaaatgctgaaagaaggtgcacaagtggatctgaccgcgaaccagttaacgctggcgaccgcgaaacagacattaacttataagctggcggatttaatgaattaa

SEQ ID NO: 474938 - DNA, 189 bp, Shigella flexneri
atgttgacccgcaaaagtatagataccgttcggctctctgttggtgctgagaagctctcacaacgtgaatgggactggatgaagatgctcaaacccatggacccaccacctgcgatggtcgcggcctccatcctggagcgccgtggcgacacagcagcccttacccggctacaggataccgggggttaa

SEQ ID NO: 474939 - DNA, 756 bp, Shigella flexneri
gtgcaaaaaaatggcgatacgttgtccggtggacttacttttgaaaacgactcaatccttgcctggattcggaatactgactgggcaaagattggatttaaaaatgatgccgacagcgatactgattcatacatgtggtttgaaacaggcgacaacggcaatgagtatttcaaatggagacaccacctcactggcggccgggttaaagacctgatgaatcttaaatgggatgctctgtatgttcttgttaaagcccttttcagcagtgaagtaaaaatatcgacggtcaatgcactgagaatatttaattcatcttttggtgccatttttcgtcgttctgaagaatgcctgcatatcatccctacacgagagaatgaaggggaaaatggtaatatagggccactacgcccctttacgcttaatctcagaactggccggataagcatggggcatggtctggttgttacaggagatatatttacaaaccgttttttaattaacagcagtacaggcatgtggattcatatgcgtgaccagaacgttattatgggccgtaatgcggtatccaacgatggtgcgcaggcattgcttcgccaggaccataccgaccgtaaattcgtaattggtgggctggggaataggcaatttggcatctacatgattaataactcaaggacagccaatggcaccgatggtcaggcgtacatggataataacgggaactggctttgcggttcgcaagttattcccgggtaa

SEQ ID NO: 474940 - DNA, 189 bp, Shigella flexneri
atgaaatcaattcgctgtaagaactgcaacaaactgttatttaaagcggattcctttgatcacattgaaatcaggtgtccgcgttgcaaacgtcacatcataatgctgaatgcctgcgagcatcccacggagaaacattgtgggaaaagagaagaaatcacgcattctgacgaaaccgtgcgttattga

SEQ ID NO: 474941 - DNA, 696 bp, Shigella flexneri
gtgggaaaagagaagaaatcacgcattctgacgaaaccgtgcgttattgagtatgaaggccagattgttggctatggttcaaaggagctgcgcgttgaaaccatatcctgctggctggcccgcacaatcattcagacaaagcactattcccgccgttttgtgaataactcttaccttcacctgggagtattcagcgggcgtgatctggttggcgttctccagtggggatatgcccttaaccccaactcaggtcgtcgtgtcgtgcttgaaacggataaccggggctatatggagttgaatcgcatgtggctacacgacgacatgccccgcaactctgaatcacgggccatcagctacgcgctgaaagttatcagattactgtatccgtcagtggagtgggttcagtcctttgctgacgaacgctgcggactcgcaggcgttgtgtatcaggcgtcgaattttgattttattggcagccatgaaagcacgttctacgagctggatggtgaatggtatcacgagataacgatgaacgcgattaagcgcggagggcaacgaggcgagtatttgcgagctaataaggagcgtgccgtggtgcacaaatttaatcagtatcgctacatcagattcctgaacaagcgagcaaggaagcggctaaataccaaactattcaaggttcagccataccctaagtga

SEQ ID NO: 474942 - DNA, 384 bp, Shigella flexneri
atgacagctccattaaccctattgatcgttgaggacgaaacgccgctggcagagatgcatgcggaatatattcgtcacattcccggattcagtcagatattactggcgggaaacctggcgcaggcccgaatgatgatcgagcgttttaagccggggctaatcttgctcgataactatcttcctgacggtagagggattaatttactgcatgaactggtgcaggcgcattatcccggcgacgtggtgtttaccactgcagccagtgatatggaaacggtgtctgaagccgtacgttgtggtgtatttgattatctcattaagccaattgcctatgaacggctgggtgaagcggcgcacgaaaaacgcgaaagcgtttcacgataa

SEQ ID NO: 474943 - DNA, 1527 bp, Shigella flexneri
atgttgcagcttaacgagaataaacagtttgcatttttccaaagactgacatttccgctgcgtatctttttgctgattctggtgttctcaatatttgtcattgcagccctggcgcaatattttacggccagttttgaggactatttaacgcttcatgtacgcgacatggcaatgaatcaggcgaaaattattgcctccaatgacagtgtcatctctgcggtgaaaacgcgtgactacaaacggctggcgaccatcgctaacaaattacaaagagataccgattttgattatgtggtgattggcgaccggcactcgatccgcctttaccatcctaatccggagaaaattggttatcctatgcagttcaccaaacagggcgcgctggagaaaggggagagctacttcattaccgggaaagggtcaatgggtatggcgatgcgcgccaaaacgccaatctttgatgacgatggaaaagtcatcggcgtggtgtcgattggctacctggtgagtaaaatcgatagctggcgggctgagtttttattaccgatggcaggtgtgtttgtcgtgctgttagggattctgatgttgctgtcgtggttcctggccgcgcatatccgtcggcagatgatgggcatggagccaaagcaaatcgcacgggtggtccgtcagcaagaggcgctgtttagttcggtttatgaagggctgattgcggtggatccgcacggttacattaccgccatcaatcgtaacgcaagaaagatgctggggctgagttcccctggacggcaatggttgggtaaacccattgctgaagtggtcaggtctgccgatttctttaccgaacagattgatgaaaaacgtcaggatgtggtggctaactttaacggtctgagcgttattgccaatcgggaagctattcgttcaggtgatgatttgctgggagccattatcagctttcgcagtaaagacgaaatttccaccctcaatgcgcaactgacgcaaataaaacaatacgttgagagccttcgtacattgcgacacgagcatctcaattggatgtcgactctcaatggtctgttgcagatgaaagagtatgatcgcgtgctggcgatggtgcagggggagtctcaggcccagcaacagcttattgacagcctgcgcgaggcgtttgccgatcgccaggtggcggggctgctttttggtaaagtgcagcgcgcccgcgaactggggctaaaaatgatcatcgtccccggtagccagctttcgcaactgccgccaggactggatagcaccgagtttgccgccattgttggcaatttacttgataacgccttcgaagccagcctgcgtagcgatgaaggaaacaagagcgttgaattattcctcagcgatgaaggcgatgatgtggtgattgaagtcgccgatcagggctgcggcgttccagagtctctacgagacaaaatatttgagcaggggtcagtacgcgtgctgacgagcccggtgaacatggcattgggttgtacttga

SEQ ID NO: 474944 - DNA, 219 bp, Shigella flexneri
atgaaagcattgacttatcacggcccacatcacgttcaggtagaaaatgttcccgatccgggcattgaacaggcagatgatattattctgcgtattacggtaacggcgatctgtggctctgacctccatctttatcgaggcaaaataccccaggttaaacatggcgatatttttggtcatgaatttatggggaagtcgttgaaaccgggaaggacgtaa

SEQ ID NO: 474945 - DNA, 936 bp, Shigella flexneri
atgaaaatactggtctacggcattaactactcgccggagttaaccggcatcggcaaatacaccggcgagatggtggaatggttggcggcacaaggtcatgaggtgcgggtcattaccgcaccgccttactacccgcaatggcaggtgggtgagaactattccgcctggcgctacaaacgagaagaaggggccgccacggtgtggcgctgcccgctgtacgtgccaaaacagccgagcaccctgaaacgcttgttgcatctcggcagttttgccgtcagcagtttctttccactgatggcgcaacgtcgctggaagccggatcgcattattggcgtagtgccaacgctgttttgcacgccgggaatgcgcctgctggcgaagctctctggtgcgcgtaccgtgctgcatattcaggattacgaagtggacgccatgctggggctgggccttgccggaaaaggcaaaggcggcaaagtggcacagctggcaacggcgttcgaacgtagcggactgcataacgtcgataacgtttccacgatttcgcgttcgatgatgaataaagccatcgaaaaaggcgtggcggcggataacgtcatcttcttccccaactggtcggaaattgcccgttttcagcatgttgcagacgccgatgttgatgcccttcgtaaccagcttggcctgccggataacaaaaaaatcattctttactccggcaatattggtgaaaagcaggggctggaaaacgttattgaagctgccgatctcctgcgcgatgaaccgctgctttttgccattgtcgggcagggcggcggcaaagcgcggctggaaaaaatggcgcagcagcgtggactgcgcaacatgcaattttttccgctgcaatcgtatgacgctttacccgcactgctgaagatgggcgattgccatctggtggtgtaa

SEQ ID NO: 474946 - DNA, 474 bp, Shigella flexneri; identical to SEQ ID NO: 474215

SEQ ID NO: 474947 - DNA, 702 bp, Shigella flexneri
atgctaacgctggatacgcttaatgtgatgctggccgtcagcgaagagggattgatcgaagagatgatcatcgcactgctggcctcaccgcagctggcggtcttctttgaaaaattcccacgactgaaggcggcaatcactgatgatgttccccgctggcgtgaggcgctgcgcagtcggctgaaagatgcccgagtcccgccggaactcaccgaagaggtgatgtgctatcagcaaagccagctcctctccacgccgcagtttattgtgcagctaccacagatcctagacttactgcatcgtctgaattccccatgggcagaacaagcccggcagttggttgatgctaacagcacaataacttcagcgttacacacgctttttctccagcgttggcgtttaagtctgatcgtgcaagcaacgacgttaaatcaacagctattagaagaagaacgcgaacaactgttaagtgaagttcaggaacgcatgacgctgagcggacaacttgaaccgattctcgcagataacaataccgcagctggtcgtctgtgggatatgagcgccggtcagcttaaacgtggcgactatcagtttattgtgaaatacggtgaatttcttaacgaacagccggaactgaaacgcctggcagagcagctggggcgttctcgggaagccaaatcaataccgcgcaacgatgcgtag

SEQ ID NO: 474948 - DNA, 276 bp, Shigella flexneri
atgagcagaaaaacccaacgttactctaaagagttcaaagccgaagctgtcagaacggttcttgaaaatcaactttcgatcagtgaaggcgcttcccgattatctcttcctgaaggcactttaggacaatgggttaccgccgccagaaaagggctcggtactcctggttcccgcacggtggctgaactggaatctgaaattctgcaactgcgtaaggcgttaaatgaagctcgccttgagcgagatatattgcgtattttgcacaggagtcgctga

SEQ ID NO: 474949 - DNA, 174 bp, Shigella flexneri
atgtgtagccgctcgcgattaggtgaacgcccaaaagggcagggaattacaggtgctgatcatttctggtttggtcatacaccgttgcgacatcgtgtggatattggcaacctgcattatattgataccggtgctgtctttgggggcgaactgactcttgtgcaactgcaataa

SEQ ID NO: 474950 - DNA, 771 bp, Shigella flexneri
ttggcgttgcttctatataaggtacaggattatgcccatatccaggcgggtgtcggcttgttctcttttgtggcgttggtgattttaacgacggtgacgttgtcacatcttaatgttgaggagctgtgggagcgatattatccgcagcgccccgctacgcgtagggacgagaaacttcgtgtctgtcttgggtgccattttaccggctatcctgatcagcgtggtctctgcccgcgttgccatatcccgctacgcctgcgtcgtcgtcatagtttgcaaaaatgctgggcggcgctgttagcgtcaatcgttttgttgttaccagccaacctattgcctatttctatcatttatctgaatggtggccggcaggaagatacgattctttccggaattatgtcgctggcaagtagcaacattgcggttgcgggaatcgtgtttatcgccagtattctggtaccgtttactaaagtgatcgtcatgttcactttactgttgagcattcattttaaatgccagcaaggtttacgcacacgcattctgttactgcggatggtgacctggattggacgctggtcgatgctcgacctgtttgtcatatctttaaccatgtcgctgattaatcgcgatcagatcctcgcttttactatgggaccggctgcgttttattttggcgctgccgtaattttgactattcttgctgtggaatggctggacagccgcttactttgggatgcacatgagtcaggaaacgcccgcttcgacgactga

SEQ ID NO: 474951 - DNA, 531 bp, Shigella flexneri
ttgtttcttgggatcaactcactggtctattacgtgattattggctggcttccggcgatcctcatcagtcacggctatagcgaagcacaggcgggttcactgcatggtttgctgcaactagccacagcagctcccggtttgctgatcccacttttcttacatcatgtgaaagaccagcgtggtattgcagcgttcgttgccttgatgtgcgcagtgggcgcggttgggctctgctttatgccagcgcacgcgatcacctggactctgcttttcggttttggttccggcgcaacaatgatactggggttgacgttcattggtcttcgggcaagttctgcgcatcaggcggcggcactctcggggatggcacaatccgtcgggtatttgctggcagcctgtgggccgccgctaatgggtaaaatacacgatgctaacggtaactggtccgtaccactgatgggtgttgcaatactttcactactgatggcgattttcggactttgcgccgggagagacaaagaaattcgctaa

SEQ ID NO: 474952 - DNA, 276 bp, Shigella flexneri; identical to SEQ ID NO: 474948

SEQ ID NO: 474953 - DNA, 1467 bp, Shigella flexneri
atgaaaaaagtaaatcattggatcaacggcaaaaatgttgcaggtaacgactacttccagactaccaatccggcaacgggtgaagtgctggcggatgtggcctctggcggtgaagcggagatcaatcaggcggtagcggcagcgaaagaggcgttcccgaaatgggctgatctgccgatgaaagagcgtgcgcgcctgatgcgccgtctgggcgatctgatcgaccagaacgtgcctgagatcgccgcgatggaaaccgcggacacgggcctgccgatccatcagaccaaaaatgtgttgatcccacgcgcttctcacaactttgaatttttcgcggaagtctgccagcagatgaacggcaagacctatccggttgacgacaagatgctcaactacacgctggtgcaaccggtaggcgtttgtgcgctggtgtcgccgtggaacgtgccgtttatgaccgccacctggaaggtcgcgccgtgtctggcgctgggcaataccgcggtgctgaagatgtcggaactctccccgctgaccgccaaccgcttgggtgagctggcgctggaagctggtattccggcgggcgtgctaaacgtggtacagggctacggcgcaaccgcaggcgatgcgctggtccgtcatcatgacgtgcgtgccgtgtcgttcaccggcggtaccgccaccgagcgcaacatcatgaaaaacgccgggctgaaaaaatactccatggagctgggcggtaaatcaccggtgctgatttttgaagatgccgatattgagcgtgcgctggacgccgccctgttcaccatcttctcaatcaacggcgaacgctgcaccgccggttcgcgcatctttattcaacagagcatctatccagaattcgttaaacgctttgccgaacgcgccaaccgtctgcgcgtgggcgatccgaacgatccgaatacccaggttagggcgcttatcagtcagcaacactgggaaaaagtctccggctatatccgtctcggcattgaagaaggcgcaaccctgttggcgggcggcccggataaactgtccgacctgcctgcgcacctgaaaggcggcaacttcctgcgcccaacggtgctggcggacgtagataaccgtatgcgcgttgcccaggaagagattttcgggccggtcgcctgcctgctgccgtttaaagacgaagccgaaggcttacgcctggcaaacgacgtggagtacggcctcgcgtcgtacatctggacacaggatgtcagcaaagtgttacgcctggcgcgtggcattgaagcaggcatggtgttcgtcaacacccagaacgtgcgcgacctgcgccagccatttggcggcgtaaaagcctccggcaccgggcgtgaaggcggtgagtacagcttcgaagtgttcgcggaaatgaagaacgtctgcatttccatgggcgaccatccaattccgaaatggggagtctga

SEQ ID NO: 474954 - DNA, 129 bp, Shigella flexneri
atgaccattctcagcgctctgatttgccgcagtgaccttgatgccacccttgcgctccgtaaccatttgaattcagctaaacaatcaatgattcgatccattaatgagaacacgcgttatgctcattaa

SEQ ID NO: 474955 - DNA, 1128 bp, Shigella flexneri
atgattcgcttagcgcccttgattaccgccgacgttgacaccaccacattgcctggcggcaaagccagcgatgctgcacaagattttctcacgttgttgagcgaagcattagcaggcgagacaacaactgacaaagcggccccccagttgctggtggcaacagataagcccacgacaaaaggcgagccgctggtcagcgatattcttgccgatgcgcaacaagcggatttactgatccctgtggatgaaacacttcctgtcatcaacgacgaacaatccacatcaacaccgttaaccaccgctcagacaatgacgttggctgcggtggctgacaaaaatacgacaaaagacgaaaaagcggatgatcttaatgaagacgtcaccgcaagtctgagcgccctttttgcgatgttgccgggttttgacaatacgcccaaagtgactgatgcaccgtcaaccgtgttaccggcagagaaaccaacgctcttcacaaaactgacttctgcgcaactcactacagcacagcctgatgacgcccccggcacaccagctcagccattaacaccgctggtagcagaagcccagagtaaagcggaagtcatcagcacgccttcgccggtgaccgctgacgccagcccgctaatcactccacaccagacacagccactgcccaccgtcgccgcgcctgttttgagtgcaccgctgggttctcacgaatggcaacaatcattgagccagcatatttcgctgttcacccgccaggggcaacaaagtgcagagttgcgtctgcacccacaggatttaggtgaagtgcaaatttccctcaaagtggatgataaccaggcgcagatccagatgatttcaccgcatcagcacgtacgcgccgccctggaagcagcgctgccggtactgcgtacgcagctggccgaaagtggcattcagttagggcaaagcaacattagtggcgaaagctttagtggtcagcagcaggccgcttcccagcaacagcaaagccaacgcacagcaaaccatgaacctctggcgggggaagacgacgatacgcttccggttcccgtctctttacaagggcgtgtaacaggtaacagcggcgttgatattttcgcctaa

SEQ ID NO: 474956 - DNA, 1323 bp, Shigella flexneri
gtgaatgcttcaagtattaatcaaacttacttacatgataaaaatcctggtgacgttattagcctgtatggcactttagataacattccccttgtagttaaggaatgcacgggtaaaaatcatcaaattaatgttaaagccaaattgccacaagaacgaagtgaaaaagttgaggatatgtgtgaaagaatgaaaggtggcatctctatgtttaaccacaccacaaaaacagctgataatatagagcataatttgcagctaagttttctcgtgggttcacgtccgtcgatcaccaataaatactcagcaaaagatgtaggtccagatatacttgcattgcccgtcaacgtatatcatgcggattttaaaattaaaatcaataatgcagtggagaaggcttcatcaattgtgttatgtgctgtgcaaaaaaatctccatgcagcaaggaaggttcttagcgggataataggaaatgtgccaaaaaataataaaccaaaaacaattatttttgatttgcgttttcttagtgcaattaagcagaaagtttttttgggcagtgaaaaaccgttgtttgtaaagcataccgcaatgatgagggaggcatgtaaggaattaccgcagtcagtggaatatgttcctttagcctgtgaagcgcatagccatcgcagcgtcgcccttgccaaaaccgtggctgcgcccatcatggcgacaggtgtgggcttggcattaatgtatgcaacatcatcaggaccgtattatgcgcaaagtctttctggttcgccggatatcgagatgataaaaaatcgcatggctgaattgtttaaccagtcggatatttctgtgcgcaacaaatatagcccggcttttgataaatggaatgaactggtagataaattaaatcacgaaagaaatacagttccgtttgcgtgtttgaccaccattttagcgacggcgataaatgaaactcttgagggggatacgaatgttgccgttgtgatggggtgtaaatctgcgaaagatcgcacgatatccattgtccttggcaactcgatgttgcaaacactccttgaaaaacgcctcgccgatagtggagaaatagaaaatctttttgatcaacagggatattttagttgcgattcattaacacccgaagaattaatgatgttaaaaaacctttttgatattcgagttcttcatgtctctaacaaattcaatgttggattgcaaggtaatatcaacactgatgttttacaagattcgttttttaaaaatgtcgatttcattcatgaatataactcgtataccgtagggatgggagtctga

SEQ ID NO: 474957 - DNA, 390 bp, Shigella flexneri
atggaaggtgaggagcaactgtgcgattgtgttaacgaactgaagcatggtttgtcgagtaataatgaatatgacctgtttaaaaatagagaaacctcactgtggaaacgcaaagtaccagaaagcgcagcgctggcaatgacgggaacagtatataaattatttggtaatcgcttactcaacgcccgcaatcagttagataaaaatctcctcgaaatggctatgcaaatggtttatggcaaagatatggtgacaaagtccggggatatattgattgatatacaattaaataaggatggcagtctccagagtaagcactacacacttgatgtaggtgaagttataaacagttataatattgaccctctttgtgaatgcttcaagtattaa

SEQ ID NO: 474958 - DNA, 294 bp, Shigella flexneri
atgaaaaagattaatgcaataattttattatcttctctgacctctgcctcggtatttgctggcgcatacgtcgaaaacagggaggcatataatcttgcctccgatcagggcgaggttatgctacgtgtgggttataacttcgatatgggcgcgggtattatgttaaccaatacctacacctttcagcgagaagatgaactaaaacatggctataatgaaattgaaggttggtatcctttattcaaaccaaccgataaattaaccatccagcccggtggcttaattaatgggtaa

SEQ ID NO: 474959 - DNA, 804 bp, Shigella flexneri
gtgcaaaaccctcccggcacacctcccgtcgatgtcgcctcgttcaaggcatggggtgattttgccgcagataaacacagtctctattttgaaggcaagcgcaccgatgacaatggtggtggaaatagcttggatatcaaaacgctgcatcaggtggaattccggcctccctgggatcctgacttactggggctgatattacgtgacgctaatttcttgtatatcaatgggcatcgcctcgctgaccccgagagtttccgtgtgctggcgcagaagtcctgggatcagcgaggaaagttttccaccacgtttaacccctgcattgccgtaccatttggcccctgggataccctggctcgtacacggaccaaaatcctgctcaacggcgaacagcttgatgccgacccggacaccttttccgtcgtgcgctggatgcccggctcactcttgacctggcgtgataaaaacgggctgcagcgtaaagtcctcgacaaggaaaatctggcgtgggatgaagatttaacaaagcactgtctggatttttctctgctggaaaagaaagtgttctggcgtaaaggacctgcttgtaaacaggaagaattacccggactcgatccggagcagtttcaacccatcagtgatgctgtcgcccagtatcaggactcgctttataccatcatcgaaacagagtctggtgaccgtaagctggagatcgtgaaacttgatgatcccaatcttattatcaacaaacgtttcaacgccgggaaacgccacggctatttacttacgcgtgccgaagggtag

SEQ ID NO: 474960 - DNA, 306 bp, Shigella flexneri
gtgtttgaatctgacggaccgctgatcttactggataaccgttctccggatgaacgcgaagcccatcttaatgaccatccctttttgcgcagatggtatgcccgcgataaccgctacatttacagctttgatggcgcgcagctctggcgataccgcaccgctgatccgaaacaagttcgcttaatctggaaggaacaacattcgggatatgtctatggcgtaaattacaaaacgggatatctggacggaaaaattactgatgacggcgaatttattcctgccccgcgcaatgaggtgacaaaatga

SEQ ID NO: 474961 - DNA, 1605 bp, Shigella flexneri
atgaaaaaaattgctattgtgggtgccgggcctacggggatctacaccttattctcgcttctacagcaacaaactccactttctatttctatcttcgagcaggctgacgaggccggtgtcgggatgccatacagtgatgaggaaaactcaaaaatgatgctggcaaatattgccagtattgaaataccgccgattaattgtacgtatctcgaatggctacaaaagcaagaagccagccatctccagcgttatggcgttaaaaaagaaaccttgcacgatcgtcagtttttaccgcgaattctgctgggcgaatatttccgcgatcaatttttacgattagtagaccaggcacgacagcaaaaatttgcagtggctgtttatgaatcatgccaggttaccgatctgcaaattacaaatgctggcgtcatgctcgctacaaatcaggatttacccagcgagacgtttgatttagcggtgattgccacgggtcacgtctggcctgatgaagaagaagcaaccagaacgtattttcccagcccgtggtcaggcctgatggaagcaaaggtcgatgcgtgtaacgtgggtattatgggaacatccttgagcggactggatgcggcaatggcagtggctattcagcatggttcgttcattgaagatgataaacaacacgtcgtttttcaccgcgataacgcaagtgaaaagctaaatattacgttgatgtcgcgcacgggtattttacccgaagccgatttctattgccctattccctgcgagcccttacacatcgtcaccgatcaggcattaaatgctgagattcaaaaaggtgaagagggccttttggatcgggtatttagattgatagtagaggaaatcaagtttgctgatccagactggagccaacgcatagccttagagagcctgaatgtcgattcctttgctcaagcctggtttgccgagcgcaaacaacgcgacccatttgactgggcagaaaaaaatctccaggaagtcgaacgcaataaacgagaaaaacatactgttccctggcgttatgtcattctgcgcctgcatgaagccgtacaggaaattgttcctcatctgaatgaacacgaccataaacggttcagtaaaggccttgccagggttttcatcgataattatgcggcaatcccttcagagtctattcgtcgactactggccttacgtgaagcggggatcattcatattctcgccctcggtgaagactacgaaatggaaattaatgagtcgcgcaccgtcctgaaaacggaagacaacagctactcgtttgacgtttttattgatgcccgcggacagcgtccgcttaaagtgaaagatattcctttccctgggctacgcgagcaattacagaaaacaggggatgaaatccctgatgttggcgaagattatacgttacagcaacccgaagatattcgtggacgcgtagcgttcggcgcgttgccctggctgatgcacgaccagcctttcgttcagggacttacggcatgtgcagaaattggtgaggcgatggctcgggcggtcgtaaagcctgcatcccgtgctcgtcggcgtctttcgtttgattaa

SEQ ID NO: 474962 - DNA, 834 bp, Shigella flexneri
ttgggttcagtcgtggccgcaagcgtggtgccaaaacataaacaggccagcgcagttgccactatgtttatggggttaaccctggcaaatatcggtggcgtgccggcggcgaccaggttgggtgaaaccatcggctggcggatgtcatttctggcaacggcggggctgggagtgatttcaatggtaagtctgttcttctcattacctaaaggtggtacaggggcacgacctgaagtgaaaaaagagctggcggtattaatgcgtccgcaggtgctgtctgcattgctgacgacggtactgggagctggtgcaatgtttaccctctacacctatatctctccggtactgcaaagtattacccacgcaacaccggtgttcgtcacggcaatgctggtgctgattggtgtcggattctctatcggtaactatctcggcggcaaactggcagatcgttcagttaacggcacgttgaaaggctttttgttgctgctgatggtgattatgctggcaatcccgttcctggcccgcaatgagttcggcgcagctattagcatggtggtgtggggcgcagcaacctttgcggttgtacctccgttacagatgcgcgtgatgcatgtcgccagtgaagcgccaggtctgtcttcatcagtcaatattggtgcctttaatcttggaaatgcgctgggagcagctgctggtggtgcggtaatttccgctgggctgggatacagctttgtgccggtgacgggggcgattgtcgcgggactggcattattgctggtgtttatgtcagccagaaaacaacctgaaacagtttgcgttgctaacagctaa

SEQ ID NO: 474963 - DNA, 501 bp, Shigella flexneri
atgatactttggtctgtgaaaaaagaaaccgatatccggcgtggaaggcattgtgttttcctgatgcatgttcacctggtctttgtcaccagataccgacgccagatttttgaccatgacacgacagaaaaactacgcacttacttttcaaatgtatgtgctgattttgcagctgaactggttgaaatggatggcgaaccagatcacgtccatttgttaattaactatcctcccaaactggcgatatccagtctggtaaacagcctcaaaggcatatcgaataggttactgcgacgagatcgaccagatattgcagtcaggtattactacaaaggcgttttgtggagtcctggctattttgccagtagctgcgaaggtgcgccaatatccgtcatccgccaatacattgaacaacagcaaacacctggtcaggtggaaaaccgcgccttatatccccgccctgaaggacgaggttttacggcgcaccggataaaggactga

SEQ ID NO: 474964 - DNA, 357 bp, Shigella flexneri
atgagagtcgtgatattattattcatcatttttataccgagtgtggcggatgctttttcattcgatagttcaataattaatctcaaatgtcctaggcgtggaactatcgaaataatattacacagatacgaacacacccaggaaagctggggaggggagaattttgaaaccgggagtgggtatagtcatgagggcgcgttatttatttttgactttgccaatcaggataaaatgatttacaatcgcgcggagaattcgtttgctttttggtatgaatcttcccggaaattagttaactgtaacttaataacgcttaaaagcacatatcctgtcaaccttccttatgttcatggctga

SEQ ID NO: 474965 - DNA, 297 bp, Shigella flexneri; identical to SEQ ID NO: 462336

SEQ ID NO: 474966 - DNA, 576 bp, Shigella flexneri
atgcgtgtcatcaccctggcgggtagtcctcgctttccttctcgctccagctccttgctggaatatgcgcgggaaaaactaaatggcctagatgtagaggtttatcactggaatctgcaaaacttcgccccggaagatctgctttatgctcgtttcgatagtccggcactcaagaccttcaccgaacagctgcaacaggctgatgggctgattgtcgccacgcctgtgtataaagccgcctattccggcgcgctgaaaaccctgctcgacctgctgccagagcgcgctttgcaaggcaaagtggtgctaccgctggcgacgggcggtaccgtggcccatctgctggcggtcgattatgcccttaaaccagttttaagcgcactgaaagctcaggagatcctgcacggcgtgtttgccgatgactcacaattaattgattaccatcacagaccccagttcacgccaaatctgcaaccccatcttgataccgcgctagaaactttctggcaggcattgcaccgccgcgatgttcaggttcctgaccttctgtctctgcgaggtaatgcccatgcgtaa

SEQ ID NO: 474967 - DNA, 1461 bp, Shigella flexneri
atgattggcgtcaagcagcctttaccaaaagcagttttaagaactcagcatgacaaaaataaagaagcaataagtatcctggattttggtgttattgatgatggtgtgacagataattaccaggcaatacaaaatgcaatagatgccgttgcttcactaccctccggcggggagctgtttatccctgcgagcaaccaagcggtggggtatattgttggatccactttgcttattcctggcggtgttaacatcagaggggttggtaaggcatcgcaactccgagcaaaaagcggacttacaggatctgtgttaaggctgtcttatgattcagacactatcggccgttatctgagaaatatacgagtaactggtaataacacctgcaatggtattgacacaaacattacagcagaagactctgtcatcagacaggtttatggctgggtatttgataatgtaatggtgaatgaagttgaaaccgcttatttaatgcaagggctctggcactcaaaatttatagcatgtcaggctggaacctgtagagtcggtcttcactttttaggccagtgcgtaagtgttagtgtcagctcctgccatttcagcagaggaaattattctgctgatgaaagctttggcatcaggattcagcctcaaacgtatgcgtggtcgtcagaggcagttaggtcagaagcaataattttagacagtgagaccatgtgcattggttttaaaaatgccgtctatgttcatgattgccttgatttgcatatggaacaaccggatttagattattgcggttcaacaggcgtggttatagagaatgtaaacggaggattttctttctcaaactcatggatagcagcagatgccgatggcactgaacaatttacggggatatattttagaacgccgacctcaacgcagtcacataaaattgtcagtggtgttcatatcaacactgcaaacaaaaacacggctgcaaacaatcaaagtatagcgatagaacagtcggcgatcttcgtctttgtaagtggttgtacgttaactggtgatgaatgggctgtaaatattgtcgacatcaatgaatgtgtttctttcgataagtgcatattcaataagcctctatgctatcttcgtagcggtggcgtgtcagttactgactgttatttggctggcattaccgaggtgcagaaaccggaaggcagatacaatacgtatcgtggctgttcaggcgtaccgtctgtaaatgggatcattaatgtcccagttgcggtaggtgccacaagcggatctgcagctataccgaacccggggaacctgacatacagagtaagaagcctttttggtgaccctgcatcaagtggtgacaaggttagtgtttccgtggtgacaattaatgttactcgcccaagcccagtaggagtcgcgctgccttcaatggttgaatatctggccatctga

SEQ ID NO: 474968 - DNA, 1002 bp, Shigella flexneri
atgcataagagcaactgctttgacacggcaaggcttgtggcagctatgatggttctggtcagtcaccactacgcgctctctgggcagccggagccgtacctgttcggctttgaaagtgctggcggcattgcagttatcatattcttttcaatatcaggatatctgatttcaaaatcagctatcaggagtgattcctttattgatttcatggctaaaagagcgagaagaatattcccggcgctggtcccttgctctatactgacatattttttatttggatggatacttaacgacttcagcgcagaatattttagccatgacattgtcaggaagaccataagctctatttttatgagtcaggctccagatgctgacattacatcacatttaattcatgccggaattaacggcagtttgtggaccctaccgcttgagttcctgtgttatataataacgggagtagcagttgccctactaaagaacggaaaagcattcatagttatactgttggtttttgtttctctttcattaattggaagtgtgtcagaaaacagggatgtaatgttctctattccgttatggctgtatcctttgcgtggactggcgttcttttttggtgccactatggcaatgtatgagaagtcatggaatgtaagtaatgttaaaattactgtagtttctttgcttgctatgtacgcctacgctagttatggcaaaggcattgattatactatgacttgctatatcctggtttcattctcgacaatagccatatgcacatccgttggcgacccactggttaagggcaggtttgattactcgtatggtgtgtacatttatgcattcccggttcagcaggttgttataaacacattgcacatgggtttttacccgtcaatgttgttaagtgccgtgactgttcttttcttgtcccatctttcatggaatctggttgaaaaaagattcctgacacgaagttcgcctaaattatccctggattga

SEQ ID NO: 474969 - DNA, 405 bp, Shigella flexneri
gtgcactggcaaactcacaccatttttaatcaacctataccattaaataacagcaacttatacctgtctgatggcgcgctttgcgaagcggtaacgcgtgaaggtgctggctgggatagcgattttctagccagtattggtcagcagttaggaacggctgaatcccttgaactggggcggctggcgaatgtaaacccgcctgaactgttgcgctacgatgcccaggggcggcgtctggacgatgttcgtttccatcccgcatggcacctgctgatgcaggcgttatgtaccaatcgggtgcacaatcttgcctgggaagaagacgctcgctccggcgcatttgtggcgcgcgcggcgcgttttatgttacatggcaggttgaggctgggtcgttatgtccaataa

SEQ ID NO: 474970 - DNA, 414 bp, Shigella flexneri
atgttgtccaaacaaatcccgcttggcatctatgaaaaagcgctccccgccggggagtgctggctggaacgcctgcgactggcaaaaacgttgggcttcgattttgtcgagatgtcggtagatgaaactgacgagcgcctgtcgcgcctcgactggagccgcgagcagcgtctggcgctggtgaatgcgattgttgaaaccggcgtgcgtgtgccgtccatgtgcctttctgcccatcgtcgtttcccgttgggcagcgaagatgacgcggtgcgggcgcaggggctggagattatgcgtaaagccatccagttcgcccaggacgttggcattcgcgtgatccagctgcgggctatgacgtttactatcaggaagccaataacgaaacgcgtcgtcgtttccgtgacggcctga

SEQ ID NO: 474971 - DNA, 138 bp, Shigella flexneri
atgaaccggcacacacaaatccgtcagagcgtgctggcacgccttcgggaacagtgtggagacagcgccacgttttttgacgggcttccggcatttattgatgcgcaaactgcctgccgtggcggtgtggctgagtga

SEQ ID NO: 474972 - DNA, 300 bp, Shigella flexneri
atgcgcaaactgcctgccgtggcggtgtggctgagtgatgctcagtacaccggaaaaatgacggatggagatgactggcaggctgttctgtatattgccgtcttcatccgggcacaggcaccggattcagagctggatatgtggatggagagcaccattttcccggccctgaatgatgtaccggcactttccggactcatcgacaccctgaacccactcggttttaactatcaacgtgataatgagatggctacctgggcgatggcggaaatcacgtaccagatcacgtacacgaattaa

SEQ ID NO: 474973 - DNA, 972 bp, Shigella flexneri
atggaccagatagccaacctggtcattgatttggggattgatgcggcagagtttaaaaatgaaattccccgtatcaaaaaccttctgaatggtgcagccagcgatgcagaacggtcttctgcccgtatgcagcgttttatggagcgtcagactcaggcggcccggcagacaatgcaggcggcttcttcggctgcaacagcagcatcagcccatgcgcagacggtggagaagaatgcacgggctcatgaacgcatggcccgtgaggtggaacaaacccgtctgcgcgtggatgccctgaatcagaaaatgcgcgaggaacaggcgcaggccagggcactggcggaggcgcaggataaagcggctgccgccttttatcgccagattgacagtgtgaaacaggccggtgcggggcttcaggaattacagcgtattcagcagcagatccgacaggccagaaacagtggcggggttggtcagcaggattatctggcgctgatttcggagatcacggcgaaaacccgtgccctgacgcaggcagaggaacaggccacccggcagaaagcggcgtttatccgccagcttaaagagcaggcaacccgccagaatctgtcgtcttctgagttgcttcgcgccagggcggctcagctgggggtaagcagtgctgcagaagtgtatatccgcaaaatggagcgggcaggaaaagccacacattcgctggggctgaaaagtgcggcagcccggcgggagctgggggtgttaatcagtcagatggcgcgcggcaattttggtgcgctgaggggatccgggataacgctggctaaccgtgccggatggacaggcgcactgatgtcgccgaaaggcatgatgactggcggcgttattggcggacttgtcgcggcggtcctgggtctgggtaaagcctggcatgacggcggaaggagggcgaggaatttaaccgtcagctggcgctga

SEQ ID NO: 474974 - DNA, 1788 bp, Shigella flexneri
atggtggcgaaagctgccgcacagatggagcgatcggttggccagtcggtcagcgataccataaatcagtttaagcggctgaaggatgatcctgtaaatgccgcgaaggcgctggacaatgcgctgcattttttgactgccactcagcttgagcagatacgcgtccttggggagcaggggcggtccagtgatgcggcccggatcgccatgtctgcgctggcagaggaaaccggtaaacgcacatctgatattgataataatctcaatgcgctgggtagtacgctgcaaaccttgtctgactggtggaagcagttctgggatgcggccatgaatattggtcgtgaagactcgctggatgcgcagattgatgcgttacaggaaaaaattcagcgcgcgaaaaaatatccgtggacaaacgcctccacacaggtggagtacgatcagcagcgtcttaacgatcttcaggagaaaaaacgccggaaggatttgcaggatgcaaaagcgcaggcagaacggaattaccaggagcaacagaaacgccggaatgctgaaaatgccgcgctgaaccggatgaatgaaacggaagctgcacgacatcagcgggaaattgcgcgtattaatgccatgcagtacgccgaccaggctgtcagggatgcggcgatacagcgtgaaaatgaacgttacgaaaaagccattaagaaaaatacacgggcaacccgtaatgatgaggccacccggttattgctgcagtacagtcagcagcaggcacaggtggaagggcagattgctgctgccagacagtcagcaggcattgccactgaaaggatgactgaagcgcataaacagcttctggccctgcagcagcgcatcagcgacctggacgggaaaaagctgacggcagatgaaaagagtgtgctggcccgtaagaatgagctgattcaggcgctgacgctgctggatgtgaaacagcaggagctgcagaaacagacagcgcttaacgacctgagaaaaaaaacggttcagctgaccagccagctggcagacaaagaacgtgcactgcgtgagcagcacaatctggatattgccactgcaggtatgggggataagcagcggcagcgctaccaggcacagttgcgcatccggcaggaataccggcaacagttgcaacagcttgagaatgacagtcgccagaaaggcacttacgggacggaggactaccggagggctgaggaggtgctgaaggggagcctgaagcgacaactgaatgaaaacaaacgctactggcaggaactggaagtggcgcagggcgactggaaaaacggtgccatgcgggcgtttcagaattttacggcggatgcggataatgcggcgggaacggcagaacagatgtttacagtggcattcagcagtgccggtaatgcactggcgacattctgtaccaccggtaagctgaattttaaatccttcacctcttccctgttgtcagatatggccagaattatggcacagatggccatgatgcaggcggtaaagggcgtcggttctttattcggcttcacgactaatgctgatggcggtgtttaccagtctgctgatttgagtcgctacagtggcacggtggttaaccgtccgacgttttttgcttttgcaaaaggcgcgggtgtgatgggggaagcgggacctgaagccattctgccactgcgtcgcggtgctgatggtaagctggggggttgtggcggatactggtggttcaggcatggtgatgtttgccccgcagtacaacattga

SEQ ID NO: 474975 - DNA, 252 bp, Shigella flexneri
gtgaaaacgggggctgaagccatccgcgcactggccacacagctcccggcgtttcgtcagaaactgagtgacggctggtatcaggtgcgcattgccgggcgtgatgcaggtgaaaccgaattgtctgcccgtcttaatgagccgctggcaaatggtgcagtgatccacatagtaccgcgtctggtgggagctaaaagtggcggtgtgtttcaggcggtgctgggggcagctgttatggcggttgctatatag

SEQ ID NO: 474976 - DNA, 2622 bp, Shigella flexneri
atggggaaacgtcgtggtgcggcagatgtggacaaatgggcgctgtatgtcatcggccagtactgcgaccagtcagtgccggacggatttggcggcacggagccgcgcatcacctgtaacgcttacctgaccacacagcgtaaggcgtgggatgttctcagtgatttctgctcggcgatgcgctgtatgccggtatggaacgggcagacgctgacgttcgtgcaggaccgaccgtcggataaagtgtggacctataaccgcagtaatgtggtgatgccggatgatggcgcgccgttccgctacagcttcagcgccctgaaggaccgccataatgtcgttgaggtgaactggattgatccggacaacggtcatgagacggcgacagagcttgtggaggacacgcaggccattgtccgttacggtcgtaacgtcacgaagatggatgcctttggctgtaccagccggggacaggcgcaccgcgccgggctgtggctgattaaaacggaactgctggaaacgcagaccgtggacttcagcgtcggcgcagaagggcttcgccatgtaccgggtgatgtcattgaaatctgcgatgatgattatgccggtatcagcaccggtggtcgcgtactggcggtgaacagccagacccggacgctgacgctcgaccgtgaaatcacgctgccgtcctccggtaccacgctgataagcctggttgacggaaatggcaatccggtcagcgtggaggttcagtccgtcaccgacggcgtgaaggtgaaagtgagccgggttcctgacggcgttgcagaatacagcgtgtgggggctgaagctgccgacgctgcgccagcgcctgttccgctgcgtgagtatccgtgagaacgacgacggcacgtatgccatcaccgccgtgcagcatgtgccggaaaaagaggccatcgtggataacggggcacactttgacggtgaccggcgcggcacggtgaatggtgtcacgccgccagcggtgcagcatctgaccgccgaagtcaccgcagacagcggggaatatcaggtgctggagcgatgggacacgccgaaggtggtgaagggtgtgagcttcctgcttcgcctgaccgtggcagcggacgacggcagtgagcggctggtcagcacagccaggacgacggaaaccacataccgcttcaggcagctggcgctggggaattacagtctgacagtccgggcggtaaatgcccgggggcagcagggcgatccggcgtcggtatcgttccggattgcggcaccggcagcgcctgtcactattgaactgataccggggtattttcagataacggtggtcccgaaactggctgtatatgacccgacggtgcagtttgagttctggttttcggaaaagcggattgcggatatcaggcaggttgaaaccagcgcccgctatcttggcacggcgctgtactggatagccgccagtatcaatatcaggccgggccatgattattatttttacgttcgcagtgtgaacaccgttggcaaatcggcatttgtggaggccgtcggtcgggcgagcgattatgcggaaggttatctgagtttttataaagggttgatcaataaaacgcatctcggcaaggagttgtggacgcagattgataacggtcagcttgcgccggacctgactgaaatcaggacgtccattacgaatgtcagcaatgaaatcacgcaaaccgtcaataaaacactggaaaatcagagtgctgcaatccagcagatacagaaagttcaggttgatacaaataataacctgaacagcatgtgggctgtgaagctgcaacagatgaaggacggacgcctttatattgcgggtatcggtgccggtattgagaatacgccagcaggaatgcagagtcaggtgctgctggcggcagacaggattgcgatgattaatcctgcgaatggcaacacaaagccgatgtttgttggtcagagcgatcagatattcatgaacgacgtgttcctgaaacgcctgacggctccgaccattaccagcggcggtaatcctccggcattttccctgacacctggcggacggctgacggcgaaaaatgccgatatcagcggtaacgtgaacgcgaactccgggacgctcaacaacgtcacgattaataagaactgtcgggttctgggaaaattgtccgcgaaccagattgaaggcgatctcgttaaaacagtgggcaaacctttcccacgggactcccgggcaccggagaggtggccatcagggaccattaccgtcagggtttatgacgatcagccgtttgatcggcaaattgttattcccgcggtggcgtttcgcggtgctaaacatgagcggaagaataacaatatttattcgtcatgccgcctgatagtgaagaaaaacggtgctgaaatttataaccgaacgaccctggataatacgctgatatatacgggtgttattgatatgcctgccggtcacggtcacatgacgctggagttttctgtatcggcatggctggtaaatggctggtatcccacagcaagtatcagcgatttgctggttgttgtgatgaagaaagccactgcaggcatcacgattagctga

SEQ ID NO: 474977 - DNA, 501 bp, Shigella flexneri
gtgggagtggcgcgtgcactggctgccgatccgcaagtcttactgatggatgaaccttttggcgcactggacccggtaacgcgcggcgcgttgcaacaagagatgacgcgcattcaccgtttgctggggcgcactattgtgctggtcactcatgatattgatgaggcgctacggctggcagaacatctggtattgatggatcacggtgaagtggtgcagcaggggaatccgctgacgatgctgactcgtccggcgaatgattttgtccgccagttttttggacgtagtgaactgggggggcacctgctttcgttacgtagcgtggcggattacgtgcgtcgcgaagaacgggcagaaggtgaggcactggcagaagagatgacgctacgcgatgcgctctccctgtttgtcgcgcggggatgcgaggtgctgccggtggtgaacacgcagggccagccttgcggcacgctgcattttcaggatctgctggtggaggcgtaa

SEQ ID NO: 474978 - DNA, 672 bp, Shigella flexneri
atgaaagaatacgccaaccgtcaggatgtgtttgacgacgcgctggcacaacatctgacgttgctgtttggtgcggtgctgcctgcgttagtgattggtgtgccgttgggcatctggtgctacttttccactgcgcggcagggggcaattttttctctgctcaatgtcattcagaccgtgccttcggtggcgctctttggcctgttgattgcgccgcttgccgcgctggttacggcctttccgtggctggggaagctcggcatagcaggaaccggaatgacacccgcactgattgcgctggtgctctatgccttgctgccgctggtgcgcggcgtggtagtcggtttgaaccagatcccgcgcgatgtgctggagagcgccagagcgatggggatgagcggggcgcagcgtttcctgcatgttcagttaccgctggcgttaccggtatttctgcgcagcctgcgggtggtgatggtgcaaactgtaggtatggcggtgattgcggcgttaatcggcgcaggcggttttggtgcgctggttttccaggggctgctaagcagcgccattgatttagtgttgctgggggtgatcccggtaattgttctggcggtgcttaccgacgcgctgttcgatttgcttatcgcactgctgaaggtgaaacgtaatgattga

SEQ ID NO: 474979 - DNA, 1437 bp, Shigella flexneri
atgaatcgtgattccttttatccagccatcgcctgttttccgctgttactgatgctggccgggtgtgcgcctatgcatgaaacccgccaggcgttaagccagcaaacgcccgctgcacaagttgacaccgcattacccacggcgctgaaaaatggttggccagacagccaatggtggctggagtatcacgataatcagctcacttcattaattaacaatgcactacagaacgcaccggatatgcaggtggctgaacagcgcattcagctagctgaagcccaggcgaaggcagttgccactcaggatggtccgcagatcgacttttcggcggatatggagcggcaaaaaatgtcggcagaagggctaatggggccgtttgctctgaacgatccggccgcaggtacgaccggtccgtggtacaccaacggaacttttggcttaacggcgggctggcatctcgatatctggggaaagaatcgggcggaggttactgcccgcctgggtacggttaaagcacgggcggcggaacgcgagcaaacccgccaattgctggctggcagcgtagcccgcctgtactgggagtggcaaacccaggcggcgttaaacacggtcttgcagcaaatagaaaaagagcagaacaccattatcgcgaccgatcgccagctatatcagaacgggattacttcttcagttgacggtatggaaaccgatattaatgccagcaaaacccggcagcagctcaacgatgtcgtggggaaaatgaaaattattgaggcacggttaaatgcactcacaaatcaccagactaagtcattgaagcttaaaccggtcgcgttgccgaaagtggcaagccagcttcctgatgaactggggtactccttactggcccggcgggcagatttgcaggcggcgcactggtacgttgagtcatcgttaagcactattgatgcggcaaaagcggcattttatcctgacatcaacctgatggccttcctgcaacaggatgcgttgcacttaagcgatctgttccgtcattccgcgcagcaaatgggcgttacggcaggcctgacgctacctattttcgatagtggtcgtcttaacgccaatctcgatatcgcaaaagccgaaagcaacttgtctatcgccagctacaacaaagcggtggttgaagcagtgaatgacgtggcgcgggcagccagtcaggttcagacactggcggagaaaaaccagcatcaggcgcaaattgagcgcgatgccttgcgtgtggtaggtcttgcgcaggcccgctttaacgcgggcatcattgctggttcccgcgtcagcgaagccagaatcccggcgctgcgtgagcgggccaatggcctgttattgcaagggcagtggctggatgcctccattcgactcaccggtgcgctgggcgggggttacaaacgctga

SEQ ID NO: 474980 - DNA, 714 bp, Shigella flexneri
atgaaactggttcgccttgtcatgcagttgaccccttacggcgttctggctctaatgaccaaagtggttgcaggttctaacttgcaagacatcatcaaactgggaagtttcgttgtcgcgtcctacctcggtctgctgattatgtttgctgtgcatggcattctgctgggcattaatggcgtgagtccgctgaagtacttccgtaaggtatggcctgtgctgacgtttgcctttaccagccgttccagtgctgcgtctatcccactgaatgtggaagcacaaacgcgtcgtctgggcgttcctgaatccatcgccagtttcgccgcctctttcggtgcaaccattggtcagaacggctgcgccggtttgtatccggcaatgctggcggtgatggttgcgcctacggttggcattaacccgctggacccgatgtggattgcgacgctggtcggtattgttaccgttagttccgcaggcgttgccggtgtcggtggtggtgcaactttcgccgcactgattgtgctgcctgcgatgggcctgccagtaaccctggtggcgctgttaatctccgttgaaccgcttatcgacatgggccgtacggcgctaaacgttagtggctcgatgacagctggcacgctgaccagccagtggctgaagcaaaccgataaagccattctggatagcgaagacgacgccgaactggcacaccgttaa

SEQ ID NO: 474981 - DNA, 282 bp, Shigella flexneri
ttgacggctgaaggtctggttcagggtggtgcagaaactgcacgtctgaacgccattgaaagtaactatgttggtaaagtctctgatctgagcgttccgcagctggtcttgtcctttatcccgaaaaacccgtttgccgatcttaccggagccaatccgacgtcaattatcagcgtggtaatttttgccgcattcctcggcgtagctgcattgaaactgctgaaggatgatgcgccgaaaggtgaacgcgtcttaaccgctatcgataccctacaaagctga

SEQ ID NO: 474982 - DNA, 396 bp, Shigella flexneri
atgaactttccattaattgcgaacatcgtggtgttcgttgtactgctgtttgcgctggctcagacccgccataaacagtggagtctggcgaaaaaagtgctggtgggtctggtgatgggtgtggtttttggccttgccctgcataccatttatggttctgacagccaggtacttaaagattctgtacagtggtttaacatcgttggtaacggcaatgttcaactgctgcaaatgatcgttatgccgttagtcttcgcctctattctgagcgcggttgcccgtctgcataacgcatctcagttaggcaaaatcagttttctgaccatcggtacgcttttgtttaccacgctgattgcggcgctggtcggtgtgctggtcaccacctgtttggtttga

SEQ ID NO: 474983 - DNA, 339 bp, Shigella flexneri
gtgggactggcctccgcgtcaccactacatatgctggaaaaagtgttgaccatgtttgacttacgcgacagtttcgatgccctcgcctcggttgaaaaactgccttacagcaagccgcatccgcaagtatatctcgactgcgcagcaaaactgggcgttgacccactgacctgcgtggcgctggaagactcggtaaatggcatgatcgcttctaaagcagcctgcatgcgttccatcgtcgttcctgcgccagaagcgcaaaatgatccacgttttgtattagcaaacgtcaaactctcatcgctgacagaactcaccgcaaaagaccttctcggttaa

SEQ ID NO: 474984 - DNA, 261 bp, Shigella flexneri
atgtcaaccccgcgtcagattcttgctgcaatttttgatatggatggattacttatcgactcagaacctttatgggatcgagccgaactggatgtgatggcaagcctgggggtagatatctcccgtcgtaacgagctgccggacaccttaggtttacgcatcgatatggtggtcgatctttgtacgcccggcaaccgtggaatggccaagccgtcaggaagtagtagaacgggttattgcccgtgccatttcactggttga

SEQ ID NO: 474985 - DNA, 861 bp, Shigella flexneri
atgtggcaggcaatcagtcgtcttttgagcgagcagttaggtgaaggcgaaatcgaactgcgtaatgaactgcctggcggagaagtccatgccgcatggcatttgcgctatgcaggacatgactttttcgtcaaatgtgatgaaagggaactgcttcccggttttaccgccgaagccgaccaactggagttactgtcgcgtagtaaaaccgtcaccgtgcctaaggtttgggcagtaggcgctgaccgtgactacagttttctggtgatggattatctcccacctcgtccgctggatgcgcatagcgcatttattcttggtcagcaaattgcgcgtttacatcaatggagtgaccaaccacaatttggcctcgattttgataactcgctctccacaactccacagcccaacacctggcaacgtcgctggtcaacgttttttgctgaacaacggattggctggcagttggaactggcagcagagaaagggatcgctttcggcaatatcgacgccatcgtcgagcatattcagcagcgtctggcctcgcatcaaccgcagccttctctgttgcacggcgatttatggtccggcaactgtgcgctgggtccggatggcccgtacattttcgaccctgcctgctactggggtgaccgagagtgcgacctggcgatgttaccgctgcatactgaacagccgccacaaatctatgacggctatcagtcagtatccccgctacctgccgatttccttgaacgtcaaccggtttaccaactctacacgctgttaaatcgtgcaagattatttggcggtcagcatttggttattgctcagcagtcattggatagattattagcagcatga

SEQ ID NO: 474986 - DNA, 363 bp, Shigella flexneri
gtgttgaccgcgggttatggtcgtcagtttttgaatggcccggtacacagtttccgctttgaattcggtccaggtgtgcgttacgacaaatataccgacaatgccagtgaaacccagccgctgggctatgcctccggggcttatgcatggcagttgactgacaacgctaaatttacgcagggtgtttcggtctttggcgcggaagacacaacgctgaactccgaaagcgcattaaatgttgctattaatgaacattttggactgaaggtggcttacaacgtcacatggaactctgaacctccagagtctgcaccggaacataccgaccgtcggacaaccttatcgctgggctacagcatgtaa

SEQ ID NO: 474987 - DNA, 906 bp, Shigella flexneri
atgaaaaagttattaccctgtaccgcactggtgatgtgtgcgggaatggcctgcgcacaggccgaggaaaagaacgactggcactttaatatcggtgcgatgtacgaaatagaaaacgtcgagggttatggcgaagatatggatgggctggcggagccttcagtctattttaatgccgccaacgggccgtggagaattgctctggcctattatcaggaagggccggtagattatagcgcgggtaaacgtggaacgtggtttgatcgcccggagctggaggtgcattatcagttcctcgaaagcgatgatttcagtttcggcctgaccggcggtttccgtaattatggttatcactacgttgatgaaccgggaaaagacacggcgaatatgcagcgctggaaaatcgcgccagactgggatgtgaaactgactgatgatttacgtttcaacggttggttgtcgatgtataaatttgccaacgatttgaacacgaccggttacgctgatacccgtgtcgaaacggaaacaggtctgcaatataccttcaacgaaacggttgctttgcgagtgaactattatctcgagcgcggcttcaatatggacgacagccgcaataacggtgagttttccacacaagaaattcgcgcctatttgccgctgacgctcggcaaccactcggtgacgccgtatacgcgcattgggctggatcgctggagtaactgggactggcaggatgatattgaacgtgaaggccatgattttaaccgtgtgggtttattttacggttatgatttccagaacggactttccgtttcgctggaatacgcgtttgagtggcaggatcacgacgaaggcgacagcgataaattccattatgcaggtgtcggcgtaaattactcgttctga

SEQ ID NO: 474988 - DNA, 810 bp, Shigella flexneri
atgagatcgttagctgatttcgaatttaataaagcgccattgtgcgaaggcatgatcctggcttgcgaagcaatccgccgcgattttccctcgcaagatgtttacggcgaactggagcgtctcgttagtctggcgaaggaagaaatcagccagcttctgcctttagaagagcagctggaaaaactgatcgcgctgttttacggcgactggggatttaaagcctcacgcggcgtttatcgtctttccgatgcattatggctggaccaggtgttaaagaatcgacagggcagtgcggtatcattaggtgcggttttattatgggtcgcgaatcgtctcgatttgccgctgctgccggtgattttccctacgcagctgatattgcgcattgaatgtccggatggcgaaatttggctgattaatccttttaacggtgaatcgttaagcgaacatatgctggacgtatggttaaagggaaatatcagcccgtcggcggaactgttttatgaagaccttgatgaagctgataacattgaggtaatccgcaaattgctggatacactcaaagcctcgttgatggaagaaaatcagatggagctggcgttacgcaccagcgaagctttattacaattcaaccctgaagatccctatgaaattcgcgatcgcgggttgatttatgcgcaactggattgcgaacacgttgcgttgaacgatttaagttatttcgttgaacagtgtccggaagagccgatcagcgaaatgatccgtgcgcaaataaataacatcgcgcataaacatattgtgctgcattaa

SEQ ID NO: 474989 - DNA, 918 bp, Shigella flexneri
atggatccacggctactgggatactacaaccgcgaactgagctatctgcgggaaacgggagccgaatttgccgcccgtcatcccaaagtcgccgcccggctgggcatgcagggaacggatattgccgatccgtatgcagagcgaatggtcgaggccttcagcttcctgaccgcccgcacgcagctaaaaattgacgctgaattcccccgtttcacccagcgcccgctggaagtggtcagccccaattacgtcacacccacgccctcaatgagcgtggcgcagttgcatcccgatacggaagaaggcgatctggcgaaaggatttaccgtcccgcgcgacacagcctttttctccgccattccggaaggcgaaagcactgcctgccagtttcgcagcagccaggatgtaacgctgtggccgctcgccatcgaagaggcgcgactgaccgccgcgccaccggatatgcctgccctgcaccgctacctgccggccaacattcacgtcgccggggcgctgcgtattaccctgcgcacctttggtgaactaacgttcagtcagcttgccggactggacaggctgccgttttatctctgcggcgaggagcgtacggcctcacacctgttagaacttctacataccagcgccatcgcgaccctggctggcattccggggcattttgacggcgcgctggatgtgaatctgcaacagcccgttatgtacgaaggcctggagccggatcaggggctgctgccgctggcgtggaacgtgtttcacggtcataacctgctgcatgaatattttgcctgtccggaacgcttctattttttcaccccgacaggcctgtctgccggattacagaaaattgacggtggcgtggcggagattgttatcctgctgaaccgcctgccgccggactga

SEQ ID NO: 474990 - DNA, 1950 bp, Shigella flexneri
atgactgacagttttcagctgaaggcgatcatcactgccgtggataaggtatcggcaccgctgaagggaatgcagcgccagctgaaaggttttaaaaaggagtttgccagcctgtcactgggcgcagcgggtgccggaaccgcagtactgggggcgctggcgctcccggtcaaatctgccattgcccttgaatcaaaaatggcggatgtccggaaagtggtggatggtctggatacgccggaagcgtttaaggcaatgacggagcaggtgcgcgacctgtcaacagaactgcccatgtcggcggaaggtatcgccgaaattgtggcggcgggtggtcaggctggtatcgcccgtgacgagctgatgcagtttactgacgatgccgtgaagatgggcgtggcctttgacgccacggcagaagaatccggtcagatgatggcgcagtggcgcactgcctttaaactgacacagggagaggtggcagggcttgcggataagattaactatcttggcaataccggtcctgcaagtgcgaaaaagatttctgatgttgtgacccgtattggccctttaggcagtgttgcgggtgtggcctccggagagattgccgcaatgggggcaaccattgccggaatgggggtggagtcagaaattgctgcgacggggataaagaattttatgttgtcgctgacagcgagggattctgccaccaaatcgcagaaaaaagtgctccgctcgttgcgcattagcccgaaaaaactggcggcggatatgcagaaagacgcccgcggggccatgctgcacgtactggattctctggcaaaagtgccgaaagaaaaacaggctgctgtgctgaaagcgctgttcgggaaggaatccctgggggccattgcgccgctgctcacgaatctggatttgttgcgaaccaactttaatcgtgtggcggatgcgcagcagtatggcggctcaatgcagaaagaatatgccgcccgtgccgcgacgacagaaaatcagttgttgctgctgcagaaccagatcaatgcgatttcttccacgctgggggaaaccttcctgccttcactcaatgaaggcataaaagagatgaagccttttctggaagaagtgcgcacgtttgtcagagaaaatcctgaggtcgtaaaaaccatcgcgaaaactggtgcggcattactgacgatgggcgtggcgattggcacattgacacgcataacaaaaatcatgggtagcgtgatgaatatgacgccggcaaagggattaattgcgcttctcgtcggtggtgcatatctcataattgataactgggaaacggtcggtccggttgtgaaaaaagtctggcaggaggttgatcaggttgtcagagcaatggggggatgggaacaggcagtaaaaacaatagcaacggtttctgccctgtatattggtgtgaaggcggtggcaagtattcgtgcggcaacagtcgcccagaatcaatggacaacggcggcaggaaaaacagggctgaaattaaagggcctcggaaagatcagtctgattggtggattgcttgaactgggcatgatggcgcaggagtttgaaaaagaacatccctggcttgttaaaaattttgtggctgatgcactgaacagtggatttggtctgaatgataagttcgacgagtggggcaaacagttccatgattttgtctatgacatgaccggatggcagatgccacgtggtgatgggtatttatctcccgataaacgctacaccccgaatgtatcactggaaaggaatcagctgttaagccttgcatcttcaccggcaacccgcagcgaacttaaggtgacgtttgacaacgcgccgcctggaatgcgcgttatcgatttgccgaaaacaggcgatccctttatgaaaatcacccatgatgttgggtattctccatttaaaaggtga

SEQ ID NO: 474991 - DNA, 429 bp, Shigella flexneri
atggcaatgaacgttacagaaatagttttaaaaaaaccggtgacagcgcataacgaaatgctgcatgtgctggagttgcgcgagcccacgtatgacgaaatcgaggcgctgggttttcctttcattatttccggtgaaggcagtattaaactggacagccgggtggcactgaaatatatcccgttgctggcggggatcccgcgttcatcggcggcgcagatggcaaaactggatatttttaagaccagcatgcagatcctgcgtttttttacccagtcggagacgggaagcacctccgggaaacgactctacaatgttgcctggttctggaaactgaatccactggagctgcgacgggtggctgtttcgcagtttacagaactggaagccgaggccgtccgcattaacgaggagatgaagcatgactga

SEQ ID NO: 474992 - DNA, 357 bp, Shigella flexneri
atggcaaagatcgccggaacctgtttttttaaagtggatggtcagcagttatcgctgacaggtggcattgaagtgccgatgaacaccaatgtccgggatgacatcgtcggcatggcaggggatgtggattacaaggagacctggcggtcaccttacgttaagggcacgtttaaagtgcccaaaaactttccggtcgacaaaattaccacctcagaccagatgacgattaccgctgagctggcaaacggcatggtgtatgtgctttcggcggcatggctgcacggagaggctaatcataatgccgaagaaggcacggcagatcttgaattccacggcgaagagggagggtatcagtaa

SEQ ID NO: 474993 - DNA, 1497 bp, Shigella flexneri
atgacgataagttttaatactgttccgtcgaatacgctggtgccgttgttctacgccgagatgaacaattctgcggcaaatacagcggtgaccagcgcgcctgcattactgatcgggcatgccagcaacgatgcagccattgaggttaacagcctggtgctgatgccatcggcagattatgcccgccagatttgtggggcggggagccagctggcgcgtatggtggaagtctaccgtcagacagatcctttcggtgaactgtatgttattgcagtaccggaagccagaggggcggcggcgacggtcagggtgacggttgccggagaagcagaggaaagcggcaccctgagtctgtatgtcgggcgctcccgtgtacaggtgcctgtggtgaatggcgatgatgccactgcggttgccaccgcgattaaggaagcggtaaacggggttatcaccctgccgtttacggcgtcatctgatgcaggcgtggtgacgctgactgcccgtcataaggggctgtatggtaatgagttaccggtctgtctgaattattatggttctggtggtggtgagattctgccagcagggcttcgggtggtgacggaagtcggtgctgccggtagcggagcgcctgatcttaccgccgctgttgctgctatgggcgatgaggcattcgactttatcggtctgccgttcaacgatgccgcctccatcaatatgatgatgaccgaaatgaatgacagcagcggtcgctggagttatgcgcgccagttatacgggcatgtctataccgcaaaactgggaacgctgtcagagctggttggtgccggagatatgcataatcagcaacatatcacgcttgccggttacgaaaaagaaacccagtcgcctgtcgatgaactggttgccagtcgccttgcccgtgaagcggtatttatccggaatgatcctgcccgtccgacacagacgggggagctggtggggatgcttccggcaccgaaaggtaagcgattcatcatgacagagcagcagacccttttatctcacggcgtggcgacggcttatgtggaaggcggcacgttgcagatccagcgttccgtaaccacctacaaaaagaatgcgtatggcgtggcagacaacagctatctggacagtgaaactctgcataccagtgcatatgttcttcgcaaactgaaatcggtcatcacaagcaagtacggacgtcacaagctggcaaatgatggtacccgttttggtccggggcaggcgattgtcactcctgccgttatcaaaggggaacttctggcgacatatcgtcagatggagcgtgccggtattgtggaaaattacgatctgtttaaacagtatctgatagttgagcgtgatgcagataacccgaaccgactgaatacgctgttcccgccggattatgttaatcagttacgtgtctttgcggtggttaaccagttccgtcttcagtattcagaggagtcagcataa

SEQ ID NO: 474994 - DNA, 162 bp, Shigella flexneri
atgtttgtgaaacccctgaaagggcggtcggttcctgaccctgcccgtggagaccttttgccttccgaagggcgaaatgtggaagaaagcagctactggttccgccgtatagcggcgggtgatgtggtacgtgttaaacaggataaggctaaaaaatcatga

SEQ ID NO: 474995 - DNA, 477 bp, Shigella flexneri
atgaaactgacaacgataattgcggcgctgcgtgagcgatgcccgcgttttgaggagcgtgttggtggcgcggcgcagtttaaggcgatccctgatgccggaaaacttcgcctgcctgctgcctatgtggttccctctgacgatgcgccgggggaacaaaaatcacagaccgattactggcaggatttgactgaaggcttctccgtgattgtggtgctcagcaatgagcgtgatgaaaaagggcagtgggcagcctatgacgccgttcatgatgtccggagagaactctggaaagccctgcttggatggatgccggacccgcaagggggcgagattgtttatgtcggtggcaccctgctggatctgaaccgttacgaactgtattaccagtttgattttacggcgaagtatgaaatcacggaagaagacacgcgacaggcagaggacgtgaatgcctgccggatttatccctgctga

SEQ ID NO: 474996 - DNA, 525 bp, Shigella flexneri
atgaatcagacagcatttttacacgtcgactttaaacaaccagaggagctggagtttaatcgcgcccgtctgcgtcgggcgtttgtgcaaatcgggcgcgtttacatgcgttatgccagacgtctggtgattaaacgcggacgctccggtccgggagagaacccgggatatcagaccgggcgtctggcccgctccattggttattacgttcccaaaaaaacgacgcgtcgccccggactgatggtgaaaatttcccctgaccagaaaaacgggcaggggaatcgccgttttcctgaaggtgctccttattatccggcgtttctgtattacggcgttcgccattcagcgtatggaatggataaaaaggataagcggcagaagaagcaccattcttcgactttccggctggccccgcgtaataactttatggctgacgttattgagcgtcagcgtcactggacgcaggaactgttgtccagtgagctgcagcgttcgttacgtccggtaaaaaggaagcataaatga

SEQ ID NO: 474997 - DNA, 417 bp, Shigella flexneri
atgaaaatcaggcaaagtcagaccagtgccacttaccttttaccggatcccggagagctgaatcgccggataaagatccgccttcgtgtggatgaacccaccgctgattttggtacggagccaacgtatccggagtcgtttgatgtctgggcaaaggtggctcagccaggcgctgccgcttatcagggctcagtgcagacagaaaatatcgttacgcattattttacgatccgtttccggcacgacatcacggcagatcacgaagtggtttattacggccaagagtaccggatccggcgaatacgtgacctgaacggtcagcggcgttttttattactggaatgtgaagaactgcgtacagcgcgacgacggggtgaatgccatgaatcagacagcatttttacacgtcgactttaa

SEQ ID NO: 474998 - DNA, 324 bp, Shigella flexneri
atgctcctgaaagaagaggagattaaatctcatctccggctcgatgatggtttgtacagtgacggcgattttctgaaactgctggcacaggcggtacagaaaaaaacagagacatacctgaacaggaagttgtatgcaccggaagagacgattccggaagatgatcctgacgggatgcatctgactgatgacgttcgtctggcaatgctgatgctggtcagtcatttttatgaaaatcgctcaacgatcaccgatgtggagaaactggaaacgccaatgagtttcagatggcttgctggcccttacaggattgtcccgctatga

SEQ ID NO: 474999 - DNA, 1731 bp, Shigella flexneri
atgcagacgaaacaacgtcttgatgtaccgctgagtctgaaatctgtcagtgactccggtgagtttgaagggcatggctccgtctttggtgtaaaggacagccacgatgatgtggtgatgtccggggcatttgctgcttccctgcgggcgtggagtgacagaaaagcgttacctgcgctgctctggcagcaccgcatggatgaacccatcggtgtttacaccgaaatgaaggaagacgatgtcgggctttacgtcaggggacggttgcttattgatgatgatcccctcgcaaaacgtgcacatgcacacatgaaggccggttcgttaaccggcctttctattgggtacgtcctgaaagactgggaatacgaccggagcaaagaagcctttctgctgaaagaaatcgacctctgggaagtcagtctggtgacgttcccgtctaacgacgaggcgcggatcagcgacgtcaagaacgcactggcccgcggggaaatccccgaacagaaaaaaatcgaaagagtcctgcgtgatgtcggactctcccgtacccaggccaaagcattcatggccgggggctatggcgcactgtccctgcgcgacgctgaggatgtgggctctgcactgaacggagaagtggaaaccctcaacggaaaactgactgaactggaaaatctcaaaagcgatcttgaggctgagctggctgaagttaagcgtccggcaggtggtacgcaaaataaagttgccggggaacataaagaagcgtgtatcggttttatgcgcaaggggcgtgaagatggcctgcgtgagcttgagcgaaaggcactgcaggtgggtaatgatgaagatggtggttatgccattccggaagaactggatcgcaccattctgacgttgctgaaagatgaagtggtgatgcgccaggaggccaccgtaatcactctgggtggctcggattataaaaaactggtgaatctgggcggcacgacgtccggatgggtgggggaaacggaagcgcgtcaggaaaccgccacctcaaaactgggactgattgagccctttatgggggaaatctacggcaacccgcaggccacacagaaaatgctcgatgatgctttctttaatgtggaagactggatcaacagtgagctggcgctggaatttgccgaacaggaagaaattgcctttaccagtggcgacggtagcaaaaaaccaaaaggttttctggcttatgagtccaccgatgaagatgacaagacccgtgcgtttggcaaacttcagcacattgcttccggcgcggcttccggcgtgaccgctgatgcgatcattaaactgatttacaccttgcgtaaggcgcaccgcagcggcgcgaagttcatgatgaacaacagcagcctgtttgccattcgtctgctgaaggataacgacggaaattatttgtggcgtccgggtattgagctgggtcagccttcttctctggcagggtatggcatcgttgagaatgagcagatgccggatattgccgccgatgcaaaagccattgcgtttgggaacttcaaacgcggctataccatcgttgatcgcatcggtacccgtatcctgcgtgacccgtacaccaacaaaccgttcgtgggtttttataccaccaagcgaaccggcggtatgctggtggattctcaggcgattaagctgatgaaaattggggctgcaacccgccagaaagccgctgcgtaa

SEQ ID NO: 475000 - DNA, 1242 bp, Shigella flexneri
atgtttttccaggggctttttcaacgcaaaaataacacccccgtcacaacgcccgggatgcttgcggaagagctggggttgtcatacgacacctataccggaaagcggatcagcagccagcgggccatgcggctgacggcggtctattcctgcgtcagggtgctggctgagtctgttggtatgctgccctgcagtctctacaaaatcagcggcacccttaaaacacgggcggtggatgaacggctgcataagctgatttcagcaaaacccaatggctacatgacgccgcaggaattctgggagctggttatcgtctgcctgtgtctgcgggggaatttttacgcttacaaggtgaaggcgctgggggaagttgtggagcttcttccgatagatccgggctgtgtggaaccgaagctgaacagccagtggcagccggtttatcaggtgacgtttccggatggttccgtggatgtgttgacccaggatgaaatctggcatgtgcgcaccctgacgctggacggactggtcgggctgaatcccattgcatatgcgcgcgaggccatttcactggcagcggcaaccgaggagcacggtgccaggttgtttggtaatggtgcggtgacatccggtgtgttgcgcacggaacaaaagctcacgccggatgcttatgagcgcatgaagagggattttgaggagcgtcatcttgggctgggtaatgcgcaccgtccgatgattctggaaatggggctggactggaagccggtggcactgaatgccgaggacagccagttcctggaaacccgcaagtttcagttggaagaaatctgtcgtcttttccgcgtgccgctgcacatggtgcagaacaccgatcgcgccactttcaacaatattgaagagctggggctcggatttatcaactattcccttgtgccgtatctgacccgtattgaacaacggatcaatacagggctggtcagggagagcaaacaggggaagttttacgccaaatttaacgccggggcgttactgcgcggggatatgaaatcccgttttgaagcctacgccaccgggattaactgggggatttactctcccaatgactgccgcgacctggaagatatgaatccgcgtcccggtggggatgtctatctcacaccgatgaacatgaccacgaaaccctccgatggcagtaaagccggtaagcagaaggataacgccaatgcagacgaaacaacgtcttga

SEQ ID NO: 475001 - DNA, 183 bp, Shigella flexneri
atgtttctgataattctcacgccactggtgggcgtgctgggggcgcttttgctgtcgtatggcacatggctgatttatcccccggcaggttttgttgttgccggggcgctgtgtctgtgctggtcgtggctggttgcgcgttatctcgatcgcggtcaccgggtcgcctccggaggtgagtaa

SEQ ID NO: 475002 - DNA, 1758 bp, Shigella flexneri
atggcaaaagtggctgacgggatccgctacgccgaacgtgttgttgcaggagaaattgtcgctggtgaatttgtccgtctggcctgccagcgttttcttgatgatctgaagtacggcgaagagtgggggatttatttcagtgaaccccgtgcgcagcacatcctgaatttctacaaatttgtgccccatgtaaaaggggcgctggcaggtcagcccattgagttgatggactggcatgtgtttatcctcattaatatttttggttttgtcattccgctggtgaatgaagagaccggggaagttgtcatgcgcagcgatggcagcggacgcccggtgatggtgcgccgtttccggacagcgtacaacgaagtcgcccgtaaaaacgcaaaatcaaccctgtcatcaggtatcggtctgtatatgacgggggcagatggtgaaggcggggctgaggtgtattcagccgcaaccacgcgtgaccaggccagaatcgtgtttgaagacgccaaaaatatggtcagaaaagcccggtcgacactcgggcggttgtttgatttcaacaagctggcgatttatcaggagcagagcgcatcaaaatttgaaccgctttcttcagatgcaaacaacctggatggtctgaacatccactgcgccattattgatgagctgcatgcacataaaacccgtgacgtgtgggacgttctggaaacggcaaccggtgcccgtctgcagtcccttttatttggtatcaccacggcagggtttaacaaggaagggatttgttacgagcagcgtgattacgccatcaaggtattgcgtggctataacagcgatgtggagggcgcggtaaaagacgactcctactttgcgattatttacaccctcgatgagggagatgatccgtttgatgaaacggtctggcagaaagcgaatcccggcctgggcatctgtaaacgctgggatgatctgcgtcgcctggcgaaaaaagcgaaagaacaggtctctgcgcgggtgaatttttttaccaaacacatgaatgtgtgggtaacagcagagtctgcctggatggacatgattaagtgggagaagtgcgaatacattgccccacgacatgagctgaaaacgtatcccatgtgggtcggcgttgaccttgctcataagattgatatctgtgcggcggcaaaactctggcgaacggataacgggcatgttcatgccgattttaaattctggcttccggaaggacggctggaacgatgctcgcggcagcaggcagaactttaccggaagtgggcggagatggataagctgattctgacggatggtgatgttatcgatcatgctcagataaaaagtgacttactggaatggattggcggtgaaaacctgagggaactgggatttgacccgtggagcgcaatgcagttcagtctggcgctggctgaagaaggtataccgctggtggaagttccgcagacggtccgcaatctgtcagaggccatgaaggaaacggaatcactggtctatgccgggcgtttccatcacagtaatcacccggtcatgaactggatgatgtctaacgttacggtgaaaccggacaaaaacgacaatatcttcccgaacaaatccacgccggaagccaaaatcgacggccctgttgcgatgtttacagcaatgagccggatgctggtcaatggcggtgaaccggagccggatctgtctgagcatctggtcagcgttggtattcgctcgctttaa

SEQ ID NO: 475003 - DNA, 483 bp, Shigella flexneri
atgtcaggacccccgaaaaccccgccacgcctgcatttgatacgaggcaatccctcaaagcgtcccgttaaagacgccaaaaaaaccgctaaaaaggacgaaaaaggtctccctaaaattccgcagcatttaggggcgcagggaaagtactggttcaggcgaatggcggaagagctgaatgcggaagggatcatttctcagcttgatgcgcgtgcactcgagttgctggtggaagcctacaccgaataccggcatcactgcgaaaccctcgatgttgagggttatacctaccgcacggaaacgcagaacggtgatgtgctgattaaggcacacccggctgctgcgatgaaagcggatgcctggaagcggatccgggcgatgcttgcagaatttggtatgtcaccggcaagccgggcgaaagtaaatatcgccggaccggatgatgttgatccgctggcagaacttttaaaagcgagagactga

SEQ ID NO: 475004 - DNA, 351 bp, Shigella flexneri
atgccatcactaatcccacgtgcctgccgtaagcgtggatgtgcaggtacaaccacagacagttcgggttactgcgataagcatcgcggtgaaggctgggtgcagcaccagcgcggactgagccgccaccagcgtggctatggctcaaaatggacggtgattcgtgcccgtattctgaagcgcgataaaggtctgtgtcagttgtgtctgcgtgtcggtgtggtgagcgaggcgaaaaccgtcgaccacatcatcccgaaagcgcatggcggaacagacgcagacagcaacctgcagagtctgtgctggccctgccataaagcgaaaacagcgcgcgaacgaatcaggtga

SEQ ID NO: 475005 - DNA, 465 bp, Shigella flexneri
atgagcagagtcaccgcgattatctccgctctggttatctgcatcatcgtctgcctgtcatgggctgttaatcattaccgtgataacgccattacctacaaagagcagcgcgacaaaaacgcaagagaactgaagctggcgaacgcaaccattactgacatgcagcagagacagcgtgatgttaatgcactcgatgctaaatacacgaaggagttagctgatgcgaaagctgaaaatgaaactctgcgcgctgatgttgccgctggtcgtcgtcggttgcacatcaaagcagtctgtcagtcagtgcgtgaagccaccaccgcctccggcgtggataatgcaaccagcccccgactggcagacaccgctgaacgggattatttcaccctcagagagcggctgatgacgatgcagatgcaactggaaggggcacaggagtatatccgcactcagtgcattaagtag

SEQ ID NO: 475006 - DNA, 189 bp, Shigella flexneri; identical to SEQ ID NO: 463227

SEQ ID NO: 475007 - DNA, 1152 bp, Shigella flexneri
atgaaaatcgtaatcgccccagactcttataaagaaagtttatctgccagcgaggttgcgcaggcgatagaaaaaggatttcgggaaatttttcctgatgcacagtacgtttctattccggttgccgacggtggcgaaggaacggtggaagcgatgattgcagccacccagggttctgaacgtcacgcctgggttacagggccgctgggcgagaaagtgaatgccagttgggggatctccggcgatggcaaaaccgcgtttattgaaatggcggcggccagtgggctggagctggtacctgcggaaaaacgcgatccactcgtgaccacttcacgcggcacaggcgagttaatcctgcaggcgctggagagcggcgcgacaaacattattatcggcattggcggtagcgctacaaatgatggcggcgcaggcatggtacaggcgctgggggcgaaattatgcgacgccaacggcaatgaaattggttttggcggcggtagtcttaatactctgaatgatattgatatttccggcctcgatccgcgcttaaaagattgcgtcattcgcgtcgcttgtgatgtcaccaatccgctggtgggcgataacggcgcatcgcgcatctttggcccacaaaagggagccagtgaagcgatgattgttgagctggacaataacctctctcactatgccgatgtcattaaaaaagcgctgcatgttgatgtaaaagatgtccccggcgcaggagctgcgggcggtatgggtgcggcgctgatggcgtttcttggtgcggaactgaaaagtggtattgaaatcgtcactacggcgctgaatctggaggaacatattcacgattgtacgctggtgatcaccggtgaagggcgtattgacagccagagtattcacggcaaggtaccgattggcgtcgcaaacgtggcgaagaagtaccataaaccggtgattggcattgcgggtgcgggtagcctgaccgatgatgttggcgttgtacatcagcatggcattgatgcggtcttcagcgtattgaccagcataggtacgttggacgaagcattccgcggggcttatgacaatatctgccgtgcttcacgtaatattgccgcgacactggcgattggaatgcgcaacacggggtga

SEQ ID NO: 475008 - DNA, 1278 bp, Shigella flexneri
atggaaattgcatcgaataaaggcgtcattgcagacgcttcgaccccggcgggtcgtgctggaatgagtgagagcgagtggcgagaagcgatcaaattcgacagtactgacaccggctgggtgattatgagtatcgggatggcgattggcgcggggattgtttttctcccggtgcaggtcggtttgatgggattgtgggtatttttgctctcatcggtgattggttacccggcaatgtatctgtttcagcggttgtttattaatacgctggcagaatcaccagaatgtaaagattacccgagtgtcattagcggttatttaggtaaaaactggggcatcctgttaggtgcgctctatttcgtaatgctggtgatttggatgttcgtctattccaccgccatcaccaacgatagtgcttcctatctgcataccttcggcgtgacggaagggttgctgtcagacagtcccttttatggtctggtactgatttgcattctggtggcgatctcttcacgcggcgagaaattgttattcaaaatttcgaccgacatggtgctgaccaagctgctggtagtcgctgcgctgggcgtgtcgatggtgggaatgtggcatctgtataacgtcggttcgctaccgccgctggggctgctggtgaaaaacgccattattacgctgccgtttaccctgacgtcgattctgtttatccagacgttaagcccgatggtgatctcttatcgctcgcgggaaaaatcaattgaagtggcgcggcataaagcattgcgggcaatgaatatcgcgtttggcattttgtttgtcaccgtctttttctacgccgtgtcgttcacgctggcgattgccgcacagtttattagcggtgacggcgcagcgtgggtgaaagtggtcagcgtcattctcaatatctttgctgtcatgactgcattctttggcgtctatttaggctttcgcgaagcaacgcaagggatcgtaatgaacatcctgcgtcgcaagatgcctgccgagaagattaacgaaaatcttgttcagcgcggcatcatgattttcgccattttgctggcctggagcgccatcgtactgaacgcaccggtgttgagcttcacctctatctgtagcccgattttcggcatggtagggtgcctgatcccggcgtggctggtttacaaagtaccggcattgcacaaatacaaagggatgtctctgtacctgattatcgtcactggtttgttgctttgtgtttctctgttcctggcattttcttga

SEQ ID NO: 475009 - DNA, 1194 bp, Shigella flexneri
atggggccggcaccggaacctaacctgaccattctttggtcggaagaattaccgattgccttcaaaaaatatgccgcgcaggtgtcgatcgtcacctcttccttgcagtatgaaaatgacgatctgatgcgtactgacttcaacagcgacgattacgcgattgcctgctgcgtcagcccaatggtgattggtaagcaaatgcagttctttggtgcacgcgctaacctggcgaaaacgctgctctacgcaattaacggcggggtggacgagaagctgaagattcaggtcgggccgaaaacagcaccgctgatggacgacgtgctggattacgacaaagtgatggacagcctcgatcacttcatggactggctggcggtgcagtacatcagcgcgctgaatatcattcactacatgcacgacaagtacagctacgaagcttcgctgatggcgctgcacgatcgtgatgtctatcgcactatggcatgcggcatcgcgggcctgtcggtggcgacggactccctgtctgccatcaaatatgcccgcgtgaaaccaatccgtgacgaaaacggcctggcggtggactttgaaatcgacggtgaatatccgcagtacggcaacaacgacgagcgcgtagacagcattgcctgcgacctggttgaacgctttatgaagaaaattaaagcgctgccaacctatcgcaacgccgtccctacccagtcgattctgactatcacttctaacgtggtgtacggccagaaaaccggtaatacgccggacggtcgtcgcgccggaacaccgttcgcgccgggcgctaacccgatgcatggtcgtgaccgcaaaggtgccgtggcctcattgacgtcggtggcgaaactgccgttcacctacgccaaagatgggatctcgtacaccttctcaatcgttcctgcggcgctgggcaaagaagatccagtacgtaaaaccaaccttgtcggcctgctggatgggtatttccaccacgaagcggatgtcgaaggcggtcaacacctcaacgtcaacgtaatgaatcgggaaatgctgctggatgccatcgagcacccggaaaaatatcctaacctgacaatccgtgtctctggctacgccgtgcgcttcaacgcactgacccgtgaacagcaacaggatgttatttcacgtacttttacccaggcgctctga

SEQ ID NO: 475010 - DNA, 249 bp, Shigella flexneri
gtggaaatagacaacaacatcggtgaaaacgcgttacgatcggttgcggttggaagaaaaaattatctctttttcggctcagacaagggaggagaaagtgcggcgatcatctacagtctgctggtcacctgcaaacagaacgaagtggagccggaggactggttgcgcgaagtgatcgagaagctcaatgactggccgtcgaaccaagtgcatgaactgctgccctggaacttctcgtctgtaaaataa

SEQ ID NO: 475011 - DNA, 1194 bp, Shigella flexneri
atggctctgagtgatgtgaaggttcgttcggctaagcctgaagcaaaagcctataagctgaccgacggtgaaggcatggttttgctggttcaccctaacggctccaaatactggcggctacgttatcgctttggcggcaaagagaagatgcttgcattggggaaataccccgaagtgtcgttggcggatgccagggcacgccgggatgaggctcgtaagcttttagctaatggtgtcgatcccagtgaaaacaagaaagctgttaaggtagaacaggaacaagaggcgataacgtttgaagtagtcgccagagactggcacgccagcaatcagaagtggtcggcatcgcatagcgctcgtgttttgaaaagtctggaggataatctctttactgctatcggtaagcggaacattgcggaactgaagacgcgggatcttcttgtacccattaaagcagtcgagtcatccgggcggctcgaagttgccgcccgtttacagcagcgtactaccgcgattatgcgctttgccgttcagagcggcttaatcgactacaaccccgcgcaagagattgcaggtgcggttgctacggcgaaaagacagcaccgtgcagctcttgaactgaaccgtatacctgaattacttcatcgcatagatcactattctggcagaccgttaactcgactggcggttgaactcactttattggttttcatccgttcgagcgagctgcgttttgcccgctggtcagaagtagattttgaaacggctatgtggacaatcccaggtgagcgtgagcaactggaaggagtcaagcattctcagcgtggctcgaagatgcggacaccacaccttgtacctttgtcgcggcaggccctaagtattttggaaaagatcaaaagcatgagcggaaatcgaaagctgatttttgtgggcgatcacgatccacgtaagccgatgagtgagaatacggtgaacaaggctttgcgcgtaatggggtatgacacgaaggtcgaggtttgtgggcatggcttcaggacgatggcttgtagttcgttgattgagtcgggattatggtcgagggatgcggtagagcggcagatgagtcaccaggagcgtagctctgtgcgagcagcttacatccataaggcggaacatcttggggagcgtaggttgatgtttgaagtggcacactga

SEQ ID NO: 475012 - DNA, 372 bp, Shigella flexneri
gtgtttaaatttcttgtattaacattaggcattatctcttgccaggcttacgcagaagatacggttatagtaaacaaccatgacacttcagccatcaaagattgttggcaaaaaaattcagatgatgatactgacattaacgtgatcaaatcatgcctgcgacaagaatacaatctcgtcgatacgcaattaaataaagcctatggtgaagcttatcgttatatagaacaagtgccacgcacaggtgcaaaaaaacttgatactgaacaacttaacttgcttaaaaaatcaggtaatgactccaacttactgatagtgttttatgttcagataatgcccgatgaccttgtcatgcagctccaccgattttga

SEQ ID NO: 475013 - DNA, 2430 bp, Shigella flexneri
atggcattaacaatacgtgaatttattaaacacagcggtattgccgctggagcgctggtggtgacatcggcagcaccgctccccgcatgggcagaagagaagggcggtaaaatcctcaccgcgggacgttggggagcgatgagcgtagaagtgaaggacggcaagattgtttcttcgacaggcgcgctggcgaaaaccataccgaactccttacagtctacggcggcggatcaggtacacaccacggcgcgtattcagcatccgatggtgagaaaaagctatctcgacaatccactgcaaccggcgaaaggtcgtggcgaagatacctatgtacaggtgagctgggaacaggcattaaaactgattcatgagcaacatgagcgtattcgtaaagctaacggaccatcggccatttttgccggatcttacggctggcgctcttctggcgtgttgcataaagcgcaaaccttactgcaacgttatatgaacctggcgggcggttattccgggcatagcggcgattattcaaccggggcagcacaggtgatcatgccgcatgtggtcggttctgtagaggtgtatgaacagcaggcctcctggccgctgattctggaaaacagccaggttgtggtgctgtggggaatgaacccgctgaataccttaaaaattgcctggagcagtaccgatgagcaagggctggaatacttccatcagctgaaaaaatctggcaaaccagtgattgccattgatcctatccgctccgaaaccatcgaattctttggcgataatgccacctggatcgcgccgaatatgggcaccgacgtggcactgatgttagggattgcgcataccctgatgacacaaggcaaacacgataaagtgttccttgaaaaatacactaccgggtatccgcagtttgaagagtatctgacaggtaagagcgataatacgccgaagagcgcggtctgggcggcggaaattactggcgtaccggaagcgcagatagtcaaactcgctgaactgatggcggcgaatcgcacaattctgatggcaggctggggaattcagcgccagcaatatggtgaacagaaacactggatgctggtgacgctggcggcgatgttagggcagattggtacaccgggcggcggttttggtttctcttatcattactccaatggtggcaacccgatgcgtgttggcggcgtgctgccggaaatgtctgcggcgattgccggacaggccagcgaggccgctgatgatggcggaatgacggcgattcctgttgcccgtatcgtcgatgcgctggaaaatcctggcggcaaatatcagcataacggtaaagaacaaacgtatccgaatatcaaaatgatctggtgggcgggtggcggtaactttacccatcaccaggatactaatcgtctgatcaaagcctggcagaaaccggagatgatcgtcgtttctgaatgctactggaccgcagcagccaaacacgcagatatcgtattaccgatcaccacatcgtttgagcgcaatgacttgacgatgaccggtgattacagcaaccagcatattgtgccgatgaagcaggctgttgctccgcaatttgaagcgcgtaacgattttgacgtgtttgccgatcttgcggaattactcaaacctggcggaaaagagatctataccgaaggtaaagatgaaatggcgtggctgaaatttttctatgatgccgctcagaaaggggcccgtgcgcaacgcgtcactatgccaatgtttaatgccttctggcagcaaaataaactgatcgaaatgcgccgcagcgagaagaacgaacagtacgttcgttatggtgatttccgcgccgatccggtgaaaaatgcgctgggtacgccaagcggcaaaattgagatttactccaaaacgctggaaaaatttggctataaggattgcccggcacacccaacctggcttgcgcctgatgagtggaagggtaccgccgacgagaagcagttgcagcttctgaccgcacatccggcacaccgtttacacagtcagcttaactatgcggaactgcgtaaaaaatatgcggttgccgatcgtgaaccgatcactattcacaccgaagatgctgctcgatttggtattgcgaatggcgatctggtgcgtgtctggaacaaacgtggtcagattttgacaggcgcggtggtgactgacgggatcaaaaaaggcgtggtatgcgtgcatgaaggtgcatggccagatctggaaaacggcttgtgtaaaaacggcagtgcgaacgtgttaacggcggatatccccagctcgcagctggcaaatgcctgtgccggtaactctgcgctggtgtatatcgaaaaatatacgggtaacgcaccgaagttaacggcatttgataagcctgctgttcaggcgtaa

SEQ ID NO: 475014 - DNA, 1146 bp, Shigella flexneri
atggataaagtcaaatatccaacaggcgtcgaaaaccacggcggcacattacgcatctggtttaattttaaaggtaaacgtgtcagggaaaatcttggtgtccctgacactgccaagaacaggaagatcgccggggaactgcggacatcggtatgttttgccatccgcacaggaagctttgattatgctgcacagttccctgactcccctaaccttcaggcttttggggtaagtaaaaaagaaattacggtgaaggaacttgaagaaaagtggctggatctgaaacgaatggaaatctctgcaaatgcattcaatcgctatgaatccgttgcaagaacgatggttccgaaaattggaggcggcagactggtgtcatcggtaaccaaagaggaattgctgtatatcaggaaagatttgctgaccgggtatcagaattcaacgaaaaacaaagcagcagcaaaaggacggagcgtcgttactgtaaattattacatgacgacaatcgctggaatgtttcagtttgctgcagatcacggttacttagaagcaaatcccttccagggaattaagcctcttaaaagagccagggcagagccagatccgttaactcgtgacgaatttattcgcctgatagatgcttgccgacatcagcagacgaaaaacctgtggtcattggctgtgtacacaggaatgcgtcacggtgaactggtctccctggcctgggaagatatcgatatgaaagcaggaactattactatcaggcgcaattatacgaaactcggtgagttcactctacctaaaactgaagcaagtacaaacagggttgtgcatcttatccagcccgctatcagtgtcctgaaaaatcaggctgaaatgacaagactgggtaagcagcaccacatcaaggttcaactacgtgaatatggacgttcagtgaatcatgaatgtactttcgtatttaacccccaggtggttagaaaaagcaaacaggtaggttttatctacaaggtagattccattggcgactcatgggaaacagccattaagcgtgcgggcatcaggcaccggaaagcataccagtcacgacacacttatgcgtgctggtcattatctgccggagcaaacccaagcttcattgccagctag

SEQ ID NO: 475015 - DNA, 183 bp, Shigella flexneri
gtgcgactggaagcgccggggcgtgattatcggcgctatcagatggaagagtacggcggcgtggacgttcgcctgtatcgtattcctgacccgatggcatttttgcgccagcagaaaaacctgcatcgcattgtggtgcaaccgcaatatctgggcgacgggctgaacaatacgctgacctag

SEQ ID NO: 475016 - DNA, 1914 bp, Shigella flexneri
atgcagcgtactttctcttctcagtcacggcagaatgtgactcaggcattacccgaattacatctcggcaatgccattattaaaccttcccgttatgtacagaacaaccagttttccccgctgaaaaaatatcccttggtggaacagttccgttatccactatggcaggctaaaccggtcgagccgcagcaagggataaaactggaaggcgcatccagcaatttcatctcgccgcagccgggtaatatttatattcctctcggccaacaagagccggggctgtacctcgtcgaggcgatggtaggtgggtatcgggcgacgacggtggtgtttgtttccgataccgtggcgcttagcaaagtgtcaggtaacgagcttctggtatggaccgcgggtaaaaaacagggtgaagcgaagcccggctcagagatcttgtggactgacggtcttggcgtgatgacccgcggggtgaccgatgacagcggtactttgcagttacaacatatatcgccagaacgttcatacattctgggtaaggatgctgaaggcggcgtttttgtctccgagaacttcttctacgaaagcgaaatctacaacacccgcttgtatatttttaccgatcgcccgctatatcgcgcaggcgatcgtgtcgatgttaaagtgatgggccgcgagttccgcgatccgttgcattcatcccccatcgtcagcgccccggcgaagctttcggtgctggacgctaacggcagtctgttgcaaaccgtcgatgtcacgctggatgcgcgcaatggcgggcagggaagtttccgcctgccagaaaatgccgttgccggaggttatgagttacgtcttgcttaccgcaatcaggtctatagcagcagttttcgcgtggcaaactacatcaagccacatttcgagattggtttagctctcgacaaaaaagagttcaaaactggcgaagcggtcagcggcaaactgcaactgctctacccggatggcgagccggtaaaaaatgcccgcgtgcagttaagtttgcgcgctcagcaattatcaatggtcggtaacgatttgcgttatgccggacgtttccccgtgtcgctggaaggcagcgaaacggtgtccgacgccagcggtcatgtggcgttaaatctccccgccgccgataaaccgagccgctatttgttaaccgtctccgccagtgacggcgcggcgtatcgcgtcaccaccaccaaagagatcctcattgaacgcggcctggcgcattactctttaagtaccgccgcacaatacagtaatagcggcgagtcggttgtgttccgttatgccgcgctggaatcttcaaaacaggttcctgttacgtatgaatggttgcgtctcgaagaccgcacgagccatagcggagagctaccgtcaggcggcaaatcctttaccgtcaatttcgctaaacctggcaactacaatctgacattacgcgataaagacggcttaattctcgctgggttaagtcatgccgtcagcggtaagggcagcacggcgcatactggtacggtagatatcgtggcggataaaacgctgtaccagccaggcgaaaccgcgaagatgctgattactttcccggagccaattgatgaagcgttattgacgctggaacgcgatcgcgtggaacagcagtcgctgctttcgcatccggcaaactggctaacgctacaacgtttaaacgataccctgtatgaagcccgggttccagtgagcaattcctttgcgcctaacatcactttttcggtgctgtatacccgtaatggtcagtacagttttcagaacgccgggatcaaagttgccgttcctcagcttgatatccgggtgaaaacggacaaaacccattaccagcctggtgaactggtcaatgtcgaatga

SEQ ID NO: 475017 - DNA, 177 bp, Shigella flexneri
atgcgtacaaccattgctgtagtgttgggtgcaattagtttgacgtctgcttttgtgtttgcagataaaccagacgttgccaaatcggcaaacgatgaggtcagcaccctgttttttggtcatgatgatcgtgtgccagtgaatgacacgacccaatctatgagggtttgcttttaa

SEQ ID NO: 475018 - DNA, 177 bp, Shigella flexneri; identical to SEQ ID NO: 475017

SEQ ID NO: 475019 - DNA, 1035 bp, Shigella flexneri
atggcaaagccgatcatcacgctcaatggcctaaaaatcgtcattatgttgggaatgctggtcattattctctgcggtatccgttttgccgccgagatcatcgtgccgtttattctcgcattatttattgctgttattcttaacccgctggtgcaacatatggtccgctggcgtgtgccgcgtgtactggcagtgtcgattttgatgacaatcatcgtgatggagatggtgttgctattagcttatctgggttccgcgctcaacgagttgacgcggacgttaccgcaatatcgcaactctattatgacgccgctgcaagctcttgagccgttgttgcaacgcgtagggattgacgtctcagttgaccaactggcgcattacattgatccgaacgcggcgatgacgttgctcaccaacttattgacgcagttatctaatgccatgtcatcaatatttttattgctgctgacggtgctgtttatgctgctcgaagtgccacaattgcccggaaaatttcagcaaatgatggcgcgtccggttgaagggatggcggcgattcaacgtgcgattgacagtgtttctcattatctggtgctgaaaacagccatcagcatcatcaccggcttggtcgcctgggcgatgctcgccgcactcgatgttcacttcgcttttgtctggggattgctggcctttgcgcttaattacatccctaatattggttcagttctcgcggcaatcccccctatcgctcaggtactggtgtttaatggcttctacgaagcgttgctggtgctggcgggatatctgctgattaatctggtcttcggcaatattctggagccgcgcatcatgggacgtgggctggggctttcgacattggtggtatttttgtcgttgattttttggggatggttgttaggaccggtgggtatgctgctttccgtgccgttgacaattattgtcaaaattgcgcttgaacaaacagcgggaggtcaaagcatcgccgttctgttaagcgatctcaataaagagtga

SEQ ID NO: 475020 - DNA, 615 bp, Shigella flexneri
atgaacgaaacgctgaatgcactgatttgtcgccacgcccgtaacctgctgctggcgcagggctggccggaagagacggatgttgtactgtccggcagtcagtggcagtcgctgccggtacttccggcagacggaacgcaggtgtctttcccgtatgccggtgaatggctgacggaggaagaaatcagggcggtttttgatgcgatgcgcgatgcagtatgcagtgtcagttgccgggtggcagaagatgcgcggcgtatccgtgcggcgttgactaccaccggtcagacgttgctgacccgccagacgcgccgctttcgtctggttgtgaaggaaagcgatcacccctgctggctcgatgaagacgacgaaaacctgcccgtggtgctcgatgccatcctgaaccggggcgctcgtttttcgtcggtggaaatgtatctggtcagtgagtgtgtggagcatatcctgtccagtgggctggcctgcgatgtgctgcgtataccggatgaaccgtcccgtcgctggtttgaccgggatattctgcgggaggtggtcctggaagcccggactgaaatccgcagcatggcggatgcactggcgaaaatccggaaatga

SEQ ID NO: 475021 - DNA, 435 bp, Shigella flexneri
atgtacggaacatgcgaaacgctctgccgggagctggcagcgcagtatccgggagacgcgccgctgatgctggttgtctggtccccggaagagatccaggccctcgctgacggaatggatatttccctgtccgatcatgaaatcaggaccgtcctggcgcgcctggaggacatcccggaagaccagcgaattgagtccggtatttcttccgccgcggcgatggagattatcagcaacgtgagcgaaaaccgccaggtgaccgttccggctgaactgctggcgtccctgattcagaccgctgaacaggcattgtggaaacgtgaatgggccgcccgggatcatggcctcgccgtcccggaatgcgtcacccgccgtcaggcggtggttaatcaggcccgcaccctgctgaaaaacaacacacgcgaaaacgactga

SEQ ID NO: 475022 - DNA, 222 bp, Shigella flexneri; identical to SEQ ID NO: 8358

SEQ ID NO: 475023 - DNA, 870 bp, Shigella flexneri
atggccataagcatcaagggtgttaataccggtgttattcgcaagggtaataatttcattgcactggcgctgaaaattaaagaacctcgcaataaagaatcgttgttctttatgtctgtcatggaactgcgcgacctgctgattgcgctggaaagtcgtctgcatcaaaagcataaactggatgctgctgcacgccttcagtatgagcaagctcgcgataaagtcattaagaaaatggcagaaaacatcccagaaattctggttgatgagcttaaaaatgccgatattaatcgtcgggttaacacgctggaacttaccgataatcaaggcgaaaatcttaccttcgtattaacgctacatgacggtagcaaatgtgagttagtcgtcaatgagttgcagattgaaatgctggcgcgagcaatcattcatgcaattaataatgcggaaatgcgtgaactggcattacgtattacctcactgttagatttcctgccgttatacgacgttgactgccaggacaatggcaatctggaatatgacacctattcccaaccggaatggaaacataacttgttcgaccattatctggcggtgctttaccgctttaaagatgaaagtggcaaagaacaatttagcggcgcagtggtgaaaacgcgtgaagcaacgccgggtaaagaaatagaggcgatcactcgccgaatgcttgatttcagcccacgattgaaaaaactcgcgggtgtgccatgtcaggtctatgttcgcaccgtagcggcgaataacgcccaaccgctaacccaggatcaatgcttacgcgcgctgcatcacttacgtgtacaatccaccagcaaaactgcaccacaggcgaaataa

SEQ ID NO: 475024 - DNA, 1275 bp, Shigella flexneri
atgtttgcactggctgatatcaacagtttctacgcctcatgtgaaaaagttttccgcccggaccttcgcaacgaaccggtcatcgtactcagcaataacgatggctgtgtgatcgcgcgcagcccggaggcaaaagctcttggcatcagaatggggcagccctggtttcaggtgagacagatgcgcctggagaagaaaatacatgtattttccagcaattatgcgctgtaccacagcatgagccaacgggtcatggctgttctggagtcgctttctcccgcagttgagccctactcaattgatgaaatgtttattgatttgcgggggataaatcattgcatctctccggagttttttggtcatcagctcagggaacaggtaaagagctggacaggactcaccatgggggtgggcattgcgcctacaaaaacgctggctaaaagtgcacagtgggcaacaaagcaatggccacagttttccggtgtggtcgcgctgacggcagaaaaccgtaatcggatcttgaagctactgggactgcagccagttggtgaggtctggggagtaggacgcagactgacggaaaagctgaatgcgctgggtattaacacagcactgcagctggcgcaggctaacacggcattcatccggaaaaacttcagcgtcattcttgagcgtacggtacgcgaactcaacggcgagtcctgcatatccctggaagaagcaccaccggcaaaacagcagattgtctgtagtcgcagttttggtgaacgaatcacagacaaagatgccatgcaccaggctgttgttcagtatgcagagcgggccgcagagaaactacgtggggagcgtcagtattgccggcaggtgacgacatttgtacggacatccccctttgcagtaaaagaaccctgttacagcaatgccgctgtggaaaagcttccattgcccacacaggacagccgggacattattgccgccgcatgcagagccttaaaccatgtctggcgtgaaggataccgctatatgaaggcaggagtcatgctggctgatttcacaccatcgggtatagcgcagccgggattatttgatgaaatccagccccgtaaaaacagtgaaaagttaatgaaaacactcgatgaactgaaccagtcgggaaaagggaaagtgtggtttgcggggcgaggaaccgcccctgaatggcaaatgaaacgggaaatgttgagtcagtgttatacaactaaatggcgagatattcccctggccaggctgggttag

SEQ ID NO: 475025 - DNA, 417 bp, Shigella flexneri
atgagtgatgaaaataaatccagacgctgctcatttgaacttttcccggatgaacggacaggagataagatagcagatgagctcattgcaaatgaaaaactgaaggagcggggacgtttcatgcgcgcgatgttagttactggtgcggcgtttgcagctatagataaacgtcttcctttgctgatatcggagttactgacagaaaatacgactctggatgatattaataaggtgatttccagcgtgataccaggtgctttttcggttgaaaagaaattgcttgaattactggaaaaacaatctggtctccatacgtctgtggattgcagtactcctcttacagagcagagtctgtcgagaaatgacggtgaagaccagaccagaagaaacgctgaaaatatgttcggagatgactga

SEQ ID NO: 475026 - DNA, 981 bp, Shigella flexneri
atgaaaatctttattgatgatggttctaccaacattaaacttgcctggttggaggatggtgacgtgaaaacgttaatcagccctaacagctttaaaccggaatggtcttttagtttactggatgatgctgccccggctaattacgagatcgacggcgagaagttttcatttgatccattaagtgctgatgctgtcgtaacgactgaaacacgctatcagtacagtgatgtgaatgttgtggccattcagcatgcgctacagcagaccggcctgaaagcgcagcctgttgatgtcatcgtcacattgccgatctctgaataccttgacgccaacaatcagaaaaataagcaaaacattgaaagaaagaaaaaaaatgtgatgcgtgaagtacgggtgcaggggagtgatgcatttgttattcgcagtgtttccgttcttcctgaaagtattcccgctggtttcagtgttcttgcggggcttgaggatgatgaatcccttttgatcgtagatctcggtggtacaactcttgatgtgtcgcatgttcgtagcaaaatgacagggattacaaaaacctggtgtgatccaaatatcggcgtgtccctgattacatccggggttaaggaacagatggctgtacatgctaatacaagagtgagctcattccaggctgacaatatcattgtgcaccgtaatgaacctgactacctttcccgtcgcatttataatgctgaacagcgtgagtctatcattaatgttatcaatgaacggcagaagttgcttattaaacgagttaatgatgtcatcagccgtttcaccgactatacacatgtaatgtgtgttggtggtggggctgaaattgtggccgaggctgtgaagaacctgactaaggttcctgatgagcgcttttatctgagctcatccccgcagtttgatttagtcatgggaatgataaaaatgaaaggtggtgtgactaatgagtga

SEQ ID NO: 475027 - DNA, 309 bp, Shigella flexneri
atgagcaaagcgaaatttagtgcacaggctgaaaaactgaaaaacctggtggattctgccagattacaaacttcttcttctgccgtaacagcaacagccccgtctcagccaaatgaaggtgcagaggaagtttcaggtcgtcccgtggctgccaggacgaaggctaagaatcttaaggccataccgctgtcctattttgaagctcatgcggaacttaaagcgaccagtaaaacatctctggattttagctcatatattattgaggctataagagagaagcttgaacgtgatggtgcaataggtcaataa

SEQ ID NO: 475028 - DNA, 645 bp, Shigella flexneri; identical to SEQ ID NO: 8540

SEQ ID NO: 475029 - DNA, 780 bp, Shigella flexneri
atgcagcacctgccggcaccgatccaccatgcccgggatgctgctcagcttcctgttgccatcgattatccggcagcgctggcactccgccagatgtcgatggttcatgatgaactgccaaaatacctgctggcccctgaagtgagcgccctgctccattacgtgccggatctgcgccgcaaaatgctgctggccacactgtggaacaccggtgcgcgcattaatgaagcactggcgctgacgcggggggatttttcgcttgcgcccccgtatccgtttgtgcagctggccactctgaagcagcggacagaaaaagccgccaggacggcaggaaggatgcccgtcggtcagcagactcaccgtctggttccgctctccgacgcctggtacgtcagccagctgcagacgatggtggccacactgaaaatccccatggaacggcgtaataaacgaacaggcaggacagagaaagcgcggatctgggaagtgacggacagaacggtcaggacctggattggggaggcggttgccgccgctgccgctgatggtgtgacgttctctgtcccggtcacgccacatacgttccgccattcctatgcgatgcacatgctgtatgccggtataccgctgaaggtcctgcagagcctgatggggcataagtccatcagctcaacggagatctacacgaaggtgtttgcactggatgtggctgcacggcaccgggtgcagttttcgatgcctgagtccgatgcggtgtctatgctcaaaagaattccataa

SEQ ID NO: 475030 - DNA, 414 bp, Shigella flexneri; identical to SEQ ID NO: 80741

SEQ ID NO: 475031 - DNA, 864 bp, Shigella flexneri; identical to SEQ ID NO: 12983

SEQ ID NO: 475032 - DNA, 1500 bp, Shigella flexneri
atgaatgtggaagagtcagagcagcgctgggtttgtgcttgttgtattggcgaagaatttttacgccacaaggtcgagaaagaaggacgtatacaaacctgtgattactgcgatgagattcacacctgtttttccctggaggaggtatgcgacctgacagaaaaggctattgaagctcatttttaccggactgacactgaaccgaacgatatggagtatgccagtcttcgtcatattgacggttatgagtggttccgtgagggggagaatgtagtgcagctcattgaagatttgctccagtctcgtcgtgcactcgcagacgatattcagcagctgctcgaatacagacattcagattttgattccgatgtgatgggacttgagaccgagtttgcccgcgagtcctgttacgcagaacgcaaacagatcagtaccggccgtctcgattccatgtggataaattttgttacctccctgaaaacagaatcacgcttcatcaataatgccgtgagctccaccctggacggtatattccagggggtagagacaatgcgcgcccgtggaaaagaacctgtgatcattgacgctggaccaggtacagctatcccgtcactgtaccgtgcccggtggtgccggaatcatcatgagctggagcaaatacttgtgacgccggacaaagaattaggtccgccgccgcatcagttcagcggctctaaccgtatgagtgcaaagggcatttcggtattctatggtgccagttcagtcgatacggctatatctgagatacgtccaccggtaggctgcaaagtggtgtgcgcgaagttcagtcttatccggtcgctccgtctcctgaacctgccggcgcttgaaagtgttctggagagcggaagtctgcttgatccggactacataaaaagacgtgagcaggccgcattcctgtccacatttaccagccggattgtcgagccggttctgcctggcgaagaagatttcagctatataccaactcaggtcatcgctgaatacctggcagatcctctccgctttaatcttgacggtatcctgtatccgtccgtgcagttgccgggggcggatcaggaggaacggtacaacgttgtgttgttccataaagcctcccgtgtcgcctttatgacgctaccggcaaaggatgactgcatgatcagatatggccatcagtatgccgaagacgaatgggagactgatatctgtgtgacagaggttatctctgctcaggaagaccctcctccagccaggcatgatctgtctgacctttcacttcccgacgacccacgggagcctgctctggagatagatctcgattctgtcagcgttcacggtatacgggcagcccggtttgaatactccactgatgccgtcaggcggagcacataccactatactccgcggacttcagaaccagccggtactataactcagttatgggacaccgcctctggtcatgacgattttccgttctga

SEQ ID NO: 475033 - DNA, 255 bp, Shigella flexneri; identical to SEQ ID NO: 12981

SEQ ID NO: 475034 - DNA, 591 bp, Shigella flexneri; identical to SEQ ID NO: 467964

SEQ ID NO: 475035 - DNA, 474 bp, Shigella flexneri
atgaaagatacaattactccactaaattacactaaggaagccataaaagacctgtctgtcatggaaaaaggattaaggtcaaatgcacctcttacatcatatattatgcgtcaggtcattgatatgctggacagtagtgttaagttcatcttaccgaactgctgcgatattattgaaccagaagaataccgccagacacatttcgatttggcacgattaccatatccagttgtaacatttgaaataccatggttcaaagacaatgtagaaacccaaataggtgattttaatatatcaccatcatccagaagaattgccctgtgctgggaggccagacagagttttgaacccatcccgggatgtaattcaatccttaacacttatattgatggcggagtgtttatccttcctgtttcatggtctgatgatttaaaaatatggattcttggtgtcggtggtaaccggctcatttaa

SEQ ID NO: 475036 - DNA, 282 bp, Shigella flexneri
atgacagaagccgaaataacgggattaatccgccgcgttgccggaatcagccagcaggctgacgaacaggccacgcagccggacagcgtgacagccgaaaactatgcgcgtgttgttgctgaggtgatgcgccgtgatggtatagaacttaatggcgtggatatgcgcaacatacgaaccagagttcttgagttgctggcctaccgtcgccgcgtggagatgtatcgggagaaggagaaaatcacgtaccactggaagaagccggagcggttacggcggtaa

SEQ ID NO: 475037 - DNA, 405 bp, Shigella flexneri
atggatcaggtcgttgtttttcaaaagatgtttgagcaagtgagaaaagagcaaaacttctcctggttttattcagaattaaaacatcaccgtattgcacattacatttattatctggctacggataacatcagaattattactcacgatgacacggttttgttattaagaggaaccaggaaccagttaaaagttagtacgaccaagaatcctgctaaaataaaagaggccgcattgcttcatatttgcggaaaatctacatttcgggaatactgttcaacactagcaggcgcgggcgttttccgttgggttactgatgttaatcataacaaacgcagttactacgccattgataatacgcttttatatattgaagatgtagaaaataataaaccattaatctag

SEQ ID NO: 475038 - DNA, 732 bp, Shigella flexneri
gtggcttattacagcattggtgatgttgctgaacgttgcgggattaatcctgtcactctccgggcctggcaacgccactacggtttgttaaaaccacagcgcagtgaaggcggacaccgactctttgatgaagaagacatacaacgcatcgaagagatcaagcgttggatcagtaatggcgtccctgtaggcaaagttaaagcattactggaaaccaccagccaggatacggaagatgactggagccgcctgcaagaagagatgatgtcaattcttcgtatggctaatcctgccaaactacgcgcgagaattatttcactgggtcgagagtacccagtagatcaattgattaatcatgtttaccttcctgttcgccagcgtctcgtgcttgatcacaacacctcccgcattatgagcagtatgtttgacggcgcattaattgaatacgcagcaacctcgcttttcgaaacgcgccgtaagcccggtaaagaagccattctgatggcgtggaatgttgaagagagagcacgattgtggctggaagcatggcgtttatcattgtcaggatggcacatttctgttcttgctgatcccattgaatcgccgcgcccggaactgttcccgacgcaaacattgattgtctggacaggcatggcaccaacgagaaggcaaaacgaacttttacaacattggggtgagcaaggttataaagtcatctttcatgccccctaa

SEQ ID NO: 475039 - DNA, 576 bp, Shigella flexneri
atggcgaacagcatcacggcggatgagattcgggaacagttttcgcaggcaatgtcagccatgtaccagcaagaagttccgcaatatggcacgctgctggaactggtagctgatgtgaatctggctgtgctggaaaacaatcctcaactgcacgaaaaaatggtaaatgcagacgagctggcgcgactgaatgttgaacgtcatggggcgattcgcgttgggactgcacaagagcttgctactcttcggcggatgtttgccattatggggatgtacccggtgagctattacgatctctcgcaggcaggggtgccggtacattcgacagcatttcggcccattgatgatgcttctctggcgcgtaatcccttccgcgtttttacatccttactccgccttgagcttatcgagaacgaaattttgcgccagaaagcggcggagattctgcgtcagcgcgatatcttcaccccacgttgtcgacaactgttagaggaatatgagcagcagggcggttttaacgaaacacaggcacaggagtttgtgcaggaagccctggaaacgtttcgctggcactag

SEQ ID NO: 475040 - DNA, 228 bp, Shigella flexneri
atgatactttggtctgtgaaaaaagaaaccgatatccggcgtggaaggcattgtgttttcctgatgcatgttcacctggtctttgtcaccagataccgacgccagatttttgaccatgacgcgacagaaaaactacgcacttacttttcaaatgtatgtgcttattttgaagctgaactggttgaaatggatggcgaaccagatcacgtccatttgttaattaattaa

SEQ ID NO: 475041 - DNA, 717 bp, Shigella flexneri
atgagcgagccgttaattgtcggcatccggcatcatagtccggcctgcgcccggctggtgaaatcgttaatcgaaagccagcggccacgatacgtgttgattgaaggcccggctgattttaatgaccgggtagacgaactgtttttagcccaccagcttccggtagctatttacagttattgccagtatcaggacggtgcagcccccgggcgtggtgcctggacgccatttgctgaattttcgccggagtggcaggcgctacaagccgatcgtcgtattcaggcacaaacttacttcatcgatttgccttgctgggcgcagagtgaagaagaggacgattcgcctgatacgcaagaggaaagccagaccttgctgctgcgtgccacccgcatggataacagcgacaccctgtgggatcacttgttcgaagatgaaagccagcaaactgcattaccctctgcactggcgcactattttgcccaactgcggggcgactcccccggcgatgctctcaatcgtcagcgcgaagcctttatggcccgctggattggatgggcgatgcagcaaaataatggcgacgtgttagttgtctgcggtggctggcacgctccggcactggcaaaaatgtggcgcgaatgtccgcaggtaattaacacgccagaattgccgtcgctggcagatgccgttacaggttgttatctcacccccctacagtga

SEQ ID NO: 475042 - DNA, 1527 bp, Shigella flexneri
atgcctgccccggtctggcaaaactggtgctggcagtggggcttacagcaggcgggagaacaactgctaaaaacggttctcacccgtttgcgccagcacaagttgcctgcttcgaccgcggatatggctgccgctcatctgcatgcgatggcactggcacagttgcgcggtcatacactaccgttacgcactgactggctggatgccatagcaggatcgctgattaaagaagccctgaatgcgccgttgccgtggagctatcgcggcgttattcatcccgataccgatccgattctgctaacgttgatagacacattagcgggtgacggattcggtaaacttgccccttctacgccacaaccgcctctgccaaaagatgtcacttgcgaactggaacgtaccgcaatctctcttccggcggagcttaccttaaatcgctttaaccccaatggactagcgcaaagtcaggtgttacatcggctggcaatactggagatcccagggattgtacgccagcagggaagcacactgacacttgcaggcaacggtgaagaacgctggaaattaacccgcccgcttagccagcatgcggcattgattgaggccgcctgctttggtgccacactccaggaagccgcacgccataaattagaagccgatatgctggacgcgggtggaatcggcagcattaccacatgtcttagccaggcggcgtcagcgggtctggcgtccttcagtcaacaattactggagcaactcacattattaatcgcccaggaaaatcaatttgccgaaatgggccaggcgctggaagtgctatatgccttatggcggctggatgaaattagcggtatgcaaggcgcgcagatattacaaacgacgttatgcgcggctatcgatcgcacgctgtggctgtgtgaatccaacggcagaccggatgaaaaggagtttcacgctcacttgcatagctggcaagcgttgtgtcatatcctgcgcgatctacatagcggtgtgcaactccccggcgtttcgctttctgcggcggtagccttgctggagcgacacagtcaggcgattcatgtcctggcactggatcgcggcgcgactcttggtgcgctgatgcgtctggaacatcccaacgctagtgccgaagcggcgctgacgatgctggcgcagttatccccggcacaatccggcgaggcgctgcacggtttgctggcattagcccgtcatcaactggcctgtcagccggcatttatcgccggtttcagcagtcatttaaatcaactaagtgatgccgattttaccaatgccctgcccgatttacgcgcggcaatggcctggctaccgccacgagaacgcgggacgctggcgcatcaggtgcttgagcattatcaactggcgcaacttcccgtttcggcactgcaaatgccgttgcattgtccaccgcaagccattgcacatcatcaacaactcgaacagcaggcactggcatcgctgcaacactggggagttttccatgtctga

SEQ ID NO: 475043 - DNA, 2004 bp, Shigella flexneri
atgaattcactacgtccggaattattagaactgacaccgcaggcactgacggcgttaagcaatgccggttttgttaagcgcagccttaaggaactggaaaatggcaacgtcccggaaatcagccatgagaacagcgctttaatcgccaccttcagtgacggtgtccgtacccagctggcgaacggccaggcactgaaagaggctcagtgcacctgtggggccagcggcatgtgccgtcatcgcgtgatgctggtgttaagttatcaacgactttgtgctaccgcccagcctacgggaaaagaagaggaatgggatccggcaatctggctggaagaactggctacccttcccgatgccacccgcaaacgcgcacaggagctggtcgctaaaagcatcaccattgagttgttctgtgcgccgggtgaaattccctctgcccgcttaccgatgagcgatgtgcgtttttattcccgcagcagtattcgtttcgcccgttgtgattgtattgaaggcacactttgcgaacatgtcgtactggcagtacaggcctttgtccaggcaaaagcgcagcaagcggaattgactcatttaatctggcagatgcgcagcgaacacgtcacatcatctgacgatccgtttgccagcgaagaaggcaaaacgtgtcgtcaatatgttcaacaactaagccaggcattatggctgagcggcatcagccagccgcttattcactacgaggccgctttcagccgcgcgcagcaagcagcggaacgctgcagctggcgatgggtgagtgaatcgctacggcaactgcgcgccagcgttgatgccttccacgcccgcgccagccactatcatgccggagaatgcttacgtcagcttgcggcattaaacagtcgattaaattgcgcacaagagatggcccggagcgacagtgttggtgaagttcctcctgtgccgtggcgcacggtcgttggctctggcattgccggagaagcaaagcttgatcatctgcggctggtgtctttaggtatgcgttgctggcaggatattgagcattatggtttacgcatctggtttaccgatcccgacaccggcagtattttgcacctttcgcgcagttggccgcgaagtgaacaggaagactcaccggcagctacgcgtcggctgtttagttttcaggctggcgcactggcgggtgggcaaattgtttcacaagcagcaaaacgcagtgccgatggcgagctgctgttagctacccgcaaccgcttaagcagcgttgtaccgctgtcgcctgatgcctggcaaatgttgaacgcgccgttacgccagccgggcattgtggctttgcgggaatatttacgccagcgtccccccgcctgcatacggcctcttaatcaggtcgataacttatttattctgccggtcgctgagtgtatttcgctcggttgggatagcagccgccagacgctggatgcgcaggtaatcagcggcgaaggtgaagataatctgctgacgttatcactgccagcctcagccagcgcgccttatgccattgaacgcatggcggcgcttttgcaacaaacagacgaccccgtgtgtctggtttctggctttgtcagttttgttgatgggcaattgacactggaaccacaggtaatgatgacaaagactcgtgcctgggcgctggacgcagaaactgcgcctgtggtggtatcactaccttctgccagcgttctgcctgtgccgtctactgctcatcagttgctgatgcgctgccaggcgttacttattcaactgctccataacggctggcgctatcaggaacagagcgctattagtcaggcagagttgctggcgaatgacctcaccgcggtgggtttttatcggctggcacatgtgttggcacaatttcgtaatacagaaagcgaggcacgggtagaagcaatgaataacggtgttttgctttgcgaacaattattccccatgcttcagcaacaaggatga

SEQ ID NO: 475044 - DNA, 834 bp, Shigella flexneri
atggaaaaccgccgccatcgcctgaactgggagatgagccgggacaggtgtttgcgacttggcaatccggtgccggagtataaaccaaagcttgcaagcaaaggaacgaagacgaggcatctggcaatacttcgcgccattctcaatatggctgttgaatggggatggcttgacagggcacccaaaatatcaacaccacgcgttaagaatggacgcatcagatggcttacagaggaggaatcgaagcgcctgtttgcagaaattgctcctcacttcttccctgtggtcatgtttgcaatcacgacaggccttcgccgttccaacgttacagaccttgagtggtcacaggtcgatctggataagaaaatggcatggatgcaccctgatgaaacaaaagctggcaatgcgatcggagttcctcttaacgaaaccgcatgccagatattaagaaaacagcaggggctccataagagatgggtatttgtccacaccaaacctgcctaccgaagcgacggaacaaaaacagcagcggtaaggaagatgagaaccgacagcaacaaggcatggaagggagcgttaaagcgggcaggcattagcaacttccgcttccatgatctgaggcatacctgggcaagctggctggttcagtccggtgtctctcttcttgcacttaaagagatgggaggatgggaaactctcgaaatggttcaaagatacgcccacctttcagccgggcatctcaccgagcacgcaagcaaaatcgatgcgattataagtcgcaatggcacaaatacggcacaagaggagaacgtggtttacttaaatgcgaggtaa

SEQ ID NO: 475045 - DNA, 1056 bp, Shigella flexneri
atgaaaaagagcactctggcattagtggtaatgggcattgtggcatctgcatctgtacaggctgcagaaatatataataaagacggtaataaactggatgtctatggcaaagttaaagccatgcattatatgagtgataacgccagtaaagatggcgaccagagttatatccgttttggttttaaaggtgaaactcaaattaacgatcaactgactggttatggtcggtgggaagcggagtttgccggaaataaagcggagagtgatactgcacagcaaaaaacgcgtctcgcttttgccgggttgaaatataaagatttgggttctttcgattatggtcgtaacctgggcgcgttgtatgacgtggaagcctggaccgatatgttcccggaatttggtggcgattcctcggcgcagaccgacaactttatgaccaaacgcgccagcggtctggcgacgtatcggaacaccgacttcttcggcgttatcgatggcctgaacttaaccctgcaatatcaagggaaaaacgaaaaccgcgacgttaaaaagcaaaacggcgatggcttcggcacgtcattgacatatgactttggcggcagcgatttcgccattagtggggcctataccaactcagatcgcaccaacgagcagaacctgcaaagccgtggcacaggcaagcgtgcagaagcatgggcaacaggtctgaaatacgatgccaataatatttatctggcaactttctattctgaaacacgcaaaatgacgccaataactggcggctttgccaataagacacagaactttgaagcggtcgctcaataccagtttgactttggtctgcgtccatcgctgggttatgtcttatcgaaagggaaagatattgagggcatcggtgatgaagatctggtcaattatatcgacgtcggtgctacgtattatttcaacaaaaatatgtcagcgtttgttgattataaaatcaacaaactggatagcgataataagctgaatattaataatgatgatactgtcgcggttgggatgacgtatcagttttaa

SEQ ID NO: 475046 - DNA, 210 bp, Shigella flexneri
ttgcattcgctggcgcatggggctgggcgtaaatgggggcgcaccgagtgtaaagggcgtctggcagcgaaatacacagcgacgcaactctcgcgtactgaacttggcagtcgggtaatttgtcgcgataaacaactcatcttcgaagaagcgccacaagcctataaatcggctgaaagtgtggtgcaatgtctgggcaggccggattaa

SEQ ID NO: 475047 - DNA, 834 bp, Shigella flexneri
atgtctggaaatataggggcaaatccactcgacgaagatgtaaaaaaaatagccgcgataaataaatatatccatgcaaaatttgaggagcataaaaataaaatagacaacttaaagggtgtggaacaaaaattgatggtcttacagtactttaatgtactgaatgaacttagtaatcaggctatctcttctttgaatataggagccttttcagcatcggaagtattagctagggttataatagaacaggctgccaatcaattttatatagcaatagatgatggcgaaaatgcacaagcattactcaaggctagtaagaaattagttcatagtaatggaaaacggtggctggagtgtttaaaatccaaaggaatgactaatccagcagcaaatgaaaggattcgcatgggaaaagaactaactgatctatttaatagattgtggccaaatacacctgaatatccaggaaccagaaaactttttgaattaattggctgggaaacacactatcatgcccattacgttcccctttgtgattcaatacatacattctctgatgatatggtaaatatagtatctctatataatgcaatccaaagtgatgaaactactgctatcgaattcattcttgcagttaaacaagaaaataaacggctggcaatttataattttgtaattgctacggcccttcggtgtgaggccttagtaaatgtatttaactctttaggttatcaggatattataacagaaatgacaccaacaatagatacagtcaaccagactataattcgatatgatgattttgatcattccagaattgatgattgtcaataa

SEQ ID NO: 475048 - DNA, 426 bp, Shigella flexneri
atgaaaacgtcaccgtggaataaagaccgtaccatcggtcaaaaaaggccacttcagatatctcatatctgggggatccggattagacttgagttggaaggtaaaacacgcgatctagctctgttcaacatggctttggacagtaagctacggggctgtgatttggtcaaactcaaagtatcagatgctgcatatggcagttctgtctcaagcagagcaacggtgttgcaacagaaaaccggcagccctgtccaatttgagatgcctttaataacacatcttttaaatgttgaagaattatcccgcctgctgaagaacgttgctctgagtgtgataaacctttttattcttgatgatgtcagcgagaagatggaatatatccccgactgggtcgtggttacccggttaaacatctggtggcgctaa

SEQ ID NO: 475049 - DNA, 642 bp, Shigella flexneri
ttgaatatctcctctgctttacgccaggttgttcacggcactcgctggcactctaaacgcaagagctacaaagtgttgttctggcgcgagataaccccgcttgctgttcctatcttcatggagaacgcctgtgtcctgttgatgggggtcctgagcacttttctggtcagctggctgggaaaagatgcgatggccggcgtggggttggcggacagcttcaatatggtcattatggctttttttgcagctatcgatcttggtactactgtcgttgtagcatttagtctcggtaagcgggatcgacgacgagcgagggtggcgacgcggcagtcattggtgatcatgacgttgtttgccgtactgttggcaacgctaattcatcattttggcgaacaaattattgatttcgtcgcgggtgatgccacgacagaagttaaagcactggcgttgacttatctggagctgaccgtactcagttatccagccgctgccatcactcttattggtagcggggcacttcgtggtgcagggaatacgaaaataccgctactgattaacggtagcctgaatattcttaatattattattagcggcatattgatttacggccttttctcctggtcggggctgggttgggtttaa

SEQ ID NO: 475050 - DNA, 294 bp, Shigella flexneri
atgcctatttggtccgcctcatgggtgctacccgctggatttaagggtgctcgtgatgcccgttacgccatgtgggtttctatgttgagcatgtggggttgccgggttgtagtcggttatgtgcagggaatcatgcttggctggggtgtggttggtgtctggatgggaatgtttgcctactgggctgtgcgggccgtgctgttttactggcgaatggttactggacgttggctgtggaaataccctcgatccgagccgcaaaagtgtgaaaaaaagccagttgtgtcggaataa

SEQ ID NO: 475051 - DNA, 2706 bp, Shigella flexneri
atgctgattccgtcaaaactaagtcgtccggttcgactcgaccataccgtggttcgtgagcgcctgctggctaaactttccggcgcgaacaacttccggctggcgctgatcacgagtcctgcgggctacggaaagaccaccctcatttcccagtgggcggcaggcaaaaacgatatcggctggtactcgctggatgaaggtgataaccagcaagagcgtttcgccagctatctcattgccgccgtgcagcaggcaaccaacggtcactgtgcgatatgtgagacgatggcgcaaaaacggcaatatgccagcctgacgtcactcttcgcccagcttttcattgagctggcggaatggcatagcccactttatctggtcatcgatgactatcatctgatcactaatccagtgatccacgagtcaatgcgcttctttattcgccatcaaccagaaaatctcaccctggtggtgttgtcacgcaaccttccgcaactgggcattgccaatctgcgtgttcgtgaccaactgctggaaattggtagtcagcaactggcatttacccatcaggaagcgaagcagttttttgattgccgtctgtcatcgccgattgaagccgcagaaagcagtcggatttgcgatgacgtttccggttgggcgacggcactacagctaatcgccctctccgcccggcagaatacccactcagcccataagtcggcacgccgcctggcgggaatcaatgccagccatctttcggattatctggtcgatgaggttttggataacgtcgatctcgcaacgcgccattttctgttgaaaagcgccattttgcgctcaatgaacgatgccctcatcacccgtgtgaccggcgaagaaaacgggcaaatgcgtctcgaagagattgagcgtcaggggctgtttttacagcggatggatgataccggcgagtggttctgctatcacccgctgtttggcaacttcctgcgccagcgctgccagtgggaactggcggcggagctgccggaaatccaccgtgccgccgcagaaagctggatggcccagggatttcccagcgaagcgattcatcatgcgctggcggcaggcgatgcgctgatgctgcgcgatattctgcttaatcacgcctggaatttgttcaaccatagcgaactgtcgctgctggaagagtcgcttaaggccctgccgtgggacagtttgctggaaaatccgcagttagtgttattgcaggcgtggctaatgcaaagccaacatcgctatggcgaagttaacaccctgctagcccgtgctgaacatgaaatcaaggacatcagagaaggcaccatgcacgcagaatttaacgctctgcgcgcccaggtggcgattaacgatggtaatccggatgaagcggaacggctggcaaaactggcactggaagagctgccgccgggctggttctatagccgcattgtggcaacctcggtgctgggtgaagtgctgcactgcaaaggcgaattgacccgctcactggcgctagtgcagcaaaccgaacagatagcacgccagcacgacgtctggcactacgccttatggagtttaattcagcaaagtgaaattctgtttgcccaagggttcctgcaaaccgcgtgggaaacgcaggaaaaagcgttccagctgatcaacgagcagcatctggaacagctgccaatgcatgagtttctggtgcgcatccgagcacaactgttatgggcctgggcacggctggatgaagccgaagcgtcggcgcgtagcgggattgaagtcttgtcgtcttatcagccacagcaacagcttcagtgcctggcaatgttgattcaatgctcgctggcccgtggtgatttagataacgcccgtagccagttgaaccgtctggaaaacctgctggggaatggcaaatatcacagcgactggatctctaacgccaacaaaatccgggtgatttactggcaaatgaccggcgataaagccgccgctgccaactggttgcgtcatacggctaaaccggagtttgcgaacaaccacttcctgcaaggtcaatggcgcaacattgcccgcgcacaaatcttgctgggcgagtttgaacctgcggaaattgttctcgaagaactcaatgaaaatgcccgcagtctgcggttgatgagcgatctcaaccgtaacctgttgctgcttaatcaactgtactggcaggccggacgtaaaagtgacgcccagcgcgtgttgctggacgcattaaaactggcgaatcgcaccggatttatcagtcattttgtcatcgaaggcgaagcgatggcgcaacaactgcgccagctgattcaacttaatacgctgccggaactggaacagcatcgcgcgcagcgtattctgcgagaaatcaatcaacatcatcggcataaattcgcccatttcgatgagaatttcgttgaacgtctgctaaatcatccggaagtgccagaactaatccgcaccagcccgttgacccaacgtgaatggcaggtcctggggctgatctactccggttacagcaatgaacaaattgcgggcgaactggaagtggcggcaaccaccatcaagacgcatatccgcaatctgtaccaaaaactcggcgtcgcccaccgtcaggctgccgtgcagcacgcgcagaaactgctgaagatgatgggttatggggtgtga

SEQ ID NO: 475052 - DNA, 717 bp, Shigella flexneri
gtgctgcaaacggtgctgcccgcgctgtggtttgccgatggaccttcgcgtgttgaagtgagcggcggcaccgataacccgtcggcgccgcctgcggattttatccgccgggtgctggagccgctgctggcgaaaataggaattcatcagcaaaccacgctgttacgtcacggtttttatcctgccggaggcggtgtggtggcaacggaagtctcgcccgtggcatcgtttagcaccttgcaacttggcgagcgcgggaacattgtgcagatgcgtggagaagttctattagctggtgtgccgcgccatgttgctgagcgtgaaatcgctacactggcggggattttttccctgcatgaacagaatattcataacctgccgcgcgaccaggggccgggtaataccgtctcgctggaagtcgaaagtgaaaatatcactgaacgctttttcgtcgtcggtgaaaagcgcgtcagtgccgaggtggtagccgcgcagttagtgaaagaggtgaaacgctacctggcaagcccagcggcggtgggggaatatctcgccgaccaactggtactgccgatggcgctggcgggcgcgggagaatttacggtcgcccatccttcatgccatctgctgaccaatatcgcggtggtggagcgtttcttgccggtgcggtttggtttgatagaaacagatggcgtaacgcgggtgagtattgaatga

SEQ ID NO: 475053 - DNA, 1539 bp, Shigella flexneri
atgaccaataatcccccttcagcacagattaagcccggcgagtatggtttccccatcaagttaaaagcccgctacgacaactttattggcggtgaatgggtagcccctgccgatggtgagtattaccagaacctgacgccggtgaccgggcagctgctgtgcgaagtggcgtcttcgggcaaacgagacatcgatctggcgctggatgctgcgcacaaagtgaaagataaatgggcgcacacctcggtgcaggatcgcgcggcgattctgtttaagattgccgatcgaatggaacaaaacctcgagctgttagcgacagctgaaacctgggataacggcaaacccattcgcgaaaccagtgctgcggatgtaccgctggcgattgaccatttccgctatttcgcctcgtgtattcgggcgcaggaaggtgggatcagtgaagttgatagcgaaaccgtggcctatcatttccatgaaccgttaggcgtggtggggcagattatcccgtggaacttcccgctgctgatggcgagctggaaaatggctcccgcgctggcggcgggcaactgtgtggtgctgaaacccgcacgtcttaccccgctttctgtactgctgctaatggaaattgtcggtgatttactgccgccgggcgtggtgaacgtggtcaatggcgcaggtggggaaattggcgaatatctggcgacctcgaaacgcatcgccaaagtggcgtttaccggctcaacggaagtgggccaacaaattatgcaatacgcaacgcaaaacattattccggtgacgctggagttgggcggtaagtcgccaaatatcttctttgctgatgtgatggatgaagaagatgcctttttcgataaagcgctggaaggctttgcactgtttgcctttaaccagggcgaagtttgcacctgtccgagtcgtgccttagtgcaggagtcaatctacgaacgctttatggaacgcgccatccgccgtgtcgaaagcattcgcagcggtaacccgctcgacagcgtgacgcaaatgggcgcgcaggtttctcacgggcaactggaaaccatcctcaactacattgatatcggtaaaaaagagggcgctgacgtgctcacaggcgggcggcgcaagctgctggaaggtgaactgaaagacggctactacctcgaaccgacgattctgtttggtcagaacaatatgcgggtgttccaggaggagatttttggcccggtgctggcggtgaccaccttcaaaacgatggaagaagcgctggagctggcgaacgatacgcaatatggcctgggcgcgggcgtctggagccgcaacggtaatctggcctataagatggggcgcggcatacaggctgggcgcgtgtggaccaactgttatcacgcttacccggcacatgctgcgtttggtggttacaaacaatcaggtatcggtcgcgaaacccacaagatgatgctggagcattaccagcaaaccaagtgcctgctggtgagctactcggataaaccgttggggctgttctga

SEQ ID NO: 475054 - DNA, 213 bp, Shigella flexneri; identical to SEQ ID NO: 11266

SEQ ID NO: 475055 - DNA, 324 bp, Shigella flexneri
atgttcctggactattttgcactgggagtgcttatttttgtatttctggtgatattctatgggattattattttacatgatattccctacctgatttctaaaaaacgtaatcatcctcatgccgacgccattcatgttgctggttgggtgagtctttttacgctgcatgttatctggccatttttgtggatttgggccacgctttaccgcccggagcggggatggggaatgcaaatccatgactcctccgttgtgcaactacaacagcgtattgccgggctggagaaacagctcgccgacatcaaatcctcttctgccgagtaa

SEQ ID NO: 475056 - DNA, 1137 bp, Shigella flexneri
atggatttactgattattttgacctatgtggcttttgcatgggcaatgtttaagatcttcaaaattcctgtaaataaatggaccatttccacagcggccctgggtggcatatttattgtcagtggtttaattctgttaatgaactataaccatccgtataccttcaaggcgcaaaaagcggttatttctattcctgttgtcccacaggtgacaggcgtggtgatcgaagtgacggataagaaaaatacgctgattaaaaaaggtgaggtgctatttcgactggacccgacgcgttatcaggtgcgggtggatcggctgatggcggatatcgttaccgcagaacataaacagcgggcgttgggcgcagagttagatgagatggcggcgaatactcagcaggcaaaggccacgcgggataaattcgctaaagagtatcagcgttacgcacgcggcagccaggcgaaagtaaacccgttttcagaacgcgatattgatgtggcgcggcaaaattatctggcgcaggaagcctccgtaaagtcatcggcggcggaacaaaaacagatccagagccagctggatagcctggtgttgggtgaacattctcaaatcgccagcctgaaagcgcagctcgcggaagcaaaatataaccttgagcagacgatagtgcgtgcgccgagcgatggttatgtgacccaggtgctgattcgtccgggtacctatgccgcgtcgctgccgctacgtccggtgatggtgtttatacccgatcagaaacgacaaattgtggcgcagttccgtcagaactccttgctgcgactggcccctggcgacgatgcggaagtggtgtttaatgctctgccaggtaaggtattcagcggcaagctggcagccattagtccagctgttcccggcggagcttatcagtcgaccggcaccttacagacgttaaacacagcgccgggttcagatggcgttatcgcgaccattgaactggatgagcacactgatttgagcgctttaccagacggtatttacgcccaggtggcggtctactctgatcatttcagccatgtctcggtgatgcgcaaagtgctattacgcatgaccagctgggtgcattacctttatctcgatcattaa

SEQ ID NO: 475057 - DNA, 1398 bp, Shigella flexneri
atgaaaatggtctcacgtattaccgcgatcggcctggctggcgtcgcgatttgctatttagggttatctggttatgtgtggtaccacgataataaacgcagtaaacaggccgatgttcaggcatctgctgtcagtgaaaataataaggttttaggctttctccgcgaaaaaggatgcgactattgccacacgccttcggcagaattacccgcctattattatattcctggcgcgaaacagttgatggattacgacattaagcttggatataaatcttttaacctcgaggccgtgcgtgcggcactgctggctgataaacccgtttcgcaaagcgatctgaataagattgaatgggtgatgcagtatgaaactatgccaccaacgcgttataccgcgctacactgggcgggtaaggtgagtgatgaagagcgggcggaaatactggcctggattgcaaaacagcgcgcggaatattacgccagcaatgatactgctccggagcatcgcaatgaaccggtgcagcccatcccgcaaaaactgcctaccgatgcgcaaaaagtggcgttgggctttgcgctgtatcacgatccccgtttatcggctgatagcaccatttcatgcgctcattgccatacgttgaatgcggggggcgtcgatggcagaaaaacatcgattggtgttggtggcgcagttgggccgattaatgcgccgacggtatttaactcagtatttaacgttgagcagttctgggatggtcgtgcggcaacattgcaggatcaggcaggtggaccgccgttgaacccgattgaaatggcgtcgaaatcctgggacgaaattattgctaagctggaaaaagatccgcagcttaaagcgcagttcctcgaagtttatccgcaaggtttcagtggcgaaaatattactgatgccattgctgaatttgagaaaacattaattacgccggattccccatttgataaatggttgcgtggagatgaaaatgcgctgacggcgcaacagaaaaaaggctatcaattatttaaagataataaatgtgcaacttgtcatggtggtattattctcggcggacgttcctttgaaccgttggtgctgaaaaaagactttaactttggggaaattacggcggcggatattggtcgtatgaatgtgactaaagaagagcgtgataaattgcgtcagaaagtacccggtttacgtaacgttgctttaacggcaccgtacttccatcgcggtgacgtgccgacgctggacggggcggtgaaactgatgctgcgctatcaggtaggcaaagagctgccgcaggaggatgtggatgatatcgtagctttcctgcacagtctgaacggggtgtacacgccgtatatgcaggataaacaataa

SEQ ID NO: 475058 - DNA, 1401 bp, Shigella flexneri
atggaccagaagctgttaacggatttccgctcagaactactcgattcacgttttggcgcaaaggccatttctactatcgcggagtcaaaacgatttccgctgcacgaaatgcgcgatgatgtcgcattccagattatcaatgatgaattatatcttgatggcaacgctcgtcagaacctagccactttctgccagacctgggacgacgaaaacgtccataaattgatggatttgtcgatcaataaaaactggatcgacaaagaagaatatccgcaatccgcagccatcgacctgcgttgcgtaaatatggttgccgatctgtggcatgcgcctgcgccgaaaaatggtcaggccgttggcaccaacaccattggttcttccgaggcctgtatgctcggcgggatggcgatgaaatggcgttggcgcaagcgtatggaagctgcaggcaaaccaacggataaaccaaacctggtgtgcggtccggtacaaatctgctggcataaattcgcccgctactgggatgtggagctgcgtgagatccctatgcgccccggtcagttgtttatggacccgaaacgcatgattgaagcctgtgacgaaaacaccatcggcgtggtgccgactttcggcgtgacctacaccggtaactatgagttcccacaaccgctgcacgatgcgctggataaattccaggccgacaccggtatcgacatcgacatgcacatcgacgctgccagcggtggcttcctggcaccgttcgtcgccccggatatcgtctgggacttccgcctgccgcgtgtgaaatcgatcagtgcttcaggccataaattcggtctggctccgctgggctgcggctgggttatctggcgtgacgaagaagcgctgccgcaggaactggtgttcaacgttgactacctgggtggtcaaattggtacttttgccatcaacttctcccgcccggcgggtcaggtaattgcacagtactatgaattcctgcgcctcggtcgtgaaggctataccaaagtacagaacgcctcttaccaggttgccgcttatctggcggatgaaatcgccaaacaggggccgtatgagttcatctgtacgggtcgcccggacgaaggcatcccggcggtttgcttcaaactgaaagatggtgaagatccgggatacaccctgtacgacctctctgaacgtctgcgtctgcgcggctggcaggttccggccttcactctcggcggtgaagccaccgacatcgtggtgatgcgcattatgtgtcgtcgcggcttcgaaatggactttgctgaactgttgctggaagactacaaagcctccctgaaatatctcagcgatcacccgaaactgcagggtattgcccagcagaacagctttaaacacacctga

SEQ ID NO: 475059 - DNA, 483 bp, Shigella flexneri; identical to SEQ ID NO: 473783

SEQ ID NO: 475060 - DNA, 933 bp, Shigella flexneri
atgattgaatggattattcgtcgctcggtggcgaaccgttttttggtgctgatgggcgcgttgtttctgagcatctggggcacctggaccatcattaatacgccagtggatgcgttgccggatctctccgatgtgcaggtgattattaaaaccagctatcccggccaggcaccgcaaatcgttgaaaatcaggtgacttatccgctaaccaccaccatgttgtcggtgcctggcgcgaagactgtgcgtggtttctcgcagtttggcgactcttatgtgtatgtcattttcgaagatggcaccgatccgtactgggcgcgttcgcgggtgctggagtacctcaaccaggtacagggtaagctgcctgcgggagtcagcgccgagctgggaccagatgccacgggtgttggctggatctatgaatatgcactggtggatcgcagcggtaagcacgatcttgccgatttacgctcattgcaggactggtttctcaaatatgagctgaaaaccattcctgacgttgcggaagtggcgtcggtaggcggtgtggtgaaagagtatcaggtggttatcgatcctcagcgcctggcgcagtatggcatcagtctcgccgaagtaaaaagcgcgctggatgcttcaaaccaggaagcgggcggttcgtcaatcgaactggcggaagcagaatatatggtgcgcgccagcggctatctacaaacgctcgacgactttaatcacatcgttttaaaagccagtgaaaatggcgtgcccgtttatctgcgcgatgttgcgaaggaccagattggcccggagatgcgccggggcattaaacggcgaaggcgaagtggcgggcggggtggtgatcctgcgatccggcaaaaacgcccgagaagtgatcgccgccgtgaaggacaaactggaaacgctgaaaagtag

SEQ ID NO: 475061 - DNA, 429 bp, Shigella flexneri
atggacccggtgtgggtcactgctgcgatcccggagtccatcgcctggctggtgaaagatgcctcgcagtttaccctcaccgttccggcgcgaccggataaaacactcaccatccgcaaatggacgctgctacctggcgtggatgccgcgacccgcacgctgcagctgcgtctggaagtcgacaacgccgacgaggcgctgattgataccggcaacgaacagcgggtgattaccgttgatgccgacgggcgctttgtaccgaaacgcgttgctgttttccaggcatcgcaaggcgtcaccgcattacgctctggtctggcggaaggtgaaaaggtggtttccggcggcctgttcctgattgattccgaagccaatatttctggcgcactggagcggatgcgctctgaaagtgctacccatgcgcattga

SEQ ID NO: 475062 - DNA, 2373 bp, Shigella flexneri
atgaagcgagttcttattcctggcgtcattttatgtggcgctgatgtggcgcaggccgtcgatgacaaaaacatgtacatgcatttttttgaagagatgacggtctatgctcctgtccctgtacccgtaaacggcaacacgcattacaccagtgaaagcatcgagcgtttaccgaccgggaatggcaatatcagcgatctgctgagaaccaaccctgcggtacgcatggattcaacgcaaagtacctcgttgaaccagggagatattcgccctgagaaaatctctattcacggtgcgtcgccctaccagaatgcctatttgattgacggtattagtgcaactaataacctgaacccagcgaatgagtccgatgccagtagtgcaaccaatattagcgggatgtcacaggggtattatcttgatgtcagcttactggacaatgtgacgctttatgacagttttgtgccggttgaatttggtcgcttcaatggcggggtaattgatgcaaagatcaaacgcttcaacgctgatgatagcaaggtgaaattgggttatcgcactacgcgtttggactggttaacatcgcatatcgatgagaataacaagagcgcatttaatcaaggttcttcaggaagtacctatttctctccagattttaaaaagaacttttataccttgtcgtttaatcaggagctggctgataactttggcgttaccgccggtttatcgcgccgccagtctgatatcacccgcgcggattatgtttcgaatgacggcattgtcgccggtcgggcacagtataaaaacgttatcgatactgcattgagcaaatttacctggtttgccagcgaccgctttacccacgatttaaccttaaaatataccggctccagccgtgattataataccagcaccttcccgcaatctgatcgcgaaatgggtaataaatcctatggtctggcatgggatatggatacgcaactcgcatgggccaaactacgtaccaccgttggttgggatcatattagtgattatacccgtcacgatcatgacatctggtacaccgaactttcatgtacatatggtgatattacagggcgttgtacccgtggcggattaggacacatttcccaggctgtagataattacaccttcaaaacacgcctggactggcaaaaattcgccgtgggtgatgtttcgcatcaaccctacttcggcgcggaatacatctattccgatgcatggactgaacgccataaccagtctgaatcctatgtgattaatgctgcaggaaagaaaactaaccataccatttaccataaaggtaaaggcagcctgggaattgacaactacacgctgtatatggcggatcacattagctggcggaatgtgtcgttaatgcccggtgtgcgttatgactatgacaactatctgtcaaaccacaatatctccccgcgctttatgacggaatgggatatttttgctgatcaaacctcaatgattaccgccggttataaccgttactatggcgggaatattcttgatatgggattacgtgatatccgcaatagctggacggaatcggtatcaggtaataaaaccctgacgcgttatcagaatttgaaaacgccttataacgatgaactggcaatgggattgcagcaaaaaatcgataagaacgttattgcacgcgcaaactatgtttaccgtgaagcgcatgatcaaatcagcaaaagcagtcgtaccgacagcgcgactaaaaccaccattactgaatataacaacgatggcaaaaccaaaacgcattcgtttaacctcagttttgaactggccgaacccctgcatatccgccaggtagatattaacccgcaaattgtctttagctatatcaagagcaagggcaacttatcgttaaacaatggttatgaggagagcaataccggtgataaccaggtggtttataacggtaatctggtctcttacgatagcgttccagtggcagattttaataacccattaaagatctccttaaacatggatttcacgcatcaaccgagcgggttagtgtgggcgaatacgctggcctggcaagaagcgcgtaaagctcgcattatccttggtaagacaaatgcgcaatacatcagcgaatattcagattacaagcagtatgttgacgaaaaactggatagcagcctgacctgggacacccgcttgtcctggacgccacaatttctgaaacaacaaaacctgacgatcagtgccgatattctcaatgtactggatagcaaaaccgctgttgatacaacgaacaccggtgtggcgacctacgccagtggccgtactttctggcttgatgtcagcatgaaattttaa

SEQ ID NO: 475063 - DNA, 2784 bp, Shigella flexneri
atgagaaacctctgtttcttactgacgttagtggcaactctgttgctccccgggcggctgattgccgccgccttacagcaggatgaaaagttaattaccgggcaactggacaatggcttgcgatatatgatttatccgcatgctcatccaaaggatcaggtaaatttatggctgcaaattcataccggttcattgcaggaagaagacaatgagcgcggcgtggctcattttgtagaacatatgatgtttaacggcgcaaaaacatggccgggtaataaagtcatcgaaacatttgagtcaatgggcctgcgttttggtctcgatgttaatgcctataccagctatgacgaaacggtgtatcaggtgagtttgccgactacgcagaaacaaaatctgcaacaagtgatggcaatcttcagtgaatggagtaatgccgcaacctttgaaaaactcgaagtagacgctgaacgtggcgtaatttctgaggaatggcgtgcccatcaggatgcgaaatggcgcacctctcaggcgcgccgccctttcctgctggctaatacccgtaatttagaccgtgaacctatcggcctgatggatactgtcgccacggtcacaccggcacaattgcgccaattttatcaacgctggtatcaaccaaataatatgacctttatcgtggtcggcgatatcgacagtaaagaagcgctggcgctgataaaggataatttaagtaagtttccggctaacaaagcagctgaaaatcgcgtctggccgacaaaagccgaaaaccacctgcgctttaatatcattaatgataaagaaaaccgggtgaacggcatcgcactctattatcgcctgccaatggtacaagtgaacgatgagcaaagctttgtcgaacaagctgaatggagcatgttagttcagctgttcaatcaacgtctgcaggaacgcatacagtcgggcgagttgaagactatttctggcggcactgcgcgcagcgttaaaattgcacccgattatcagtcgctgtttttccgtgtaaatgcacgagacgataatatgcaggatgctgcgaatgcattaatggcagagttggcaaccattgatcagcatggtttttctgctgaagaactcgatgatgtcaaatctacccgcctcacctggctgaaaaatgcggttgatcagcaagctgaacgtgatttacgtatgctgaccagtcgcctggcatccagctcattaaataatacgccgttcttgtcgccggaagagacatatcaactttcgaaacgtctgtggcagcaaattaccgtgcaaagtctggcggaaaaatggcagcagttaagaaagaaccaggacgcattttgggagcaaatggtaaacaatgagcttgccgccaaaaaagcattgtctcctgcggctatcctggcgctggaaaaagagtacgccaacaaaaagctggcggcttacatcttcccaggcagaaatttatcgttaacagtagacgctgacccacaggcggaaattagcagcaaagaaacgctggctgagaatctgacatcattaacactttccaatggtgccaaggttattctggcaaaatccgcgggtgaagagcaaaagctacaaattattgccgtatcgaataaaggcgatttaagtttccctgcgcagcaaaaatcacttatcgcgctggcaaataaagcagttagcggaagcggcgttggcgaactctcctcttccagcctgaaacgctggagtgcggaaaactcggtaaccatgagcagtaaagtcagtggcatgaatacgttgctctccgttagcgcgcggactaataaccctgaacctggtttccagttgattaaccagcgaatcacccacagcacgattaacgacaatatttgggcatcgctacaaaatgctcaaattcaggcgttgaaaacgctcgaccagcgtccagcggagaaattcgcccagctgatgtatgagacgcgctatgctgatgaccgcacgaaattactgcaagaaaatcagattgcacagtttactgccgcagatgcgctggctgccgatcgccagttgttttcatctccagcggatatcacgtttgtcattgtcggtaatgtcgcagaagacaaactcgtggcgttaattacgcgttacttaggctcaatcaaacactctgattcgccattagccgcaggtaaaccattaactcgcgcgacggacaacgcatcggttactgtaaaagaacaaaatgaacctgtggcacaggtttcacagtggaagcgttatgattcccggacacctgttaatctggcgacgcgtatggcgctcgatgcttttaacgtcgcactggcaaaagatctacgcgttaatattcgtgaacaggcatctggggcatacagcgtttcttctcgcctctcggttgatcctcaggctaaagatatcagtcatttgctggcttttacttgtcaaccagaacgacatgatgaacagttaacgttagcgaatgaagtgatggttaagcgtttgactaaggggatcagtgagcaagaactgaacgaataccagcaaaacgttcagcgcagcctcgatatccaacagcgtagcgttcaacaattagcgaacactattataaatagtcttattcaatatgacgatcctgcagcatggactgagcaggagcaattgttgaaacaaatgacgatagagaatgttaacactgccgttaaacaatatctttctcatccggtaaatacttataccggagtattattgccaaaataa

SEQ ID NO: 475064 - DNA, 777 bp, Shigella flexneri
gtggcatgcgcctgcgccggtaactatgagttcccgcaaccgctgcacgatgcactggataaattccaggccgacaccggtatcgacatcgacatgcacatcgacgccgccagcggtggctttctggcaccgttcgtcgccccggatatcgtctgggacttccgcctgccgcgtgtgaaatcgatcagtgcttcaggccataaattcggtctggctccgctgggctgcggctgggttatctggcgtgacgaagaagcgctgccgcaggaactggtgttcaacgttgactacctcggtggtcagattggtacttttgccatcaacttctcccgcccggcgggtcaggtgattgcacagtactatgaattcctgcgccttggtcgtgaaggctataccaaagtacagaatgcttcctaccaggtcgctgcctatctggcggatgagatcgccaaactggggccgtatgagttcatctgtaccggtcgcccggacgaaggcatcccggcggtttgcttcaaactgaaagatggtgaagatccgggatacaccctgtacgacctctctgaacgtctgcgtctgcgcggctggcaggttccggccttcactctcggcggtgaagccaccgacatcgtggtgatgcgcattatgtgtcgtcgcggcttcgaaatggactttgctgaactgttgctggaagactacaaagcctccctgaaatatctcagcgatcacccgaaactgcagggtattgcccagcagaacagctttaaacatacctga

SEQ ID NO: 475065 - DNA, 882 bp, Shigella flexneri
gtgcgttatgcccgtgaacataatctcggcaagattattctcggtcgcccagcctcgcgccgctggtggcgtcgggaaacatttgctgaccgactggcgcgcatcgcccccgatctcgatcaggtgctggtcgcgcttgatgaaccacccgcccgcacgattaacaacgcgccggatagccgctcatttaaagacaagtggcgggtacagattcagggatgcgtggttgccgccgcgttatgcgccgttatcaccttaattgccatgcagtggctgatggcgtttgatgccgccaacctggtgatgctgtatctgcttggcgtggtggtggtggcgctattttatggacgctggccttcggtggttgccaccgtcattaatgtggtgagtttcgatctcttttttatcgccccacgcggcacgctcgccgtctctgatgtgcaatatctgctgaccttcgcggtgatgttaaccgtcgggctggtgatcgggaaccttactgctggcgtgcgttatcaggcgcgggtagcccgttaccgcgagcaacgcacacggcacttatatgaaatgtcgaaagctctggcggtgggccgcagtccgcaggacatcgccgccaccagcgaacaatttattgcctctacgtttcatgcccgcagtcaggtgttgttgcccgatgacaacggtaaattgcagccgttaacacatccgcaaggaatgacgccatgggacgatgccatcgcgcagtggagttttgataaaggcctgcctgcgggcgcgggcaccgacacgttacccggtgtaccgtaccagattttgccgctaaaaagcggcgagaaaacctacggctggtggtggtggagccggggaatctgcgccagttga

SEQ ID NO: 475066 - DNA, 819 bp, Shigella flexneri
atgatcccggaacagcagcgcctgctggagacttttacgctgttagtcgccaatgcccttgagcggctgacgctaaccgccagcgaagaacaggcgcggatggcaagcgaacgtgaacagatccgcaacgccctgctggcagcgctttcgcatgatttacgcacgccgcttacggtgctgtttggtcaggcagaaatcttaacgctcgatctggcaagcgaaggatcaccccacgcccgccaggccagcgagattcgtcagcatgtgctgaacactacccgactggtgaataatctactggatatggcgcgaattcagtccggcggctttaatttgaagaaagagtggttaacgctggaagaagtagtcggcagcgcgctgcaaatgctggaaccgggtttatcgtcgcccatcaatctttctctgccagaaccgctgaccttaatccacgttgacgggccactctttgaacgggtgctgattaatctgctggagaacgcggtgaaatatgcgggtgcgcaggccgaaattggtatcgatgcccacgttgagggcgaaaatctacaactggatgtctgggataacggccccggtcttccgccaggccaggagcagacgatatttgataagtttgctcgcgggaataaagagtcggcggtgccgggtgtcgggcttgggttggcaatttgtcgggcgattgtggatgtacacggcggcaccattaccgcgttcaaccgaccggaaggtggtgcctgttttcgtgttacacttccccagcaaaccgctcctgaacttgaagactttcatgaggatatgtga

SEQ ID NO: 475067 - DNA, 294 bp, Shigella flexneri; identical to SEQ ID NO: 25632

SEQ ID NO: 475068 - DNA, 1035 bp, Shigella flexneri
atgttgatagcaaagtatctctgtctgctgaagcccttttggctgcgtaagaataataaaacttcagtgttgttaatcattattatcctcgcaatgatccttggcgtggttaaaattcaggtctggttaaacgactggaataatgattttttcaatgcgctaagccagaaagaaaccgataagctttggcagcttgttctttggttccctgccctgctggggatctttgtattaatatccgtaaacaaaacatggttaattaaactactgactattcgctggcgcgaatggttaacagattactaccttaatcgctggtttgcagataaaaactactacttcacgcagatctacggcgagcataaaaatacagataaccctgaccaacgtatcgctgaagacattctcttactgatcaacaaaacgctcagtctttcatttggcttcatccagtcacttagcatgctgatcacctttaccgttattctttggcaaagcgcgggtacgctctcattcactgttggtggaacagaatggaatatccaggggtatatggtctataccgtcgtgctcattgtgatcggtggaactttatttacccataaggtgggtaaacgtattcgtccgcttaatgtggaaaaacaacgtagcgaagcgacatttcgaactaatcttgtgcagcataataagcaggcagaactgattgcgctaagcaatgctgagtctctacaacgccaggagttgcgcgacaattttcataccattaaagagaactggcatcgtttaatgaatcgtcagcggtggcttgattactggcaaaatatttattcgcgctcgcttagcgttcttccctactttctgttattgccgcagtttattagcgggcagatcaatctgggcggactgatgaaatcgcgccaggcatttatgctagtatcgaacaatttaagctggtttatttataaatatgacgaacttgctgaactggctgcggttatcgatcgcttgtatgagttccatcaactcactgaatag

SEQ ID NO: 475069 - DNA, 558 bp, Shigella flexneri
atgtttatgtggtggaaaggaaaacttcaacccggtaattatgacaagctgatttccgcaatggatttctacccaacagctcttgatgcagccgatatcagcattccaaaagaccttaagctggatggtgtttccttgctgccctggttgcaagataagaaacaaggcgagccacataaaaatctgacctggataacctcttattctcactggtttgatgaggaaaatattccattctgggataattaccacaaatttgttcgccatcagtcagacgattacccgcataaccccaacactgaggacttaagccaattctcttatacggtgagaaataacgattattcgcttgtctatacagtagaaaacaatcagttaggtctctacaaactgacggatctacagcaaaaagataaccttgccgccgccaatccgcaggtcgttaaagagatgcaaggcgtggtaagagagtttatcgacagcagccagccaccgcttagcgaggtaaatcaggagaagtttaacaatatcaagaaagcactaagcgaagcgaaataa

SEQ ID NO: 475070 - DNA, 366 bp, Shigella flexneri
ttgccagtacacctcagtaataatagcggcccaaattcagagctgaacatttaccagtacggtggcggtaactctgcacttgctctgcaaactgatgcccgtaactctgacttgactattacccagcatggcggtggtaatggtgcagatgttggtcagggctcagatgacagctcaatcgatctgacccaacgtggcttcggtaacagcgccactcttgatcagtggaacggcaaaaattctgaaatgactgttaaacagttcggtggtggcaacggtgctacagttgaccagactgcatcgaactcctccgtcaacgtgactcaggttggctttggtaacaacgcgaccgctcatcagtattaa

SEQ ID NO: 475071 - DNA, 333 bp, Shigella flexneri
atgaatgcgttattactccttgcggcactttccagccagataacctttaatacgacccagcaaggggatatgtacaccattattcctgaagttactcttactcaattttgtctgtgcagagtacaaatattgtccctgcgcgaaggcagttcagggcaaagtcagacgaagcaagaaaagaccctctcattgcctgctaatcaacccattgctttgacgaagttgagtttaaatatttccccggaagatcgggtgaaaatagttgttactgtttctgatggacaggcacttcatttatcacaacaatggacgccctcttcagaaaagtcttaa

SEQ ID NO: 475072 - DNA, 291 bp, Shigella flexneri
atgaattcccagacaacaaaagatattccctgcttccgttcttatttgcctgatgccctgcgtttaagatttgaagataaactgaccatccgggccatcgctcagcgtctgggtctcagtcattccacaatacatacgctttttcagcgatttcttgcatccggtatcgcatggccattgcccgattcagtttcattcgctcaacttgacgccatcctttatgccaacagaaagaaggaattaacagagcctcaaatcagaggtaagcgccccgagaagtacgtagcgtaa

SEQ ID NO: 475073 - DNA, 243 bp, Shigella flexneri; identical to SEQ ID NO: 474685

SEQ ID NO: 475074 - DNA, 276 bp, Shigella flexneri; identical to SEQ ID NO: 474948

SEQ ID NO: 475075 - DNA, 852 bp, Shigella flexneri
atgactgttcaaacaagtaaaaacccgcaggtcgatattgctgaagataatgcgttcttcccttcagaatattcgcttagccaatatacgagtcccgtctctgatcttgatggcgtggactatccaaaaccgtatcgcggtaaacataaaattctggtgatcgccgcggacgaacgttatttgccgaccgataacggaaaactgttctcgacaggtaaccatccgattgaaacgttgctgccgttgtatcatctccatgctgcaggtttcgaattcgaagtggcgaccatttccggtctgatgaccaagtttgaatactgggctatgccgcacaaagatgaaaaagtaatgccattctttgaacagcataaatcgttattccgtaatccgaagaaactcgcggatgttgtcgccagcctcaacgctgatagcgaatatgcagcaatctttgttcctggtgggcatggcgcacttattggtttaccagaaagccaggacgtggctgccgctttacagtgggcaatcaaaaatgaccgttttgttatctccctttgccacggtccggcggcttttctggcacttcgccacagcgataacccactgaatggttattctatttgcgcattcccagacgccgcagacaaacaaacgccagatattggctatatgccgggtcatctcacctggtacttcggcgaagagttgaagaaaatgggcatgaacatcattaatgacgacatcaccgggcgagtacataaggaccgtaaacgtctcaccggcgacagtccttttgcagcgaatgcgttgggtaaactggcggcgcaggaaatgctggcagcttacgcgagttaa

SEQ ID NO: 475076 - DNA, 1794 bp, Shigella flexneri
gtgaaagatggcatccgccatatccgcgccctcgccaaccgggtactgaataaagaaggcgaagtcgaacgcctgctcggcattaatatggatatgaccgaggttaaacagcttaacgaggcattgtttcaggaaaaagagcgcctgcacattacgctggattccatcggtgaagccgtggtctgtattgatatggcgatgaaaattacctttatgaatccagcggcggagaagatgagcggctggacgcaggaagaagcattaggtgttccgctcctgacggtgttgcatattacttttggcgacaacggaccattaatggagaacatttacagtgccgacacctcacgttccgcgattgaacaagatgtggtgttgcactgccggaacggcggcagttacgacgtgcattacagtattacgccgttaagtactctggacggcagcaatataggctcggtactggtgattcaggacgtcaccgaatcacgcaaaatgctgcgccagctgagctacagcgcctcccatgatgcactgacgcatctcgccaatcgcgccagttttgagaagcaactgcgtatcctgctgcaaacggtaaacagtacacatcagcgacatgccctggtgtttatcgatcttgatcgctttaaagcggtgaatgacagcgccgggcatgcggcgggtgacgctttactgcgcgaactggcgtcgttgatgctgagtatgctgcgctccagcgacgtgctggcgcgactcggtggtgatgaatttggtctactgttgccagactgtaatatcgaaagtgcgcgttttatcgctacacgcattatcagtgccgtgaatgattatcactttatatgggaaggccgtgtgcatcgggtaggtgccagtgccgggattaccttgattgatgacaacaatcatcaggcggcagaagtgatgtcgcaggctgatatcgcctgttatgcctccaaaaatggtggacggggccgggtgacggtttacgaaccacagcaagctgccgcacatagcgaacgggcggcgatgtcgcttgatgaacagtggcggatgattaaagagaatcagttgatgatgatcgcccacggtgtcgcttcgccgcggatcccggaagcgcgtaatttgtggctgatttcacttaagctctggagttgcgaaggcgagattattgatgaacaaaaatttcgtcgtagcttcagcgatccggcacttagccatgctcttgaccgacgggtattccacgaatttttccagcaggccgcaaaagcggttgccagtaaaggcataagcatcgccctccccctttccgttgccggtttgagtagcgccacgctggtgaatgatctgcttgagcagctggaaaatagccctctaccaccacggttattacatctgattattccggctgaagcgattttagatcacgcagaaagcgtgcaaaaactgcggctggcgggatgtcggatagtgctcagccaggtgggccgcgatctgcaaatcttcaactcgctgaaagcgaatatggcagattacctgctacttgatggtgagttatgcgccaacgtgcagggtaatttgatggatgagatgctgattacgattattcaggggcacgctcagcgactcgggatgaaaaccatcgccgggccagtcgttttacccttagtgatggatacgctttctggcatcggcgtcgatctgatttatggtgatgtgattgccgatgcccaaccgctggatttgctggtgaatagcagttatttcgcgattaactga

SEQ ID NO: 475077 - DNA, 285 bp, Shigella flexneri
atgcaggttgcctggctaaatgaccagcagccattactggtgatgttccttgctgatggcgcaggtagcgtttcgcaggggggcgaaggcgcgatgctcgccgtcaatgaagcgatggcttatatgtcgcaaaaagtgcagggtggggaattggggcttaatgatatcctcgccacggatattgtgctgaccgttcgtcagcgactttattgccgaggcggaagccaaagaattagcagttcgcgattttgcctgtacgtttctgggattgatttcatcggctaa

SEQ ID NO: 475078 - DNA, 885 bp, Shigella flexneri
atgatggtcatccgtcccgttgagcgctcagatgtctcggcgctgatgcagcttgccagcaaaacgggcggcggcctgacgtcgcttcccgccaatgaagccacgctttcggcgcgtatcgaaagggcaatcaaaacctggcaaggcgaactgcctaaaagcgagcagggctatgtgttcgtgctggaagatagcgagacaggcaccgtggcggggatttgcgctattgaggtggcggttgggctgaacgatccctggtacaactatcgcgtcggcacgttggttcacgcctcaaaagagctgaatgtctataacgcattgccgacgctgtttcttagtaacgatcacaccggcagcagcgagctgtgcacgctgtttctcgacccggactggcgcaaagagggcaacggctatttgctgtcgaaatcgcgctttatgtttatggcggcttttcgcgacaagtttaatgacaaagtggttgctgaaatgcgcggggtgattgacgaacacggctattcaccgttctggcaaagcctcggtaaacgcttcttttcgatggattttagccgcgccgattttctctgcggcaccgggcaaaaggcatttattgcagaactgatgccgaaacatccgatctatacccactttttatcccaggaagcccaggacgtcatcggtcaggtacatccgcaaaccgcgcctgcccgcgcggtgctggagaaagaaggttttcgttaccgcaactatatcgacatcttcgacggcgggccaacgcttgagtgtgacatcgaccgcgtgcgcgccatccgtaaaagtcggctggtggaagtggcagcaggctggcttgccgccgggcgtgctgaacctggtgcagggcgggcgtga

SEQ ID NO: 475079 - DNA, 495 bp, Shigella flexneri
gtggaaacacttaagcctgatatcgtcatcattgatgtcgatatccccggagttaacggtatccaggtgttagaaacgctgaggaagcgccaatatagcggaattattattatcgtctccgctaaaaatgaccatttttacgggaaacattgtgctgatgctggcgctaatggtttcgtgagtaaaaaagaaggcatgaacaatatcattgcggctattgaagctgcaaaaaatggctactgctatttccccttctctctcaaccggtttgttggaagtttaacgtccgaccagcaaaaactcgactccttatcgaaacaagaaattagtgtcatgcggtatattcttgatggcaaggataataatgacattgcggaaaaaatgttcatcagcaacaaaactgtcagcacgtataaaagtcgcctgatggaaaaattagaatgtaaatcactgatggatctttacacattcgcgcaacgtaacaaaatcggctaa

SEQ ID NO: 475080 - DNA, 2283 bp, Shigella flexneri
gtgctttgcgaaggcgaaattgattgtatgagctatgcgcaatacggcatctcggcgttatccgtgccgtttggtggcgggaaaggcgctaagcaacagtggattgagtttgagtatcataacctcgacaggtttgaggaaatattcatctcgatggacgttgatgatgttggtcgtgaagccgcaagggaaatcgcaagccgactcggtgaacatcgttgccgtcttgttactctgccgtacaaagacatcaacgaatgcctgatgaacggtgttaccgaggatgaaatctggcagtacatcggcacggcatcctacttcgatcctgaagaactctacagtgcgcgagagttttaccaggacactatcaacgctttctacggcaagcagcagtatctgtttaatccaccgtgggaatctctggcagataaattccagttccgtgaggcagagttgacgctggtcaatggtgtgaacggtcacggaaaggcatgcccactgaatgagcctattcttttagctgatgggacatggactactcacgggaatgtaaaaattggcgatcaggtggcgtcagtagacggcaatccgtcaactgtcactgggatattcccgcagggtgttagagatgtttaccgagtcacatttgaagatggtcgttatgttgattgcgcaggcgatcacctatgggaggtcactagtcgtggattcacgaaaggcgagaaacgccgcgtgatagataccttcgggttgaagcggttgagtgaaacgaagaggcacaaaaatggcgttaggattcctgaaataactggtgactttggcgaccactcagagccattagcatgggttatcggctcccttctcggggatggtagtcttagcaatgggagcgtgaagttttcaaacgtcgagccatacatgatcgagcgtatgaaggctgaactgcctgattacaacttctctggagatggtaaggactggctgatatcaacggcgcgtggtcaggtaaatccactcatggagaccctgcgaggttatggactaatggggtgcacagcaaaaaacaaattcatccctcgtgtgtttttttccgcaaataaatcaacgcgtataggcatgctgtgtggtctgcttgaaacggatgggtatgtcgagaaggatggaacgcttgttttttcctcagcaagtgaagaactgcgcaatggggttgttcaactggttaactcactcggcgggtcatgccggacgcgagttaaaactggcgtgacatacacatacaaggacgataagcggcatgggatggattcatacgaggcaagaatcagactgacaagagaaatcagggaggccatccgttcaccacgactcaatggcagattaactgcgcatcgattcgagggctgtggggtattcgtcaggaatgttgaaaaaatcggcaatgcagaatgcttgtgtattatggtcgatcaccctcgccacctgtatgtaaccaggggatatgtggcgacgcataacaccgaggttgtcgggcatatggcacttgaggcaatgcgtcagggtgtgaagacgtgcatcgcgtcacttgagctgaagcctggtattctccttaagcgacttacccgtcaggcaacgtgctgcaagatgccgccagtgctggaaattgactctgcatttaaattttatgacgaaagactttgggtgtttggcctgactggaacggcgaaagccgacaggctgatcgaaatattcgactacgctcgccgccgatacgggatccagttattcatcatcgacagcctgatgaaatgtggcataggcgacgatgactataacgggcagaaggcgtttgttgactcgatttgcgacttcaaaaacaaaacaaactcccacgtcattctcgttactcactcgcgaaaaggagacagcgaagaaaaaccaaccgggaaaatggacgtaaaaggctctggagcgataacagacctgacagacaaccttttcatcatctggcgtaacaaggctcgcgagagagcgttacagagagttcagagtggtgaaaagatgtcagagaaggacgaacagctactggcatctccggcatctgttttgatgcttgaaaaacaacgtaacggcgaaggttgggaaggtggtgtcccgttgttccttgacgagcaatcgcaccagttcctgcaacttgaatcaggatcgccatatagctacatcgccaatatgccgaaatcggaatatgacgaggcgtggcgacaggaaaacgtgacggagtattaa

SEQ ID NO: 475081 - DNA, 279 bp, Shigella flexneri
gtgaacgatagctaccgacagtttgaaaactggtggtcaaaagacgaaagccagttcacaggagacgatgaattaaaagagtttgcctgggtgatatggcaggcaccgcgagcagctattgaactggatatcgactggcccgaatcgaatgacgacttttggaaagatggtgaagaaggtgcttatgcgatggggcatgaggatgggaaggacaaaacggtaattgcagtaatgaaagctatcagagccgctggaattaaagagaagaattttcgatga

SEQ ID NO: 475082 - DNA, 411 bp, Shigella flexneri
atgaagcaaacaatcttcctccgaactaagcaacaacagcaagccgcaataaatgccatcctctcaactcctctcgataaagacaagccagtcaccatccgcattactgactacaagcgaaatcttgaccagaacgcaaaatttcacgcgatgctggcggatatcgctcgtcaggttcaatggtgcggcaaatggttaaaaccagaacaatggaaggttttgttgatcagcggtcatgcagtggcaacaaaacaggaagctgatgttttgcccggccttgaaggagaatgcgtcaacattcgcgaaagcagcgcgcagatgagcgtgaagcgcatggcaagtctgatcgagtacacaacagcctgggctattggtcagggtgtcagatttaccgacaggaggtatgaatga

SEQ ID NO: 475083 - DNA, 309 bp, Shigella flexneri
atgactggtaaacgcactctccccaccatgacacacgacgaaatggcagccaaatggatggaagacccggcttttaaagcagaatacgacgctatcgctgacgaattcgcactgcttgatgaaatgctggcagcacgcaaagaagctggcttaactcaggctgaagttgccgagcgaatgggaacaaaagcgaccgcgatcaccagaatggaaagtaatctcgcatcaggtatcagcggcccatcatttgccacactaaaaaaattcgcccgcgctactggaaaaaaactccagatccgcttcgtttaa

SEQ ID NO: 475084 - DNA, 1125 bp, Shigella flexneri
atgcagcatgatgatgcgtttccctgtcagagtgcagtaaaaaacacgcgcgatcccatcgttgcctttaattctgagttcgaaaagcccgtcaccaaaggcgctggtgtgaggttctccgagattgctgccgtataccttcatgcgttcaacaagatgctggtatctggcacgcatactcaatggaagctgatcgacctccagtcggacctcttcactgtagtattcgatagtgtagttcatacagcaaaacataacaaaatcgttatatctgcacaatatattgattctgcaatttcgggacgttacactgtctctgcaccttataaagcgggtgccgggattgacgtcctgaaattcaatatagagcataaccgcgctcatgcggttttttcgtgtcatgagcattgctacgcccaaattatggtggggcgtgcaggggcatcgcaagatgcgccgggttctatgttgaccggttacgccaaccctgtacgtctcaccacctctgtgattggcgtcccatgtggtgagttctttgaattcaacataggggctgtcaccatgactactctcccaaccctctctcaacctgaaattgccatcgttgatggtcaggctgttacttcatccctggctgttgccaacttcttctctaaacgtcatgacgatgttctgaaaaagatccgcattttggattgttctccagagttttgtgcccgcaattttgcggagacatcaattttggtacgccagcccaacggcggtactcgcaaacttccctgctaccaaattacccgcgacggcttcgccttccttgctatgggcttcactggtaaacgtgccgcccggttcaaagaggcatacatcaatgcctttaaccagatggagaggagcttatcaggagctggtgcggctgacatgtcatctgtcgcacaaaacgccagaggcgtatacctgcatttgcgtgaaatccatcaaatctggacaagccagctttacccaatgcttaaggccgttgaatctccgctggctggcaaactgtacgaccgtgtaggtgatgctgtttttggtgctgcacttgttgattccaggctgaatggttctgacaaggaggtgctcccatga

SEQ ID NO: 475085 - DNA, 234 bp, Shigella flexneri
atgatccgccacatcgttaatttcctgtatcaccgatacaaccattgcccccgtgtggggcagtggttcaccaccagcaacggctacgttctgcgggtttgcctggtcagtaccgaaagccagaaggttgtctgccaggttcagggacgtactcataccctgagttatccgctggtggcgtttcagcccggaaaaatgtttaaacgcctgggaggtggctatgcgtccgtctga

SEQ ID NO: 475086 - DNA, 366 bp, Shigella flexneri
atgcgtccgtctgatcttctgctcgattttggacatccggttgcttattaccctgggctcgttaaatacatgggaagtccgcacgctgttattttctttggtcagattttttactggcaggataaagcacatgcagcggaaggcgtacataaaacgcgtgaagagatacaacacgaaaccggacttacatttgaacaacaggctgtagcgcgtaagcatcttgtgtccagaggcattttggttgaaaccaacaagcgtcttgagcacaaaatgttctaccgtatagattgtgagcgccttaatgaaattatcaatgaaaacaatcagtttcccgaaatggggaaacccgttttcgggaaactgtaa

SEQ ID NO: 475087 - DNA, 168 bp, Shigella flexneri
atgactaaaaatacacgtttttcccctgaagtccgtcaacgggcagttcgtatggttctggaaagtcagggcgaatataactcacaatgggcggcaatttttagccatgaaaacgtaatcaactcggtgaaccaattcaaaaaatatactttatacctgcggaagtga

SEQ ID NO: 475088 - DNA, 624 bp, Shigella flexneri
atgaccagtcaactcatccccgtattcaacggcactatatccaacgaaacaactcttctcgttaatgcccgtgatttacacgaatttttggaagtacgtcgtgacttctctacatggattaaaaatcgcataacagaatacggctttgccgttgatgtcgattacattttggttcaccaaaacagggggatcaaaggacgtggaggcgatcgccgtagcaaagactatcacctcaccctcgatacagccaaagaaacggcgatggtcgagcgtaacgaaaaaggccgccagatacgccgatacttcatcgagtgcgaaaagaaacttcgcagcatgcaaccagcgcagcaattcacagacgaagaaatcatcctcctttgctatatgcaggtacagatggagaatgcgcaggacatctgcaaacgtctgtacccgatattgaaggaactgaactcatcatacacgagcaagctgtatgacatcgcgtttgaaactttttacacggtgacgaaaaacagagatgtactgctaagggaggcgacacgacttgaccaagcaagcgcccttttcgaacgggcaaaaccaatgctgaaaagccttcgggcgagacaattcgaattttaa

SEQ ID NO: 475089 - DNA, 681 bp, Shigella flexneri
gtgcgcatccggcaaaaccatcatgaaaacaagtcgcgctttgttgagggggtacacttctacaaggtcgttggtgacgagctgcgcgcgctaaaacacaaagtagctttaaactactttgtgaaaagtgccccaaatgcacgccacctcatcctctggacagagcgcggagccgcccgtcacgcgaagatgctcgaaacggatcaggcatgggacgtgttcgaaaaactggaggacggctacttcaatcagcgcgaaaaggttgccaaccatcctcaaccagtaccgcaaccagaaagtagcctagaccgtgcgcgagccatggaaatagctttgaacgtggcggatcgactggtgaatatgttcctgaatctgtcctcagaatcaaagcaggcagcagtagctggagtgttcaacccgattgttggtcgcgatgttgtacctctgccagctatctcagagcactactactctgctacggaagtcggccagcgctacggtatttcagccaacaaggtaggacgcatagccaacacctacatgctcaaaacagaaaagtacgggaagtggttcatcgacaaatcggcgcacaatgacaagcaggttgaaacatttcggtacaacgaggctggagtgcacaaaatagaggaactcatcgaaggagagcgaaaggctgcatga

SEQ ID NO: 475090 - DNA, 435 bp, Shigella flexneri
gtgaacgacaaagaactgattaaagaaatcaaagagcgtatcagcagtttggatgtgcgagacaatgttgaacgccgtgcttatgaaattgctctggcatcgctgacagcagagccggtggcgtggaaggtaaccttcacgcaaattgaccgtgaatataacacgttcactggtatgtattctgacaaagcagaagtcgaacggtgggtgcggctgcataaagcatgtaattttcgggcagatataacaccgctttataccgcccagccagtgccggtaactccggatgcctggataagctgtagtgagcgaatgccagaaatgggagagcgacaatgctatgtgttagcagctgactttaaaaacaactacccaccaaacattggcgcagttgtacggaacggatgttgtgcgcatccggcaaaaccatcatga

SEQ ID NO: 475091 - DNA, 327 bp, Shigella flexneri
gtgccacttcatgttcaggcttatgcaaacgctgaatttattgctgcttttaatccaaatgttgcgctggcactactggatgaacgggaaagaaacctgcaatacatcaaaagccgcgatcaggagaacgaggaaattgcgctaacggtagggaagttgcgtgttgagctggaagcagcagagaacaaccttattgatagtgaatgccatgttgctgaactggaagaagcgctacgcgataagcaggcgttacttgaagcctcagaaaagcgcatagcagaactggaggcacagacagttaccgttaaagaggttggagatgcttga

SEQ ID NO: 475092 - DNA, 420 bp, Shigella flexneri
atgaaagccctgatttccggaagcgagcgaacagtccacaaactgttgaacgtggtgtcagcggcggacagggataagccctcgtcagcagttccgtcagcactgctgacagcgttctttacccggtcaaaacagcgttgcggtgcaccacgcctgacggatgaactgcgtgctcagggttaccactttaacgtaaaaaccgtggcggcaagcctgcgccgtcaggggctgagggcaaaggcctcccggaagttcagcccggtcagttaccgcgcacatggcctgcccgtgtcagaaaatctgctggagcaggatttttacgccagtggtccgaaccagaagtgggcgggagacatcacgtacttacgtacagatgaagttcggttacatcctgtcagcacggaacctcacgctttttga

SEQ ID NO: 475093 - DNA, 822 bp, Shigella flexneri
ttgttcaaagccaatcatgttccggtattaatgtatcatcatgtcagtcattgccccggactggttacactttctcccgtgacattccggaagcaaataaaatggttggctgaaaacaactggaaaacactgtcatcagatgaactggagtttttttatcggggcggaaaactcccccggaaaagcgttatgttgacatttgatgatggataccttgacaactggtttcaggtatatcctttattaaaagagtttaatctcaaagcacatatttttttaattaccggttttattgggaatggtccggttcgtcactctcctggaaaggaatattctcatcgcgattgcgaacatcaaatagcgacagggaatgctgataatgttatgcttcgctggtctgaagtaaacgaaatgttgcaatctggtctggtcgaatttcatgttcatacgcatactcatacacgctgggataaaaagttcagttcacgagaagaacagtgtaagcatcttcggcaggacttgttgagcgggagagaatgtttgaaagaaatgacaggaaaatgcagtaaacatttgtgttggccggaaggttattataacaaggattatattcaggtcgctgaagaacttggattctattatttatatacaacagaaagaagaatgaatgctcctgctaaaggaactacacggataggaagaataagcaccaaagaacgggaaagttgcgcatggctgaaaagacgacttttttattatacaacaccgtttttttcatcgttgctggcctttcataaggggccaagattaccggatgattaa

SEQ ID NO: 475094 - DNA, 1089 bp, Shigella flexneri
atgaatatactatttacggaatcatcaccgaatataggtggtcaggaattacaggctgttgctcaaatgaaggccctgaagaaaatggggcattcagttctgcttgtctgcagggaaaacagcaaaattgcttttgaagccagtaaattgggaattgatatcacattcgcgttatttcgaaacagtcttcacatccctactgcatggagattactcggaatagttcatggttttcagcccaatgcaatcgtttgtcacagtgggcatgatagcaatattgttggtttagtacggttattcactaggaaacatccattcagaattatcaggcaaaagacatatttgacacgaaaaacaaaagttttttcaataaatcatttttgcgatgaggtgattgttcccggaacaagtatgaagacacatctggagcaggaaggatgtcgaacccgggttactgttgtgcctccaggctttgatttccagaaattatacgttgattcccgaaacagtttgcctccaaatgttctttcttggctggcgtcccgaaggggatgccccgttattgctcaggtaggaatgttgcgcccggaaaaagggcacgaatttatgttgaatttactgttccatttaaaaatgaatggacgacagttctgttggttgattgtggggtctggttcgcctgaactgcgggagcatttacagtatcagattgacagtatgggcatgcatgatgatgtttttattgctgacaatgtttttcctgccgcccccgtatatcgggttgccagtctggtggttctgccttcagaaaacgaatcgtttggtatggtactggcagaagcatcggcattttctgtgcctgtactggccagtcagattggtggaatccctgatgttattcagaacaaccagaccgggacattgttaccagcaggtaataagcacgcatggatgtgcgccctgaatgatttttttaatgaccctgggcgtttttatcagatggctcgccaggcaaaacaggatatagaagagcggtttgatattaataaaactgcgttaaaaatactcacattagcgaagcacaagtaa

SEQ ID NO: 475095 - DNA, 951 bp, Shigella flexneri
atgttttctgtaagtaacttatcatttatcggtttccttaaaaggattgttttttcctcagattcactcccggggaagtgggaacacagaaaattccggttcatgtacattttgcgatgtgctataaatccggttgccagtattcgatattattacgaactgcgttccttgcagtgcattgaggatattctggcaatacaacccacgttgccagcaagaattcatcgaccttatttgcataaaggggggcgagcctggtcccgggggcaatatattcttgagcattatcgctttgtgcaaaatttgccagaaaaatattctgaatttttgtttccacaaaaatcggtatcattagtccaattcatcgggaaagatggagaggattttgatatccagtgttctcccagtggttttgaccgggaaggagagttgatgttgtcattgtttttcaatcaaatagtgattgcccggttaacattttcagtcattctgactcaaaatggacacaccgcttttattggcggattacagggagcccccaaaaataccggacctgatgttattcggtgcgcaacccgggcctgttatgggcttttcccaaaacggattatttttgaagcattttgtgcgttgatgaaagcttgtaatgtctctgagtgtctggcagtcagtgagcacagtcatgttttccggcaattgagatactggtatcagaaacgcaaaacctttgttgctgtctacagtgatttctgggagtctgtagcagggaaaacctgtggtgactggtacaaattaccaacacaggtggttcgaaagccgctaagcaatatagctagtaaaaaacgctctgagtatcgaaaacgatacgctttgctggattatatccatgaaactgctatccgctctttggatgcatatcctgtaaactcagaacatcaggacttaaattaa

SEQ ID NO: 475096 - DNA, 945 bp, Shigella flexneri
atgaaaaaatacaaatccgagtttattcctgaatttaagaaaaattatctttcccctgtttactggtttacatggttcgttttgggaatgattgcaggtatttcaatgtttcccccttcattcagagatcctgtcttggccaaaatagggcgttgggtgggcagattgagcagaaaagctcgtcgcagggcgacgattaatttatcgctttgtttcccggaaaagagtgatacagaacgggaaataattgtcgacaatatgtttgccacagcattgcaatccatagtgatgatggcagaactggcaattcgtggtccggaaaagttccagaaacgagtgttctggaaaggcctcgaaattcttgaggaaatccggcacaataacagaaatgtgatttttctggttccccatggctggagcgtggatattcctgcaatgttgctggcagctcagggggaaaaaatggccgccatgtttcatcagcaacgaaatccagtgattgattatgtctggaattctgtacggcgtaaattcggggggcgcttacattcccgggaggatgggataaaaccatttattcagtcagtacgccagggatactgggggtattaccttccagatcaggatcatggtcctgaatacagtgaatttgctgatttttttgcgacctataaagcgacattaccaattattggacgtctgatgaacatcagtcaggctatgattataccgcttttcccggtttatgatgaaaaaaaacatttcctgactattgaagttcggccaccaatggatgcatgcattgccagcgcggacaataaaatgattgcccgacaaatgaacaaaacagtggaaattttggtggggtcacatccggaacagtatatctgggttttaaaattgttaaaaacgcgcaaatcaaacgaagcggacccgtacccttga

SEQ ID NO: 475097 - DNA, 387 bp, Shigella flexneri
atgaatatgatgcgtattatttatatcggattgtcaggtgtggggatgatgttctcatcaatggcgtctggacatgacgctggcggacttcaatctccggcgtgcggcgttgtttgcgacccgtatatttgtgtgaactcagatggcatttccccagagttaacaaggaaatatctcggcgaaaaagccgctgaaaacttacaatcatttggatttgcccctatatttccagatatctgttatcacttaacccattacaagcccgctgccgcagatattcccgtggcgagcgataacccagcgcactatgcggatgccattcgttataatgctcgaacgcctctgcaaggttctttgctgccgttaacccgtctggtttgggcatga

SEQ ID NO: 475098 - DNA, 2238 bp, Shigella flexneri
gtggactggcttcttgatgtttttgctacctggctctacagcttaaaagtaatcgcgataacgttagcggtcatcatgttcatcagcgggctggacgatttttttattgatgtcgtctactgggtacgccgcattaaacgcaagttgagtgtttatcgccgctacccgcgaatgagttaccgcgaactgtataaaccagatgaaaaaccgttagcgattatggttccggcgtggaatgaaacgggcgtcatcggcaatatggccgagctggcggcgaccacgctcgactacgaaaactatcatatctttgttggcacctaccccaacgaccccgatactcaacgtgatgttgacgaagtgtgcgctcgctttccgaacgtgcataaggtagtctgcgcgcgtcctggtcccaccagcaaagccgactgtctgaacaacgtgctggacgccatcacccagtttgaacgtagcgccaatttcgcttttgctggttttattctgcatgacgccgaagatgtgatttcaccgatggaattgcgtctgttcaactatctggtcgagcgtaaagatctgattcagatcccagtgtatccgtttgaacgcgaatggacgcacttcaccagcatgacttacattgatgagttttcagaactgcatggcaaagatgttccggtgcgtgaagccctcgccggacaagtgcccagcgcaggcgtcggcacctgtttcagccgccgcgccgtgaccgcactgttagctgacggtaacggtattgctttcgacgtgcagagtcttactgaagattacgacattggcttccgcctgaaagaaaaaggtatgacggaaatttttgtccgttttccggtggtggacgaagccaaagaacgcgagcagcgtaaatttttacagcacgcacggacgtcaaacatgatctgcgtgcgcgaatatttccccgataccttttcgactgcggttcgacaaaaatctcgctggatcatcggcattgttttccagggctttaaaacccataaatggacctccagcctgacgctgaactactttctctggcgcgaccgcaaaggggcaatcagtaactttgtcagcttcctcgcgatgctggtgatgatccagcttttgctgttgctggcgtatgaaagtttgtggcccgatgcctggcatttcctttctatttttagcggcagcgcatggttaatgaccctgctgtggctaaactttggcttgatggttaaccgcatcgtgcagcgagtgattttcgtcactggctactacggcctcacgcagggcctgctttccgtcctgcgtcttttctggggcaacctgattaactttatggctaactggcgcgtgctgaaacaggttcttcagcacggcgatccgcgtcgcgtggcgtgggataaaacaacgcatgacttccccagcgtcactggcgatacccgctcgttgcgcccgttaggtcaaattctgctggaaaatcaggtcatcactgaagaacaactcgatacagcactgcgtaatcgcgtcgaaggtctacgcctgggcggttcaatgctgatgcaggggctgattagcgccgagcagctggcacaggcgcaggcagagcaaaacggcgtggcgtgggaatccatcgatgcctggcagatcccgtcctcgctgattgccgaaatgccagcctccgtagcgctgcattatgcagtactgccgctgcgtctggaaaatgatgagttaattgtcggcagtgaagatggtattgacccggtttcgctggcggccctgacgcgtaaagtcggacgcaaagtgcgttacgtcattgttctgcggggacaaattgtcacagggttacgccactggtatgcacgccgacgcggtcacgatccgcgggcaatgttgtacaatgcggttcagcatcagtggctcacggaacagcagaccggtgaaatctggcggcaatatgtgccgcatcagttcctgttcgccgaaatactgaccacgctcggtcatattaatcgttcagcaattaacgtgttgttattgcgccatgaacgcagttctctgccgctcggcaagtttttggtcaccgaaggcgttatcagccaggaaacgttggatcgcgtcctgacaattcaacgcgaattacaagtttcgatgcaatcactattactcaaagcaggtttaaacacagaacaggttgcgcaactggagtccgaaaatgaaggagaataa

SEQ ID NO: 475099 - DNA, 2973 bp, Shigella flexneri
atgaaggagaataaccttaatcgcgtcatcggatggtctggtttactgctgacgtctttattgagtaccagcgcactcgcagacaatatcggcaccagcgcagaagagctggggctgagcgattatcgccattttgttatttatccccgtctcgataaggcgctgaaggcacagaaaaataacgacgaagcaaccgccatccgcgaatttgaatatatacaccaacaggtgccggataatattccgctgactttataccttgcggaagcctatcgtcattttggtcatgatgaccgggcgcggctgttgcttgaggatcaactgaaacgtcacccaggagatgcccgacttgagcgcagtctggcggctattccagttgaagtgaaaagcgttacgactgttgaagaactgcttgcccagcaaaaagcgggcgacgctgcgccgaccctgcgttgtcgcagtgaagtcgggcagaatgccctgcggctggcacaattacctgtcgccagagcgcaactgaacgatgcgacgtttgctgcatcgccggaaggaaaaacgctgcgaaccgatctgctgcaacgggcaatctacctgaaacaatggtcccaggcagatacgctatacaatgaagcacgccagcagaacacattaagcgcggcagaacgccgtcagtggtttgacgtgcttcttgccgggcagctggacgatcggatcctggcactgcaatcacaggggatcttcaccgatcctcagtcatatattacttacgcgaccgcgctggcttatcgtggcgaaaaagcacgcctccagcattatctcattgaaaataagccgctgtttaccacgggcgcacaagagaaaagttggctctatctgttatctaaatacagcgccaaccccgttcaggcattggcgaattatacggtgcagtttgccgataaccgccagtatgttgttggcgcgacgctaccggtgctgttaaaagaaggtcagtacgacgcagcgcaaaaactgctcgccaccctccccgccaatgaaatgcttgaggagcgttatgctgtcagcgtggcgacccgtaacaaggctgaatctctgcgtctggcacgattgctgtatcagcaagaaccgacaaatcttccccgcctggatcaactgacctggcaactgatgcagaacgagcagtcacgcgaagctgccgatttattgctgcaacgctatcctttccagggcgatgcgcgtgtcagccagactttaatggcgcgactggcgtctctgctggaaagtcatccttacctagcaacgccggcgaaggtggcgattttatcgaaacccttaccgctggcggagcaacgtcagtggcaaagtcagttgccgggtattgcagataattgcccggcaatagttcgcttgctgggcgatatgtcgccttcctacgatgctgccgcctggaaccgtctggcaaagtgttatcgggacacgctacccggtgtggcgttgtatgcatggcttcaggccgaacaacgacaaccgagcgcctggcaacatcgtgcggtagcctatcaggcgtatcaggttgaggactacgccaccgcactggcggcctggcagaaaatcagtcttcacgacatgagcaatgaggatctgctcgccgccgccaacaccgctcaggcagcgggaaatggcgcggctcgcgatcgctggcttcaacaggcagaacaacgtgagctgggaaataatgctcaatactggtggctgcatgcgcaacgttatatcccagctcagccagaactcgcactgaacgatctcacgcgctcaatcaatattgccccttctgccaacgcttacgttgcgcgggcgacaatttatcgccaacgtcataatgttccggccgcggtgagtgatttgcgcgccgcgctggaactggaaccgaataatagcaacacccaggcagcgcttggttacgccttgtgggatagcggtgatatcgcacagtcgcgggaaatgctcgaacaggcgcataaagggcttccggacgatccggcactgatccgacaactggcctacgtgaaccagcgtctggatgacatgcctgcgacgcagcactacgcccggctggtgattgatgacattgataatcaggcgctgataaccccactgaccccagagcaaaatcagcaacgcttcaatttccgccgtttgcatgaggaggtcggtcgccgctggacgttcagtttcgattcttccatcggcttgcgttccggcgcaatgagtaccgctaacaataatgtcggcggtgcagcgcctgggaaaagctatcgtagctacggacaactggaagccgagtaccgcatcggacgcaatatgctgctggaaggcgacctgctctcagtttatagccgcgtctttgccgataccggagaaaacggggtgatgatgccggtgaaaaatccgatgtccggcaccggtctgcgctggaagccgctgcgcgatcagatctttttcctcgccgtcgaacagcagttgccgctgaacgggcaaaatggcgcatccgataccatgctgcgcgccagcgcctcattctttaatggcggcaaatacagcgacgaatggcacccgaacggttcaggctggtttgcccaaaacctgtacctcgatgcggcgcaatatatccgccaggatattcaggcgtggacggcagattatcgcgtcagctggcatcagaaggtagctaacggacagactattgagccttacgctcacgttcaggacaacggctatcgtgataaaggcactcagggcgcgcagcttggcggtgtcggggtccgctggaatatttggaccggcgagacgcactacgacgcctggccgcacaaagtcagtctcggcgtcgagtatcaacatacctttaaggcgattaatcaacgtaacggagagcgcaacaacgcgtttctcaccattggagtgcactggtaa

SEQ ID NO: 475100 - DNA, 213 bp, Shigella flexneri
atgttgatgttatttctcaccgtcgccatggtgcacattgtggcgcttatgagccccggtcccgatttcttttttgtctctcagaccgctgtcagtcgttcccgtaaagaagcgatgatgggcgtgctgggcattacctgcggcgtaatggtttgggctgggattgcgttgcttggcctgcatttgggtaatgctgccaacttactgatttag

SEQ ID NO: 475101 - DNA, 927 bp, Shigella flexneri
atgccaaactggtgctcgaatcgtatgtattttcctggtgaaccggcacagatcgctgagattaaacgactggccagcggtgcagtcacaccgctttatcgccgcgccacaaatgaaggtattcagctgtttctggccggaagtgccggacttctgcagatcactgaaaatatccgctctgaacagtgccccggagtgacggctgccggacgtggtgctgtatcgacggaaaatatcgcgttcacccgctggctgacacacctgcagaacggtgtgttgctggatgaacaaaactgcctgatgctgcatgaactctggttacagagcggtactggccagcgtcgctgggaaggattaccggatgatgccagggaaaccatcactgtgcatttcaccgcaaaaagaggtgactggtgtgacatatggggtaacgaggatgtatctgtgtggtggaaccgtctgtgtgacaacgtagtgccggaaaaaaccatgccgtttgacctgctgacggttctgccgacccgcctggatgttgaagtgaacggctttaatggtggtgttctgaacggtgttccttctgcatatcactggtatacggaacggtatggcgtgaagtggccttgtggatatgacctgaatatcagcagtcagggagaaaacttcattcaggtggatttcgacacgccgtggtgtcagccggaaagcgacgttattgcagaattaagccgccgtttcagctgcacgctggagcactggtatgccgaacagggctgtgatttctgtggctggcagttgtatgagcgtggagagctcgtcgatgtgctgtggggggaacttgaatggtcttccccgacagatgacgatgagcagccggaagtcaccggacctgcgtggatagtcgacaatgtggcgcattatggcggatga

SEQ ID NO: 475102 - DNA, 684 bp, Shigella flexneri
atgtcccgttttgtcctcggtaactgcatcgatgttatggcccgtattcctgataacgccattgatttcatcctcaccgatccgccatatctcgtcggttttcgtgaccgtcaggggcgtaccattgctggtgataaaactgatgaatggctgcaaccggcctgtaatgaaatgtaccgcgtactcaaaaaagacgcgctgatggtgagcttctatggctggaaccgcgtcgatcgctttatgtctgcctggaaaaatgcgggattcagcgttgttggtcacctggtcttcaccaaaaactacacatcgaaggccgcatatgtgggctatcgccacgaatgcgcctacatcctggcaaaaggccgtccacgtctgccacaaaacccgctgccggacgtgttgggctggaaatattcgggcaaccgccatcacccgacggaaaagcccgttaccagcctgcaaccgctgattgagagcttcacacacccgaatgcgatagtgctggacccgtttgcaggcagcggttcaacctgcgtcgccgccctccagtccggacgccggtatatcggtatcgagctgcttgagcagtatcaccgtgccggacagcaacgactggctgccgtacagcgggccatgcagcagggggccgcgaatgatgactggtttatgccggaggctgcgtaa

SEQ ID NO: 475103 - DNA, 222 bp, Shigella flexneri; identical to SEQ ID NO: 474768

SEQ ID NO: 475104 - DNA, 186 bp, Shigella flexneri; identical to SEQ ID NO: 474497

SEQ ID NO: 475105 - DNA, 216 bp, Shigella flexneri; identical to SEQ ID NO: 474498

SEQ ID NO: 475106 - DNA, 771 bp, Shigella flexneri
atgaatgaaacgctgaatgctctgatttgtcgtcacgcccgtaacctgctgctggcgcagggctggccggaagagacggatgttgaccaatgtaacccgaactatccgggctggatcagcatttacgtgcggctggatgcgccccggctggcgacgttactcgttaaccgccacgatggcgtgctgccgccgcacctggcctccgccattcagaaactgaccggaaccggagcggaacttgttctgtccggcagtcagtggcagtcgctgccgctacttccggcggacggaacgcaggtgtctttcccgtatgcctgtgaatggctgaccgaagacgaaatcagggcagttcttgatgcggtgcgcgatgcagtatgcagtgtcagttgccggggggcagaagatgcgcggcgtatccgggcggcgctgaccacaagcggtcagacgttgctgacccgccagacgcgccgctttcgcctggtcgtgaaggaaagcgatcacccctgctggctcgatgaagacgatgaaaacctgcccgtggtgctcgatgccatcctgaaccggggcgcacgtttttcggcggtggaaatgtatctggtcagcgattgtattgagcatatcctgtccagtgggctggcctgcgatgtgctgcgtataccggatgaaccgccccgccggtggtttgaccgtggtgttctgcgggaagttgtccgggaagcccgggccgaaatccgcagcatggcggatgccctggcaaaaatccggaaatga

SEQ ID NO: 475107 - DNA, 324 bp, Shigella flexneri
atggtgcatgtcatgcagcaaatgttcattaaaaccaaacttgttacgtaccgcgtcaaacaatttcggcatgaaatcgaggtatttctccgtcgaccacagctgctcttccggccactgtcctttggttgcgggttcataagccagacctttacctttcgacatgccgtaggtggttttcataccagggattccgcactgcacgcggatggctttgaatcccagctcctgatgacgggcataatcatccagagcttcatcaatactgtgaccggtggtatggcaataaaccatcaccccttcacgagacgcgccgccgagtaa

SEQ ID NO: 475108 - DNA, 990 bp, Shigella flexneri
atgaccatgattaaagatagctatcagttcggcattgagccagtacgtatcaccgacaccgacaacattcaggttaacgaaggtctgccaactaacgctgacccacaggtctatgccctccagttagctaagacggttaaggctatgctgaacggtgtacttaaagacgctcaggataacattccgttccctgtagaagtcctgcctacccgcaatagcctgcctaccccaatcatcgcccacaccctgtctgaccgctctgtggtcgtccctgtacgcggtggtgagcgacctgaagtcgtgaccgttccgtctggtcaggagattgtcgtcgaacctatcgaacaggcaatcctcatctcggagcaaactaaactgtgggacgccaagtcctccactggtttcactcatggcacactccagcaggacgctatgaacatctgtgagaatgtggtccgtaccatcaacgctcgcatggttgacgttctggagtcctccaagctgctgaagaccgtagagctgccagtcctgactggaagcctgaccactaaggcagacgctatcatggacgctctgtttgagaacaccgagtcctctttcggctctgaagtgtctgattacggcatcatcgcccatgagtcccaactgaaagcgctgtcccgtctggctgctaaacagggcttctctggtgaagacgctatcgtggatatgctgggtaccgacatcgcgtattacaacggtgaggacaaaggtgtgttcatgctggctaaacgcttcacggccctgagcttcggctgcttccgtcacgacggtgagaatattacggtcgtcctttcacgtgatggcgactctcagtcccacgacttggaaatcctcggtaaggtcttcgttgtcgctgaagctgctacgacagttaagctggacactggcgctgcaaccgcagtcctgcctgtagtcaaacgcctgaagttcaccaagaccgaagcgtaa

SEQ ID NO: 475109 - DNA, 375 bp, Shigella flexneri
atgacaaaagagctgacaggtaaagccctgtttatggcgctcaggagccagcgcccacctgccgggctaatccaccactctgatcgaggttcacagtactgcgcatacgattaccgggtcatacaggagcagtttggtctgaaaacatcaatgtcgcgtaaaggtaactgttacgacaacgctccgatggaaagcttctggggaacgctgaaaaatgagagcctgagccactatcgttttaataaccgggatgaagccatctcagtaatacgggaatacattgagattttctacaatcgtcagcgtcgtcactctcgtctggggaatatctccccggcagccttcagggaaaaatatcatcagatggctgcttaa

SEQ ID NO: 475110 - DNA, 1284 bp, Shigella flexneri
atgaatacccagtataattccagttatatattttcgattaccttagtcgctacattaggtggtttattatttggctacgacaccgccgttatttccggtactgttgagtcactcaataccgtctttgttgctccacaaaacttaagtgaatccgctgccaactccctgttaggattttgcgtagccagcgctctgattggttgcatcatcggcggtgccctcggtggttattgcagtaaccgcttcggccgtcgtgattcacttaagatttctgctgtcctgttttttatttctggtgtaggttctgcctggccagaacttggttttacctctataaacccggacaacacagtacctatttatctggcaggttatgtcccggaatttgttatttatcgtattattggcggtattggcgttggtttagcctcaatgctttcaccaatgtatattgcggaactggctccagctcatattcgcggaaaactggtttcatttaaccagtttgcgattattttcgggcaacttttagtttactgcgtaaactattttattgcccgttccggtgatgccagctggctgaatactgacggcaggcgttatatgtttgcctcggaatgtatccctgcactgctgttcttaatgctgctgtataccgtgccagaaagtcctcgctggctgatgtcacgcggcaagcaagaacagacggaaagtatcctgcgcaaaattatgggcaacacgcttgcaactcaggcagtacaggaaattaaacactccctggatcatggccgcaaaaccggtggtcgtctgctgatgtttggcgtgggcgtgattgtaatcggcgttatgctctccatcttccagcaatttgtcggcatcaatgtggtgctgtactacgcgccggaagtgttcaaaacgctgggggccagcacggatatcgcgctgttgcagaccattattgtcggagttatcaacctcacctttaccgtactggcaattatgactgtggataaatttggtcgtaagccactgcaaattatcggcgcactcggaatggcaatcggtatgtttagcctcagtaccgcgttttacactcaggctcgggtattgtggcgctactgtcgatgctgttctatgttgccgcctttgccatgtcctggggtccggtatgctgggtactgctgtcggaaatcttcccgaatgctattcgtggtaaagcgctggcaatcgcggtggcggcccagtggctggcgaactacttcgtctcctggaccttcccgatga

SEQ ID NO: 475111 - DNA, 315 bp, Shigella flexneri
atgaccgcgtttcgggaagaaatgtttggccccgttgctgcaatcaccattgcgaaagatgcagaacatgcgctggaactggctaatgatagtgagttcggcctttcagcgaccatttttaccaccgacgaaacacaggccagacagatggcggcacgtctggaatgcggtggggtgtttatcaatggttattgtgccagcgacgcgcgagtggcctttggtggcgtgaaaaagagtggctttggtcgtgagctttcccatttcggcttacacgaattctgtaatatccagacagtgtggaaagaccggatctga

SEQ ID NO: 475112 - DNA, 1959 bp, Shigella flexneri
atgcctgtaacgaagtgtgaaccagaaaccacccgcaaagcaagccgtaaatctgtaaaaacgcaggaaactgtcctgtctgccctgctggcgcagacggaggaagtgagcgtgccgctggcctcgctgattaaatcaccgctgaatgtgcgcacggtgccgtattctgcggagtccgtcagcgaactggcggagtccattaagggcgtcggactgctgcagaatctggtcgtgcataccctgcttggtgaccgttacggtgtcgccgcaggtggtcgccgactggctgcactcaacatgctggcagagcgtggcatcattccggctgactggcctgtacgcgtgaaggttattccgcaggagctggcgactgccgcatcaatgactgaaaacggtcatcgtcgggatatgcaccctgccgaacagattgccggattccgtgcgatggcgcaggaaggcaaaacgcctgcacaaatcggtgatttgctgggctattcgccccgccacgttcagcgaatgctgaaactggcagaccttgcgcctgtcatcctcgatgcgctggcagaagaccgcatcaccacagagcactgtcaggcgctggcgctggagaacgacaccgcgcgtcaggtgcaggtgtttgaagccgcctgccagtcgggatggggcggtaaaccggaagtacagaccattcgtcgtctggtgaccgaaagtgaagtggcggtggcggggaacagtaaattccgcttcgtgggggctgatgccttctcgccagacgaactgcgcaccgatttgttcagcgacgacgagggtggctatgtggactgcgtggcgctcgatgccgccctgctggaaaaactccaggctgtcgcagagttccttcgggaagccgaaggctgggaatggtgcgccggacgcatggagcctgtcggtgagtgccgtgaggatgccggaacataccgctgtctgccggagccggaagcggtgctgacggaggcagaagaagaacgcctgaacgaactgatggcacgttacgacgcgctggaaaaccagtgtgaggaatccgacctgctggaagcagaaatgaagctgattgactgcatggcgaaggtcagggcgtggacgccggagatgcgtgccggaagtggcgtggtggtgtcctggcgttatggaaacgtatgtgtccagcgtggtgtgcagttgcgcagtgaagatgacgcgactgatgacgctgaccgcacggaacaggtgcaggagaaagcgtcagtggaggaaatcagtctgccgttgctgacgaaaatgtcttccgaacgcacgctggcagtccaggcagcactgatgcagcaaccggacaaatctctggcactgctggcatggacgctctgcctgaatgtgtttgacagcggagcgtacagtaaaccagcacaaatcagcctggaatgtaaacattattcgctgaccagcgatgcgccgtcagggaaggaaggtgccgcattcctggcgctgatggcagaaaaagcccgtcttgcggccctgttaccggagggatggtcacgggacatgacgacgttcctgtcactcagtcaggaggtgctgttatccctgctcagtttctgcaccgcatgcagccttaacggtgtccagacccgcgagtgtggtcgcacgtcacgcagtccgcttgactcactggagagcgccatcggttttcacatgcgcgactggtggcagccgacgaaagcaaacttcttcggacacctgaaaaagccgcagattatcgcagccctgaatgatgccggactgtccggtgccgcacgggacgcagagaagatgaagaaaggcgatgccgctgaacatgcagagttccatatgaaagacaaccgctgggtgcctggctggatgtgttcaccacgtccacagacggatgccactgaacgcgccgataacctggctgatgccgcctga

SEQ ID NO: 475113 - DNA, 234 bp, Shigella flexneri; identical to SEQ ID NO: 15508

SEQ ID NO: 475114 - DNA, 237 bp, Shigella flexneri
gtggtcggcattatcccgcccgatctgccgtatcgcgccagtgaagatgaagtctcggcggtgtttgaaatgccgctcgcccaggcattacatctgggtcgttatcaccctttagatatctaccgccgtggcgattcacatcgggtatggctgtcctggtacgaacagtattttgtatggggaatgaccgcaggcataattcgtgagctggcgctgcaaattggagtgaacccctga

SEQ ID NO: 475115 - DNA, 615 bp, Shigella flexneri
atgtttttcgctgcggcgcgctgtctgaatggtctggcggcaggtgaatattttgaaggtcatacttcgatgatccgtcgcgatccgttgggggtcgtggcttctatcgcaccgtggaattatccgctgatgatggccgcgtggaaacttgctccggcgctggcggcagggaactgcgtagtgcttaaaccatcagaaattaccccgctgaccgcgttgaagttggcagagctggcgaaagatatcttcccggcaggcgtgattaacatactgtttggcagaggcaaaacggtgggtgatccgctgaccggtcatcccaaagtgcggatggtgtcgctgacgggctctatcgccaccggcgagcacatcatcagccataccgcgtcgtccattaagcgtactcatatggaacttggtggcaaagcgccagtgattgtttttgatgatgcggatattgaagcagtggtcgaaggtgtacgtacatttggctattacaatgctggacaggattgtactgcggcttgtcggatctacgcgcaaaaaggcatttacgatacgctggtggaaaaactgggtgcctgcggtggcaacgttaaaatctggtgcgccggatga

SEQ ID NO: 475116 - DNA, 363 bp, Shigella flexneri
atgcaacataagttactgattaacggagaactggttagcggcgaaggggaaaaacagcctgtctataatccggcaacgggggacgttttactggagattgccgaggcatccgcagagcaggtcgatgctgctgtgcgtgcggcagatgcagcatttgctgaatgggggcaaaccacaccgaaagcgcgtgcggaatgcctgctgaaactggcggatgttatcgaagaaaatggtcaggtttttgccgaactggaatcccgtaattgtggcaaaccgctgcatagtgcgttcaatgatgaaatcccggcgattgtcgatgtttttcgctgcggcgcgctgtctgaatggtctggcggcaggtga

SEQ ID NO: 475117 - DNA, 210 bp, Shigella flexneri; identical to SEQ ID NO: 9340

SEQ ID NO: 475118 - DNA, 228 bp, Shigella flexneri
atgaccattacgtctctggatggctatcgctggctgaagaacgatattattcgcggtaattttcaaccggatgaaaaattacggatgagtttactgacatcgcgttatgcacttggcgttgggccgttgcgggaagtactttctcaactggtggcggaacggctggtcacggtggtgaatcaaaaagggtatcgggtggcgtctatgtcagagcaggagctgctctga

SEQ ID NO: 475119 - DNA, 639 bp, Shigella flexneri
gtggctggagtgcttgaggggagattatctggcggtactgcagcggaattttgtaattctgcggtggttgcgttgcaggctgctggcctggatgtctgtcgtgagtatccggtgccagagcgtggtgacggttgcggagggcggattgatatcgtcgtgactgacaggaacggtgtccggtgtgggatcgagcttgaccgaaattctccgcgacagaaatcactgctcaaaatcggtgctgttgaaaccgggatatgtgtcttgcggcgcagtgatatcgcaaggcacaccgagcagggaattctggttatcggtggggctgttcgccagaaaaaatttgacccgttgtcagttgatctgcccgactggttgccagatacactctggcatgagtgggtccagttcaggcaggcattgcgaaaaccgattcgaacggagctgggcgctaacggggcgatacgggaactggaaaaattccgtcagcagggttttacacctgagcaggtgattcgacacagcatcgccaatgaataccagggtctgttcgcgccgaaaggtgttcggcctgagacgttgctccgacaggttaacaccgtctcgttgccggacagtgcgatcccgccaggcttcagggggtaa

SEQ ID NO: 475120 - DNA, 357 bp, Shigella flexneri
atggaaataaaaccagaagatgagttaagcaatatcgttttatttccggtaaaagaggatgacccacgtaatcaggttaattttctttatgaaccatcggaaagaccatattgccatcacgcctctgtccgggttgacgaaaaagagcgtcaggtccgctgtaaaatctgcggtgcggttgtggagccgtttgactggatgctctctgtggcaaaaagagaaaccagactggcagatgatgtaaggctattgcgccaggaggaacaggaaaggcggagaaatatagaaaagctgatacagattgagcgtaacgcgaaagcgcggatacgcagggcgacaaaatccagaactgaataa

SEQ ID NO: 475121 - DNA, 228 bp, Shigella flexneri
atgcttgtgcagattgcatgggtggcattctggtaccatgttggatatatcgtcacgttcctggtgaagcatatttccatcaaaacgaatgaccggttttacatggtctgcatgccacttttcgccaagttcgcagccgcaataagcgcagcgaccaccgaacttcatgcgcagttctgcacgttgttttttcgtcagtgccatatcagctttccttatacggattaa

SEQ ID NO: 475122 - DNA, 213 bp, Shigella flexneri
gtggaaaaaataaagaaactatttagtagcaaatacgcagtcatacgtcgtgatgacctgtcagttatagtcgaaatggattacttccctgaaaccccaaaatcaataatgtatcgtaatggtcgaaaggcaatttttttaccgatgagggtaagtgacattatgggaaatgataaactgctggatgaattgcgagtcagagcatcctgttag

SEQ ID NO: 475123 - DNA, 153 bp, Shigella flexneri
atgttgcagataatgttatttttgatgcatacgcgttataaatatcaaaaacacaaaccagataaatatcttatcaatatacaacaaagtttgaattattcaatttatagcagcacaaccaaacgccaaaaaaataataaccaagagctataa

SEQ ID NO: 475124 - DNA, 678 bp, Shigella flexneri; identical to SEQ ID NO: 471504

SEQ ID NO: 475125 - DNA, 267 bp, Shigella flexneri
gtggcgcagatcgcccgggaaaacggaatcaacgataacctgctcttcaactggcgccatcaataccggaaaggtggcctgctgccttccggaaaaaatatgcctgcactgcttcccgtgacgttaacgccggagcagataaatacaccgtccgacagtctgtgctgtgagctggttctgccggccggaactctcaggcttaaaggtaaactgacgccggcgttattacagatacttatccgcgaaataaaagggagcagccactga

SEQ ID NO: 475126 - DNA, 1308 bp, Shigella flexneri
atggacacctcactttctcatgagaatgcccgcctgcgggcactgttgcagacgcaacaggacaccatccgccagatggcgaaatacaaccgcctgctctcacagcgggtggcggcttatgcttccgaaatcaaccggctgaaggcgctggttgcgaaactgcagcgcatgcagttcggtaaaagctcagaaaaacttcgcgcaaaaaccgaacggcagatactggaagcacaggagcgaatcagcgcacttcaggaagaaatggcggaaacgctgggtgagcaatatgacccggtactgccatctcccctgcgccagtcttcagcccgtaaaccgttacctgcctcacttccccgtgaaacccgggtcatccgtccggaagaggaatgctgcccggcctgtggtggcgaactcagttctctgggatgtgatgtgtcagagcagctggagcttatcagcagcgcctttaaggttatcgaaacacaacgtccgaaactggcctgttgccggtgtgaccatatcgtgcaggcaccggtgccttcaaaacccattgcacgcagttatgccggagcggggcttctggcccatgttgtcgctggaaaatatgcagactatctgccgttataccgccagtcagaaatataccgtcgtcagggcgtggagctgagccgtgccacactggggcgctggacaggtgctgttgctgaactgctggaaccgctgtatgacatcctgcgccagtatgtgctgatgcccggtaaagtccatgccgatgatatccccgttccggtccgggagccgggcagcggtaaaacaaggactgcccggctgtgggtctacgttcgtgatgaccgtaacgccggttcggaaatgcctccggcggtctggttcgcgtactcaccggaccggaaaggtatccatccacagaatcatctggccggttacagcggagtgcttcaggccgatgcttacggtggttaccgggcgttgtacgaatccggcagaataacggaagccgcatgtatggctcatgtccggagaaaaatccacgatgtgcatgcaagagtgccaaccgacatcaccacggaagccctgcagcgtatcggtgaactgtatgccatcgaggcagaagtccggggatgttcagcagaacagcgtctggcggcaagaaaagccagagccgcgccactgatgcagtcactgtatgactggatacagcaacagatgaaaattcattcgctgaaaatggaatgtctccacggagaacactattatccatcgggaaatagtgcgggcaacagtgtttag

SEQ ID NO: 475127 - DNA, 567 bp, Shigella flexneri
atgcccgttaataaagccctgcaactcattgagatgctgaatgaacaccacattcacggtctgatgtatgtcgatgatgcaatggtctatgagcacccgaccgggcatgtcattcgcacgtctaactgggcgcaaaccctgccgccggaacagcgtccgactttcacacaagtcgcttctctggctgaaacgacgcaacaagttaacgccgtatggaagttcaccctgacgcacgatgacctgccgcaattgcagcattttggtaagcatgtcgaacatgaactgggactggagtgtgaatggtcctggcacgatcaggttgatattgcacacggcggcaacagcaaaggtaaacgtttgacgaaatgggttgaggcgcaaggttggtcgatggaaaacgtcgtggcattcggcgataactttaatgatatcagtatgctggaagccgctggtacaggcgtggcgatgggcaacgccgatgacgcggtaaaagcgcgcgccaacattgtgattggtgataacaccaccgacagcattgcccagttcatttatagccacctgatttaa

SEQ ID NO: 475128 - DNA, 918 bp, Shigella flexneri
atgaaaatatctcttgtcgttcctgtcttcaatgaagaagaagcgatacctgttttctataagacggtacgtgaattccaagagttgaagccatatgaagtagaaattatattcataaatgacggaagtaaagatgccacagagtcaattattaacgcgctggctgtttcagacccgctagttgttccgctgtcatttacacgcaactttggtaaagaaccagccttatttgcagggttagaccatgcaagcggcgatgctgtaattcctattgatgtcgacctgcaagaccctattgaggttatccctcatcttattgaaaagtggcaggctggtgctgacatggtgcttgcgaaacgttcagaccgctcaactgatggacgactgaaacgtaagacagctgagtggttctataagttacacaacaaaataagcaccccaaagatcgaggaaaatgtcggagattttcgactcatgtctcgtgaggttgtggagaacattaaactgttgcctgagcgcaatcttttcatgaaaggcatactgagctgggtgggtggtcagacagatgtcgttgaatatgtacgcgcagagcgtgttgctggcatctcaaaatttaatggctggaaattatggaatctggcactggaaggtatcacaagtttttcaacctttcctcttcgcgtatggacttatataggcttgtttgttgcaagcatttcgtttttatatggtgcatggatgattatagacacccttgtctttggtaacccagtacgcgggtatccctccatgcttgtatcaatacttttcctgggtggagtgcaactgatcgggattggtgttctcggtgaatatataggtagaatttatttagaaacaaaatcaagaccacggtacttaattaaaagcagaaaataa

SEQ ID NO: 475129 - DNA, 1266 bp, Shigella flexneri
atgaagatattcataatgcgcaattggcacaagatatcaatttttatacttgcatttactttgatttggcttaggcgcattgacattttgacaaatgcccagttttgggctgaggatgcagttttttggtataaagatgcatacgaacaaggttttttcagttcactcataaccccaagaaatggttattttcaaacagtatcaacactcattgttggtgcgacgacatttattaatccaatttacgcaccattattatcaaacttttttggaataataattagagctataattatatggttcttatttaccgatagatttaaattcctaagcaccacatcaaaaatcttcatctctgtatatttaatttgcatgcccgggcttgatgaagtccaagccaatataacaaatgctcactggtatttatcattgtatgttgcaatgataataatatctgaagaatccaagtcaaaattatggaaagcacatgatttattttttatagtattatctggattgagcggtccatttattatattcataattgcatcatctgtttttaaatatttacacttatcaaaaggagtaataagcataagaggtttatacttattttatactcgactgccatatttggcaatgatcttgtgtgggctgatacaggcaacatcaataattcttacatttaatggaacaagatcacatgctccattaggattcagttttgatgttatgtcatctataatatcatctaatgtatttcttttttcatttgtcccttggaatatcgctaatgctggatgggataatcaccttttatcgtacacactatcaactttagtaattacattatgtgttttcatttatattaaaggaaattggcaaatgaaagtgtttgccacccttccaatacttattgtcgcattttctatggcaaaacctcaactggcagattctgttcctcaactgccaacacttgcaaccggaaacgggtcaaggtattttgtaaatattcatattgcaattttttcattaatatgcgtttgtttgtttcaatgcataaagaataaaaccttaaaaatattctttaaaatctatgtttcagtcatccttattgcaatgataaaattaaacttttttataacccctcttcctgacatgaactggtctcaaggagcagaattaataaataaagcaaaacatggagaagccgtctcatttacagtgctccctccatggttaactcttgatttaataaaaaaataa

SEQ ID NO: 475130 - DNA, 1119 bp, Shigella flexneri
atggcagaaacgatatttaactgccatgcctcggatttcaacttaaagatgctcggtgatacagtcggggcaacccaacgtgtacacgcctatgattatctgggggacattacacttaaaggttcgggatcgtcttacggtcttctcgtaaccaataaagcatacactaaattagagaacattgtgtcttatgggcacactaccggcgaagggttgcgtacagactcggtgttaacgtcagagttagataatgtgtacttacagggtaaccgtattggctggcgcgcacttaactccagtgaagggtcagagcttaatgccattacagttaaccgattaactgcaagccagaatacacgatggggtatacttggtgatagatggggggcaggaactactatcaacagcctgacttgtgaaggaaatggtactcagggggattccggtacaggtggtgcgcaattagccataaatggccttaacggttcgtgtgctttggtgttaaacaacccatacttcgaggctaatgccgggggggcagaccttgctatagataatactgggacgcgacctgtaacggtagttataaacggtggaaattttcatcgcgtgagcagtgaacgctacacgcacacgaatatacaagtaacaagctcaggtgggggaaaagttatagtcttactcaatggcacaacgttccagagcgcaggggattatcagccaagtgcagatcgaccatactggataacagggaacaattgcgaattgatcgatattggttgcacctttatggaaataaccagtaaggccacatcggtttctgcagagtcagttacgcgctcagggagaattaacgccaatggtagtgtagacattgcgccgggtgtttcatccgttaacgcgcatgctactggtgtgtatgatgtaacgttttctcatccgctcgcagcagctactaatggttatgtggttcagataacacctatatctgcgcctgattcagttagttgtgatgttacttatattggtgtagatacatttagggtgaccctgcgcaatacgcttagcggagcaggaatctccagttcgtttgcatttagcattaccaggctactataa

SEQ ID NO: 475131 - DNA, 339 bp, Shigella flexneri
atgaatcgcgagaggatgctcaccatacgggttactgatgatgaacatgcccggttactggaacgctgtgagggtaaacagctggcggtatggatgcggcgggtctgcctgggtgagccggttgcccgttccgggaaactgccgacactggcaccgccgttactgcgtcagctggctgccatcgggaataacctgaatcagacagcgaggaaggtgaacagcgggcagtggtcttccggtaaccgggttcaggtggtggccgcactgatggccatcggggacgagctgcgccggctgcgtctggccgtcagggaacaggggacgcgggatgatagttaa

SEQ ID NO: 475132 - DNA, 519 bp, Shigella flexneri
atgagcaatcttttacagacgggtgcggagttcgagaaaaagctgaaagagagagccgaatctacagagaaaatgctgaacgacgagttcaggaagctcgaagaatctgtaagcaaggctgtgacatcaaacgagacgaaaatcaaagacgctatagccctgttcacagcttcgacagaggaatcactgaaaaaacaccgggaaggggtgaaagaggcgatgatgcagcacaggaaggacgtgttaaagctggcagggaatacgggcatgatgttactggggatggtcattttcctgtttaccgtgagtggcgggacgctctggtatcttggcgggatgatacaggcgaacctggaagaaatcaggaagcagaacgagagtctggagaagctgaacgcgaagacatggggcgtggagtttgtgcaggacgggaacaggaaatttctggtccttccttacgggaagtcagcagaggtgatttcctttcaggggaaggaatgggtacatctgaaggagtga

SEQ ID NO: 475133 - DNA, 1119 bp, Shigella flexneri
ttgaacagcgaaataaaggttatgtctaatagagatccgtcaattgatacattgcgagtaacagcctgcatttttgttattatatctcattatggctacatatttagccaaaccaggctatctttcataccatcattttatggaggggttcttggccaggtaggtgtgagcttgtttttttttatatctggatatttggcatttatttcactagatagaaagaacaccattgattatttccttgacaaaggagtaaggatccttactccttatattatcacttacttttttatctctttactcttaattttattgtcttatttaaataaagagataattaatacagtccctctcgtatcaataatgacaacaggaggccagtacactagaataattccagtattttttgcccttgatggtatattaaacgcccatttctcttatgattttcttttccttacaggcgagtggtttattgggtgcgttattatgctgtacgtgatatcaccgatagtttttcacgttatgaatacctttacatttaaacgtaacatattttttttatttgtgataacaattacaacattcccgatatcaaatatctcatcatcatttttaaacttcccattttggttttttgcttgccgacttcctgagtttatggttgggatgcttgcatttaaatacaaaaataaattacaaaaaaacaccacagttattctatcggttgttatatgtatattgacagtattattaatagggcctaatgagttcaaaacaaacatagtcaatcaccagttatcaataatacctttaatgtgcataagcattatcatttacaaagcagcattaataattaataagaaatttaacctctattttttcaactcatatgctaaatgcatctacatatccatgttgattcagcatgtagtaatatacagattaacatcaataattgaaattaataacgcttctgtttttgggtatttatttatactattaatggtgttttttttaactttctatttgtcaaagaaaatattaatacccacatcaaagattgaatcaattttaataaaaaagatgaacattataaacgcaaaaaaagctaattaa

SEQ ID NO: 475134 - DNA, 1608 bp, Shigella flexneri
atgctcaactcaagaacctacctttatcagcgtaatggtgtcttttacatccgtttcaggatgaagaccactggtcgccttaccgcttcgcttccttctcacaaccgttataaactagcgtcagtatctttacggaccaaggatagacgtaccgctatggctcactcccggcacatcaagtcagcacttaaagcaatccatgcagacaaccctaacgcctcttatgaggagctacgggagcacctgaagaccattgtcgagtgggaactcagtgtcagccgcgatgacctgaacgaccctgagtcctatcagctttacgttgaccagtacgacgatattaagtccaaccttcgggaagctgtagcgactgagcacctgactgtagaccagcatcgctatatcaatgacgttatcggtgtgcttaaagcctgtcaggatagactcaaaggtgatagctctggtctgttgtcttaccttgagcctgagactggcagtctaagaccgtccgtctccctatctgtattggcagaacctgaagtccctgaccctaaagctctgaccctcgcgtctctcattgagcagtacgagcaggagaacgcccagaactggaagccagcgaccctgagcgagaaccgagcgtcgcactccacgctaatcgagatattcgactatctggatattcaggacgtcagcaaggcgacccgtgcagatatgcttagggtccgtgaagtcctccaactgttaccgaagaactgcaaacaacgctttaaggctatgccgctgtctgacctgctgaaccgggagtctaagactgactgtctggatgtcgttaccatcaacaataaataccttatcaagatggctgctgtgtttaagtgggcggtacgcaacgacctgatagctaagaacctgacagaaggtcttgagctgaaagtcccgcagcgtaaagcctccgacgctcgtgatgcgttcagtcctgagcaggtagggcaactactggtcgcagctaaagcgtactcgcagaagacctcagggaagccataccattattacgtcaccgttctggctgcaatcactggagcgagacttaacgaggtggcccaacttcaggtcaaagacgtcaggaccactgaggccgggaccgtgtatatccatatcaacgaagacgatagcagcttgccgggtaagagcatcaagaacgcccacagtgaccgctgtgtcccgctggtcgatggcgcttatggttttgtattggctgactttatgtcgcttgtggaagaccgtagaaagactatgggtgataatgctatggtattcgatggcctcaagctgatgaagaacggctatggtgagcaggtgagcaaatggtttaaccgaacgttgctacctaaagtccttgctgaccgtagcggcttagcgtttcactcgtttagacatacagttgcgacccagctaaaacaacatgggggcgaattggcgtatgctcaggcgattatgggtcatagctctgggtctataacttacgaccgttacgcgaaagaggtcgaggtagatagattggttaatgtgatggcgggtgtttataaggagactggagtaaatggctga

SEQ ID NO: 475135 - DNA, 654 bp, Shigella flexneri
atggctgagtattatccggcagagtttggtggcactgcttttaactgcccgaattgtggcgcttattctcaacagcgctgggtccgcttaaaatatggcgctaacgggatttatgagacacctttcgccttttctaaatgtgaacgatgcaatgagaaagcttattggtatgacgaaaccatgattataccagcgtcagcaaacgttgagatgcctaacccagacatgccagacgactgtaagtccgactacatggaggccagaagcattgttaacctttctcctaaaggcgctgccgcactcctgcgcttaagtcttcagaagctgatggtccatctcggtgagccggggaagcatatcgacacggacattaagtcgcttgtagccaaaggattgtctccattggtccagcgagctgctgatatttgtcgtatcgttggcaatcaggcggtccatccgggtgaaattaatattgatgacgaccctcagttagcgcatggtctttttaagctgctgaatattattgtcactgagcagattaccagaccgaaagaagtcgaagccatgtttaacagcatgccggaaagggcgctcaagggcattgaggaccgggacaggaaggcgagggaacagcagcaggcagctagcgagtaa

SEQ ID NO: 475136 - DNA, 375 bp, Shigella flexneri
atgacgaaagagttgacgggtaaagccctgtttatggcgctcaggagccagcgcccacctgccgggctaatccaccactctgatcgaggttcacagtactgcgcatacgattaccgggtcatacaggagcagtctggtctgaaaacatcaatgtcgcgtaaaggtaactgttacgacaacgctccgatggaaagcttctggggaacgctgaaaaatgagagcctgagccactatcgttttaataaccgggatgaagccatctcagtaatacgggaatacattgagattttctacaatcgtcagcgtcgtcactctcgtctggggaatatctccccggcagccttcagggaaaaatatcatcagatggctgcttaa

SEQ ID NO: 475137 - DNA, 549 bp, Shigella flexneri
atggcggtgattggttattgcagggtatcaacacaagaccagactgtagacaaccagaaactacagatagagaaggttcacaaggtcgataaatggtttattgatgaggctgtctcaggagctacaaaggccaccagcagagatggttttagaaacatgatgaactatgtaaggtgtgacgatacgttagttgtggtagctattgaccgtttagggcgtaataccgttgatgtgctctctaacgtggaggcactacagactaaaggtgtgagggttgtttctctacgtgaaggttttgacttattaacaccaatcggtagagcaatgcttactatgatggctggtttagctgaccttgaaaaagaccttatcagtgaacgtagaaaggctggtattgaacgtgctaaagctgaaggggtacatatggggaggcctgtaaaagcttcttcagaggctgtacagacgcttatttcacaaggtaagacgaggttgcagattcaggaagaattaggaatctctagagcaacttattacagacttgctaaataa

SEQ ID NO: 475138 - DNA, 177 bp, Shigella flexneri
atggtaaatctccctcctgagctggggtcacctgatgtatgggctggtggaggtattggacttattgcagatctgctacttcgttacgtcctcgtcagagtgcttgttgtctttaaactgttcggtcgcacatggacgcttgaccttaaggataatgaccacacagccccccgttaa

SEQ ID NO: 475139 - DNA, 123 bp, Shigella flexneri
atgaaaacttttatcaaaactttactcgttgctgtaactattctgttctctgtcttcgctacggcgaaacaagtaaaactgccaaacaacatcaaatacgttaatactacagaggcgttttga

SEQ ID NO: 475140 - DNA, 678 bp, Shigella flexneri
atgcaattacctgtaaagttattaatgagccttatatctctggtcagcgttattgcacgtgccgggaaatataaaaattatatccgggatgaaataaaatactggcgatatacatcatacaagggtgggaaatttccggaaggtttcactgatgagaaattttccagcgccatttacaacggaagaatatttacaatgaaacgtttacataccctgatgttatttctggcggttctgtttactggctttaacgtggaagcagcgagcgtgaaacaagcgctcagctgcgacccaaacgcccgggctgaacaacctggagcgtgtccaacaacgtacgagttgtacgaaggtgacgctgcctacaaagctgcgcttgacaaagcattaaaaccggtcggactgagcggcatgttcggtaaaggcgggtatatggatggccctggcggaaacgtaacgccagtaaccattaacggtacagtctggctccagggcgacggttgcaaagccaatacctgcggctgggactttatcgtaacactctataacccaaaaacccatgaagtcgttggctaccgctactttggtttagatgacccggcctacctggtttggttcggcgaaattggcgtgcatgaattcgcgtatctggtgaaaaactacgtagctgcggttaactaa

SEQ ID NO: 475141 - DNA, 1071 bp, Shigella flexneri
atgagtacagaaatgaaaacggggctggtgctgtccggtggcggggcggtgggcgcttatcaggcgggagtggttaaggcactggcagagtgtgatacacagatcagcatggtttcaggggccagcattggcgcattcaatggtgccattatcgcggcctctcccgatctgtcagaagctgccgtacgcctggaagcgctctgggatcatctggggaataatcaggtgctgtcggtaaaccgattggtttacttttcattgctgaaaaaattgttccaggcaatgaacctctgccagatccccggacgtgcaggagcactgcttacgacgcttcttcgccatatatcgatactcaacgggtttgacaatctgatggctcagccgttgttgtcagatgagcccctgacagcgctgttggatcattatcttgatactgatgctctggcagacgggctaccgctgtatgtgtcgctgtaccccacagaagggggcatgcaggatattattgactgcattcgtgctgaactgggtgccggaaccacgaaaaacgccgtttttcagcatatccagagcctgccccgcggacagcagaaagaggctctgcttgcgtcagccgcgctgcccctgctgttccgtccccgtgaggttcaggggacaatgttcggtgatggtggtatgggaggatggcgaaatatgcagggaaatacccctgtgacgcctctggtcgatgccggatgcaatatggtgattgtgacgcatctgagtgacggttctttatgggatcgccaggcttttccggacaccacaatccttgagatccgtccccggaaaaggctgaaatatgcaggtgatggcgacaacagcggcggtctgctcagtttcacgttggcacataccgacgcctggcgtcagcagggctatgaagacacgatgctgacgatggagcatatccggaaaccgctggcagcacgtcaggtactgtcccggtcagaaacggtgttgcagaaaagtctggagataacggaagaggcagatttggcactgagaaacgcgatggcccggattaaataa

SEQ ID NO: 475142 - DNA, 906 bp, Shigella flexneri
gtgacttcaccatttattcaacaaattgctgataaccgggtatgtcaggtactcacctgtcttcctgaaaaatttgtggttgatttcgcaaacggaatcgatgttgcacaggagcatatccgcacggccggagagcgcacgttcttccggcgtttaaaagagggactgaccggcgaaggcgctgcacggcagaatgccatcaatgcttcggttgcacagggcgttgaggcgtccctgcgctggctgacggagctgacaacgtcacttgccaccacaaactacgcgattacccgggtaaacgacagggtcagttcactggtcagtgatactgccaggttggcgcattattccgcagatacacgggagcagttactcatcctggccgatcaggttcaccataaactgaatcatcttgaagaaaaactccaccgtgttgaccaggttcagcgggcgcagttacatcttgagcagatattctcatggtggagcgccgggcgatacgcgtcattttcccctgccggacgttgttatgtggcacttgaagagcttcgctggggcgcgtttggtgatgtgatacgtcagggcgaaacaggccaggttaaccagctactggatattctcagacataaagcattaacgcagatggcacaggagagtggcggtagtgcaaccgtgcgtctgaacactctggactggcttggtggtcagggccgggagcaggcagataacgagtggcatgacgcgattaactggctgggagactggtgcagtgaagagcagcatccggtgatctggtcaaccacgcaggctgcagaacacttaccggttcgcatgcctcgcctctgctctgcagaacgcctctctgaaagtatggtcgatgaaatatttcagaagggggctgcatga

SEQ ID NO: 475143 - DNA, 843 bp, Shigella flexneri
atgctggaggaagaaaattcagcgcagccccgggagagaaacgcattcgctttctttcacgatattttcggaaccggaaatcagcatgacaggatgcgggactttgatccggacagccccgaaataaaattcagtgatcgcagggaagcccttgaactgatgacgcaaatcgaatcgaccgtgaccagcctgcaccgagaggctgaagcacagttccggcctgagctggagaaaatcgtcagcgggattgaaacaggttttcgtggcacggccctgtacgccacagaaaacattgccggtcgcatcaatacccgcctggaggatgagggctttaccgtaaaaatcagttttccggcagtcagtcagttacaaacccggctcgcggtaaaaacaaatctgagtgcgcttatggaggaaagaacggagaccgtcacccgtcgccgtcggcagcgtggtttatggggaaagatttgtggagcgtttggcaccagtgactggggctgggaaacctataaagaggatgtgagccgcagtgttatcaatatcaacaccgtcaggaaggaagttatgtcactgacccgggcatatttcggggagctgcaggcatccattgagcaggatattaaccagcccgtccgccaggaaatcgatgcctttttctgcgcattcagggagaaagttgaacaactgcgtaacacgctgattcagagctctgaagatcataaacgcgatcagcaggcacaggaacggcttaccaggcgacttcaggcattaaatgaaagggttcctgagctcattactgacagtaaggcgctgagggaagagctggagacaatgctgtga

SEQ ID NO: 475144 - DNA, 228 bp, Shigella flexneri
atgcagaatgcagacaatatcagtgaatacctgtcgttacaccatcaggggctgatgcaaagtattcagtcactgcaggcgcatatcaccagcctgcttgaggatatccgggaaatagcagactgtcaggagcaggtgaccgctgatgtcagaatggccatggaggagatcgatgccagaacccgggaattactgacggggtctgcacctcactggaagaggagctga

SEQ ID NO: 475145 - DNA, 294 bp, Shigella flexneri
gtggcgcacgtcttcggtgaacgcactctggccacactggagcgtcttctgagcctgctgtcggcctttgaggtcgtggtatggatgacggatggctgtccgctgtatgaatcacgcctgaagggaaagctgcacgttatcagcaagcgttacactcagcgcattgagcgacataatctgaatctgagacaacatctggcaaggctgggacggaagtcactgtcgttctcaaaatcggtggagctgcatgacaaggtcatcgggcattatctgaacataaaacactatcagtaa

SEQ ID NO: 475146 - DNA, 342 bp, Shigella flexneri
atgtcagatatcgccgcaaatgttgtggtcagcatgccttcgcaactcttcactatggcgcgttcttttaaagccgtatccaatggcaaaatttatatcggaaaaattgacactgacccggtaaatcctgaaaaccagattcaggtttatgtagagaatgaagacggatctcacgtccctgtttctcagccaattgttatcaatgctgccggatatcctgtgtacaacgggcagattgccaaatttgtaactgagcaaggccattcaatggctgtatatgatgcgtatggttcgcaacagtttgaaccgccccgggtttcctggagagtgttttatctgtga

SEQ ID NO: 475147 - DNA, 261 bp, Shigella flexneri
atgtacagcaaatacgacgagtcacagtttcacttgagacttccgcatgaactccacgcgaaaattaaacagtgtgcgaagatgaataacagttcgctgaactcagagataattgcagcgattgaagaatcattggctaaacaaagctctgcatcagtttacattgacgatgcagagcgtatggcagaacaacaatctgatatggttaagaaaattgtctttgatacgctcaaggagctatataaaaaagacagcaactaa

SEQ ID NO: 475148 - DNA, 714 bp, Shigella flexneri
atggctaattaccgtgatttgttagagcaggctggcgcacgttacggtgtgccagaagggttgatgactgcactgggtgccaaggagtcttcttacaaccctgccgcagtaagctccgccggggctgtaggattgactcaggtcatgcctgggacatggcgtgatatgggttataccgatgagcaaatgcaaaaccccgaatatcaggctgacgctggcgcgcgctatctggcaaagatgtaccagcagtttggtaactggcgtgacgctcttcaggcttatcacgacggtcccggcaacgttatgaaggcaaagcgtggtgaatatacgccaggacctgaaggccgcggttacgttgatgatcgctttgctcaatgggctggtgacccggtgacagactcaacagtcgaacagcgcgccacctctgcaaaggtacatcctcagcaagaccctaacaacccgtttgcacaactggaagtacagtcatccgaacaagtatcggcatcaggtgtgcagtcagacccaaataatccatttgctcagattgagcagcaggcagccagtcagcagccacctcaacccgtaagttctgtcgcaccgaaacctgttcagcaacaaacagttaatcaggccaataatgcaccaacacgggaagaaccatcattgatgcaacaagctggcgattggctcactggtggtcaaagtgcagggtaa

SEQ ID NO: 475149 - DNA, 849 bp, Shigella flexneri
atgtaccaacagaacccgcggcagttcggcgaatttgtcgatcacctggggatgaacagtctcggacccgaaaaatactttgacctacaggataaaatgcagggtcgccaggttaccatgcgcggtcaggacctggattcgcaaaccgccgctcggaatcaggcaatcacaatgcgcgggcaagatatccaggcgaatttaggtcagcagcgcattaatctggacgcagaaacaaaccgcattaacaacgaaaataagcgccttgaccggatgctatcagcagaaactaacgacctgaagcgccaggaaatacagagccgcatagcagccaacaaccagcagttgcagcagaagcagcaagcgctaaatgatggctacaaagacggcatcaacaccctcacaaccagcatgttcactctgaacgatatcgttagttctccttcacttaagagcattacaggcttacgtggagtaatccccaacgttccaggctcacaggctgcagacactcaggcacgacttgatacctttaaatcccaagcatacctgacagcagttcaggccatgcgaggcatgggcgcactttctgatgccgagggcaaaaagctcgaccaggctgttggttcgctgcagaactcgcagagcgaggagtcctttcgtcgcaacgctggcgtcatcctgaacacgctcaaccagaagcgtaatgaggcggttggtaagtacgttcagcaaaacggtatcaagcgagtggaagcgcctcaggcttctatagattacctgaagcagcaccccgagctgtcaatcgacttcattaatcgctacggatatcttccatctttggggcagtaa

SEQ ID NO: 475150 - DNA, 306 bp, Shigella flexneri
ttgcgggaatttatcgacgaaaactccggtgaattttttgttcaggtctggggaaatggagccaacttcgacaacacgattttgcgccgttcatacgaacggcaggggatcccctgcccgtggcgttactacaacgatcgcgatgtacgcacaatcgttgagctggggaaagccatagacttcgatgccagaacggctattccattcgaaggtgagcgccataatgcacttgatgacgctcgttaccaggcaaaatacgtttcagctatctggcaaaaactgatcccgagtcaggctgatttttaa

SEQ ID NO: 475151 - DNA, 204 bp, Shigella flexneri
atgagcagcttatttttaaccgaagatgaattgctaatattaacgggctgcaaatatgcaagccaccagcgaaaatggttaatggaaaacgggcttccgttctataccaatcgtagtggcaaaccgattgtcagccgggagctatttacctgcaataaaactttaccaccacacgaggtagagccgaattttggtgcgatctga

SEQ ID NO: 475152 - DNA, 936 bp, Shigella flexneri
atgttgcctaatagaatattattttctttaatgctgatagtttcatcaggcgtggtggcaagtaagaaagcgcatgaattgtatgacagcatatacggtggtaaatctgctcccgatgttataaatacactgcataaaatggctgaatcgggagatatcgacgcgcagagcctgttaggctgggaatattatcagcctcgctatgataccaaacctgatgttcaggaagcgattaaatggttcgagttagccgctaaacaaggtgacagagaagctccgttagcgctggggagtatctactacgacggtgagcaggtgcgggtggattatgccaaagcgtatgcactatttaatcaggccgcgcagcaaggtatgaatttagcatggtccaggttgggcatgatgtacgccaatggtcagtatgttgaggtagattgtaagaaagcgaaggaataccttgataaaggtgtccacatttatggtggcccggaagactttctggctacttgtcgaaaagacatgattgacagaaaaacggttgaggatacgttacccgtgatcacggttacccgttctgggatgcgggataattttttagataaaggtttttcctgcatggatagcctcttcgccaccaccaataaattaggcgaagtggccaatcttcgcgtgacattcagcattcgtcgcccatccggtaaggagattaaccaaacggttggcttcgcgcctttcggtttaaaccggctgaatattagctttactgattacctatttggttcatttaccagtaattcgtctcttattctttataaaccggaatttgagcgaaaatcttgtgcaactgtaaggaccacaatcgttgccgcaacggcaactattaacggcaaggatgtggagttgctgaaagcgggggcaattgaacaaaagtggtaa

SEQ ID NO: 475153 - DNA, 891 bp, Shigella flexneri
atgatgtttaagcaatacctgcaagtaacgaaaccaggcatcatctttggcaacctgatctcggtgattgggggattcctgctggcctcaaagggcagcattgattatcccctgtttatctacacgctggttggggtgtcactggttgtggcgtcgggttgtgtgtttaacaactacatcgacagggatatcgacagaaagatggaaaggacgaagaatcgggtgctggttaaaggcctgatctctcctgctgtctcgctggtgtacgccaccttgctgggtattgctggctttatgctgctgtggtttagcgcgaatccgctggcctgctggctgggggtgatgggctttgtggtttatgtcggcgtctatagcctgtacatgaaacgccactcagtctacggcacattgattggttcgctctccggcgctgcgccgccggtgattggctactgtgcagtaaccggcgagtttgatagcggcgcagcgatcctgctggctatcttcagcctgtggcagatgcctcactcctatgccatcgccattttccgctttaaggattaccaggcggcaaacattccggtattgccagtggtaaaaggcatttcggtggcgaagaatcacatcacgctgtatatcatcgcctttgccgttgccacgctgatgctctctcttggcggttacgctgggtataaatatctggtggtcgccgcggcggttagcgtctggtggttaggtatggctctgcgcggttataaagttgctgatgacagaatctgggcgcgcaagctgttcggcttctctatcatcgccatcactgccctctcggtgatgatgtccgttgattttatggtaccggactcgcatacgctgctggctgctgtgtggtaa

SEQ ID NO: 475154 - DNA, 1227 bp, Shigella flexneri
atgtctccttgtaaacttctgccattttgtgtggcccttgcgctaactggttgttcactggcaccggattatcagcgtccggtaatgcccgtaccgcagcagttctcactcagccagaacggcctggttaacgcagcggataactaccagaacgcgggctggcgcaccttttttgttgataatcaggtgaagacgctgattagcgaggcgctggtgaataaccgggatttgcgcatggcgacgctgaaagtgcaggaggcacgggcgcaatatcgtctgaccgatgccgaccgctacccacagctcaatggcgagggcagcggcagctggagcggcaatcttaaaggcgattcagccacgacgcgggagttctcgactggccttaacgccagctttgatctcgattttttcggtcgcttaaagaacatgagcgaagccgagcgccaaaattatttagccactgaggaagcccagcgcgcggtgcatattttgctggtttctaatgtcgcgcaaagctatttcaatcagcagctggcgtatgcgcaattgcaaatagccgaagaaacgctgcgtaattatcagcagtcatatgcgtttgtcgaaaaacaactgttgaccggtagcagcaatgttctggcgctggaaaaggctcgcggggtgatagaaagtacccgcagtgacatcgctaaacgtcagggggaactggcgcaggcgaataatgcattgcaactgttattgggaagctacggcaagctaccgcaagcgcagacagtaaacagcggcagcctgcaaagcgttaaattaccggcgggcttgtcgtcgcaaatcttattgcagcgcccggatattatggaagctgaacacgcgttaatggcggctaatgctaatattggtgctgcgcgtgcggcatttttcccgtctatcagcctgaccagcggaatatcaaccgccagcagcgatctgtcgtcattatttaacgctagcagcgggatgtggaattttattcctaaaattgagatccccatttttaatgccggacgcaaccaggccaatctggatatcgccgaaattcgccagcagcagtcggtggtgaattatgaacagaaaatccagaacgcctttaaagaggtggcagatgcgctggcattacgtcaaagcctggacgatcaaatcagcgcccagcagctggatttgcccctatatttccagacatctgttatcacttaa

SEQ ID NO: 475155 - DNA, 291 bp, Shigella flexneri
atggtgaaacagttcctgagtcgtgacccgttcgaatgcgtgctgtgcgggagtcagatgcgttttacggggctgaagcggggctaccgtctggcagagcaggtcctgatgcatgagccgcagaggggaagttgcgtccattttgagggaaacggagcaaaaaaccgccattcataccctgaatcaatcagagccatccagtttaatcgtcggttccgttcatatgtagcaaaagtggtgttgaagaaacatccgttttgtggtgtttttttaatctttttggggttttaa

SEQ ID NO: 475156 - DNA, 366 bp, Shigella flexneri
atgaagtatgtctttattgaaaaacatcaggctgagttcagcatcaaggcaatgtgccgcgtgctccgggtggcccgcagcggctggtatacgtggtgtcagcggcggacaggaataagccctcgtcagcagttccgtcagcactgcgacagcgttgtcctcgctgcggcctttacccggtcaaaacagcgttacggtgcaccacgcctgacggatgaactgcgtgctcagggttaccactttaacgtaaaaaccgtggcggcaagcctgcgccgtcaggggctgagggcaaaggcctcccggaagttcacgtataggaaattgaaaaaccagacgataccgctgtccacgccttatgccacgtga

SEQ ID NO: 475157 - DNA, 504 bp, Shigella flexneri; identical to SEQ ID NO: 474723

SEQ ID NO: 475158 - DNA, 234 bp, Shigella flexneri
atgcttcatgaagaaaaactggcacgtcatcaacgtaaacaggcgatgtatacccgaatggcagccttcccggcggtgaaaatgttcgaagagtatgacttcacgttcgccaccggagcaccgcagaagcagctccagtcgttacgctcactcagcttcatagagcgcaatgaaaacatagtcttactggggacatctgacatcacaaatccccgggtggggatttgtgtataa

SEQ ID NO: 475159 - DNA, 291 bp, Shigella flexneri; identical to SEQ ID NO: 464287

SEQ ID NO: 475160 - DNA, 1365 bp, Shigella flexneri
atgtcattattcacagaacctaaggaaattgaaagattaccctctgaagagattgaacgattatatcccgtcctgcgatacagggtctttatcagcattttcctcggatatatggggtattattttgtccgaaacaccaccagtgtgttatccggtgtgctgcacatgtctgcaaccgagatcggcattatctcctgtgccggttttttatcctatggtatatcaaagtttgtttccggacttatttctgacagaagtaattcaaaagtatttttgtctcttggtttattcctgtccggactggtaaattttctgataggatatattcccgggatcatcacatccgttacgttattttcaacaatgtatttacttaacggctggatccaaggtatgggatatcctcctggtgccaaaacactggtgttctggtatgaacatcgggaaaggatcacctgggccacactgtggaatttatcgcacaatgtcgggggagctctggcccccgttctgattggtttcagttttggttttttcggcgacagtgctctggagcatgcccgggccgcatttatcttcccaggagtactgtgtatggcaatgagtgtgctgatttactttattcaggtggacagacctgtatcagtggggcttcctcccattgaagaatggaaaggtaacgtcgtttcacacccggctaaaggccgtgaacaaggtccgagactctccattcctgatatcatcagaaaacatatcatccgaaataataaactcatttactgctgtatctatggttcgtttgtttatattctgagatacggtattgtttcctgggctcctaagtttttaagtgacagtctggatgtcggtggtaaggatatgggaaaactggcatcaatgggggggttttctgtttttgaaatcggtggtgtggctggtatgcttcttgccggatacctgtctgtcagactgttcagaaactcaaaaccattaacaaatactttatttctggcacttaccattattttattaatcgcgtactggtacgtgccatcaggcaatgaatatctctggctaaactatacaatccttattctgttggggctggcagtgtatggtccggtgatgtttattggtctttattcaatggagcttgttcctaaagaagctgccggagccgcatcagggctgtcaggcacattttcctatatcttcggctcaattgttgcgacactgggaatgggacttgttgtcgattatctgggatggggggccacatttatcgtactgatactgtctgctgtttttgccatcattttcacactgatgagtcgtgaacgctcactggagttcgaaaaagagtaa

SEQ ID NO: 475161 - DNA, 276 bp, Shigella flexneri
atgaacccgtcgcaacatgctgaacagtttcagagccagttagagaactatgtgccacagttcactcccgaattttggccggtgtggttgatcattgccggagtattgctggttgggatgtggttggtgctggggctgcacgccttgcttcgtgctcgtggcgtgaagaaatcagccaccgatcatggtgagaaggtttatctttacagcaaagcggtcagattatggcactggtcgaatgcgttactctttgtattgttgctggcaagtgggtaa

SEQ ID NO: 475162 - DNA, 1821 bp, Shigella flexneri
atgggtggcttttttgcagcgcaaatgaaattcgctggatacgacgtcattattatcgaagggaaggcgaaatcaccggtatggctgaagattaaagatgacaaagttagcctggaaaaagccgatttcttatggggaaaagggacgcgcgcaacgacggaagaaatttgtcgattgaccagtcgggaaacctgtgtggcggctattggtcaggctggggaaaaccttattcctctctctggcatgttgaatagccgtaaccacagcggcggtgcgggaactggcgcaataatgggttcgaaaaacctgaaagcgattgcggttgaagggacgaaaggggtcaacattgccgatcgtcaggagatgaagcgtctcaatgattacatgatgactgaacttattggtgcgaataacaaccatgtcgtgccaagtacgccacaatcgtgggcagagtattcagatcccaagtcacgctggacagcacgtaaagggctgttttggggcgcggctgaaggtggtccgattgaaacgggtgaaattccgccaggcaatcagaatacggtcggctttcgtacctataaatccgtttttgacttaggaccggcggcagagaaatacacagtaaaaatgagcggctgccactcttgcccgatccgttgtatgacccaaatgaatattcctcgggtgaaagagtttggcgtgcccagcacaggtggtaacacttgtgtagcaaactttgtccataccaccatcttcccgaacgggccgaaagattttgaagataaagacgatggtcgtgtgattggtaacctggttggtctgaatttgttcgatgactacggcttatggtgtaactacgggcagttgcatcgcgactttacttattgttacagcaaaggtgtgttcaagcgtgttctgccagctgaagagtatgcagaaattcgctgggatcaactggaagcgggtgacgttaacttcattaaagatttttactaccgtctggcgcatcgtgtgggtgagctgagtcacctggcttatggttcatatgccatcgcagaacgctggaatttgggtaaagagtactggggctacgcgaaaaataaactctggtcgccgtttggctatccggttcaccatgccaatgaagcgtcagcgcaggtcggttccattgttaactgtatgttcaaccgtgactgcatgacgcatacccatatcaactttattggttccggcttgccattgaaactgcaacgtgaagtggcgaaagaactttttggttctgaagatgcttacgatgaaaccaaaaactacacgccaatcaatgacgcaaaaattaaatatgcaaagtggtcgctgttgcgggtctgtttgcataacgccgtcaccctgtgcaactgggtctggccaatgaccgtttcgccgctgaaaagccgtaattaccggggcgatctggcgcttgaagccaaattcttcaaagcgatcaccggcgaagagatgactcaggaaaaattagatttagctgcagagcgtatctttacgttgcatcgtgcctacacggtaaaaccgatgcaaaccaaagatatgcgtaatgaacacgatcttatctgttcctgggttttcgacaaggatccgcagatcccggtctttactgaaggtactgacaaaatggatcgtgacgatatgcatgcttcgctcacgatgttctacaaagaaatgggctgggacccacagcttggttgtccaacccgcgaaacattgcagcgtctggggctggaagatattgccgccgatctggcagcacacaatctactgcctgcgtaa

SEQ ID NO: 475163 - DNA, 303 bp, Shigella flexneri; identical to SEQ ID NO: 473532

SEQ ID NO: 475164 - DNA, 1128 bp, Shigella flexneri
gtgaaggaccgtaatgggtccgaagcaaagggcttgccccattgtgctgatggtgcggcggcaaccacgggcgacaatgccgatgggaggactgctgtaaaatcggcaaagccatttcctgtaagtaaacgacaggtatgggaagcttataaacgagtaaaagccaaccgtggggcggcaggcattgacgggcagacactggccgggtttgacgagaatgttacagacaatctctacaaactgtggaacagaatggcttccggcagttatatgccgcaggcggtaaggcgtgtggacattcccaaagctgacggtggtgtacgtccgctcggtattccggccgtgtcggaccggatcgcccagatggtcgttaagcagatactcgagccggtactggaacccctgttccatgcagactcgtatggttatcgaccgggtaaatcctcacaccaggcgattgcgcaggcgaggaaacgctgctggaagtttgactgggtggtggaagtcgatattaaaggcttctttgatgatatcgatcatgacctgctactgaagacagtgcagcatcatactcaggcacgctgggtggtgatgtacattgagcgcaggctgaaggcaccggtgcaaatgccggatggagcaatgctggcacggggtcgaggaacgccgcagggcggcgtaatctcccccctgctctcaaatctgttcctgcactatgcctttgatatgtggatgcaacgtcagtttcccggcgttcccttcgaaaggtacgccgatgatgttgtatgccactgtcacagccagtggcaggctgacgctctgataagtggactgaggcagcggcttgcgcaatgcgggctgcagctgcatccgcaaaaaacacgaatagtttactgtaaggatgctgaccgacggggggactacccggaaacgagcttcaactttctgggctatacattccggccgcgtctgtcgatgaatcgctggggtaagaccttcgttaacttcagtccggcgatgagtgccagagcaggaaaagcaatccgtcaggaggtgaggagaatcgcagtgacaagtccttgtacgagctggcgcatatgttcaatgcgaaaatcagaggctggataa

SEQ ID NO: 475165 - DNA, 558 bp, Shigella flexneri
gtgactcgacttgtagtacattgttcacgaatgagtgatgcaacaaggctgaagaacaggttatcggtgcgcttctcggaagtcgggttggtcctgaacgcagggaagacgaatatcgcctacattgacacgtttaaaaggagaaacgtcgctacgagtttctcctttctcggatatgacttcaaagtgcgtactctgaagaatttcaaaggcgaattgtacagaaaatgtatgccgggtgcatcaaatgcagcaatgtgcaaaataacagaaacaatcaagaagtggcgtatacatcgctcaacagctgaaagtttgctggattttgcgaggcgctacaatgcgatagtgagaggctggattgagtactatggaaagttctggtccagaaacttcagctatcgactgtggagtgcaatgcagtcacgtttgcttaagtggatgcagtctaaatacagactttcgaaccggaaggctcagcgaaagctggcgctggtaaggaaacagtatccgaagctatttgcccactggtatttactacgtgcatcgaatgagtga

SEQ ID NO: 475166 - DNA, 963 bp, Shigella flexneri
atgtatatcgcgaaaaataatcgcatgttttacgccttgctgattgcaatttcggcacaaagcgtgggggtttttgcgttaattcaggcgggcctactgacttacgaagccggggcgttcccgtggcttggtactgttataggtgggtatcttttcgggctgggaattgttctggcgggtggatgtgccaccgggacctggtatcgcgcgggtgagggattgatcggcagttggatcgcgcttttcacttatatggtgatgagtgcggtgatgcgttctccacacgccagtggtttaaatcaaaccttgcagcactacactactgaacataactctattgctgagacttttaatttgtctgtgtggccgttggttaccgttttgctggtgataacgctctgggtggtgatgaaagagttgaagaagccaaaactcaaagtcgcgaccttaccgccgcgccgaaccgggatcgctcatattctgtttgaaaaacgctggcatccctttgtcactgctgtactcatcggtttgattgcgcttttagcctggcccctgagtgaagcaaccggacgcatgtttgggttaggagtcacttccccaacggccaatattctgcaatttctggtcgcgggtgacgtgaaatacattaactggggcgttttcctggtgttagggatcttcgtgggggcatttattgcagccaaagcgagccgtgagttccgcgttcgcgcagctgatgcacaaacaacattacgtagcgggttaggtggtgtactgatgggcttcggtgccagtattgcaggtggttgctctatcggtaatggactggttatgactgcaatgatgacctggcagggctggattggccttgtatttatgattctcggagtctggactgcgtcctggcttgtgtatgttcgaccgcagcgtaaggcgcgactggcaactgctgcggcaaattaa

SEQ ID NO: 475167 - DNA, 543 bp, Shigella flexneri
gtgaaagaaagcaatcagcgatggtgctctgacggggtcgagttctgctgtgataacggagagagactgcgtgtcacgttcgcgctggactgctgtgatcgtgaggcactgcactgggcggtgactaccggcggcttcaacagtgaaacagtacaggacgtcatgctgggagcggtggaacgccgcttcggcaacgatcttccgtcgtctccagtggagtggctgacggataatggttcatgctaccgggctaatgaaacacgccagttcgcccggatgttgggacttgaaccgaagaacacggcggtgcggagtccggagagtaacggaatagcagagagcttcgtgaaaacgataaagcgtgactacatcagtatcatgcccaaaccagacgggttaacggcagcaaagaaccttgcagaggcgttcgagcattataacgaatggcatccgcatagtgcgctgggttatcgctcgcaacgggaatatctgcggcagcgggcttgtaatgggttaagtgataacagatgtctggaaatatag

SEQ ID NO: 475168 - DNA, 342 bp, Shigella flexneri
atgacagacattacagccaatgtgatcgtatcgatgtcttcgcaactcttcactatggctcgttcttttaaagccgtagccaatggcaaaatttatatcggaaaaattgacactgacccggtaaatcctgaaaaccagattcaggtttatgtagagaatgaagacggatctcacgtccctgtttctcagccaattgttatcaatgctgccggatatcctgtgtacaacgggcagattgccaaatttgtaactgagcaaggccattcaatggctgtatatgatgcgtatggttcgcaacagtttgaaccgccccgggtttcctggagagtgttttatctgtga

SEQ ID NO: 475169 - DNA, 1842 bp, Shigella flexneri
atgaaagtaactgcaaacggtaagacatttacctttcctgatggtacgagcaccgaagatattggcaccgccattgatgagtattttgctggtcaggctgttcagcaacaaacagttaatcaggccaataatgcaccaacacgggaagaaccatcattgatgcaacaagctggcgattggctcactggtggtcaaagtgcagggcaaattgcagaacaggctggtcgtggtctggtaaacataccatttgacgtattgcagggcggcgcaagtctgattaatgcaatcagtcaggggcttggtggacccaaggttttggatgatgtttatcgtccagtagacagaccgacagacccctacgcgcaagccggtgaaacaattggtgggtatttagttccaggagttggaacggcaggaagcatggctattggatcactggcagaggccgcaaatcagaaaggcgatttcgcacaaaatgcagctaaaaatgccggagttaaccttgccgctcagggtgttctttccgcagcagcaaagggaatagggcgtggaataacggctataaaaggtgatattgcgccagaagtggcgaagaaaattgccacatcagaatcgatgggcgtgacaccaatgacatctgatgttatcccgccgaaaaatgctttcactcgcggcctaactcaggatgccgagggggctttgctcgggacaggctcaaagcgagcggagcaatatgcaacgcgtagtaagctggtaagtaattattttgaccgttttggtgagtacaaccctgatgatgtggtgaaatctcttaccaccacgttaagggggcggaaggatgccgctggcgctgttatcaatgacgtcaccaataaaatgggtaatgccgcagttgataccacaaataccatgaatgctctgaatacagcgatcgcaagacaggaacggcttgggacgtctgccaatcaaagcctgcttacatccttgcgtaacctacgtgaagaattagcaaaccctgcaactgatttggatgttacgtttgatctcttgcgtcagcacagaacagcatttagatctaatgttcagggagatgctatggtcttccccaaccaggcaaaagcagctaccaatatggtagagaatgcaatgtcaaaagaccttcgtaacgcagttgctaaaaacctcggtgcatcagacgcagcaaaataccttaaagcaaattccgattatgcaaacgtttataataaggtgcttaataaaaacattgctaacaagctcaacaaggcaagcagtgaagccagtcctgaacttataaataccgttgtattaagcagaaaaccatctgacgtgaaacgaatctggagcgcactggatgataaagggaaagatgctatgcgtgcagcttacgtcagcaaaatagcggaaaaggccggtgactctccagccaagttcatcactgaagttaataagctgaaatctcagtcaggcggtgaaatttacaacactattttttctggaaagcacatgaaagagcttgatgctcttcatgaagttctacagcaaacagcaaggtcagacaccgcaaatgtagtaactcagacggggcaatcgcaagccaacaggataaggacgattggcgcaactgcgactcttggtgtatcaatggggcttgaggctggttttggtgcaatgatgcgtttgtatgagtccaaagccgcaaggaatatgcttcttcgtttggcaaacaccaaagcaggaacggcagcttatgaaagagcgttaaataatgctgcaaatgcgatacgccctatactttcaagccaaattacagcagaacaatag

SEQ ID NO: 475170 - DNA, 996 bp, Shigella flexneri
atgcaatcatggctgcaaaacaacgccaatgagctggcgcgcgtcggtgttggccctaacagcgttgctcagatgtatcagcagaatccttcaggatttggtgagtttgttgatcaccttggaatggctgctcttggtccgattgattacttcaatgttcaggacaagatggctggtcgtgaaattgaccgaggcaggctggcagagacaatccgcagcaatcaggctggagaagcacttcaggcgagagggcaaaacctttcctatcagtcagcaatgactgggcacaatatcgcagcacaacgcttggctctggatcagcaagagttcgggtttaagatgcagcaagcgcaggaaaaggctcagcagttgattagcgaagcacctaagctgtcagtaaacatggaaaaaggcatcgagacggctgtaaacaatgctacagcatcatcaaactcagccaattctatgagtgcgcttgctcaacagttcagagcagaaaaaccaacgacaggtttgttcggtaacgcacagaacatgttcgcaaaacttaccggaagcgatacaacattgcgtgatttgcgcattcgccaaaatgcccttgttaacagtcaggttcttaaattcctacctcccggcccagcaacggataaagacgttgagatcgttcgacagggtgcgccaactgacatggataaccctgagacggtcgcaagatggcttgatgcaatggcaaaccttgagcgacgaaacgcgcagtttaatgagtttaaagccgagtggatgagcgcgaatggcaaccctggacaatcgcgtaatggcggtcagatattggggttggatgttaaaaaaggtgaatcattggggagtgccgttaagcggtatatgtcaatgaatactgacgcagcgccagcacaagattcgacaccttcaggagaaccacggaatcaggttggatcatatacctcaaaatcaggcattcaatttacggtggaatga

SEQ ID NO: 475171 - DNA, 726 bp, Shigella flexneri
gtggtcgttcctgtccgtggtggtaagcgacctgaagtcgtgaccgctccgtctggtactgaaatcaccgttgagccgattgaacaggctatcctcgtgtctcatcagacaaagctctgggaccagaagtcctctactggtttcactcgggggacgctccagcaggatgctctgaacatctgcgataacgtggtccgtaccattaactctaagatggttgacgttctggagtcctctaagctgctgaagaccgtagagcttccggtcctgactggtagcctgaccgctaaggcagacactatcatggacgctctgtatgagaacaccgagtcttctttcggttctgaggttactgattacggtatcatcgcccatgagtcacacctcaaggctctttcccgtctggctgctaagcagggcttcggtggcgaagacgctattgtcgatatgctgggtacagacatcgcctactacaacggtgcagaccgtggcgtcttcatgatggctaagcgctttacggctctgagcttcggttgcttccgtcacgatggcgagaatattactgtggtcttatcccgagatggcaacacccagtctcacgaccttgagattctcggtaaggtcttcgtggtcgctgaggctgcaacgactgttaagatggggactggcagcgctgctgctgtcctgcctgtagtcaaacgcctgagctttactaagacaagctaa

SEQ ID NO: 475172 - DNA, 300 bp, Shigella flexneri; identical to SEQ ID NO: 84330

SEQ ID NO: 475173 - DNA, 585 bp, Shigella flexneri; identical to SEQ ID NO: 460740

SEQ ID NO: 475174 - DNA, 1206 bp, Shigella flexneri
atgaatagttcgacaaagatcgcattggtaattacgttactcgatgtcatggggattggccttatcatgccagtcttgccaacgttattacgtgaatttattgcttcggaagatatcgctaaccactttggcgtattgcttgcactttatgcgttaatgcaggttatctttgctccttggcttggaaaaatgtctgaccgatttggtcggcgcccagtgctgttgttgtcattaataggcgcatcgctggattacttattgctggctttttcaagtgcgctttggatgctgtatttaggccgtttgctttcagggatcacaggagctactggggctgtcgcggcatcggtcattgccgataccacctcagcttctcaacgcgtgaagtggttcggttggttaggggcaagttttgggcttggtttaatagcggggcctattattggtggttttgcaggagagatttcaccgcatagtcccttttttatcgctgcgttgctaaatattgtcactttccttgtggttatgttttggttccgtgaaaccaaaaatacacgtgataatacagataccgaagtaggggttgagacgcaatcgaattcggtatacatcactttatttaaaacgatgcccattttgttgattatttatttttcagcgcaattgataggccaaattcccgcaacggtgtgggtgctatttaccgaaaatcgttttggatggaatagcatgatggttggcttttcattagcgggtcttggtcttttacactcagtattccaagcctttgtggcaggaagaatagccactaaatggggcgaaaaaacggcagtactgctcggatttattgcagatagtagtgcatttgcctttttagcgtttatatctgaaggttggttagttttccctgttttaattttattggctggtggtgggatcgctttacctgcattacagggagtgatgtctatccaaacaaagagtcatcagcaaggtgctttacagggattattggtgagccttaccaatgcaaccggtgttattggcccattactgtttgctgttatttataatcattcactaccaatttgggatggctggatttggattattggtttagcgttttactgtattattatcctgctatcgatgaccttcatgttaacccctcaagctcaggggagtaaacaggagacaagtgcttag

SEQ ID NO: 475175 - DNA, 1083 bp, Shigella flexneri; identical to SEQ ID NO: 472659

SEQ ID NO: 475176 - DNA, 1104 bp, Shigella flexneri
ttggagtcattaccgcttgaggaataccgttcactttttggtcttgccagtttgcgttttcagggtgaccaacatttgctggatattgccttctggtgcaacgaaaaaggggtcagcgcccgtcagcagcttagcgttcagcaacaaaatggtatctggacattagttcaaagcgaagaggcggagatccaaccacgcagcgacgaaaaacgcattctgagtaatgttgctgtactggaaggtgcgccgccgctatcggaacactggcaactgttcaacaataacgaagtcctgttcaatgaagcccgtaccgctcaggcggcgacggtggtcttttctttacagcaaaatgcgcaaatcgagccactggcccgcagcattcataccctgcgtcgccagcgcggtagtgcgatgaaaatcctcgtgcgggaaaataccgctagcctgcgcgccaccgatgaacgtttgttattggcctgcggtgcaaatatggttattccgtggaatgcgccactctcccgttgtctgacgatgatcgaaagcgtgcaagggcagaagtttagtcgctatgtaccggaagatatcactaccttgctgtcaatgacccagccgctcaaactgcgtggtttccagaagtgggatgtgttctgtaatgccgtcaacaacatgatgaataaccctctcttgcctgcccacggtaaaggcgttctggttgccctacgtccggtaccgggtatccgcgttgagcaagccctgacgctatgtcgccctaaccgtaccggcgatatcatgaccattggcggtaatcggctggtgctgtttctctcattctgtcggattaacgatctggataccgcgttgaatcatattttcccattgcctactggcgacattttctcaaaccgtatggtctggtttgaagatgatcaaatcagtgccgagctggtgcagatgcgcctgcttgccccagaacaatggggaatgccgctgcctttaacgcaaagttctaaaccggtcatcaatgccgagcacgatggtcgccactggcgacgaataccagaacccatgcgactgttagatgatgctgtggagcgctcatcatga

SEQ ID NO: 475177 - DNA, 249 bp, Shigella flexneri
gtggaaatagacaacaacatcggtgaaaacgcgttacgatcggtggcggttggaagaaaaaattatctctttttcggctcagacaggggaggagaaagtgcggcgatcatctacagtctgctggtcacctgcaaacagaacgaagtggagccggaggactggttgcgcgaagtgatcgagaagctcaatgactggccgtcgaaccaagtgcatgaactgctgccctggaacttctcgtctgtaaaataa

SEQ ID NO: 475178 - DNA, 366 bp, Shigella flexneri
atgattgatgtcttagggccggagaaacgcagacggcgtactacacaggaaaagatcgctattgttcagcagagttttgaaccgggaatgacggtctcccttgttgcccggcaacacggtgtggcagccagccagttatttctctggcgcaagcaataccaggagggaagtcttactgctgtggccgcaggagaacaggtcgttcctgcctctgaacttgctgctgccatgaagcagattaaagaactccagcgcctgctcggcaaaaaaacgatggaaaatgaactccttaaagaagccgttgaatatgggcgtgcaaaaaagtggatagcgcacgcgcccttattgcccggggatggggagtaa

SEQ ID NO: 475179 - DNA, 906 bp, Shigella flexneri
gtggatagcgcacgcgcccttattgcccggggatggggagtaagcttagtcagccgttgtctccgggtgtcgcgtgcgcagttgcacgtcattctcagacgaaccgatgactggaaagatggtcgccgcagccgtcactcagatgatacggatgtgcttctccgtatacaccatgttatcggagagctgcccacgtatggttatcgtcgggtatgggcgctgcttcgcagacaggcagaacttgatggtatgcctgcgatcaatgccaaacgtatttaccggatcatgcgccagaatgcgctgttgcttgagcgaaaacccgctgtaccgccatcgaaacgggcacataccggcagagtggctgtgaaagaaagtaatcagcgatggtgctctgacgggttcgagttccgctgtgataacggagaaaaactgcgagtcacgttcgcgctggactgctgtgaccgtgaggcactgcactgggcggtcactacgggcggcttcaacagtgaaacagtacaggacatcatgctgggagcggtggaacgccgcttcggcaacgagcttccggcgtctccagtagagtggctgacggataatggttcatgctaccgggctaatgaaacacggcagtttgcccggatgttggggcttgaaccgaagagcacggcggtgcggagtccggagagtaacggaatagcagagagcttcgtgaaaacgataaagcgtgactacatcagtgccatgcccaaaccagacgggttaacggcagcaaagaaccttgcagaggcgttcgagcattataacgaatggcatccgcatagtgcactgggttatcgctcgccacgggaatatctacggcagcgggccagtaatgggttaagtgataacaggtgtctggaaatatag

SEQ ID NO: 475180 - DNA, 888 bp, Shigella flexneri
atgactctgaggtgtctgttaaacccgtggcgattcagtgagcgcattctgaccgaccgtgaaaatggtgaaaaaggcgataattctcaagatacctcttatgcccgtgtaggcgtgaaaggtgaaactcagatcaaccctgaaatgactggttacggtcagtttgaactagacctggaagcatcaaacagacacaaccctgaccaaactcgtttggcatatgctggtttgagttacaaagattttggttcattcgactacagtcgtaatgtcggtgtcgcgtatgatgcagaagcatttactgatatgtttgttgagtggggcggtgactcatgggctggtactgacctgttcatgaccaaccgtaccaacggtgttgcaacctatcgtaacacagatttctttggcatggttgaaggtctaaattttgctctgcaatatcagggtaaaaatgaaggtacaggcaactacaaagcaaatggcgatggccatggtttatctgcaacttacactattgacggtttctcatttgctggtgcttatgcaaactctgaccgtactgattggcagtctggtgatggtaaaggcgaaagagccgaagtttgggcgttgtcaacaaaatatgacgctaacaatgtttatgctgctgtgatgtacggtgaatctcacaacatgaattccgacgacggtgatgttgtgaacaaaacacaaaacttcgaagctgttctgcaatatcagttcgactttggtctgcgtccatccatcggttactcctattctaaagcactggacgtagcaggttggatttgcccctatatttccagacacctgttatcacttaacccattactggcccgctgccgtagatattcccgtggcgagcgataa

SEQ ID NO: 475181 - DNA, 615 bp, Shigella flexneri
  misc_feature (584)..(593): n is a, c, g, or t
atgcttaccacccttatttatcgtagccatatacgtgacgacgaacctgtcaaaaaaatcgaagaaatggtttcgatagcaaatcgcaggaacatgcagtctgacgtaacagggatcttactgtttaatggttctcattttttccagcttctggaaggtccggaagaacaggttaaaatgatatatcgggctatatgccaagatccacggcactataatattgttgagctgctgtgcgattacgcgcctgctcgccgttttggcaaagcgggaatggaattatttgatttgcgcctgcacgagcgagatgacgttttacaggccgtattcgacaaaggcacatcaaaatttcagctaacttatgatgacagagcgctacaattttttcgtacttttgtccttgcaaccgaacaatcaacctatttcgagatccctgccgaagactcctggctttttatcgctgacggatctgataaagaacttgattcctgtaccctttcaccaactataaacgaccactttgcctttcatcctattgtcgatcccttatcgcggcggataatcgcttttgaagccattgtgcnnnnnnnnnngaagatagcccatcagccatag

SEQ ID NO: 475182 - DNA, 237 bp, Shigella flexneri
atgcatcaaaattcagtgacttcagattctgcgggagcaatcactcgttactttgcaaaagctaacttgcctactcagcaggaaactctcggggaaattgtgactgagattttgaaagatggacgtaatctgagtcgaaagtcgcattgtgccaaacttctttgccgactggaacaagcgacaggggaagaggaacagaaacattataatgcactaattgggttgctttttgaataa

SEQ ID NO: 475183 - DNA, 267 bp, Shigella flexneri
atgcttgaagatactacaattcataatgcaataactgataaagcgttagcaagttactttcgcagttcgggtaatttgttagaagaagagtcagcagtgttagggcaggctgtcaccaatttaatgctttcaggcgataatgttaataataaaaatattatcttaagtctgatacactccctggaaacaacaagtgatattctcaaagctgatgtgattagaaaaacactggaaatcgtgttgcgatacacagctgatgatatgtaa

SEQ ID NO: 475184 - DNA, 249 bp, Shigella flexneri
atgaataattcaatcccagagagatttatttttcaatgtgctttgtttaaaaatctcgagagggaggtgttcatgacgcatgggtatgttgatagtcatattattgatcaggctttacgcttgcgtttaaaagatgaaaccagtgtgattctttctgatctctatctgcaaatattgcagtacattgaaatgcataagactacactaacggatatcattattaatgacagggaatccgtgctctcttag

SEQ ID NO: 475185 - DNA, 156 bp, Shigella flexneri; identical to SEQ ID NO: 461908

SEQ ID NO: 475186 - DNA, 429 bp, Shigella flexneri; identical to SEQ ID NO: 461909

SEQ ID NO: 475187 - DNA, 444 bp, Shigella flexneri
atgaatccgtctgatgccattgaggcaattgaaaaaccgctctcctccctgccttacccgatttcccgtcacatcctggaacatctgcgcaaactcccccgtcacgaacccgtgcctggcattatgggtaaaagcggggccggtaaatcctcactctgtaatgcactgtttcagggggaggtcaccccggtcagtgcactcatgacagtgcttcccggacatgccgccatccctctgatgacacgcctgcaggacgaactgcgcacggagtctgtccgcactcagacccgtgaacagtttaccggtgcggtggaccggatatttgacacggcggagagtgtctgtgttgcctctgttgtccgtacggccctgcgcgccgttcgtgacaccgtggtctctgtggcccgcgcggtatggaactggattttcttcttaacccggtag

SEQ ID NO: 475188 - DNA, 1083 bp, Shigella flexneri
atgcacgaaaagaacatcaccctgctttgtgatgaagccgaccggcttttgcaactgagcatcaatctgctccggcaaatggttgatgagccggatgtgttatctgacggtaagaacgaaaacgggcagctttttgataaacagaaagcactgaaaagaattaaggagctggagggcgaacaaatcaaaaccgcccgcagggagatggtgctggctgttgtcggcacgatgaaagcaggcaaatcaaccaccatcaacgccattgtggggcaggaaattctgcctaaccgtaaccgccccatgacctctgtaccgacgctcatccgccacgttcccggaaaaactgagccggttctccatctggaacatattcagcctgtccgcaatttattaatcacactgcaggaaaaagtcgccaccccggcaggacagcaggtcgcacagaccctgcagcaaaccggggatacccgcgaactgctggatattctgacggatgatggctggctcaaaaatgaataccacggggaggagggaatctttaccggactggcatcgttaaacgatctggttcgtcttgctgcggcaatggggagtgaatttccttttgatgaatacgcagaagtgcagaaactgccggtgatcgacgtggaattcagccatctggtggggatggatgaatgccagggaacattcacactggtggatacccccggccctaatgaagccggacaaccgcagatggaagtgatgatgcgggatcaactgcagaaagcctctgcggtgctggcggtgatggactacacccagatgaactcgaaagccgatgaggaggttcgtaaagagcttaatgccattgctgatgtgtcagtcggccgcctgtttgtgctggtcaataaatttgatgaaaaagaccgtaatggcgatggggctgatgcagtctgtcagaaggtaccggcaatgctgaacagcgatgtgctgcccgcctcccgcgtttatcccggatcctcacgccaggcatacctggctaaccgtgcgcttcatgagttacggaaaaacggaacccttcctgttgatgaagcctag

SEQ ID NO: 475189 - DNA, 603 bp, Shigella flexneri
atgctgctggtcaccccgctggtaatttacaccatgtatccaccagaaattaaaaaggtggataacaaaaccatcgctaaagcgggccttgccgaactgggaccgatgaaaatccgcgaaaaaatgctgctcggtgtctttgtgctggcgctactgggctggattttcagtaagtctctgggggttgatgaatccactgtggcaatcgttgttatggcgaccatgctgctgctgggtatcgttacctgggaagacgtggttaaaaataaaggcggctggaataccttaatctggtacggcggtattatcggcttaagctccttattatcgaaagttaaatttttcgaatggttagctgaagtctttaaaaataacctggcatttgatggtcacggtaacgttgctttcttcgttattattttcctcagcatcatcgtgcgttatttcttcgcttccggtagtgcctatatcgttgctatgttacctgtatttgccatgctggcgaacgtctccggcgcaccgttaatgttaaccgcgctggcactgttgttctccaactcctatggcggcatggttactcaggtaatgctgccaacttactga

SEQ ID NO: 475190 - DNA, 543 bp, Shigella flexneri
gtgaaagaaagcaatcagcgatggtgctctgacggggtcgagttctgctgtgataacggagagagactgcgtgtcacgttcgcgctggactgctgtgatcgtgaggcactgcactgggcggtgactaccggcggcttcaacagtgaaacagtacaggacgtcatgctgggagcggtggaacgccgcttcggcaacgatcttccgtcgtctccagtggagtggctgacggataatggttcatgctaccgggctaatgaaacacgccagttcgcccggatgttgggacttgaaccgaagaacacggcggtgcggagtccggagagtaacggaatagcagagagcttcgtgaaaacgataaagcgtgactacatcagtatcatgcccaaaccagacgggttaacggcagcaaagaaccttgcagaggcgttcgagcattataacgaatggcatccgcatagtgcgctgggttatcgctcgccacgggaatatctgcggcagcgggcttgtaatgggttaagtgataacagatgtctggaaatatag

SEQ ID NO: 475191 - DNA, 249 bp, Shigella flexneri; identical to SEQ ID NO: 475010

SEQ ID NO: 475192 - DNA, 303 bp, Shigella flexneri
atgaaaaaaagaaattttagcgcagagtttaaacgcgaatccgctcaactggttgttgaccagaaatacacggtggcagatgccgccaaagctatggatgttggcctttccacaatgacaagatgggtcaaacaactgcgtgatgagcgtcagggcaaaacaccaaaagcctcccccattaccccggaacaaattgaaatccgtgagctcaggaaaaagctacaacgcattgaaatggagaatgaaatattgaaaaaggctaccgcgctcttgatgtcagactccctgaacagttctcgataa

SEQ ID NO: 475193 - DNA, 819 bp, Shigella flexneri
atggaaaacagtgacgatatccgtttgattgtgaagattgcccaactctattacgaacaggatatgacgcaggcgcaaatcgcgcgcgaactgggtatttaccgcaccaccatcagccgcttgcttaaacgaggccgcgatcagggaatggtcaccatcgccatcaactatgactacaacgaaaatctctggctggagcagcaactgaagcaaaagtttggcctgaaagacgttgtggtggtgtcgggaaatgatgaggatgaagagactcaactggcgatgatggggttacacggcgcgcaactgctggatcgcttgctggagcctggcgatattgtcggtttttcctggggtcgcgcggtgagcgcactggttgaaaacttgccgcaggcggggcaatcgcggcagttaatctgcgtaccaattattggcggaccgtccggtaaactcgaaagccgctatcatgtaaacacattaacctacagcgcggcagcgaagctgaaaggggaatcgcatctcgcggattttccggctctgctggataacccattaattcgtaatgggatcatgcagtctcagcactttaaaaccatctctgcctactgggataatctggatgtcgccctggtgggaattggctcaccggccattcgcgacggcgctaactggcatgcgttttatggtggtgaagagagtgacgacctgaatgcccgccaggttgctggcgatatttgctcgcgcttttttgatattcacggcgcaatggttgaaacgaatatgagcgaaaaaacgggtaatgctgccaacttactgatttag

SEQ ID NO: 475194 - DNA, 1215 bp, Shigella flexneri
atgaaaattattgctgcagatgtttttgttacttgcccagggcgtaatttcgttacgcttaaaataaccactgaaagcggactttgtggattaggagatgccacgttaaatggtcgcgaattgtcggtcgcttcttatctgaaagatcatctttgtccacaactaattggccgcgatgccagccgtatcgaagatatctggcaattcttttataaaggtgcttactggcgacgtggccccgtcatgatgtcagccatttctgccattgatatggcgttgtgggatatcaaagctaaagcggcaaatatgccattgtatcaactgcttggtggtgcttctcgtgaaggcgtgatggtttattgccacaccaccgggcgtacgattgatgaagtccttgaagactatgcaaagcaccagcagatgggctttaaggcgattcgtgtgcagtgcggtgtaccgggtatgcaaaccacttatggcctggcgaagggcaaaggactggcgtatgaaccggcaaccaaaggcctgtggccagaagagcagttgtggtcttcagaaaagtatctcgattttacgccgaagttattcgaagcggtgcgtaataagttcggttttaacgaacatctgttgcatgacatgcaccatcgcctgacccccatcgaagcggcgcgctttgggaagagcattgaggattaccgcctgttctggatggaagatccgacgcctgccgagaaccaggaatgttttcgtctgattcgccagcataccgtgacgccgattgcggtcggtgaagtgtttaacagtatctgggactgcaagcagttaatcgaagagcagctgattggctatattcgcacgacgatcacccatgcaggcggcattaccgggatgcggcggattgccgattttgcatcgctttatcaggtacgtaccggttcgcatggcccttcagatttatcgcctgtttgtcatgcggcggcgctgcattttgacctatgggtaccaaattttggcgttcaggagtacatgggctattccgaacaaatgcttgaagttttcccgcacagctggcgcttcgaggaaggttatatgcacccaggcgatgaaccggggctgggtatttctttcgatgagaaactggcggcgaaatatccgtatgacccggagtatctccccgtcgcacgactggaagatggcacattgttgaactggtaa

SEQ ID NO: 475195 - DNA, 297 bp, Shigella flexneri
atgagcgcttacccgatttttgatcgtattgaagaaatggcatgggctcgccactaccagcagatcgttcgtgaagaaaaagaaacggaactggcggacgacctggaaaaaggtctgcctcagcacctgtttgaatcgctctgcatcgaccatttgcaacgccacggtgccaataaacaggcaatcagccacgcatttgatgatgatgttgagtttcaggagcgcatggcagaacacatccggtacatggctgaaaccattgcccaccaccaggttgatattgatttggaggactaa

SEQ ID NO: 475196 - DNA, 225 bp, Shigella flexneri
atgctcaactcaagaacctacctttatcagcgtaatggtgtcttttacatccgtcttaggatgaagaccactggtcgccttaccgcttcgcttccttctcacaaccgttataaactagcgtcagtatctttactgaagtggcacactgaatttggccacctgaacagaggtgatatgctcacctcagaacaacacaggtgctccaatgaaaaaaagaaattttag

SEQ ID NO: 475197 - DNA, 303 bp, Shigella flexneri; identical to SEQ ID NO: 473532

SEQ ID NO: 475198 - DNA, 249 bp, Shigella flexneri; identical to SEQ ID NO: 464355

SEQ ID NO: 475199 - DNA, 273 bp, Shigella flexneri; identical to SEQ ID NO: 474355

SEQ ID NO: 475200 - DNA, 966 bp, Shigella flexneri
atgtcagaagataaattcctttcggactacagcccccgtgatgcagtttgggatacccagcgcacgcttaccgattctgtcgggggtatctaccagactgctgctgaattcgagcgctatgcactccgtatggcctcctgtagcggtttgttacgttttggttggtctaccatcatggaaaccggagaaacgcgcctacggcttcgtagtgcgcaattttgccgtgtccgtcattgccctgtctgccagtggagaagaaccctcatgtggcaagcccgtttttatcaggctctaccgaaaatcgttgtggattacccgtcttcccgatggttgtttctgacgttaactgtcaggaactgcgagataggtgaacttggaacagtccttacagcaatgaatgcggcgtttaagcgaatggaaaagcgaaaggagctatcacctgttcaggggtggatcagggctacggaggtgacgcgaggtaaggatggcagcgcacatccgcattttcactgtctgctgatggtgcaaccttcttggtttaaagggaagaactacgttaagcacgaacgttgggtagaactctggcgcgattgcttgcgggtgaactatgagccgaatatcgatattcgggcagtaaaaactaaggcaggtgaggttgtggccaacgttgccgagcaactgcaaagcgcggttgctgaaacgctgaaatactccgttaaaccggaagatatggcaaacgatcctgagtggtttcttgagctgacgcggcagcttcacaagcgccgttttatctcgaccggtggggcgctaaaaaacgtcctccagttggatcgagaaaccaatgaggatcttgtcattgccgacgatgtaggggatggcactgatgacgggaagcggacggcgtttgtctgggattcaggtaaacggcgttacaaacgcgcccctgagaaggataaatcggattaa

SEQ ID NO: 475201 - DNA, 267 bp, Shigella flexneri
atgaatattaatattgaatacctgaatggaaataagactattggtttattttttttaagaagtgaagcagtgattcctgacaggtttaaaaaccttattttgcttattgatggattaagttttggcacatttggttttcatccgcacgaaggttttgaggatgaattaattttatatattcagaaaacaaacgagagggtaaaaactctttttgtgaaaatagatttaaacggtatcaagtttggatttttaagaacgcattcttag

SEQ ID NO: 475202 - DNA, 564 bp, Shigella flexneri
atgccactgctggataagctgcgtgagcagtacggggtcggaccgctatgcagtgaactgcatattgccccgtcaacgtattaccactgtcagcaacagcgacatcatcatgataaacgcagtgcccgtgcgcagcgcgatgactggctgaagaaagagatacagcgcgtatacgatgaaaatcatcaggtatacgctgtgcgtaaagtctggcgtcagttgttacgggaaggtatcagagtggccagatgcactgtggcacgtctcatggcggttatgggacttgccggtgttctccggggtaaaaaggtccacactaccgtcagccggaaagccgttgccgcaggcgaccgcgtaaaccgtcatcaaggcaatgtgccgcgtactccgggtggcccgcagcggctggtatacgtggtgtcagcggcggacaaggataaacacacgtcagcagttccgtcagcactgcgacagcgttgtccgcaaggcttttacccagtccagcgttacggtgccccacgcctgacggatgaactgtgtgctctggttaccactttaacgtaa

SEQ ID NO: 475203 - DNA, 1524 bp, Shigella flexneri
atgcgcaatacactcatacccatcctcgttgcgatatgcttgtttattaccggtgtcgctattttgaacatccagctctggtattccgcaaaagcagagtacctggcgggagcaagatatgccgccaacaatatcaatcatatacttgaagaagcgtcacaggcgactcaaacagcggttaacattgccgggaaggaatgcgacctcgaggagcaatatcagcttggcactgaagcagctctgaaacctcacctgcgcacaatcatcattctcaaacagggaatagtctggtgtacatccctgcctgggaatcgggtcctgctgtctcgtattcctgttgtcccggacagtaatttactgttggctccggcaatcgacaccgttaatagattacctatcctgctctatcagagccaatttgcagatacgcgcattttggttacgataagtgatcaacatattcgcggggcgcttaatgtacccttgaaaggggtaaggtatgtattacgcgtggcggatgacattattggaccaacgggtgatgtgatgacgcttaatggacattatccctataccgagaaggttcactccacaaaatatcatttcactattatctttaacccgccgccactctttagcttctacagacttatcgataaaggctttgggattttaatatttattctgttaatcgcctgcgccgctgccttcctgcttgatagatatttcaataaaagcgcaacgcctgaagagatcctgcgacgggcaataaataatggggagatcgtccctttttaccaacctgtggtaaatggtcgggaagggacattgcggggagttgaggtgttagcccgctggaaacaacctcacggtggatatatttcacccgcggcatttattccacttgctgaaaaatccggattaatcgttccgcttacacaaagcctgatgaatcaggttgccagacagatgaacgctatcgcgagtaaactgccggaaggttttcatattggaattaattttagcgcttcgcatattatttcgccgacgtttgtcgacgagtgtttaaatttccgtgacagttttacccgccgcgatttaaaccttgttctggaagtcaccgagcgtgagccattgaatgttgatgaaagtctggttcagcggttgaacattctgcatgaaaatggttttgtcatcgcgctggatgatttcggtactggctactcagggctttcttatcttcatgacctgcatattgattatatcaaaattgatcacagtttcgttggccgcgtaaacgcagacccagaatcaacccgaattctggattgtgtattggatctggcgcgtaaactttcgatcagtatcgtcgctgaaggtgtcgaaacgaaagaacaacttggctatctgaaccaaaataatatcacatttcagcagggttattatttctataaacctgttacatacatcgacctggtcaaaattatcctttctaaaccgaaggtgaaggttgtggttgagtga

SEQ ID NO: 475204 - DNA, 555 bp, Shigella flexneri; identical to SEQ ID NO: 474545

SEQ ID NO: 475205 - DNA, 528 bp, Shigella flexneri
atgatgcacttaaagaacattaaagcgggtaacgctaaaacactggaacagtacgaattaacaaagaattttgacgtaatctggttgtggacagaagacggaaaaaactggtatggggaagtgaagaactttcagccagatacaataaagattgtttacgatgaaaataatattattgtcgccatcactaaagatgcctccacgcttaatcctgaaggctttagcgtcgttgaggtccccgatataacagcaaatcgtcgtgccgatgattccgggaagtggatgtttaaggacggagctgtggttaagcggatttatacggcagacgaacagcagcaacaggccgaatcacaaaaagccgcattgctttccgaagctgaatcagtcatccagccgctggagcgctctgtcaggctgaatatggcaacagatgaggaatgcgcacgactggagtcatgggaacgctacagtgttctggtcagccgtgtggatacggcaaagccagaatggccacaaaaaccagagtaa

SEQ ID NO: 475206 - DNA, 534 bp, Shigella flexneri
atgatgcacttaaaaaacatttctgctggtaatcctgaaacaaaagagcaataccagctaacgaaacaatttaacatcaaatggctttatacagaggatgggaaaaactggtatgaggaacaaaagaactttcagcctgatacgttgaaaatggtctatgaccacaacggcgttattatttgtattgaaaaggatgtttcagcaattaatccggaaggcgcaagcgtcgttgaggttcctgatattacagcaaatcgccgggctgatatttcaggtaaatggatgttcaaagatggcatagtgataaagcgaacttataccggggaagagcagaggcaacaagtggaaaatgaaaagcaaagcctgttgcaacttgtcagggataaaacccagctatgggactcacagctacgactgggcatcatttccgccgggaataagcagaaattaaccgagtggatgctctacgcgcagaaggtcgaatccacagacacctccagtctgccagtaacgtttcccgaacaaccagaatga

SEQ ID NO: 475207 - DNA, 486 bp, Shigella flexneri
atggtagtgtccgctattgccagtacacctcaagctgttggctggaactggaatagcggtgtttatgatgcaaatatcagcggtgcatcaacattaatcctccacttcaataagaatacggggagctgccctgctgtacagttccgtgtgaattataagaacggcggtattttttatcgttcagcgcgtgatggttatggatttgaggctggctggtcagagttttacaccacaacacgcaagccatcagcgagagatgttggcgcatatacgcaggcagaatgtaactcaaggtttattacaggtattcgccttggtggtctgtcatctgttcggacatggaatggtcccggctggtctgacaggtcaggttatgttgttaccggttccgttaactcaaacagagatgaactaattgatacaactcaggcaaggccaattcagtattgcattaatgggaggtggtataacgcggggagtatttaa

SEQ ID NO: 475208 - DNA, 639 bp, Shigella flexneri
atgggggattctgtgacaccggagatacttggcaacatgattcgtcagtatttcagtcaggtacgaactgaaaaagagagcatacaggctctgaatcatctgcgcagagtgcttcatgaggtcagtccttttgcacaggagcctgtggactgtgtgttgtgggtgaaagcggatgaggtggtggccaacgattacaaccctaatgtcatggcactaggtgagaaaaaactactgaaacagtctctggagaaagatggtttcacacaaccggtggtggtgtcagaggagaagaatcattatctggtggtggatggttttcatcgtcagttactggggcgggaagcagatacaggaaaacgcctgaggggctggttgcctgtagcctgtattaatccggagagaaagggacaggccgcacgtattgccgcgaccattcgacataaccgggccagggggaaacaccagatcactttaatgtctgatattgtcagggatctttcacgtctgggctggacgaatgaacgtattggtacagagctgggaatggaccaggatgaagtgctgaggctgaaacagattagcgggctgacagagttgtttcaggaagaggatttcagctcggcttggacggttcgttga

SEQ ID NO: 475209 - DNA, 348 bp, Shigella flexneri; identical to SEQ ID NO: 7898

SEQ ID NO: 475210 - DNA, 1617 bp, Shigella flexneri
gtgatttatcagtcagccgttccacaaggtgcttttgagatcaccgatctcaacaccgcaagtacaggtggcgatttggacgtaaccatcaaagaagaagacggtagcgaacaacgattcacccaaccttatgcttcattggcgattcttaaacgtgaaggtctgacagatgttgatgtcagcgtgggtgaattgcgcgatgaagacggatttacaccggacgtccttcaggcgcaaatacttcatggtttttcccacgggatcactttatatggaggtatgcaggctgctgaaaattatggttctgcagctctgggtgtcggtaaagatcttggcgctttgggcgcaatttctttcgatgtgacacatgctcgtgcgaattttagccatgatgatacagaaacgggtcagtcatatcgctttctctattcaaaactatttgacgacacagacactagcttgcgcctggttggctatcgttactccaccgagggctactataccctcaatgagtgggcatcgcggcgcaacagccctgaagacttttgggaaacaggtaaccgacgtagtcgcgtggagggaacgctaacgcagtcgttggggagagattatggcaatttatacctgacattaagccggcaacaatactggcataccgatgatgtcgaacgattaatgcaatttggctacagcagtagctggaagcgtctctcgtggaacgtctcctggagttattccaatactgccagacaggggacggggaacaaccatgccagtgataacaccagtgagcagatctacatgctctctttatctgttcctttatcgggctggtggggtaatagttacgccacctattctgtttcgcaaaacgataattccggtagctcacatcaactcggactcagcggtacggcgctggaaagaaataacctttcatggaatttaatgcagtcctataacagtcatgatgatgaggttggcggtaatatgtccctgacctatgatggctcttatggcacggtgaacggcagctataactacagccaaaattcccagaggctgaattatggtatcagagggggaattctggcacacagcgaaggggtaacgttaagtcaggagttaggtgaaactattgctcttgttaaagcgcctggggccgccgggttagaaatagataatatgcgcggtgctgcgacggactggcgcggctatacggtcaagacacagctaaacccttatgatgaaaatcgggtagcaatcagcgataactatttctcgaagtcgaatatagaacttgataataccgtcgttacgatggttcccacgcgtggtgcagtggttaaagcggagtttgtgactcatgtgggttatcgcgttctcttcagagtgttaaatgcaaatggtaaaccggtaccttttggagccattgctgcgatacaagatgcaagtttggcagattcaggaattgtcggtgaccgtggcgaactttatctttctggtctaccagaaaaaggacaggttacgttatcctggggagaaaacgcctcaacaaaatgcatcttcaattattcactttcgacaccagaaagtgagagcggattaattgggtaa

SEQ ID NO: 475211 - DNA, 933 bp, Shigella flexneri
atgtgcgtcgcaacaagggagccccccggatgcgacgggcagactttgaaaatgttcgaccagcaacgtgatggcaatctatacaagatctggaaccggctatgttcgggaacatggtttccgccaccagtgctggaaaaacggatcccgaagtcgaatggcaaggaacgcattctggggatcccaacagtatccgatcgaattgctcagggagcgataaaacttttcatggaagaaaagcttgacccgattttccatgctgattcatatggttaccgaccaggcaaatcagctcatgacgctctgaaacaatgtgccatccggtgctggcgttatagctggatactggaagtggacatcagtgcgtttttcgaccatgtgagacatgatctggtgctcaaagctctggaacaccacgggatgcctaaatgggtcatcctgtactgtcgacgctggatggaagcgccaatgcagagttgtgaaaatggagaattaataacccgaacacgaggcactccgcagggcggggtcattagtccgctacttgctaacttgttccttcactatgcatttgatttgtggatggaaagagaatatcggggggtaccgtttgagaggtacgctgacgatattgtagtacattgttcacgaatgagtgatgtaacaaggctaaagaacaggttatcggagcgcttctcggaagtcgggctggtcctgaatgcagggaaaacgaatatcgcctacattgacacgtttaaaaggagaaacgtcgcaacgagtttcacctttctcggatatgacttcaaagtgcgtacgctgaagaatttcaaaggcgaacggtaccgaaaatgcatgccgggtgcgtcaaatgcagcaatgctgcaaaataacagaaacaatcaagaagtggcgtatacatcgctcaacagctga

SEQ ID NO: 475212 - DNA, 228 bp, Shigella flexneri; identical to SEQ ID NO: 469002

SEQ ID NO: 475213 - DNA, 912 bp, Shigella flexneri
ttgattaacgagggcgacaagtctcaggaagatattgctgatgaagccggaatgtctccggcaacactctcggctctgcgtaaaggagagtacaacggtaatgtcgaaggtatgcatgacaaattacagaaatggtatcaggtctggcagaagggacagaacttgtcaggtacccctggtgttgtgaagacccagatattttgtgatttgcatgagctgtttaaaacagtgcgctcactcgggattatcagtgtcgttgttggcgtaccgggtgtcggaaaaacctttgctgcccgggaatattgtcgcaggacagctaatgcctggatggtgactcttgctccggcacattcgagcgtaacggaatgcctccttgaaatagcatatgcgctggaaattaataatccgggaagaaataaggggaatataacccgcgccattcgcagaaaactgggtggtggtaaagaaaccagtggccgtgttaacccccttctgattattgatgaagctgatcacttaagtgtggatggtctggagcaattacgcgccattcaggatgccactggcgtggggatggttttaattggcaacccgaaacagatggcggatgccacccgtcgtgggactgatgaactggcccgtctgttcagccgttttgccatgacaaaacaactgcgcaaagtaaaaaagaccgatgtgatggctgtagccaaagcatggggagtaacacaggaagatgagctggacctgctgatgagggtagccgaaaagcccgggggattgcgtgtattaactcacacactgaatcatgcgtggctggcggcaaaaggtgcaggcacatccctgaataaaagtcacattaaagcggcttttaaggaggcttacagcaaccccaggttactgaactggtag

SEQ ID NO: 475214 - DNA, 366 bp, Shigella flexneri; identical to SEQ ID NO: 474398

SEQ ID NO: 475215 - DNA, 273 bp, Shigella flexneri; identical to SEQ ID NO: 474417

SEQ ID NO: 475216 - DNA, 306 bp, Shigella flexneri
atggacattgcagttattggttccaatatggtggatctcattacttacactaatcagatgcctaaagaaggagaaactctggaagcacctgccttcaaaatcggatgtggtgggaaaggtgctaatcaagcggtggcggcggctaaattgaattcaaaagtcctgatgctgactaaagtaggtgatgatatttttgcggataatactattcgtaatcttgaatcaggtaatgactccaacttactgatagtgttttatgttcagataatgcccgatgaccttgtcatgcagctccaccgattttga

SEQ ID NO: 475217 - DNA, 303 bp, Shigella flexneri; identical to SEQ ID NO: 473532

SEQ ID NO: 475218 - DNA, 369 bp, Shigella flexneri
atgaagatatctcttgtcgttcctgtcttcaatgaagaagaagcgataccaattttttataaaacggtacgtgaattcgaagagttgaagccatatgaagtagaaattgttttcataaatgacggaagcaaagacgctacggagtcaatcattaacgctctggctgtttctgatccgctagttgttccgctgtcatttacacgcaactttggtaaagaaccagcattgtttgcagggttagaccatacaaccggcgatgccgtgattccaattgatgttgacctgcaagacccgattgaggttattcctcatcttattgaaaagtggcaggcaggtgctgacatggtgcttgctgaagtggcacactga

SEQ ID NO: 475219 - DNA, 639 bp, Shigella flexneri
atggcaacctacactatgttccttgcagctatttttgcgattgcgattggcctgagtttccttgaaactgcagcgaacacatacagttcaatgatcggtccaaaagcctatgccacattgcggctcaatatcagccagaccttttatccgattggtgctgcgtcaggtattttattgggcaaatatctggttttctccgagggggaaagccttgagaagcagatgtccggaatgaacgccgagcaaattcacaactttaaggtgctgatgttagagaacacccttgaaccgtataagtatatgattatgattctggttgtggtcatggtgttgttccttttaacccgctttccaacctgtaaagtggcacagacaagtcaccataaacgcccgtcagcaatggatacgctgcgctatctggctaaaaattcgcgctttcgtcgtggtattgtggctcaattcctttatgtgggtatgcaggtcgcagtatggtcatttaccatccgtctggcactggagttgggcgatatcaacgaacgtgatgcttcaaacttcatggtctacagctttgcctgcttctttattggcaagtttatagccaacatccttatgacacgggtaatgctgccaacttactga

SEQ ID NO: 475220 - DNA, 375 bp, Shigella flexneri
atgaacgataaaaacatcattcagatgcctgatgggtatctgaataagactcccttgttccagtttattttgttatcgtgtttattcccgctatggggatgcgcagctgcattaaatgacatattaatcactcaattcaaaagtgtattttcgctaagtaactttgcttcagcattggtgcagagcgcattttatggaggttattttttaattgcaataccagcatcccttgtgattaaaaagaccagttataaggtggcaattttaattggcctgacgctgtatattggtggttgtacacttttttccctgcctcgcatatggcaacctacactatgttccttgcagctatttttgcgattgcgattggcctga

SEQ ID NO: 475221 - DNA, 525 bp, Shigella flexneri
ttgatcgttttacaactggaagttcaactggaaacagtttaccacgcgattgagtttggtaagaaaaatggtattgaagtgttattaaatccggctccggcattgcgtgagttagatatgtcttatgcctgcaaaggtgatttctttatcccgaatgaaacagaactggaaatattaaccggtatgtcggttgatacttatgatcatattcgtttggccgcacgttcgttagttgataaagggctgaacaatattattgttaccatgagcgaaaaaggcgcattatggatgacccgcgatcaggaagtccatgttcctgcattcaaagtaaatgctgttgatactagtggcgctggtgacgcatttattggttgcttttcccattattatgttcaaagcggtgatgttgaagccgctttgaaaaaagccgctctctttgccgttttcagcgtcacagggaaaggtatgcaatcatcttatccgagtattgaacaatttaatgaatttttaaccttaaacgaataa

SEQ ID NO: 475222 - DNA, 303 bp, Shigella flexneri
atgaaaaaaagaaattttagcgcagagtttaaacgcgaatccgctcaactggttgttgaccagaaatacacggtggcagatgccgccaaagctatggatgttggcctttccacaatgacaagatgggtcaaacaactgcgtgatgagcgtcagggcaaaacaccaaaagcctctccgataacaccagaacaaatcgaaatacgtaagctgaggaaaaagctacaacgcattgaaatggagaatgaaatattaaaaaaggctaccgcgctcttgatgtcagactccctgaacagttctcaataa

SEQ ID NO: 475223 - DNA, 1101 bp, Shigella flexneri
atgaaattaaaaatagttgcggtggttgtaactggtttgttagctgcgaacgtagcacacgctgccgaagtctataacaaggatggtaataaactcgacctttatggcaaggttaccgctctacgttattttactgatgataagcgtgacgatggtgataaaacttatgcccgtctcggctttaaaggagaaacgcaaatcaatgatcaaatgattggttttggtcactgggaatatgattttaaaggctataacgatgaagccaacggctcgcgcggcaacaagacccgtctggcctatgctggtttaaaaattagtgaatttggctctctggactatggtcgtaactacggtgtcggctacgacattggttcatggaccgatatgttgccagaatttggtggcgatacctggagtcagaaagatgtcttcatgacataccgtaccaccggtctagcaacctatcgcaactacgatttctttggcttaattgaagggctgaactttgccgcgcaatatcaaggcaaaaatgaacgtactgacaacagtcatctttatggtgctgactacacgcgtgccaacggtgacggtttcggtatctcctcaacttatgtttatgatggctttggtatcggtgcggtatataccaaatccgatcggacaaatgcgcaggaaagagccgctgctaatcctctcaatgcctccggtaagaatgcagaactatgggccacaggtataaagtatgatgccaacaacatctactttgcagctaattacgctgaaacattaaacatgaccacctatggggatggttatatctctaacaaagcacaaagttttgaagtggtggcgcaatatcaattcgacttcggcttgcgcccatcactcgcttacctgaaatcgaaaggcagagatctgggccgctacgccgaccaggacatgattgagtatatcgacgttggtgcgacgtatttcttcaacaaaaatatgtcgacctatgttgattataaaatcaacctgattgatgaaagcgactttacccgtgccgtagatattcgcaccgataacatcgtcgctacgggcattacctatcagttctaa

SEQ ID NO: 475224 - DNA, 195 bp, Shigella flexneri
atgctggagaatgagtactctcagagggtggctgaccggctgaaagcatcaggtctgagcggtgatgcggatgcggagagggaagccggtgcacaggtgatgcgtgagactgaacagcagatttaccgtcagttgactgacgaggtactggccctgcgattgtctgaaaacggctcacgactgcaccattcataa

SEQ ID NO: 475225 - DNA, 396 bp, Shigella flexneri
atgagtcatcgtgcacgacaccaattactggcgttgccgggcattatctttttagttctctttcccatcattctttcgctatggattgccttcctttgggcaaaatcagaagtgaataatcagctccgaacctttgctcaactggcactggataaatccgagctggtcattcgccaggcagatttagtgagcgatgcagctgaacgctatcaggggcaagtttgcactccagcccatcaaaagcgaatgttgaatattattcgtggctatctttatattaatgaattgatctatgcccgtgataaccattttttatgctcatcgctgatagcgcctgtaaacggctatacgattgcaccggccgattataagcgtgaacctaacgtttctaggtaa

SEQ ID NO: 475226 - DNA, 813 bp, Shigella flexneri
atgattccatatttcacttttgcatttactatattaataataaacacaattaactcaggtgagacgattgattatatatatagccacatttatgatataatatatggtgttagaaacaaccaatttgtaggaacaatatggtttataaactgcctttttgttataatagcaattgatgcaatctttaaagaaatagtcaagaacaatatagtgattttaatcatatcactattatcgttcatgttgtcacaaacagtgctcaatcataacccattactagatcctcaatggttttggaacatagactccgctatggcatactggtggttattgcctctcggtagatgtatgtttttagaattaacacgtgacaggttttttggaaaatctaaaattggtttcattgtcttctcaattaccgcgataatgagtgcgtatcaactccttaaccagaaacctttgctttttaagattatctcaatattcaatgcagacataatatcaagtagttatattcaagctattaatactattatcaccacggtaggtttgataatatttaatatttttatagcaaaaataatttgtgggaatgactttattgtaagagctggaagaaatactcttaacatatgtggaatggagtatatcaccaaattatttatccctatggctttagcaatcataggcttcagcgtgaccattccaaatcctatctgcgcaatcatatatacctgtatttgtgtatatgtatcagataaaattggccattggctatcgaggacagtcggtgggccatttttgataaaatga

SEQ ID NO: 475227 - DNA, 1092 bp, Shigella flexneri
ttgcgatggtacaacattgcgctgatgtcttttatcactgtctggggttttggcaacgttgttaataactatgccaaccaggggctggtggttgttttttcatgggtgtttatctttgcactctatttcacaccttatgcgctaattgttggtcagttaggctcgaccttcaaagatgggaagggcggggtcagtacctggattaaacacacgatgggacccggactggcttatctcgccgcgtggacctactgggtggtgcatattccctatctggcacaaaaaccccaggcaattctgattgcgctcggttgggcgatgaaaggcgacggttcgctaatcaaagaatattcagtcgtagcgttacaggggttaacgctggtgctgtttatcttctttatgtgggttgcttcacgcggtatgaaatcgctaaaaatcgtcggttctgtggcagggattgcgatgtttgttatgtcgctcctgtatgtggcgatggcggtaaccgcgcctgcgattactgaagtgcatattgcgaccacaaacattacctgggaaacgttcattcctcatatcgactttacctacattaccactatttcaatgctggttttcgcggttggcggagcagagaagatttctccttacgttaatcaaacgcgcaacccaggaaaagaatttccaaaagggatgctatgcctggcggtgatggttgcggtttgtgccattctgggctcactggcgatggggatgatgtttgactcgcgtaatatcccggatgacttaatgacgaacggtcaatattacgcctttcagaagctgggcgagtattacaacatgggtaatactttaatggtgatttacgccattgcgaataccctgggacaagtagctgcgctggtattctcgattgatgccccgcttaaagtgctattaggtgatgctgacagcaaatatattccagccagtttatgtcgtaccaacgcttctggtacgcccgttaatggctattttctgaccctgaggtgtactggcaatagcggacactaccatttgttcttttttaagcagccatctgatgatatttttccctga

SEQ ID NO: 475228 - DNA, 249 bp, Shigella flexneri; identical to SEQ ID NO: 464355

SEQ ID NO: 475229 - DNA, 453 bp, Shigella flexneri
gtgtctgcatccgaatcatttttaaatccaatcttcgcccagtcagtattccgaatccaggcaaggattgagtcgttttcaaaagtaagtccaccggacaaggtatcgcctgtcttttggacagcgttatcagccttgtttaccgtttcctgtaaaccgaggtattcgataacggcggcaacggtcgatttcgcaagaatatcccgcccgacttttgtcagggttgccaggctggcgacatcattccccgtaaaatacggaaacctgtctgccgcagtagcaagccccgccagcgccgtcagagtggcatctttcggttgcttacccgcaagcgcgttagtcatggtggtcgcaaaattcgggtcgttgcccagcgccgccgccagttcattcagcgtgttcagtgcatcaggcgacgagtccacgagggcagcaatcgcggccataacataa

SEQ ID NO: 475230 - DNA, 501 bp, Shigella flexneri
gtgggtgtggttggcgttccggtcagagccggactgttcaggggcgctttcttgtttgtttcatccattaccaccttaaccgctttcgctgtcgcggccagtgactcggatgcactgttggtcgcactgctgagctgcactatcccctttttcgtcgtgctcgcatcttccagagatacgacatcagcaatatcctctgcccgttttgctgctgtctcagcgcgcattgccgcggattctgccgcgcttttgctctgcgctgccgccgtcgcactgcctgcagactctgtcgccttagaggatgccgtcgtggcactgcccttcgctgctgacgcctgtttagtcgcctcatcttttgaagcagacgcagatgatgccgatgacgctgccgaaccggctgacgtgctggctgcgcgtgctgagcctgcagcatcagtcgcattggttgccgcctcactggcagatgtgccggcatccctggctgaggtgtactggcaatag

SEQ ID NO: 475231 - DNA, 225 bp, Shigella flexneri; identical to SEQ ID NO: 133446

SEQ ID NO: 475232 - DNA, 234 bp, Shigella flexneri
atgaccttcgaacaatttgtacgtgagtttgccgaatggttttcacaaaaacgtccggcggcgatgatgatcggcatccgtgcggatgagtcctacaaccgttttgtcgccatcgccagtttaaataaacaacgttttgccgacgataaaccatggactacggccgcaccaggcggtcatagctggtacatttaccccatttacgactggaaagtggctgatatctggacctga

SEQ ID NO: 475233 - DNA, 138 bp, Shigella flexneri
atgggggatactatgcaacaacgattaacgcaggatttaacgcaatttctcgccagcttgccggaagatgatcgcatcaaagcgattaatgaaatccgcatggcgatccatcaggttagccctgaagtggcacactga

SEQ ID NO: 475234 - DNA, 303 bp, Shigella flexneri
atgaaaaaaagaaattttagcgcagagtttaaacgcgaatccgctcaactggttgttgaccagaaatacacggtggcagatgccgccaaagctatggatgttggcctttccacaatgacaagatgggtcaaacaactgcgtgatgagcgtcagggcaaaacaccaaaagtctcccccattaccccggaacaaattgaaatccgtgagctcaggaaaaagctacaacgcattgaaatggagaatgaaatattaaaaaaggctaccgcgctcttgatgtcagactccctgaacagttctcgataa

SEQ ID NO: 475235 - DNA, 384 bp, Shigella flexneri
atgacgattaaagacgctttccagttcggtattgagccagtacgtatcaccgacaccgacaacattcaggtcaatgaaggtctgcctactaacgctgacccacaggtctatgccctccagttagctaagacggttaaggctatgctgaacggtgtacttaaagacgctcaggaaaacattccgttccctgtagaagtcctgccgactggatttgcccctatatttccagacatctgttatcacttaacccattacaagccctctgccgcagatattcccgtggcgagcgataacccagcgcactatgcggatgccattcgttataatgctcgaacgcctctgcaaggttctttgctgccgttaacccgtctggtttgggcatga

SEQ ID NO: 475236 - DNA, 492 bp, Shigella flexneri
atgatgttcaacaacaacaactggaagctgtcagtcaccgacatcaacctttatgaaaacactgtgagtctggacggtcagtcctatccgttgtcgctcgctatcaagaccctcattccgggctacctgtccggcctgccgtctaccagccgtgagtctatggatttactggaagctctggctgaagctggcgtgaccattggtaacttcttcagtaatgacctgatgaccgcctaccaacgccgccagatgaacaaacgagctgaagctgagcgtatcgctaaagagctagcgtctcagaaagagcgtacccgcgaaatgttcatgaccgaagacgaatggcaaaaagagctacagcgccgcgaacaggtcaaagctgaacgccggacctatggtgaaaacctccgcagtgctacccattccgctggccgctcccgtgccgctatcgtcgctgaccttgagtcaggcggtaactggatggacagcctgtaa

SEQ ID NO: 475237 - DNA, 174 bp, Shigella flexneri
atgattgacccgcgcacacctgagggccgcatgactctccgttaccgtggctaccggactgaagtcctcctcagagagcttggtctagacccggaagatgagacccgccagcaccaatcccgagacgagctaatagcccaactggtcgctatgaaactgccgcttaaccgttag

SEQ ID NO: 475238 - DNA, 162 bp, Shigella flexneri
atgaccagcttcaatccgaagggtctggagaacggctattaccgtcttcagaataaccactacaacggtcaggaggggcttaaggtcctcaccaagggttacgagtggcttaagtccaacaaggtcgagctggttcgtctgtgcgctaagggaggactctaa

SEQ ID NO: 475239 - DNA, 738 bp, Shigella flexneri
atgcaaagaacgctgctaactgagggagtcgatatcacgtatctgaagcaagatgaatggcaccggacatccacggtgcttgtcgatctgaacgatcaaggggaacgttcatttacgtttatggtccgccccagtgccgatctttttttagagacgacagacttgccctgctggcgacatggcgaatggttacatctctgttcaattgcgttgtctgccgagccttcgcgtaccagcgcatttactgcgatgacggcgatccggcatgccggaggttttgtcagcttcgatcctaatattcgtgaagatctatggcaagacgagcatttgctccgcttgtgtttgcggcaggcgctacaactggcggatgtcgtcaagctctcggaagaagaatggcgacttatcagtggaaaaacacagaacgatcaggatatatgcgccctggcaaaagagtatgagatcgccatgctgttggtgactaaaggtgcagaaggggtggtggtctgttatcgaggacaagttcaccattttgctggaatgtctgtgaattgtgtcgatagcacgggggcgggagatgcgttcgttgccgggttactcacaggtctgtcctctacgggattatctacagatgagagagaaatgcgacgaattatcgatctcgctcaacgttgcggagcgcttgcagtaacggcgaaaggggcaatgacagcgctgccatgtcgacaagaactggaatag

SEQ ID NO: 475240 - DNA, 489 bp, Shigella flexneri
gtggtttacttaagtaataatgctgataaatctatttctgtatttagcaaagaagaaaaaataccttatctcatccaggcttgggtagatccatttaataaagaggataaaagcaaagcgccgtttaccgttattccgccagtatcacgattagaaccttcgcaagaaaaaatattacgcattattcacaccaaaggtgtgtcattgcctgatgatcgcgagtcagtcttctggctgaatattaaaaatattccgccatcagcgagcaacaaagcgacgaactcgctggaaatagcagtaaaaacgcgtatcaagctgttctggcgaccagcaaatatccgccttattcccgaagatgctgcgccgaaagtgaaatggcgccgggaagggcgaaatctgatagcagagaatcccaacccaattcatatcagtgtgatggatgaaccgccccgggaatcctggagactaaacttcctgagaaagaggtaa

SEQ ID NO: 475241 - DNA, 495 bp, Shigella flexneri
atgaagcgtaatattataggcggtgcattcactctggcatctctaatgctggccgggcatgcactggcagaagatggtgttgttaacttcgtcggtgaaattgtcgacactacttgtgaagttacctccgatacagccgatcaaattgtcccactgggtaaagtcagtaaaaatgcattttcaggtgtaggtagtctggcgtcgccacagaagttcagtattaaacttgaaaattgcccggcaacgtacactcaagcagccgttcgttttgatggtacaggacaagcgattgcggcaaccggcgttggtattcgtatttttaaccagtccgataattcgcaggttaaactttataacgactctgattataccgctatcgatgctgaaggcaaggctgaaatgaagtttattgcacgctatgtggcaaccaatgcgaccgtaacggctggtacggcgaacgctgattcacaatttactgtcgaatataagaaataa

SEQ ID NO: 475242 - DNA, 612 bp, Shigella flexneri
atgaattcccagacaacaaaagatattccctgcttccgttcttatttgcctgatgccctgcgtttaagatttgaagataaactgaccatccgggccatcgctcagcgtctgggtctcagtcattccacaatacatacgctttttcagcgatttcttgcatccggtatcgcatggccattgcccgattcagtttcattcgctcaacttgacgccatcctttatgccaacagaaagaaggaattaacagagcctcaaatcagagaaggctcatggcgaaaagaacggcgaaccagctatagccgtgaatttaaggtccgtctggctaagcaggcgttacagcctggggctgttgttgcccggatcgccagagaacacgatatcagggatttcagtgcccagtactcccaccggaacgtatatagcatccccacaatttttcattacgggatgttcagagcattcattaccggggtcatattgcgccctgtccggggtgccggatgctcatgtctctggcgcaatgcccgggctttttattcgcacatcgtgaggaatgcaccgtggaaattaaaaaaatcattaatccccgttataccgaaagtggcgcagtag

SEQ ID NO: 475243 - DNA, 1365 bp, Shigella flexneri
atgaggggatctctcagtgctttgcctggattaaacaccgcctttgcccgacatccaaaagagatatttccgctgctgattcatttcggcgcaacagaactggccctgcccattgcccgcgtctggcacctttttgcgggccagcgtaatctggctcgccagtggattttacaatggccggaacatacggctactgcacttatccctcttgtcttcaccaaatctagcgataaaagcgaagctgcattacttgccctgcgtttactttacgaacatgggcatggcgaattgctacaaactgtagccaatcgttggcagcgtacagatctatggcctgccctggaacaattacttaaacagagtccaatagagatttacccggcacgcattccaaaagcccctgatttctggcatccgcaaatgtggtccaggccgcgccttatcactaataatcaacctgttaccgatgacgctctggaaattatcggcgaaatgctgcgctttacccaggggggacgtttttatagcgggctggaacaactgaaaacgttctgccagccacaaacgctggcagcttttgcctgggatctcttcactgcgtggcaacaagctggtgcccccgcaaaagacaactgggcatttctggcgttaagtctctttggtgacgaaagcacggcacgggatctaacgacacatatcctcgcctggccacaagaaggcaaatctgcccgtgcggtcagtggcctgaacatccttaccctgatgaataatgatatggcgctgatgcagctgcatcatatatcgcaacgggcgaaatcccgccccttacgtgataacgcggcggaatttcttcaggtagtcgcagaaaatcgcgggctaagccaggaagagttagcggacagattagtcccaacactgggccttaatgatccgcaggcgttgagttttgattttggtccccggcagtttaccgttcgcttcgatgaaaacctcaacccggttatctttgatcagcaaaacgttcgccagaaaagtgttccccggttgcgcgccgatgacgatcaactgaaagcgcccgaggcactggcccgactaaaagggttaaaaaaagatgctactcaggtgagcaaaaacctgctcccgcgtcttgaagctgccctacgtaccacccgacgctggtcgctggcagattttcattctctgtttgttaatcatccctttacccgtctggttacccagcgattaatatggggggttatccggcaaatgaaccgcgtcgtttactcaacgcctttcgtgtggccgcagagggggagttctgcaatgcgcaagatgagccaattgacctgcctgcggacgctctga

SEQ ID NO: 475244 - DNA, 150 bp, Shigella flexneri
atgaaaataataaatattgcaagtaaacttttaatagttaatgatacggaaaaagcattcatctgcggagcaaatctcgataatacaccaagtaatacttctgatagtaacaatactatcataacaggactggctaaaataacagcctga

SEQ ID NO: 475245 - DNA, 348 bp, Shigella flexneri
atgataacgctgccgaccggtaccaaaatctggatcatcgctggcatcacagatatgcgttgtggcttcaatggcctggcttcgaaggtgcagaacacgctgaaagatgacccgttctccgggcatatcttcgtcttccggggccgcagtggcaaaatggtgaaaatactgtgggccgatcgtgacgggttatgcctgttcgccaaacgcctggaacggggccgcttcgtctggccggtgacccgggaagggaaagtgcacctgacgccagctcagttatccatgctactggaggggagcgcgtggcaacatcccaaacggacagaacggcctggcatccggatataa

SEQ ID NO: 475246 - DNA, 198 bp, Shigella flexneri; identical to SEQ ID NO: 15665

SEQ ID NO: 475247 - DNA, 141 bp, Shigella flexneri; identical to SEQ ID NO: 462785

SEQ ID NO: 475248 - DNA, 861 bp, Shigella flexneri
gtgatctatttccctccaaaatttgatgaaacccgtcagtatccggcaattgtggtatctcacccaggtgggggcgttaaagagcaaacggccggaacctatgccgaaaagctggcggaaaagggatttgtcactattgcttatgacgcatcttatcaaggtgaaagtggcggcgagccgcgtcagttagaaaacccatacattcgtactgaagacgtcagtgccgtgattgattacctgacaacgctttcttatgtcgacaatacccgaattggtgcgatgggaatttgtgccggtgcaggatatacagccaatgctgcaattcaggatcgccgcatcaaggccatcggtaccgttagtgcggtcaatattggttcgatgttccgcaatggttgggaaaacaatgtgaaatctattgatgctctgccacacattgaagctggctcaaacgcccgaaccagcgatattagcagcgaagaatacgccattatgccactggctccaatgaaggaggccgatgcgccgaacgaagaactgcgtcaggcctgggagtattaccacacacctcgtgcgcagtatccaacagcaccgggttacgctactttgcgcagccttaaccagattattacctatgatgcttaccatatggcggaagtgtacctgactcagccgatgcagattgtggcgggcagccaggcagggagcaaatggatgagtgacgacctgtacgatcgggcatcaagccaggataaacgctatcacattgttgaaggcgcaaaccatatggatctttatgacggcaaagcctatgtggctgaagcaatttcagtattagctccgttctttgaggaaactctgtaa

SEQ ID NO: 475249 - DNA, 363 bp, Shigella flexneri
atgaaacatattcaaatccgcaatagtgatatggcctggcatattgctgccaatattcagtttccaccaaattttgatgagtcaaaacagtatccggcgattatcagcgtccatccttttggcagttgtaaggagcagacgtctggcaatatctatggcaaggcattggctgaaaaaggctatgtcgttctcgcttatgacgccagtttccagggagaatctggtggggagcctcgttggatagaagatccgacacagcgcgtagaggatattagccgtgttatcgattatgcagtaactctgccatatgttgatgctgaacgcattggcgtgctgggtgtgtgtggggggtgcccctattaa

SEQ ID NO: 475250 - DNA, 273 bp, Shigella flexneri
atggaaatatgcgaaggccacaataatttttacattaatgacgaacaaggcaagcaaatcgctgaaattgtctttgtgccgaccggagagaatttagcgattatcgaacataccgatgtcgatgaaagcctgaaagggcaagggattggtaaacagctggttgcgaaagtcgtggaaaaaatgcgtcgggaaaaacgaaaaattatcccattatgtccatttgcgaaacacgaatttgataaaacgcgggagtatgatgatattcgcagttga

SEQ ID NO: 475251 - DNA, 183 bp, Shigella flexneri
atggaaggtaaaaacaagttcaatacttatgttgtttcttttgattatccatcatcttattcctcagtgttcttaagattaagatcattgatgtatgatatgaatttctcctctatcgtggctgatgaatatgggataccacgacaattgaatgaaaactcggtaatgactccaacttactga

SEQ ID NO: 475252 - DNA, 294 bp, Shigella flexneri; identical to SEQ ID NO: 25632

SEQ ID NO: 475253 - DNA, 210 bp, Shigella flexneri
atgacggatggctggccgctgtatgaatcacgcctgaagggaaagctgcacgttatcagcaagcgttacactcagcgcattgagcgacataatctgaatctgagacaacatctggcaaggctggtacggaagtcactgtcgttctcaaaatcggtggagctgcatgacaaggtcatcgggcattatctgaacataaaacactatcagtaa

SEQ ID NO: 475254 - DNA, 372 bp, Shigella flexneri
atgaaaagacttcacaagaggttcctgttagctacgttttgcgcgttattcacagcaactctccaggccgccgatgtcactatcactgttaatggtcgggtagtcgctaaaccctgcactattcaaaccaaagaagctaacgttaatctcggggatctttatacgcgcaatctgcaacaacctggttctgcatctggctggcacaatattactttgtcattaaccgattgtccggttgaaacaagtgcagtgacggcaatcgtgacaggttcaactgacaatacgggttattacaaaaatgaaggtactgccgaaaatattcagatagagctgagggatgaccaggatgctgcgttaaaaaatggagggtaa

SEQ ID NO: 475255 - DNA, 168 bp, Shigella flexneri
atgcgtccggtgaaactgaatgaccttcatgccgggatgcagtggatcccactggtaccagaacagaacaatattttgccttactccgctcgtctgaagtcaactcagaagtccgtcaatccgggactggtgagggcttcggcaacctttacccttgaatttcaataa

SEQ ID NO: 475256 - DNA, 552 bp, Shigella flexneri
atgtcaactcaacccttaatgaagcatgaagtagttcttcctgtcatcgttgacggctatcactgggcctgtaatcaggaccgtatgtggaacctgaacgagctacataaagagcttgagcttccatctgctaaggagccgggtcagtggcgttctagcgtcaggacgcttcttgaccaagatgcaaatttgcatgttgctcatggtggttcgaccccggggacatgggctactgaagaggcggctattgcctatgcgatgtgggtctcacctgatttctaccttaaggtcatccgtgctttcatcgctttacgtaacgacaaagtgtcggaagctaaggcgctggcgcaggactccaaggaacttaagggtctcaagcctatagcccgtaactggctggaaaagctggataacccgaagcagggccacaccctgacagagtgtcttaagaatctcgacttcaggttaggtacaaagctggtatcagccaaggctcttaatgccgtattgaagtcagggcgtatagctaatccctttgaagtggcacactga

SEQ ID NO: 475257 - DNA, 123 bp, Shigella flexneri; identical to SEQ ID NO: 461374

SEQ ID NO: 475258 - DNA, 534 bp, Shigella flexneri
atgaaacagcctgcgcccgtttatcagagaattgcgggtcatcaatggcgacatatctggctttctggcgatatacacggttgtcttgagcagttgcgccgcaaattatggcattgtcgttttgatccgtggcgagatttacttatctcagtgggagacgttatcgatcgtgggccgcaaagtttacgttgtctgcagttactggaacaacattgggttcgtgcggtaagaggcaatcatgaacagatggcgatggatgcgctggcattccagcagatgtctttgtggttgatgaatggcggcgactggtttattgcgctggcagataatcaacagaaacaagcgaaaacggcgctggaaaaatgtcagcatttgccctttattcttgaagtacacagtcgcaccggcaagcatgttattgctcatgccgattatccagatgatgtttatgaatggcaaaaggacgttgatttgcatcaggtcttgttgaggtgtactggcaatagcggacactaccatttgttctttttttaa

SEQ ID NO: 475259 - DNA, 465 bp, Shigella flexneri
atgaaccattatccgtcagtcactccactggagacgacggaagatcgttgccgaagcggtgttccaccgctcccagcatgtcgccaatgggagagcatctacggtctgattgaactgtttattcaaattgtccaccgtctgtcagtacgctctgaacgtcggctggttaaaacactgctcgctgattttcagagggttcacggtaaaacagcacttttattccggattgcggaagcggctctgaataatccggatgggctggttaaagaggttgtgtaccatctgcatattgttgaaccagatcgcagcggtaagagaagttcatcatacttggcgcagttacgcgatgtttctgctagaggtgatgccgtaaagaacggcagaacattaccggaacaagatagcggtctacctgcactggtatcagacccggggcttccccggatgatctccacggtactttag

SEQ ID NO: 475260 - DNA, 294 bp, Shigella flexneri
atgattaagtttagcgcaacgctcctggccacgctgattgccgccagtgtgaatgcagcgacggtcgatctgcgtatcatggaaaccactgatctgcatagcaacatgatggatttcgattattacaaagacaccgccacggaaaaattcggactggtacgtacggcaagcctgattaacgatgcccgcaatgaagtgaaaaacagcgtactggtcgataacggcgatttgattcaggggagtccgctggccgattacatgtcggcgaaaggggtaatgctgccaacttactga

SEQ ID NO: 475261 - DNA, 798 bp, Shigella flexneri
gtgtccgttaaactcaggctacctcagtttcaatttgcaacagataatggttatacatcaggaaatccatttaacggtctgacaccattaaaaaagtccaagatagaaccagatcccctcacccgtgacgaatttattcgttttattgaggcttgccgtcatcaacaaacaaaaaacctgtggattatcgctgtatacacgggtattcgtcacggggagctggtatcactggcctgggaagatatagaccttaaagcgaggactataaccatccgccggaattatacaaaactaggcgaattcactccaccaaaaactgatgctggtaccggaagaacgattcatctagttcaaccagctattgatgctcttaaaagccaagcggaaatgaccatgcttggaaaacagcattctgtagaggtaaagcagagggaatatgggagaagtactgtgcataaatgcacttttgtttttagtcctcaggtaataaaacagcggcagttttccggaccgcactataaggttgactccatcagggagtcatggacaagtatcttaaaacgcgcaggtctgagacacagaaaatcgtatcaatccaggcatacctatgcatgctggtcacttgccgcaggagctaatcctagttttatcgcaagccagatgggccacacaaacgcacaaatggtattcaatgtttacggagcatggatgaaagacaacaatcacgaacagatagaacttcttaacagaagactatctgaaagtgtcccatgcatgccccataagaaagcggggtaa

SEQ ID NO: 475262 - DNA, 438 bp, Shigella flexneri
atgccgtttgacctgctgacggttttgccgacccgcctggatattgaagtgaatggctttaacggcggtgttctgaacggtgttccttctgcatatcactggtatacagaacggtatggcgtgaagtggccttgtgggtatgacctgaatatcagcagtcagggggaaaacttcattcaggtagatttcgacacgccgtggtgtcagccggaaagcgacgttgttgcagaattaagccgccttttcggctgcacgctggagcactggtacgccgaacagggctgtgatttctgtggctggcagttgtatgagcgcggagagcttgttgatgtgctgtggggggaactggaatggtcttccccgacagatgacgatgagctgccggaagtcaccggacctgcgtggatagtcgacaatgtggcgcattatggcggatga

SEQ ID NO: 475263 - DNA, 480 bp, Shigella flexneri
atgaaaatacctgaagcagtaaatcatattaatgttcagaataatattgatcttgttgatggaaaaacgaatccgaataaagcaacaaaagcattacaaaaaaatgtattacgcgtaacaaactcatcttcttctggcataagtgaaaaacatttagatcactgtgctaatactgtgaaaaactttttaaggaagtctatagcagcgcaaagttatagcaaaatgttttctcaagggaccagtttcaaatcactaaatctttctattgaagcgccatctggagcacggtcatcatttcggtcacttgagcatctcgataaggtgtccaggcactatatctctgagataatacaaaaagttcatcctctttcttcagacgaacgtcacttactttctattattattaattctaattttaacttcagacatcaaagtaactctaatctgtcaaataatattcttaatattaatatcctttga

SEQ ID NO: 475264 - DNA, 552 bp, Shigella flexneri
atgagcaagcttcgtgactttaatcctatgcttgagaagtattttaaaagccagtattacagcttaagcagtaaatccaagacacttggaaacgaagcttttaatcgtgagttagcaaaattaaatcaatctcttcgtgaaacactttctaagtttaataagaccaccagcaaaaataattacagtgaaaatgcttcaaatagtctggatgtattagctacaagtgcaatcaaagcaggtacagccatttatggttttcagacagccttagaagcttataggaaggttatggagattggtctgaaaaaagaagcatcacaacgagcggcacaattcgttttaggtgatgaaggtgctaaacgagctacagaatttgttaagaatcttgctgatagtagtggtgtagaccagattgaaacatttagcagttttgctaagttttccgctggtgctggtgatatgaatgcagaccagaaagagtccttattttctaatgtgattggtacatcccgactaatgggtttaagcactgatgagattaacgggatttga

SEQ ID NO: 475265 - DNA, 303 bp, Shigella flexneri; identical to SEQ ID NO: 473532

SEQ ID NO: 475266 - DNA, 813 bp, Shigella flexneri
gtgaatgccacatcactggtacaggctataggtcgccttcagacgatacgtagcctaggagtgacattacctgcaattacgccagtttcggatatccgtattgcggccatggcacgttatgcctcaacggctaagataacagcgcttcagcgcttaccagaaaaaagaaaactggctacgcttgttgcattctcttgctgcatggaggcgacagctcaggatgatgctcttgagttacttgaagcgctactccgggatctgtttaatgaagcggttcaagcagataaacgtaaccgccaacgaacacttaaagatctggatcgtgcagcagaaatactggcaaaagcatgtcggatgcttcttgacgataaattatctgatactgatgttcgtgatagtatcttcaatatcattcccgaagatgtactgactcatgcagtaaataatgtgacatcaattattcgaccagataataacgtttacttcaatgaacttgattctaaattcaaaacggtgcggcgtttcttacctgacttactttccagaatacattttgagggcaatgcctcagccaaaacattaattgaagcgctttgctggattgaagttaatttaaaaaagaaaaaaacagataacgatgcaccacgcgaaataatcaataaaccgtggcaacagcatgtgataagaaaagatggtagtattgatttccacgcctatacattttgtgcacttaaggaacttcagcttgcactgaaaaaacgggatatttatgtcaatcccagctggcgttatgcagatccccgggcaggatga

SEQ ID NO: 475267 - DNA, 750 bp, Shigella flexneri
atgcgctacttattaattgtaattatatttattataggttttagtgcattacctgtatgggcaatggactgctatgctgaacatgaagagggaaataccgtagtcattggttacgtaccaagaatttctatccccagtaatggtaaaaaaggtgataagatctggcaaagcagtgagtattttatgaatgtcttctgtaataatgcattacctgccccatcacctggagaagaatacccatcagcctggactaatataatgatgtttttaccaggcggtcaggacttttataatcagaactcctatatttttggcgtaacatacaatggagttgattatgattcgactgcccctaatgctatcgcagcaccagaatgcattgatataaaaggagcgggtacctttaataatcactataaaaaccccgctgtctgtagtggaggtcctgagcctcaattatcagtaacctttccagctcgcgtacaactctatattaaattagcaaaaaatgccaatagagttaataaaaacctggtgttacctgatgaatatatcgctccagagtttaaaggtatgagtggcgcaggagctatagaagtagacaaaaatttgaccttcaggattcgtggattaaataatattcatgtccttgactgctttgttaatgtcgcactggaaccagctgatggcgttgttgactttggtaaaataaattcccgaacaattaaaaataccaccgttagtgagtaa

SEQ ID NO: 475268 - DNA, 186 bp, Shigella flexneri
atgttgccacaaacgcaaagtttaatggtaaccccttatagccatgcagatacgcagtttaaaaatgttccgtcagcttttcaggttggttatatcaatgattttggtggattaagtttttatgaaataaactgcccgacggttaataactcttgtaatgtttccgtagccaaacgagataaataa

SEQ ID NO: 475269 - DNA, 867 bp, Shigella flexneri
atgaagtatgtctttattgaaaaacatcaggctgagttcagcatcaaagcaatgtgccgcgtgctccgggtggcccgcagcggctggtatacgtggtgtcagcggcggacaaggataagcacgcgtcagcagttccgccaacactgcgacagcgttgtcctcgcggcttttacccggtcaaaacagcgttacggtgccccacgcctgacggatgaactgcgtgctcagggttacccctttaacgtaaaaaccgtggcggcaagcctgcgccgtcagggactgagggcaaaggcctcccggaagttcagcccggtcagctaccgcgcacacggcctgcctgtgtcagaaaatctgttggagcaggatttttacgccagtggcccgaaccagaagtggccaggagacatcacgtacttacgtacagatgaaggctggctgtatctggcagtggtcattgacctgtggtcacgtgccgttattggctggtcaatgtcgccacgcatgacggcgcaactggcctgcgatgccctgcagatggcgctgtggcggcgtaagaggccccggaacgttatcgttcacacggaccgtggaggccagtactgttcagcagattatcaggcgcaactgaaacggcataatctgcgtggaagtatgagcgcaaaaggttgctgctacgataatgcctgcgtggaaagcttctttcattcgctgaaagtggaatgtatccatggagaacactttatcagccgggaaataatgcgggcaacggtgtttaattatatcgaatgtgattacaatcggtggcggcggcacagttggtgtggcggcctcagtccggaacaatttgaaaaccagaacctcgcttag

SEQ ID NO: 475270 - DNA, 300 bp, Shigella flexneri; identical to SEQ ID NO: 84330

SEQ ID NO: 475271 - DNA, 1209 bp, Shigella flexneri; identical to SEQ ID NO: 19673

SEQ ID NO: 475272 - DNA, 456 bp, Shigella flexneri
atgattcagttcaaaccaacgcgaaacatcgacctgatcgaagcagtaggaaatcacactgacattatcgccgggagcaacaacggcgatggatacgactacaagcctgaatgccgttactttgaggttaacgtgcacgggcagttcggcggaattgtttactatcaggagattcagccgctaacctttgattgccacgccatgtacctgccagagattcgtggattcagcaaggaaatcgggctggcgttctggcgatacattctgactaacaccaccgttcagtgcgtcacatcgttcgctgcgcgcaaattccgccacggtcagatgtactgcgcaatgattggccttaagcgtgtaggaaccatcaagaaatacttcaaaggcgtggatgacgtgacgttttacagcgccacacgcgaagaactaatcgacttcctgaatcacgggagatag

SEQ ID NO: 475273 - DNA, 303 bp, Shigella flexneri; identical to SEQ ID NO: 473532

SEQ ID NO: 475274 - DNA, 216 bp, Shigella flexneri; identical to SEQ ID NO: 474400

SEQ ID NO: 475275 - DNA, 291 bp, Shigella flexneri; identical to SEQ ID NO: 464287

SEQ ID NO: 475276 - DNA, 252 bp, Shigella flexneri
atggaacctgtttatgtgatacttaatgctcttctggattccgggcgatttacgcgtaaacttattctgttagggctgtcaggcacattttcctatatcttcggctcaattgttgcgacactgggaatgggacttgttgtcgattatctgggatggggggccacatttatcgtactgatactgtctgctgtttttgccatcattttcacactgatgagtcgtgaacgctcactggagttcgaaaaagagtaa

SEQ ID NO: 475277 - DNA, 303 bp, Shigella flexneri; identical to SEQ ID NO: 475222

SEQ ID NO: 475278 - DNA, 375 bp, Shigella flexneri
atgaaagcgctggaaatggcatgggaaacccgtggtaagcccggcggggtgatgttccacagcgatcagggcagtcattatacgagcaggcagttccggcagttattgtggcgataccagatcagacagagtatgagccggcgcggaaactgctgggataacagcccaatggaacgcttcttcaggagtctgaagaacgaatggatgccggtggtgggttacgtaagcttcagcgaggcagctcacgccataacggactatatcgttggatattacagtgcactaagaccgcacgaatataacggtgggttacccccaaacgaatcggaaaatcgatactggaaaaactctaactcggtggccagtttttgttga

SEQ ID NO: 475279 - DNA, 222 bp, Shigella flexneri
atggatctaggttactggcgaacacatgatttcagaagaacgcttgttacacggctgtccgagatgaatgtcgagcctcatgttactgagcgaatgctcggtcatgaacttggcgggataatgtccgtatacaataaacacgactggatagaggctcagcgcaaagcgtatgagcttcacgctgataaattgttctggcacatcaggagcatttctgattaa

SEQ ID NO: 475280 - DNA, 249 bp, Shigella flexneri; identical to SEQ ID NO: 464355

SEQ ID NO: 475281 - DNA, 960 bp, Shigella flexneri
gtggcgcaggcgcagcagagtgccggggctgcagccggaaacgcacagcagacggcgcaggatgtggcggcagccgcaacggcccgtgatgatgcacaacgttttgcggagaaagcccgacaggatgcaaccgtcacagctgaggacagaaaggccactgcggaagatgtgacaagcacaggagcaaatgcagccgcagccggacagagcgcacaggatgccgcaggttatgcccgcgcagcagaacaggccaaaaatgacattgatgctgcgctgaccggcaccctgaaaacggctaaccatctgtctgaaatcgcagcagcaggcgaaaaggcacaacagaagtcccgggataatctggggctgaaaagtgcggccacgatggaagcacagagcgacatttacgaccggacaaaaggccgtctggcgatacccggcgcattcggctttgggtgtgcttttctgcctgaagatgttatccgttttgacactaagagtgatttcctggcctgggtaaggaatgcgctgccaggtgaatattccgttgctggcccctacggcatcatcatacccgacacacggtttgaaggggtgctcagcatccggtggactgatgcacgccctgagacaacagaaccgcggtacagagccaaatcccttactttttacggcattaacggccccatttatcatacccgctactgctactggcccatatccagactgactggctgggtgaaaataaatataaccacagaagatattatttacagaatcgtggcgagctctgtccgcaacagatggggagaccctgacattggcgggctgattattgctgcgtaccagggagaagctgacggtgataaagtcatcagacttgtcaggggcagtcatacagaggctcacgactgggaccggtggggatttcagtgcccagtactcccaccggaacgtatatag

SEQ ID NO: 475282 - DNA, 285 bp, Shigella flexneri; identical to SEQ ID NO: 461629

SEQ ID NO: 475283 - DNA, 276 bp, Shigella flexneri
  misc_feature (256)..(265): n is a, c, g, or t
atgaatataacaactctgactaatagtatttccacctcatcattcagtccaaacaataccaacggttcatcaaccgaaacagttaattctgatataaaaacaacgaccagttctcatcctgtaagttcccttactatgcttaacgacacccttcataatatcagaacaacaaataaggcattaaagaaagagctttcacaaaaaacgttgactaaaacatcgctagaagaaatagcattacattcatctcagattnnnnnnnnnntctcagattag

SEQ ID NO: 475284 - DNA, 534 bp, Shigella flexneri
atgaaaaaccttactccgttcacgcctcttgcggagcagtatgttaaccagcttcagaacctttccagtttagaaggtcaggggcaggcacttaatcagtattacaactctcagcagtataaagaccttgcaggtcaggctcgttaccagagtcttgctgctgcggaggcgacgggtggacttggttcgacagccacaagcaatcaactggctacgatcgcgccgacactcggtcagtcttggttatcaaaccagatgagcaattacaacaatctggcaaacgttgggcttggtgcgctgcaaggtcaggcaaacgccgggcagacgtacgccaacaacatgagcagcattgcacagcaaagcgcagctcttgccgctgctaatgccaataaaccatcaagtcttcagactgcaattagtggcggaacatctggtgcgattgccggtgcaggtcttgccagccttttgggaacatcaacaccttggggcgctggcattggtgctggtatcggattgcttggctcgttgttttaa

SEQ ID NO: 475285 - DNA, 207 bp, Shigella flexneri
atgtcgccatcattacgcaaggctgttgcagttgctattggtggcggggctgttgctatagcatctgtgttaatcactggcccaggtggtaacgatggtctggaaggtgtgagctacataccatacaaagatatcattggtgtatggactgtatgtcacggacacaccggaaaagacatcatgcctggtgaggtgtactggcaatag

SEQ ID NO: 475286 - DNA, 216 bp, Shigella flexneri
atgaaatccatggacaaaatttcaacgggcattgcctacggcaccgccgccggcagtgccggctactggtttttgcagtggttggatcaggtcagtccatcacagtgggctgcgattggtgtgctgggaagtctgcttctggggcttctgacttatctgacgaatctgtatttcaaaataagagaagataagcgtaaggctgcgagaggtgaataa

SEQ ID NO: 475287 - DNA, 279 bp, Shigella flexneri; identical to SEQ ID NO: 127146

SEQ ID NO: 475288 - DNA, 327 bp, Shigella flexneri
atgactaaaaatacacgtttttcccctgaagtccgtcaacgggcagttcgtatggttctggaaagtcagggcgaatataactcacaatgggcagcgatttgttccattgccccaaagattggctgtacgccggagactctgcgtgtctgggttcgccagcatgagcgggataccgggggcggtgatggagggctcaccaccgctgaacgtcagcgtctgaaagagctggagcgtgaaaatcgtgaactgcgccgcagtaacgatatccttcgccaggcttccgcttattttgcgaaggcggagttcgaccgcctctggaaaaaatga

SEQ ID NO: 475289 - DNA, 402 bp, Shigella flexneri; identical to SEQ ID NO: 474686

SEQ ID NO: 475290 - DNA, 696 bp, Shigella flexneri
atgcttccccgttttgccgatatttttcagcagggaaaccgctggcttaactggctggagaaacaaccggaaggggcagtccgtccggtggtaattgaatcagtgacaaaaatcatggcctgcgggaccacactgatgggctacacgcagtggtgttgttcatcaccggactgttgccatacaaaaaaggtctgcttccggtgtaaaagccgctcctgcccgcactgcggggtgaaggctggcgcacagtggatacagtatctgctgagcctggtccccgactgcccgtggcagcatattgtgttcacacttccctgccagtactggtccctggtgttccacaaccggtggttactggcagagatgagccgcattgcagcggatgtgatactggaaatctgccatcaggcagatgtggagccggggatattcacggtgagccacacatgggggcgtgaccagcagtggcatccgcatatccatttatcgacaactgccggtggtgtgacgtcgggccacacctggaaaaatcttcatttttacgcccgtaaggtgatgagcatgtggcgctaccggataacacggttgctgtcacggaaataccctgacctggtgatgccggatgcgctggcagcagaaggaagcagtaaacgggaatggaatcgcttcctggacacgcattaccgccgtggctga

SEQ ID NO: 475291 - DNA, 780 bp, Shigella flexneri
atgctctgcggcttcgatgatgatcttgccgcacagacaacgcaggccagcaaccgtatccgcggccttctgacccagatacatccggcactggagcgcgttctcggtccgagacttgagcacccggcggtactcgatcttctccagcgatatccctcaccagaaaaactcgcttcgctgggtgagaagaagctggcagcccagctctgcaaacttgcgcctcgtctgggtaaacgccttgcagcagacatagctcaggcactggccgaacaaaccgtcgtcgttcccggcacgaatgccgctgccgtagtactgccacgtctggcactccagctcatcacgctgcgtaagcaaagagacgaggtggcgcttgaggtagaacagcgagttcttgctcaccctctttacccggtcctgaccagtatgcccggagtcggtgtcaggaccgcagccagactcctcaccgaggtcgcctgccgcgccttcgcctctgccgcacatctcgctgcttatgctggccttgcgccggtaactcggcgatccggctcgtcaatacgcggtgagcatccctcgcgacggggtaataaagctctcaaacgggcgttgttcctgtcggccttcgccgcgctcagggatccgctctccagggcttactacacccgcaaaatgagtcagggaaaacgacacaatcaggcgcttatcgccctggcgagacgacgctgcgacgttctgttcgccatgatgcgcgacgggactttttataccccgcaggggtcataa

SEQ ID NO: 475292 - DNA, 237 bp, Shigella flexneri
atggttacgttttggggaaattatgaggggatctctcagtgctttgcgcgtttcgcgaaggatgaacgtggtgttactgcaatcgaatatgcattgattggtgttgctatggcaactctgcttgctttcatctttggcgatcagaactcaggcttcctgggcgcaattaaagatgcattcgacgctatcgctgcagcaattcaacaggtaacgatttccggaacgagtaatccgtaa

SEQ ID NO: 475293 - DNA, 543 bp, Shigella flexneri; identical to SEQ ID NO: 475167

SEQ ID NO: 475294 - DNA, 627 bp, Shigella flexneri
ttgccgtctgcggggattgtgtggcgaagggctgcgccaactctgcgtatccgtgacccgcataaagatgaaaagatggcagcaatccataaagcactggacgaatgcagcgcagagcatccggtcttttatgaagatgaagtggatatccatcttcatcccaaaatcggtgcggactggcaactgcgcggacagcaaaaacgggtggtcacgccgggacagaatgaaaaatattatctggccggagcgctgcacagcgggacaggtaaagtcagctatgtgggcggcaacagcaaaagttcggcgctgttcatcagcctgctgaagcggcttaaagcgacataccgtcgggcgaaaaccatcacgctgatcgtggacaactacattatccacaaaagccgggaaacacagagctggctgaaggagaacccgaagttcaggggcatttatcagccggtttactcgccatgggtgaatcatgttgaacggctatggcaggcacttcacgacacaataacgcgtaatcatcagtgccgctcaatgtggcaactgttgaaaaaagttcgccattttatggaaaccgtcagcccattccccggaggcaaacatgggctggcaaaagtgtag

SEQ ID NO: 475295 - DNA, 591 bp, Shigella flexneri
atggccgcattaccatacatgcaactgtacatagctgattatctggctgacaccatgcatttgtcagcagaggagcacggcgcgtatttgttgctgatgttcaattactggcaaacaggaaagccaatacccaaaaacaggttggcaaaaattgcccgtctgactaacgagcgatgggttgatgttgaaccatccttgcgggagtttttttgtgataacggcgacgaatggatgcatcttcggattgaggaagatctggcatctgtcagagaaaaattaaccaaaaaatcagccgcaggaaaagcatctgttcaggccagaagaagcagaaaggaagcagatgttcaaacaaaacaagagagaaatttaacaggtgttcaaacagatgttggagtggtgttcgaacatgatgctggatttgcccctatatttccagacatctgttatcacttaacccattacaagcccgctgccgcagatattcccgtggcgagcgataacccagcgcactatgcggatgccattcgttataatgctcgaacgcctctgcaaggttctttgctgccgttaacccgtctggtttgggcatga

SEQ ID NO: 475296 - DNA, 462 bp, Shigella flexneri
atgaaaaaaagtgtattgacggcgtttataactgtggtatgtgcaacgtccagcgttatggctgctgatgataatgctatcacggatggctcagtaacatttaatggtaaagttattgctccagcttgtaccctggtagctgcgacgaaagattcagtagtcacattgccaaatgtcagcgccaccaagttgcaaactaatggagcagtctctggcgttaaaactgatgtaccaattgccttagaaggctgtgatgttactgtaactaaaaatgcgacgtttacctttagtggtacggctgacggcgtgcaacctacagcatttgccaaccaggctaccaccgatgtagcgacgaatgttgctctacaaatgtatctgccagatggttctacatcggtaactcccggtaccgaaacgtcgaatattcagttagcggattcggtaatgactccaacttactga

SEQ ID NO: 475297 - DNA, 168 bp, Shigella flexneri
atgaaccaagcaattcagatgttagcctcttacccgccatccggcaaggagaaaggctatgaagcgcaaccctctggtggtgtgtctgctcattatctgcattacgattctggcattcacactcctgacccgacaaacgctctacgaactgcggttccgggacggtga

SEQ ID NO: 475298 - DNA, 477 bp, Shigella flexneri
  misc_feature (423)..(432): n is a, c, g, or t
atggttgataaaataatatttacggttactcctattttttcaattcctcctcgcggagcggctgctgttgaaacgtggatgtatcaggttgctcagcgtaccaattttccaaatcgtattgtttgtatcaaaaatccaggatactcaaattacacctttgttaatgataattgtagtattcatagggttggattcagtcgcatatataagcggttatttcaaaaatggacaagacttgatcctcttccatattcacagagaatattgaatattgcacatgattttcctataacgaaagaaagtgttattgtagttcataatagcatgaagctatacactcaaattcgtaagcgagctcctcaggcaagagtggttatacatatgcataatgcatttgaaccaaaattgcttgagcaaaatgtnnnnnnnnnntttatgctgggcgtatcgtccctgacaaaggcatattgctgttga

SEQ ID NO: 475299 - DNA, 372 bp, Shigella flexneri
gtggtgtgggtcggtaaggatgtgacaggcatcgagccacgcaatgccagcgttatcgaagttccggatattaccgctaaccgacggattaccgcgccgggttactggttttaccgcaatgatgaatttgtctttgactacagactcaaagcggaagatgagcgtgatgcccttctggctcaggtcagtgcccggacaggggaatgggaagaagacctgctgctggggttaatcagcgacgaagataaagaaaagctgaaagcctgtcgtatttacgcgaaatcgctgcaggcgatggatttcagcaccatcactgataaatcctcatacaacgccattgaatggcccgcctctccggaaggttcttcctga

SEQ ID NO: 475300 - DNA, 570 bp, Shigella flexneri
gtgataacagatgtctggaaatataggggcaaatccactgattgtgctgatcgtgcggatgattactaccatgaccgtctggcgctgactgttgataattcaacgatcgacgacaactacgaacactacacatataacggcacttacaataatgccgctgatactcatgttgtagacgtttacaacattggtacggctattactctggatcaggaagttgatctgtccatcactaataactctcacgttgcgggtattacgttgactcagggttatgagtgggaagatattgacgacaacactgtcagcactggcgtaaacagcagcgaagtgtttaataacaccatcactgttaaagattctaccgtaacctctggttcatggactgatgaaggtactactggttggttcggtaatacaggtaatgccagcgattatagtggtaaatctaactttgtcaccgtagatactgacggagatggtgttgctgatagcactattgcaagctgggatgatgttgcattagctgtagttgcacatccgaatgctgataatgctatgcagacctga

SEQ ID NO: 475301 - DNA, 189 bp, Shigella flexneri; identical to SEQ ID NO: 463227

SEQ ID NO: 475302 - DNA, 516 bp, Shigella flexneri
atgtgccgccggtactcaaaaaaacatcccgatatcgacggagataatgggccgggtcgctctcgcggcggttttggcaccaaaatccatctggcaacagacggaagtggcctcccgttaaatatcgtgctaagccccggacaagctcatgaaagccagttcgcgcaacgacttctggacgggattggcgttcagcgtcagaacggcagcatgaaacgccgtggacatgcggtactggctgataaagcgtattcagggcgcgcattgcgcaatgagctgaaaaataacggtataaaggcagtaatcccccgaaagtcaaatgagaaaatggcatcggatggacgtgcacagcttgatcgtgatgcgtactgcaatcgtaatgtcgttgaacggtgctttgggcggctgaaagaatatcgccgcatcgccacgcgttacgacaaaacggcgagaaattacctggcgatggtgaaactgggctgcatccgactcttttatcaacgcttacgtaattaa

SEQ ID NO: 475303 - DNA, 300 bp, Shigella flexneri
atggtgcagtacacccgtaacagtttttacatcccactaatgactcgcctgcgcccgatggggagcactgtcgatgttgaaacagccagccgccacggtctgcgctggctgcacgatgtcgctaaccaacgaaagcatgaaacaatccaggcccgtccctgtgatcgctggctcgaagagcagcagtccatgctggcactgcctccggagaaaaaagagtatgacgtgcatcctggtgaaaatctggtgagcttcgacaaccccgttactttattcgtaccccttataatggggtgttag

SEQ ID NO: 475304 - DNA, 312 bp, Shigella flexneri
atgccatggtccccagagggagaaccagtccgtaaattcattctcttcacggcttctgaccatggcttcggcagtgcggaggtcatttgctgtcactcccgacacgccatagaaacgcatttccttcacggcagtggagagctgaagtttctctgcgagcatggtctggaaggccaggtagacttctatctcatccacaaaatggagagttctgactttatcccgggcaatatcctccagaatttcgaggcggaacatttccctgcccagggagagcagcgcgccggtatcattatcgaaaaggccttctga

SEQ ID NO: 475305 - DNA, 234 bp, Shigella flexneri
atgcttcatgaagaaaaactggcacgtcatcaacgtaaacaggcgatgtatacccgaatggtagccttcccggcggtgaaaatgttcgaagagtatgacttcacgttcgccaccggagcaccgcagaagcagctccagtcgttacgctcactcagcttcatagagcgcaatgaaaacatagttttacaggggacatctgacatcacaaatccccgggtggggatttgtgtataa

SEQ ID NO: 475306 - DNA, 522 bp, Shigella flexneri
atgtcaaagccaaaatacccttttgaaaagcgccttgaagtcgtgaatcactacttcactactgatgatggttacaggatcatctcggcacgttttggtgtcccccgaacccaggtcaggacatgggttgccctctatgaaaaacatggagaaaaaggcttaattcccaaacctaaaggtgttagtgctgatccagagttgcgtattaaggtcgtgaaagctgtgattgagcagcacatgtcccttaatcaggctgctgctcactttatgcttgctggtagtggttctgtagccaggtggctgaaggtttatgaagagcgcggagaagctggtttacgcgcgctcaagattggcaccaaaagaaacattgcaatatcagttgatccagaaaaagcggcatcagcattggagctgtcaaaagaccgacgcattgaggatcttgaaaggcaagttcgatttcttgaaacgcggcttgtgtatctaaaaaagctgaaagccttagctcatcccacgaaaaagtga

SEQ ID NO: 475307 - DNA, 201 bp, Shigella flexneri
gtgctgaccggtctgatatgcgtcacgttgcagaaccacagttttcatattgtcatacaacacttcgcgcggcacaccaccaaagaagcggaacgcattatgatggcaggtctccagcgtgtcataacgcatattgtcagtgaattcgatgtacaacattcggctgtatccgggaacagcaacgaacacgtgaagcggtga

SEQ ID NO: 475308 - DNA, 402 bp, Shigella flexneri
atggacttcctggagcatctgcttcatgaagaaaaactggcacgtcatcaacgtaaacaggcgatgtatacccgaatggcagccttcccggcggtgaaaacgttcgaagagtatgacttcacattcgccaccggagcaccgcagaagcaactccagtcgttacgctcactcagcttcatagaacgtaatgaaaatatcgtattactggggccatcaggtgtggggaaaacccatctggcaatagcgatgggctatgaagcagtccgtgcaggtatcaaagttcgcttcacaacagcagcagatctgttacttcagttatctacggcacaacgtcagggccgttataaaacgacgcttcagcgtggagtaatggcccccgcctgctcatcattgatgaaatag

SEQ ID NO: 475309 - DNA, 369 bp, Shigella flexneri
atggggcaattttctgtggatagtttgtaccatcctgacttacatgcattatgtgagctcccagagattagttgtaagatcttctctaaagaaaatagttattttttgtatataattgttgtattcagaaatgattctccccaaggagaactacgggcaaatcggtttatagaactatatgatataaaaagagagattatgcaagtgttaagagatgagtcgccagagttaaagtctattaaatctgagattattattgctcgtgaaatgggagaactttttagttatgcatcagaggaaatagatagctacataaaacaaatgaatgacaggctttctcaaatcaaggctcgaatgcctgttacttaa

SEQ ID NO: 475310 - DNA, 225 bp, Shigella flexneri
atgtcgcgtaaaggtaactgttacgacaatgctccgatggaaagcttctggggaacgctgaaaaatgagagcctgagccactatcgttttaataaccgggatgaagccatctcagtaatacgggaatacattgagattttctacaatcgtcagcgtcgtcactctcgtctggggaatatctccccggcagccttcagggaaaaatatcatcagatggctgcttaa

SEQ ID NO: 475311 - DNA, 315 bp, Shigella flexneri
atgattgatgtcttagggccggagaaacgcagacggcgtaccacacaggaaaagatcgcaattgttcagcagagctttgaaccggggatgacggtctccctcgttgcccggcaacatggtgtagcagccagccagttatttctctggcgtaagcaataccaggaaggaagtcttactgctgtggccgccggagaacaggttgttcctgcctctgaacttgctgccgccatgaagcagattaaagaactccagcgcctgctcggcaagaaaacgatggaaaatgaactcctcaaagaagtaatgccgatcagttaa

SEQ ID NO: 475312 - DNA, 282 bp, Shigella flexneri
ttgtggtgtttttttaatctttttggggttttaattcctatcgatgaacatggcttgtcggaatatctggcaggtaaagatgagctcaacaaagtgatccagcattttggcaaaggaggctttgatgtgattactcgcggtcaggtgccacctaacccgtctgaactgctgatgcgcgatcggatgcgtcaattactggaatgggcgaacgaccattacgatctggtgattgtcgatacgccgccgatgctgggtaagcgccccgagaagtacgtagcgtaa

SEQ ID NO: 475313 - DNA, 261 bp, Shigella flexneri
atgtctgcttttaaaaagtcacttcttgttgctggtgtagcaatgattctttccaataacgtgtttgctgatgaaggtcacggtattgttaaatttaaaggtgaagttatctctgctccatgttctattaaaccaggtgacgaagatttaactgtaaatctgggtgaagtagcagataccgtactgaaaagcgatcagaaatctttggctgaacctttcactattcacctgcaaggtaatgctgccaacttactgatttag

SEQ ID NO: 475314 - DNA, 225 bp, Shigella flexneri
gtgagcaagattgactatcaggcactgcgtgccaaggcagaaaaagcaactaaaggaagctacatcgtagggcatacatctgttaatcggcacggcaatttaacaggagtttttgtttgtcaaaaatggaaaggagaacccggtggtgtgattgcggaatgtcatgttaactgcctggttgaaacagatgttgaagtggtcaacaaaagctggccaccgagttag

SEQ ID NO: 475315 - DNA, 249 bp, Shigella flexneri
atgcactcggttcgacggccagtcattgagcttcacgatcacttcgcgcaaccagtcctccggctccactccgttcagtttgcaggtgaacagcagactgtagataatcgccgcgctttctccaccgttgtcaaaaccgaagaagagataattttttcttccaaccgccaccgatcgcagcgcgttttcaccgatgttgttgtcgatttccacctggccattacgacagtacacgttcaggctatctga

SEQ ID NO: 475316 - DNA, 165 bp, Shigella flexneri; identical to SEQ ID NO: 461984

SEQ ID NO: 475317 - DNA, 225 bp, Shigella flexneri; identical to SEQ ID NO: 133446

SEQ ID NO: 475318 - DNA, 312 bp, Shigella flexneri
atgccatggtccccagagggagaaccagtccgtaaattcattctcttcacggcttctgaccatggcttcggcagtgcggaggtcatttgctgtcactcccgacacgccatagaaacgcatttccttcacggcagtggagagctgaagtttctctgcgagcatggtctggaaggccaggtagacttctatctcatccacaaaatggagagttctgactttatcccgggcaatatcctccagaatttcgaggcggaacatttccctgcccagggagagcagagcgccggtatcattatcgaaaaggccttctga

SEQ ID NO: 475319 - DNA, 138 bp, Shigella flexneri
atgcataatgtaagcaccacaaccactggttttcctcttgccaaaatattggcttccactgagcttggagacaatactatccaagctgcaaatgatgctggaacagtcgcggttgatgcacttgttggcgcaggatag

SEQ ID NO: 475320 - DNA, 195 bp, Shigella flexneri
atgctggagaatgagtaccctcagagggtggctgaccggctgaaagcatccggtctgagcggtgatgcggatgcggagagggaagccggtgcacaggtgatgcgtgagactgaacagcagatttaccgtcagctgactgacgaggtactggccctgcgattgtctgaaaacggctcacaactgcaccattcataa

SEQ ID NO: 475321 - DNA, 195 bp, Shigella flexneri; identical to SEQ ID NO: 464447

SEQ ID NO: 475322 - DNA, 195 bp, Shigella flexneri
atgctggagaatgagtaccctcagagggtggctgaccggctgaaagcatccggtctgagcgatgatgcggatgcggagagggaagcaggagcacaggtgatgcgtgagactgaacagcagatttaccgtcagctgactgacgaggtactggccctgcgattgtctgaaaacggctcacaactgcaccattcataa

SEQ ID NO: 475323 - DNA, 249 bp, Shigella flexneri; identical to SEQ ID NO: 475010

SEQ ID NO: 475324 - DNA, 327 bp, Shigella flexneri; identical to SEQ ID NO: 474582

SEQ ID NO: 475325 - DNA, 249 bp, Shigella flexneri; identical to SEQ ID NO: 464355

SEQ ID NO: 475326 - DNA, 207 bp, Shigella flexneri
atgtccgctgcatttcgggagctactttctgaaatagaagagctaaggacaattattgactttggtgaatacaaaccgggggagaatgcctctcaggataaaatctacaacaaaatatctgttgttgagagttttctgaagcaagattatcgactcggttttacttatgagcagacaatggagcttattggtgaaacaattagataa

SEQ ID NO: 475327 - DNA, 1077 bp, Shigella flexneri
gtgtataaatacacggcacaatcgctccgccataagcgacagcttgtggcaggtctgaagaatacttcatataacgcagtacactggagtcagttagcacccgaagagcagatccgtttctgggaagactatgaagcgggaagggcgaccactttcctggttgaaccggaaaggaagcgcacgaagcgccgtcgcggtgagcactccaccaaacccaaatgcgaaaatccgtcctggtatcgtcctgagcgctataaagcgctgaaagggcagctcgggcacgcctataaccgtctggtgaaaaaggacccggtgaccggcgagcagagcctgcgcatgcgcatgtcgcggcatcctttttatgtacagaaacggacgttcgtcggtcgcaaatacgctttccggccggaaaaacaacgtctcctcgatgccatctggccggttctggtcagcttcagtgatgccggcacacataccgtggggatgagcgtcactcggctggctgaagaaatcagcccgaaagacagcgagggacatgttattccggaactggaagtgacggtctcccgtctttcccgtctgctggccgaacaggtgcgctttggtgtgctgggggtgtcagaggaaacaatgtgggaccgtgaacatcgtcagcgtctgccacgttacgtctggataacaccggcaggctggcagatgctgggcgtcgacatggtaaaacttcacgaacagcagcagaaacgactgcgtgaaagtgaaatccgccagcagctcattcgggaaggtgttctgcgtgaggatgaagatatctccgttcatgcggccagaaaacgctggtatctgcagcgcagccaggatgccctgaagaagcgccgagaaaaagccgcagccagcaagcgtgccaaccgcctgaagaaattacctgttgaccagcagatttatgagatggctgagtatctccggaagcgtctgccgccggatgaagcctatttctgttccgatgaccatctgaagcgactggccatcagggagttgcgtcagcttgaactgacgctggctgccccgccaccgcactag

SEQ ID NO: 475328 - DNA, 540 bp, Shigella flexneri; identical to SEQ ID NO: 19206

SEQ ID NO: 475329 - DNA, 420 bp, Shigella flexneri
atgcagacgtttgaacaggggctgattgatgtctaccggaaattgtcatgggattacagaaccaataatccctgccgtctgggtaagaaaatcattattgaaaacctgctgtaccgctggagtaacgggcgtgtgacgctggactgcagcggacgggaggcactggatgacctggtacgtccgttttatctgctggaggggcgcaacgttcctgacttcaggaacagcatcggggcgcagtatggtgaatttctcgggaacggtgacaatgtcggtaagctgttagaaggggaatattttacggtgcgtggctaccagaaagggaccgtacacattgtctttaagcgttctgaccttgttgaaaaactgaatgatattattgcacggcattatcctggtgcattgccgccacgagtctga

SEQ ID NO: 475330 - DNA, 1797 bp, Shigella flexneri; identical to SEQ ID NO: 120698

SEQ ID NO: 475331 - DNA, 435 bp, Shigella flexneri; identical to SEQ ID NO: 19328

SEQ ID NO: 475332 - DNA, 861 bp, Shigella flexneri; identical to SEQ ID NO: 5314

SEQ ID NO: 475333 - DNA, 558 bp, Shigella flexneri; identical to SEQ ID NO: 7707

SEQ ID NO: 475334 - DNA, 3006 bp, Shigella flexneri; identical to SEQ ID NO: 10984

SEQ ID NO: 475335 - DNA, 420 bp, Shigella flexneri
atggcgttcggaaccgtgctgacccgcaagtggcaacctcccgtgcctctgctcacctttaccgcctggcaactggcggccggaggacttctgctcgttccagtagctttagtgtttgatccgccaatcccgatgcctacaggaaccaatgttctcggcctggcgtggctcggcctgatcggagcgggtttaacctacttcctttggttccgggggatctcgcgactcgaacctacagttgtttccttactgggctttctcagcccggggaccgccgtgttgctaggatggttgttcttggatcagacgctgagtgcgcttcaaatcatcggcgtcctgctcgtgatcgggagtatctggctgggccaacgttccaaccgcactcctagggcgcgtatagcttgccggaagtcgccttga

SEQ ID NO: 475336 - DNA, 1200 bp, Shigella flexneri; identical to SEQ ID NO: 6086

SEQ ID NO: 475337 - DNA, 678 bp, Shigella flexneri; identical to SEQ ID NO: 54015

SEQ ID NO: 475338 - DNA, 243 bp, Shigella flexneri; identical to SEQ ID NO: 15164

SEQ ID NO: 475339 - DNA, 2967 bp, Shigella flexneri; identical to SEQ ID NO: 5007

SEQ ID NO: 475340 - DNA, 561 bp, Shigella flexneri; identical to SEQ ID NO: 5006

SEQ ID NO: 475341 - DNA, 1578 bp, Shigella flexneri; identical to SEQ ID NO: 62825

SEQ ID NO: 475342 - DNA, 414 bp, Shigella flexneri
atgattctgcttggaaagtttagcgccttgtggattaagcgccagcggcagatgaatgtaatctggcactttccagccaaaaagctggtacagcgggatttgccttactgttggttcaatcagatcagccccacgcactatttctgtaacgccctggaaatgatcatcaaccacaacagccaggttgtaggcgaacaacccatcacggcgatgaatgataaaatcttcccgtgccagtttttcgtcggcgtgaataatgcctcgcagcaggtcagtaaattgcgtgaccggatgctgctggcggatacgcactgcggcgttgtctggtccatgatgcaacacccggcaatgaccgtcgtaaataccgccaatgctttgaatacgcgcacgcgtacaggtgcagtaataacttag

SEQ ID NO: 475343 - DNA, 1704 bp, Shigella flexneri
gtgcttaaaatcagcgaacatataagtattattgttttatatcgtcgtaaatatgtctttcagacatgtatcatttattttttactaacaggtcaaaaatatcgcgggttatttatgaaagcaattgacaatatatttaagtacatcccttcaaaccataaagataagcattcagataaagttaataatcatcaacaccatagcaaggttgataaaacacatcgttcaaagatagttgaaattgataagctggataatgattcgcaaatagataacgattttggcatgcatatcatctatttcctgcaacatggtcactggagggtaaatgaacatagtcttcagatggagaaaatatggttttacaatagtgagccatctatagatattcaagaatataatagttttgccgataatactactaacacgtttatctttacaattataccagacaataaccatgtgataaaattatcgtctcccattacagttaagattgagtgtaaggatggttattattttattaatttctccggagataaatcagacataatttataaagttaatgggctttctatcatacctgaaaatttctttactcttcttagcggtaattttaaagctgactggcgttgggatgtctctaaagagacgtttcctaaggataagtttgatagctatgttaaatctgtgttttctaaaatagacttttataaacaatgtggtgtgattaacccacaaaatgccaacacggcttattttggcgatacagatggaagagtaggcgctgtactttattcattgctcgtttcagggcatataggcatcagggaaaagggttggagtttattatgtgaattattaaaacacgaagacatggcttcatctgcatacatacataaaaataataaattgctctacaatttattaaatacgagagacatgatattgaatgagttgcatcaacatgtttttttaaaggacgatgcgataaccccttgtatcttccttggggatcatacaggcgatagatttagtactatttttggtgataaatatatccttactttgctaaattctatgcgaaatatggagggtaataaagatagccgtattaataaaaatgtcatcgttctggctggaaatcatgaaatcaattttaatggtaactatactgcacgactagaaaattataaactctctgccggtgatacgtataacttaattaaaacgctcgatgtttgtaattataactcagaaactaaagttttaaccagtcatcacggaataataagaaatgaagaaaatcaatgttattgtctcggtgctttgcaggttccatttaatcagatgaaagacccaattgatcctgaggaattagcaaatatatgtaataaaaaacataaacaacacatggatgatcatcttctccatctaattagaagcaatgctatagcacccacacctgtatatgaaaattattttaataacactactgctttcagaccaaaacctgaagatatcttcaaatgtggacagacgctcaaaaaaactaaacagaaatttggccattatggattaggggtagaccagcatcaaaaaattgataattataccatggggctaaattcttggaagatagcacctaacgaacgtggtgataaaaaaggtgtcccagggcttagttgttttcaacctcaataa

SEQ ID NO: 475344 - DNA, 861 bp, Shigella flexneri; identical to SEQ ID NO: 471421

SEQ ID NO: 475345 - DNA, 192 bp, Shigella flexneri
atgcaactcgtcgtaaccagaaagcgcgcaaggttggcggctaaacgccagttcctcaaggctaccgatcaccagttcaagcgtggtccgcacggtacagccgggcatcatatgaccgccaagcatcgtgccgtgtggatcggaaacgcagagatgaagatgctcaccactctgttccagcgtgccgtttag

SEQ ID NO: 475346 - DNA, 678 bp, Shigella flexneri; identical to SEQ ID NO: 471413

SEQ ID NO: 475347 - DNA, 489 bp, Shigella flexneri
atgatcgccaccttctggcgagaaactcctgatgcaattagtcgcccggcctgcgcccattattctggtgaaagtttgggacggcgaccgccaattcgtccctgtgcgcgagcagcttccagtcctgcttttgttcgttcaacaatcagttcacgttccatttcagccagggcacccatcacatggaagaaaaagcgtcccattggtgtgctggtatcaattgaatcagtcagactacgaaagttgatgcctcgttcgcgcaactcctccaccagcacgacaagatgccgcatactgcgccccagccgatccagcttccagacaaccagtgtgtcgcctgccgataatgtcttgagcagttttttcagccccggtctttcggactttgtaccacttatcttgtcttcaaaaatcagctcgcatcctgcacagttcaacgcattacgttgtagatcggtattctggtcatttgttgatacgcgtacatag

SEQ ID NO: 475348 - DNA, 327 bp, Shigella flexneri; identical to SEQ ID NO: 471498

SEQ ID NO: 475349 - DNA, 381 bp, Shigella flexneri
atgctgggagcggtggaacgccgcttcggcaacgatcttccgtcgtctccagtggagtggctgacggataatggttcatgctaccgggctaatgaaacacgccagttcgcccggatgttgggacttgaaccgaagaacacggcggtgcggagtccggagagtaacggaatagtagagagcttcgtgaaaacgataaagcgtgactacatcagtatcatgcccaaaccagacgggttaacggcagcaaagaaccttgcagaggcgttcgagcattataacgaatggcatccgcatagtgcgctgggttatcgctcgccacgggaatatctgcggcagcgggcttgtaatgggttaagtgataacagatgtctggaaatatag

SEQ ID NO: 475350 - DNA, 396 bp, Shigella flexneri; identical to SEQ ID NO: 464981

SEQ ID NO: 475351 - DNA, 318 bp, Shigella flexneri
atgagtcgtttagtcgtagtatctaaccggattgcaccaccagacgagcacgccgccagtgccggtggccttgccgttggcatactgggggcactgaaagccgcaggcggactgtggtttggctggagtggtgaaacagggaatgaggatcagccgctaaaaaaggtaacattacgtgggcctcttttaacctcagcgaacaggaccttgacgaataatacaaccaattctccaatgccgttctctggcccgcttttcattatcggctcgatctggtgcaatttcagcgtcctgcctgggacggctatctacgcgtaa

SEQ ID NO: 475352 - DNA, 900 bp, Shigella flexneri
atggtagtgtccgctattgccagtacacctcagtacgcctttatccgtgacaactcctgttgctggcctgttcgcctgctctgtcgggtgctggatgttcatcccagtggtttttacgcctggcttcagcagccgcattcacaacgccatcaggcagacctgagactgacaggacagattaaacagttctggctggaatcgggatgcgtctatggttatcgcaaaatccatctggatctgcgtgacagcgggcaacagtgcggagtaaacagagtctggagactgatgaaacgtgtcggaataaaggctcaggtcggataccgaagcccgcgggcacgtaaaggcgaggccagtatcgtgtcacccaacaggctccagcgacagttcaatccggatgctcctgatgagcgttgggtaacggacataacctacatcaggacccacgaaggctggctgtatcttgccgttgttgttgatctgttctcacgcaaaattatcggctggtccatgcaatcccggatgacaaaggacattgtcctgaacgcactgctgatggctgtatggtggcgtaatcccgaaaaacaggtgctggttcattcggatcagggcagtcagtacacaagccatgagtggcagtcgttcctgaaatcacacggcctggagggtagcatgagccgtcgcggtaactgccatgataatgcggttgcagaaagttttttccagttgttgaaacgtgaacggataaagaaaaagatctacggaacgcgggaagaagcccgcagtgatatttttgattacatcgaaatgttttataacagtaagcgtcggcatggttctagcgaacagatgtcaccgacagaatatgaaaaccagtattatcaacggctcggaagtgtctag

SEQ ID NO: 475353 - DNA, 594 bp, Shigella flexneri; identical to SEQ ID NO: 472815

SEQ ID NO: 475354 - DNA, 396 bp, Shigella flexneri; identical to SEQ ID NO: 464981

SEQ ID NO: 475355 - DNA, 381 bp, Shigella flexneri; identical to SEQ ID NO: 458903

SEQ ID NO: 475356 - DNA, 726 bp, Shigella flexneri; identical to SEQ ID NO: 473332

SEQ ID NO: 475357 - DNA, 381 bp, Shigella flexneri; identical to SEQ ID NO: 458903

SEQ ID NO: 475358 - DNA, 585 bp, Shigella flexneri
atgaagggacttgagaatgccatccgcaatctgaacagcctcgatacccgcatggtgccacagaccagcgcatgggcggtaaaccgtgtggcggcaaagattgtttctgtcgccacacggcaggttgcgcagaataccgttgccggggataaccaggtgaaaggtattcccctgaaaacggtcagggagcgtgtcaggctgcttaaagccagcccctcaggaaaaatgtatgcccgcatgcgtgttaaccggggtaacctgcccgccattaagctgggtaccgcacaggtcagactggcccgctcccggcatggcagcaactcacgtcatcgtggcagcgtactgaaagtggggaaataccttttccgggatgcgtttattcagcaactggcgaatggtcgctggcatgtgatgcggcgtattgacggcaaaaatcgttaccccattgatgtggtgaaaatcccgatgtccggaccgctgacacaggcatttgaagatgcccgcgaccgcatcattgctgcggaaatgccgaaacagctggggtatgccctgaaacaacaactgaggttacatctgagtaaatga

SEQ ID NO: 475359 - DNA, 714 bp, Shigella flexneri
atgtccggcagtgcttttgccgttacgcaccacgccttcagtagcggagcaggaaggacatctgatggaaatggaagccacgcaagcaccttaaaatcaccatcatacactaaatcagtaagttggcagcattaccgtcttgccgaagaagatccagcttctgcaaccaggccattcagaactgaagtgaagcgcagtcgactgttaattgacgagtatctgttaatcaggaaaatagcagacgtccagaacgaatggttcggcctttgcatggatcttgcactggtaacaggacagcgcaaaggagatctggcggctatgagatgggaggatataagagatagcaggctatacgtggaacaacaaaaaacaggagcaaaaattcgcatttctctccccaccacgatttccagattgaatttaacacttgccgatgtactggataacttgaaaaaaataaacggtaaaaacgaaaagttactcggagggaagacagccaggacaattgcagcacagttcaggattgcccgagacacatccggattgaaatgggaaggtgacccaccgccatttcatgaaatccgaagtttatccggtcgcctgcactcagcagaaaaaggcagtgatttcactcaggcgctccttggacatcgttcatccagcatgacggataaataccgtgacggacgagggagggaatggaaagacatttag

SEQ ID NO: 475360 - DNA, 900 bp, Shigella flexneri
atggtagtgtccgctattgccagtacacctcagtacgcctttatccgtgacaactcctgttgctggcctgttcgcctgctctgtcgggtgctggatgttcatcccagtggtttttacgcctggcttcagcagccgcattcacaacgccatcaggcagacctgagactgacaggacagattaaacagttctggctggaatcgggatgcgtctatggttatcgcaaaatccatctggatctgcgtgacagcgggcaacagtgcggagtaaacagagtctggagactgatgaaacgtgtcggaataaaggctcaggtcggataccgaagcccgcgggcacgtaaaggcgaggccagtatcgtgtcacccaacaggctccagcgacagttcaatccggatgctcctgatgagcgttgggtaacggacataacctacatcaggacccacgaaggctggctgtatcttgccgttgttgttgatctgttctcacgcaaaattatcggctggtccatgcaatcccggatgacaaaggacattgtcctgaacgcactgctgatggctgtatggcggcgtaatcccgaaaaacaggtgctggttcattcggatcagggcagtcagtacacaagccatgagtggcagtcgttcctgaaatcacacggcctggagggtagcatgagccgtcgcggtaactgccatgataatgcggttgcagaaagttttttccagttgttgaaacgtgaacggataaagaaaaagatctacggaacgcgggaagaagcccgcagtgatatttttgattacatcgaaatgttttataacagtaagcgtcggcatggttctagcgaacagatgtcaccgacagaatatgaaaaccagtattatcaacggctcggaagtgtctag

SEQ ID NO: 475361 - DNA, 288 bp, Shigella flexneri
atgaattcccagacaacaaaagatattccctgcttccgttcttatttgcctgatgccctgcgtttaagatttgaagataaactgaccatccgggccatcgctcagcgtctgggtctcagtcattccacaatacatacgctttttcagcgatttcttgcatccggtatcgcatggccattgcccgattcagtttcattcgctcaacttgacgccatcctttatgccaacagaaagaaggaattaacagagcctcaaatcagtaagcgccccgagaagtacgtagcgtaa

SEQ ID NO: 475362 - DNA, 867 bp, Shigella flexneri
atgaaaatcaccatttccggtactggctatgtaggcttgtcaaacgggcttctaatcgcacaaaatcatgaggttgtggcattagatattttaccgtcacgcgttgctatgctgaatgatcggatatctcctattgttgataaggaaattcagcagtttttgcaatcagataaaatacactttaatgccacattagataaaaatgaagcctaccgggatgctgattatgtcatcatcgccactccaaccgactatgatcctaaaactaattatttcaatacatctagtgtagaatcagtaattaaagacgtagttgagataaatccttatgcggttatggtcatcaaatcaacggttcccgttggttttaccgcagcgatgcataagaaatatcgtactgaaaatattattttctctccggaattcctccgcgaaggtaaagccctttacgataatctccatccgtcacgtattgtcatcggtgagcgttcagaacgcgcagaacgttttgctgcgttgttacaggaaggcgcgattaagcaaaatatcccgaccctgtttaccgactccactgaagcagaagcgattaaacttttcgctaatacctatctggcgatgcgcgtagcatactttaatgaactggatagttatgcagaaagtttaggtctgaatactcgccagattatcgaaggcgtttgtctcgatccgcgtattggcaaccattacaacaatccgtcgtttggttatggtggttattgtctgccgaaagataccaagcagttactggcgaactaccagtctgtgccgaataacctgatctcggcaattgtcgatgcaaaccgcaagtggtgggtatttatcgtctga

SEQ ID NO: 475363 - DNA, 492 bp, Shigella flexneri
atgttgtcggggtatcgtgtattttccagacgctatgttaaatcttttccatgtctatcaaggggatttgaaatcgaaactgagcttacaattcatgctttagaattacgtatgaagtatggtgaggttaatacaaaatatggcgagcgatctgaagggagtgtgagcaaactatcaacttggagtgatgggttcaagattctgaaaacaataattaaactttactcgcttgaacggccactatacttttttagtattatcggcgttttacttgctgctttgtctataattttaggattgcccatcattgttgattatattgatacaggtttggtgagaagatttccgactgcctttttaactgcctccatcatgttatcgtcaataatggcatttgtatgtggcattattttgcattcaaatacaacaactagacgtgaaatgaaggcattattttatctttctgaaaaaaactataaactgataatgtaa

SEQ ID NO: 475364 - DNA, 396 bp, Shigella flexneri
atggctggtcagttccatctggcagaccattttgacctgcgggtagagcgccgggttcccggcatgtgtctggcgggggaaggctgcatcgttctctggtgtatccggtgtgcgccagaacacaccatcgatggccagcagggtcaggccgcaccagtgcggatgcggcgtggcgttatgccagagctgcgctgttttcgtgaacacgcggcggacagcctcacttcccaggcgctggcgggcctgaataacggcactgggagcaacgaaggggcgattgcccggcagcatgatgtccaggcgattcacaatctggtgaagaggttctttacgctcaagcgccatgccaacaatacaccagaccatcatttcgaggggaagacggcgcttgcgtag

SEQ ID NO: 475365 - DNA, 177 bp, Shigella flexneri
atgctgggagcggtggaacgccgcttcggcaacgatcttccgtcgtctccagtggagtggctgacggataatggttcatgctaccgggctaatgaaacacgccagttcgcccggatgttgggacttgaaccgaagaacacggcggtgcggagtccggagagtaacggaatagcatag

SEQ ID NO: 475366 - DNA, 333 bp, Shigella flexneri
atgctcacctcagaacaacacaggtgccataatgaaaaaagaaatttcagcgcagagtttaaacgcgaatccgctcaattggtcgttgaccagaaatacaccgtggcagatgcagccagcgctatggatgtcggcctttccacaatgacgcgatgggtgaaacaattacgtgatgagcggcagggaaaaacaccaaaaacctcccccattaccccggaacaaattgaaatccgtgagctcaggaaaaagctacaacgtattgaaatggaaaatgaaatattaaaaaaggctaccgcgctcttgatgtcagactccctgaacagttttcgataa

SEQ ID NO: 475367 - DNA, 822 bp, Shigella flexneri
ttgtttaaagcaaatcatgttccggtattaatgtatcatcatgtcagccattgcccaggactggttacactttctcccgagacattccggaaacaaatgaaatggttggctgaaaacaactggaaaacactgtcatcagatgaactggagtttttttatcggggtggaaaacttccccgtaaaagcgttatgttgacatttgatgatggataccttgacaactggtttcaggtatatcctttattaaacgagtttaatctcaaggcacatatttttttaattaccagttttattggaaatggtccggttcgtcactctcctggaaaggaatattctcatcgcgattgcgaacatcaaatagcaaccgggaatgctgataatgttatgcttcgctggtctgaagtgaacgaaatgttgcaatctggtctggtcgaatttcatgttcatacacatactcatacacgttgggataaaaagctcacttcacgagaagaacagtgtaaacatcttcggcaggacttattgagcgggagagaatatttaaaaaaaatgacaggaaaatgcagtaaacatttgtgttggccggaaggttattataacaaggattatattcagatcgctgaagaacttggattccattatttatatacaacagaaagaagaatgaatgctcctgctaaaggaactacacggataggaagaataagcaccaaggaacgggaaaattgcgtatggctgaaaagacgacttttttattatacaacaccgtttttttcatcgttgctggcccttcataaggggccaagattaccggatgactaa

SEQ ID NO: 475368 - DNA, 1257 bp, Shigella flexneri; identical to SEQ ID NO: 473728

SEQ ID NO: 475369 - DNA, 1464 bp, Shigella flexneri; identical to SEQ ID NO: 473557

SEQ ID NO: 475370 - DNA, 372 bp, Shigella flexneri; identical to SEQ ID NO: 11381

SEQ ID NO: 475371 - DNA, 900 bp, Shigella flexneri; identical to SEQ ID NO: 475360

SEQ ID NO: 475372 - DNA, 1035 bp, Shigella flexneri
atgttgatagcaaagtatctctgtctgctgaagcccttttggctgcgtaagaataataaaacttcagtgttgttaatcattattatcctcgcaatgatccttggcgtggttaaaattcaggtctggttaaacgactggaataatgattttttcaatgcgctaagccagaaagaaaccgataagctttggcagctcgttctttggttccctgccctgctggggatctttgtattaatatccgcaaacaaaacatggttaattaaactactgactattcgctggcgcgaatggttaacagattactaccttaatcgctggtttgcagataaaaactactacttcacgcagatctacggcgagcataaaaatacagataaccctgaccaacgtatcgctgaagacattctcttactgatcaacaaaacgctcagtctttcatttggcttcatccagtcacttagcatgctgatcacctttaccgttattctttggcaaagcgcgggtacgctctcattcactgttggtggaacagaatggaatatccaggggtatatggtctataccgtcgtgctcattgtgatcggtggaactttatttacccataaggtgggtaaacgtattcgtccgcttaatgtggaaaaacaacgtagcgaagcgacatttcgaactaatcttgtgcagcataataagcaggcagaactgattgcgctaagcaatgctgagtctctacaacgccaggagttgcgcgacaattttcataccattaaagagaactggcatcgtttaatgaatcgtcagcggtggcttgattactggcaaaatatttattcgcgctcgcttagcgttcttccctactttctgttattgccgcagtttattagcgggcagatcaatctgggcggactgatgaaatcgcgccaggcatttatgctagtatcgaacaatttaagctggtttatttataaatatgacgaacttgctgaactggctgcggttatcgatcgcttgtatgagttccatcaactcactgaatag

SEQ ID NO: 475373 - DNA, 279 bp, Shigella flexneri; identical to SEQ ID NO: 473883

SEQ ID NO: 475374 - DNA, 396 bp, Shigella flexneri; identical to SEQ ID NO: 464981

SEQ ID NO: 475375 - DNA, 1053 bp, Shigella flexneri; identical to SEQ ID NO: 473928

SEQ ID NO: 475376 - DNA, 225 bp, Shigella flexneri; identical to SEQ ID NO: 133446

SEQ ID NO: 475377 - DNA, 327 bp, Shigella flexneri; identical to SEQ ID NO: 462700

SEQ ID NO: 475378 - DNA, 579 bp, Shigella flexneri
atgtgcctgcggcacccagccgtgcagcggaataatcccagccagcaggccaaagccaatcacaccgagcagccagatatcggaaccgagcggcagctgttgcatacgcatatccagcaggcgcagatccagcgtgccataacgctgccacagcagccagcaagcaatcaccagcagcagagtgccaagacgccccagcgcaaaccacagtttgccctctttgctgttgctggtgaggaacaccgcacacaaggccatgacttcggccattaccacgaacatgccgaggttgctggcgatgacggcgcagacggcggcagccatcaacatattgatctgcaagccgttgcacttcacctgcgcgtggcgatgccagtcaatgttatagaggctgacaaacagaccgcaaaggccgagggtaatcagccaaatcgcgttaagcggggagatttgcacatcgtagcttaccagcgacagcgcaccgctcacgccaaccgcgccagtcagtacagtgaagcccgcggctgccgtatacagactaccaaccgcgccgccaattccggctatccagccacttag

SEQ ID NO: 475379 - DNA, 333 bp, Shigella flexneri
atgtgtctggcgggggaaggctgcatcgttctctggtgtatccggtgtgcgccagaacacaccatcgatggccagcagggtcaggccgcaccagtgcggatgcggcgtggcgttatgccagagctgcgctgttttcgtgaacacgcggcggacagcctcacttcccaggcgctggcgggcctgaataacggcactgggggcaacgaaggggcgattgcccggcagcatgatgtccaggcgattcacaatctggtgaagaggttctttacgctcaagcgccatgccaacaatacaccagaccatcatttcgaggggaagacggcgcttgcgtag

SEQ ID NO: 475380 - DNA, 840 bp, Shigella flexneri
atggctataagcgacacaaaactgcgtactatttatggtaaaccatattcgggcccacaagaagtggctgatgccgatggcctcagcgtacgaatttcaccgaagggggtcatccagttccagtaccgctatcgttggcatggcaagcctaatcgacttgggcttggtcgatacccatccctgtctttgaaggatgccagacagatcactgctgacttgcgaaagctctatttctcaggaacggatccacgcacctattttgaagagaaggtggagaactccatgacggtcgcccagtgtctcgactactggttcgacaactacgtctctacaactctcagagaaaagacccaggcactttatcgatcaacggttatgaagcgcatgcatgacgccttccctaatcgtccggcatcttctatcacggttaagcaatgggttgacctgcttaccgaagaagaaaaagataatccacgccgagcaaggcaggtgctaagtcaactaagatcagcaattagttggtgcatgcggcgtcagttgatagatagttgcgcaattatgagcatccagccaagggacttcggctcccgcgctgaggtaggggatcgggtactgtcgtatcacgaactggctaagatttggcttgctattgaaagaagccgtgcgtctacgtcaaataagctccttcatcagatgcttatgctgtggggggcgaggctctcagagcttaggctggcaacaaagacagaatttgacctgctggacaacgtatggaccgtaccgaaagagcatagcaagatgggtaatgttatccgccgtccaatcttcgaacaaatgtaa

SEQ ID NO: 475381 - DNA, 294 bp, Shigella flexneri; identical to SEQ ID NO: 474477

SEQ ID NO: 475382 - DNA, 633 bp, Shigella flexneri; identical to SEQ ID NO: 474478

SEQ ID NO: 475383 - DNA, 612 bp, Shigella flexneri; identical to SEQ ID NO: 475242

SEQ ID NO: 475384 - DNA, 1434 bp, Shigella flexneri; identical to SEQ ID NO: 473855

SEQ ID NO: 475385 - DNA, 786 bp, Shigella flexneri; identical to SEQ ID NO: 473858

SEQ ID NO: 475386 - DNA, 147 bp, Shigella flexneri; identical to SEQ ID NO: 474004

SEQ ID NO: 475387 - DNA, 168 bp, Shigella flexneri; identical to SEQ ID NO: 464689

SEQ ID NO: 475388 - DNA, 645 bp, Shigella flexneri; identical to SEQ ID NO: 474042

SEQ ID NO: 475389 - DNA, 768 bp, Shigella flexneri; identical to SEQ ID NO: 474142

SEQ ID NO: 475390 - DNA, 372 bp, Shigella flexneri
gtgctggatgcactggagcaggcgttatgggcccgtcgaccgtccggcacggtccatcacagtgataaaggttctcagtatgtatcgctggcctgcacacagcggcttaaggaagccggattactggcatcaacaggaagtacaggcgactcgtatgacaacgcgatggcggagagcatcaatggtctttacaaagcggaggtaatacaccgtaagagctggaaaaaccgtgcagaagtggaactggccacactaacgtgggtggactggtataacaatcgacgattgcaggaaaggctgggccacatccctccggcagaagcagaaaaagcttattatgcttccatcggaaacgatgatctggcagcctga

SEQ ID NO: 475391 - DNA, 168 bp, Shigella flexneri; identical to SEQ ID NO: 473920

SEQ ID NO: 475392 - DNA, 489 bp, Shigella flexneri
atggaaaaagactatttgagaattagtagtactgtattagtgagcttattgtttgggcttgctttggttttggtgaatagttggtttaatcagccaggcgttgaggaagttgttccacgatcaacctatctgatggtaatgattgctttattttttatcgatactgttgcatttatttttatgcagttgtatttcatttatgaccgtaggcaattttcaaactgtatacttagtttggcttttctgagttgtttgatttactttgttaaaaccgtcattatcattcagcaaattattgaggggcgtttgacaagcagtgttgtccaaaatgacattgcaatctattatttgtttcgtcagatgagtttgtgcatattaatatttctggcattggtgaataaagttagtgaaaacacaaaacagcgcaatttattttccaaaaaaatgactttgtgcataagtttgtttttgtttttggggggccgatag

SEQ ID NO: 475393 - DNA, 534 bp, Shigella flexneri
gtgcataagtttgtttttgtttttggggggccgatagttgctcacatactttctagtcattatgagagctacaatttacacattgccgagttaaccaatgaaaatggtcaggtggtttggaaagcctcatatgttaccataatgattttcatgtggttaaccttgctttcggttaatctatactttaatggtttacgctatgatatctggaatggagtgacggtgattgctttttgtgccgtactgtacaatatctctctgttatttatgagcaggtatagcgtgtccacttggtatattagtcgcactattgaagtagtcagtaagttaaccgttatggtaatatttatgtgccatatattcagtgcgctacgagtaacaaagaacattgcacatcgcgatcccttaaccaatatatttaacagaaattatttttttaatgaactgacagttcaatcagcatcagccaaaaaaacgccttattgtgtcatgattatggatatcgaccacttcaaagaagtcaacgacacctga

SEQ ID NO: 475394 - DNA, 411 bp, Shigella flexneri; identical to SEQ ID NO: 466743

SEQ ID NO: 475395 - DNA, 210 bp, Shigella flexneri; identical to SEQ ID NO: 462389

SEQ ID NO: 475396 - DNA, 516 bp, Shigella flexneri; identical to SEQ ID NO: 474713

SEQ ID NO: 475397 - DNA, 381 bp, Shigella flexneri; identical to SEQ ID NO: 458903

SEQ ID NO: 475398 - DNA, 867 bp, Shigella flexneri; identical to SEQ ID NO: 473071

SEQ ID NO: 475399 - DNA, 1161 bp, Shigella flexneri; identical to SEQ ID NO: 473070

SEQ ID NO: 475400 - DNA, 702 bp, Shigella flexneri
atgaggggatctctcagcgctctgtttttataccgttgtacgttcccaccccatccgggtcgtcgcttacctgtcataaagaaaaccaccagctctacggaacatcgctgttcaattatcgatttagccagttataccttatatggctatatctcaatggcaacgttttatctggttagccagtggctggcacagtacggacaatttgttgcaggcatgtcatacactatgtcgatcaaactactcagtatctacaccgtgggttcgctgctttgtgtatttattaccgctccactcattcgtaataccgttcgcccaacaacattactgatgctgtacacctttatctcatttattgctctgtttaccgtctgcctgcatcccacattttatgtggtgataatatttgcttttgtcattggttttacctctgctggaggtgttgtgcaaattggcctgacgttaatggctgaacatttcccttacgctaaaggtaaagctacagggatctattacagtacgggcagtattgcgacctttactattccgttgattacggctcatctgtcccaaagaagtattgtcgatattatgtggttcgatactgccatcggttttttactggcactgtttatcggcttacgcagccgcaaaaaaacgcggcatcactcgctaaaggaaaatgtcgctccgggtgggtaa

SEQ ID NO: 475401 - DNA, 381 bp, Shigella flexneri; identical to SEQ ID NO: 458903

SEQ ID NO: 475402 - DNA, 729 bp, Shigella flexneri; identical to SEQ ID NO: 474473

SEQ ID NO: 475403 - DNA, 834 bp, Shigella flexneri; identical to SEQ ID NO: 474610

SEQ ID NO: 475404 - DNA, 381 bp, Shigella flexneri
atgctgggagcggtggaacgccgcttcggcaacgatcttccgtcgtctccagtggagtggctgacggataatggttcatgctaccgggctaatgaaacacgccagttcgcccggatgttgggacttgaaccgaagaacacggcggtgcgtagtccggagagtaacggaatagcagagagcttcgtgaaaacgataaagcgtgactacatcagtatcatgcccaaaccagacgggttaacggcagcaaagaaccttgcagaggcgttcgagcattataacgaatggcatccgcatagtgcgctgggttatcgctcgccacgggaatatctgcggcagcgggcttgtaataggttaagtgataacagatgtctggaaatatag

SEQ ID NO: 475405 - DNA, 342 bp, Shigella flexneri
atgaaaaatattgcgacaggcggcgttctggaacgcatccgccgactgaccccgcaacatgtaaccgccccattcagaacggtagcggagtggcgcgagtggcaacttgctgaaggccagaaacgtagcgaggagatcaaccgcctgaatcgccagttgcgggtggaaaaaattctgaatcgctcaggcatccagccgttgcaccgtaaatgctcgtttgcgaattaccaggtgcagaacgacggccagcgatacgcgttaagccaggcgaaatccatcgccgatgaactgatgaccgggtgtacaaattttgcgttcagcggaaaacctgataccgggtag

SEQ ID NO: 475406 - DNA, 327 bp, Shigella flexneri
atgagcgccctgcacgccagctatgacgacgggcagtcaggcgaaaaatttttgcgggagctgtgcgaagtggatctgctggttcttgatgaaattggcattcagcgcgagacgaaaaacgagcaggtggtgctgcaccagattgttgatcgccggacagcgtcgatgcgcagcgtggggatgctgacaaacctgaactatgaggtgatgaaaacattgctcggcgagcgggtgatggatcgcatggtcatgaaaggcgggcgctgggttaattttaactgggagagctggcgtccgaatgttagccattcgagggttgttaagtag

SEQ ID NO: 475407 - DNA, 423 bp, Shigella flexneri; identical to SEQ ID NO: 474638

SEQ ID NO: 475408 - DNA, 198 bp, Shigella flexneri
atgaaaatcgaagaattgcgtgaaatttttagtgaaaatggcctctatgctgtgcgcgttgagaatggagcgattgtcagccattgccgcattagatgtttgcaatctcaacaaaggggtaatgactccaacttactgatagtgttttatgttcagataatgcccgatgaccttgtcatgcagctccaccgattttga

SEQ ID NO: 475409 - DNA, 792 bp, Shigella flexneri; identical to SEQ ID NO: 474388

SEQ ID NO: 475410 - DNA, 381 bp, Shigella flexneri; identical to SEQ ID NO: 458903

SEQ ID NO: 475411 - DNA, 261 bp, Shigella flexneri
atggtgaggtactacggttttttgagtccggcgaaacggcggttactggaagaagtggtgtacatcataacggagacagtgagaaaaacggcgatgcaaatcacctggagagggatgtatcagaggttactgaaggttgacccgctgaagtgcgtgctgtgcgggagtcagatgcgttttacggggctgaagcggggctaccgtctggcagagcaggtcctgatgcatgagccgctggcccggatgcggtggtgcggctga

SEQ ID NO: 475412 - DNA, 216 bp, Shigella flexneri; identical to SEQ ID NO: 474431

SEQ ID NO: 475413 - DNA, 216 bp, Shigella flexneri; identical to SEQ ID NO: 474400

SEQ ID NO: 475414 - DNA, 684 bp, Shigella flexneri; identical to SEQ ID NO: 474399

SEQ ID NO: 475415 - DNA, 366 bp, Shigella flexneri
atgaccgaacgcatagaatttgttttgccttacccgccaacggtgaacacctactggcgacgtcgtggcagcacatattttgtatcaaaagccggtgagcgttatcgccgtgatgtggcgctaattgttcgccagcagcgactgaaattaaacctgtccggaaggctggcgataaaggtgattgcagagccaccggataagcgccgtcgtgacctggacaatatcctgaaggcaccgctggatgcgctgacgcatgctggactacttatagacgacgagcagtttgatgaaatcaatattgtgcgcggtcagctcgttcctggtgggcggctggggataaaaatcacagaactggggtgcgcatga

SEQ ID NO: 475416 - DNA, 342 bp, Shigella flexneri
gtggtcagcattgccgttgatccggaatctccggctcagtatctccagcgccagaaaccacaacgggaagagatgcctgtatacacgcgctgggtaaaaacgcagaaatgcatgacgtgtggcaatcaggcagatgatccgcaccacatcattggtcatggactgggagggatgggaacaaaggctgacgatttgtttgttattccgctgtgtcgtaaatgccataacgaactacacgccggggtaaaagattttgaagaaaaacacggtagtcagttgttgttgctgattcgttttttaatgcacgcgagaaattcgggtgttctgaagtggaaagcataa

SEQ ID NO: 475417 - DNA, 675 bp, Shigella flexneri
atgaattcccagacaacaaaagatattccctgcttccgttcttatttgcctgatgccctgcgtttaagatttgaagataaactgaccatccgggccatcgctcagcgtctgggtctcagtcattccacaatacatacgctttttcagcgatttcttgcatccggtatcgcatggccattgcccgattcagtttcattcgctcaacttgacgccatcctttatgccaacagaaagaaggaattaacagagcctcaaatcagagaaggctcatggcgaaaagaacggcgaaccagctatagccgtgaatttaaggtccgtctggctaagcaggcgttacagcctggggctgttgttgcccggatcgccagagaacacgatatcaatgataacctgctgtttaaatggaaaagccagtacgaggacggcttactgagcgatgatgacatacaggaatgcatgcctgtcccggtggcactgactgatacgccggagccgaccagaccagttacaaatcccttctggcgtaacaagcatgatgagcgccctgagggggctcccggaaacgtcccacggtgcgagctgcatcttaaatcaggtgtggtaaaactgtttgaccctctcactccggaactgttacgggcgctaatccgcgaaatgaaagggggtatccgatga

SEQ ID NO: 475418 - DNA, 1215 bp, Shigella flexneri; identical to SEQ ID NO: 474550

SEQ ID NO: 475419 - DNA, 1455 bp, Shigella flexneri; identical to SEQ ID NO: 474451

SEQ ID NO: 475420 - DNA, 381 bp, Shigella flexneri; identical to SEQ ID NO: 458903

SEQ ID NO: 475421 - DNA, 678 bp, Shigella flexneri
atgaagacacatctggagcaggaaggatgtcgaacccgggttactgttgtgcctccaggctttgatttccagaaattatacgttgattcccgaaacagtttgcctccaaatgttctttcttggctggcgtcccgaaggggatgccccgttattgctcaggtaggaatgttgcgcccggaaaaagggcacgaatttatgttgaatttactgttccatttaaaaatgaatggacgacagttctgttggttgattgtggggtctggttcgcctgaactgcgggagcatttacagtatcagattgacagtatgggcatgcatgatgatgtttttattgctgacaatgtttttcctgccgcccccgtatatcgggttgccagtctggtggttctgccttcagaaaacgaatcgtttggtatggtactggcagaagcatcggcattttctgtgcctgtactggccagtcagattggtggaatccctgatgttattcagaataaccagaccgggacattgttaccagcaggtaataagcacgcatggatgtgcgccctgaatgatttttttaatgaccctgggcgtttttatcagatggctcgccaggcaaaacaggatatagaagagcggtttgatattaataaaactgcgttaaaaatactcacattagcgaagcacaagtaa

SEQ ID NO: 475422 - DNA, 951 bp, Shigella flexneri; identical to SEQ ID NO: 474376

SEQ ID NO: 475423 - DNA, 246 bp, Shigella flexneri; identical to SEQ ID NO: 474504

SEQ ID NO: 475424 - DNA, 294 bp, Shigella flexneri; identical to SEQ ID NO: 474511

SEQ ID NO: 475425 - DNA, 750 bp, Shigella flexneri
gtggtttacttaagtaataatgctgataaatctatttctgtatttagcaaagaagaaaaaataccttatctcatccaggcttgggtagatccatttaataaagaggataaaagcaaagcgccgtttaccgttattccgccagtatcacgattagaaccttcgcaagaaaaaatattacgcattattcacaccaaaggtgtgtcattgcctgatgatcgcgagtcagtcttctggctgaatattaaaaatattccgccatcagcgagcaacaaagcgacgaactcgctggaaatagcagtaaaaacgcgtatcaagctgttctggcgaccagcaaatatccgccttattcccgaagatgctgcgccgaaagtgaaatggcgccgggaagggcgaaatctgatagcagagaatcccaacccaattcatatcagtgtgatggatgtcatcgttgatggccatgatgtgcccctcaatatgatccgtccttttgaaacgctcacgttacctttacctgctaattctgcgggaggccaaatgacctggcgatttattaatgattacggcgcagtcagtggatttgcccctatatttccagacatctgttatcacttaacccattacaagcccgctgccgcagatattcccgtggcgagcgataacccagcgcactatgcggatgccattcgttataatgctcgaacgcctctgcaaggttctttgctgccgttaacccgtctggtttgggcatga

SEQ ID NO: 475426 - DNA, 381 bp, Shigella flexneri; identical to SEQ ID NO: 458903

SEQ ID NO: 475427 - DNA, 906 bp, Shigella flexneri
gtggatagcgcacgcgcccttattgcccggggatggggagtaagcttagtcagccgttgtctccgggtgtcgcgtgcgcagttgcacgtcattctcagacgaaccgatgactggaaagatggtcgccgcagtcgtcacactgatgatacggatgtgcttctccgtatacaccatgttatcggagagctgcccacgtatggttatcgtcgggtatgggcgctgcttcgcagacaggcagaacttgatggtatgcctgcgatcaatgccaaacgtgtttaccggctcatgcgccagaatgcgctgttgcttgagcgaaaacctgctgtaccgccatcgaaacgggcacatacaggcagagtggccgtgaaagaaagcaatcagcgatggtgctctgacgggttcgagttccgctgtgataacggagagagactgcgtgtcacgttcgcgctggactgctgtgatcgtgaggcactgcactgggcggtgactaccggcggcttcaacagtgaaacagtacaggacgtcatgctgggagcggtggaacgccgcttcggcaacgatcttccgtcgtctccagtggagtggctgacggataatggttcatgctaccgggctaatgaaacacgccagttcgcccggatgttgggacttgaaccgaagaacacggcggtgcggagtccggagagtaacggaatagcagagagcttcgtgaaaacgataaagcgtgactacatcagtatcatgcccaaaccagacgggttaacggcagcaaagaaccttgcagaggcgttcgagcattataacgaatggcatccgcatagtgcgctgggttatcgctcgccacgggaatatctgcggcagcgggcttgtaatgggttaagtgataacagatgtctggaaatatag

SEQ ID NO: 475428 - DNA, 888 bp, Shigella flexneri; identical to SEQ ID NO: 474634

SEQ ID NO: 475429 - DNA, 279 bp, Shigella flexneri; identical to SEQ ID NO: 127146

SEQ ID NO: 475430 - DNA, 144 bp, Shigella flexneri
atgatttttaccaaaatcattaggggattcatcagcaccctgcgtgagtttcacgagaagctgcgtgaactgctgacgacgctgaatctgaagctggaaccggcgaatgattttcgtgatgaaccggtgaagttaacggcgtga

SEQ ID NO: 475431 - DNA, 1056 bp, Shigella flexneri; identical to SEQ ID NO: 472373

SEQ ID NO: 475432 - DNA, 327 bp, Shigella flexneri
atgactaaaaatactcgtttttcccccgaagtccgtcaacgggcagtccgtatggttctggaaagtcagggcgaatatgactcacaatgggcgacaatttgttccattgctccaaagattggctgtacgccggagactctgcgtgtctggggtcgccagcatgagcgggataccgggggcggtgatggagggctcaccaccgctgaacgtcagcgtctgaaagagccggagcgtgaaaatcgtgaactgcgccgcagtaacgatatccttcgccaggcttccgcttattttgcgaaggcggagttcgaccgcctctggaaaaaatga

SEQ ID NO: 475433 - DNA, 543 bp, Shigella flexneri; identical to SEQ ID NO: 474594

SEQ ID NO: 475434 - DNA, 741 bp, Shigella flexneri; identical to SEQ ID NO: 474595

SEQ ID NO: 475435 - DNA, 1425 bp, Shigella flexneri; identical to SEQ ID NO: 474554

SEQ ID NO: 475436 - DNA, 225 bp, Shigella flexneri
atgtcgcgtaaaggtaactgttacgacaacgctccgatggaaagcttctggggaacgctgaaaaatgagagcctgagccactatcgttttaataaccgggatgaagccacctcagtaatacgggaatacattgagattttctacaatcgtcagcgtcgtcactctcgtctggggaatatctccccggcagccttcagggaaaaatatcatcagatggctgcttaa

SEQ ID NO: 475437 - DNA, 231 bp, Shigella flexneri; identical to SEQ ID NO: 474501

SEQ ID NO: 475438 - DNA, 381 bp, Shigella flexneri
atgctgggagcagtggaacgccgcttcggcaacgatcttccgtcgtctccagtggagtggctgacggataatggttcatgctaccgggataatgaaacacgccagttcgcccggatgttgggacttgaaccgaagaacacggcggtgcggagtccggagagtaacggaatagcagagagcttcgtgaaaacgataaagcgtgactacatcagtatcatgcccaaaccagacgggttaacggcagcaaagaaccttgcagaggcgttcgagcattataacgaatggcatccgcatagtgcgctgggttatcgctcgccacgggaatatctgcggcagcgggcttgtaatgggttaagtgataacagatgtctggaaatatag

SEQ ID NO: 475439 - DNA, 531 bp, Shigella flexneri
atgaatgttacctgtttcgcactgatattgtgctgtatcggtacatcaacaaaagcaaagatattattttatctaatcgcatttttattttcgatcagttcaattaaatcttacacaaataatgcttcaccattacacgatcaggagaagattgttaaatcatacattgattttttaaaaaaaaataatctccattatgggtacggctctttttgggatttgtcaatgactgtaaattggttatctggtggggacatacagataactcctgttttctttaatgctgattcggggaaaattaactttactggcgtgagacaacagacactggcttcttggcatagcaaggaggcgttcaattctgctcctgagcgacagtttatagcagtttccatagctaacgaacctgaacgatgtaaagaaatgacatcctgccttgcaggtattcaagaacaattaggtaagcctgacgaagttttgaactttgaaggaagagtaatattagtatttaacaaaaaacttaacctatag

SEQ ID NO: 475440 - DNA, 948 bp, Shigella flexneri
atgcagcacaacacactatcgaaacacaatcagaaattgccgtttacacgctacgacttcggctgggttttattatgcataggcatggcgattggtgccggaaccgtgctgatgccagtacaaattggcttgaagggaatttgggtatttattaccgcagcgatcattgcttatcctgtcacctgggtagtgcaggacatttatttaaaaaccctttctgaaagcgattcctgtaatgactacaccgatattatcagtcattacctggggaagaactggggaattttcctcggggttatctactttttgatgattatccacgggatttttatctactctctctccgtggttttcgacagcgcctcgtacctgaaaaccttcggtttaaccgatgccgatctttcacaatctctactttataaagtcgctattttcgccgtactgatagcgattgcgtctggtggtgaacgattactgtttaagatttctgggccaatggtggtggtcaaagtagggattattgtcgtgttcggttttgcgatgatcccgcactggaatttcgccaatataaccgccttcccgcaagcctccgtctttttccgcgatgtcctgcttaccattccattttgcttcttttctgcggtatttattcaggtacttaacccaatgaatattgcctatcgtaaacgggaagcagataaagtactggcaacccggctcgcgctgcgtacccaccgaattagttatatcacgctcatcgcggtgatcctgttttttgccttttcgtttaccttctcaattagccacgaagaagccgtttctgcctttgaacaaaatatctcggcactggcactggccgcgcaggtgatccctggacatatcattcatatcacctctacggtgctgaatactgatgaatcccctaatgattttggtaaaaatcattaa

SEQ ID NO: 475441 - DNA, 1320 bp, Shigella flexneri
gtgctctgcatcggtactctgtatctcctcaaactttataccgatgaattagggatgcctgcttactatggcgggattatctttctggtcgcgaagttttttaccgcgtttaccgatatgctcaccggatttttactcgactcgcggaaaaatattgggcctaaaggcaaatttcgtccctttattttatatgcagcagttccggcggcgttaattgcaacgctccagtttatcgccaccaccttttgtttgccggttaaaacgacgattgccaccacgctgtttatgatgtttggactttcatacagtctgatgaactgctcgtatggtgcgatgatcccggcaattaccaaaaacccgaatgagcgcgcgcagctcgcggcttaccgccagggtggtgcaaccatagggctattgatttgtaccgtggcgtttattccgttgcagtcgcttttttctgactcaaccgtcggttatgcctgtgcggcacttatgttctccattggcggctttatttttatgatgctgtgctacagaggcgtcaaagagcattatgtggacacagcgccaaccggacataaagccagtattctcaaatctttttgcgcgatatttcgtaatccaccattgctggttttatgcattgctaacctgtgtactctggcggcatttaatatcaaactggcgattcaggtctattacacccagtatgtgctgaatgatattaatttattgtcgtggatgggattcttcagtatgggatgcatcctcgtcggcgtattactggtgccagtaactgtaaaatgttttggtaaaaaacaggtttatttagctggcatggtgctatgggcggtgggtgatatactgaattatttctggggaagtaactctttcactttcgtcatgttctcttgtgtcgccttttttggcacggcctttgtaaacagcctgaactgggcactggtaccagataccgtagattacggtgaatggaaaaccggtattcgtgccgaaggttctgtttataccggttataccttctttcgtaaaatttctgccgcacttgctggcttcttgccaggcattatgctgacgcaaattggttatgttcccaacatcgcgcaaagcgatgcgacattacagggtttgcgtcagctcatttttatctggccttgtgcactggcaattattgctgcattgacgatgggattcttttacacactcaatgaaaaacggtttgcattgattattgaggaaatcaaccaacgcaaaaataaagagatggcgacagaaaaaaaaacggcttccgtaacgttataa

SEQ ID NO: 475442 - DNA, 303 bp, Shigella flexneri; identical to SEQ ID NO: 474565

SEQ ID NO: 475443 - DNA, 360 bp, Shigella flexneri; identical to SEQ ID NO: 474567

SEQ ID NO: 475444 - DNA, 138 bp, Shigella flexneri; identical to SEQ ID NO: 474566

SEQ ID NO: 475445 - DNA, 195 bp, Shigella flexneri; identical to SEQ ID NO: 475224

SEQ ID NO: 475446 - DNA, 327 bp, Shigella flexneri
atgactaaaaatactcgtttttcccccgaagtccgtcaacgggcagtccgtatggttctggaaagtcagggcgaatatgactcacaatgggcgacaatttgttccattgccccaaagattggctgtacgccggagactctgcgtgtctgggttcgccagcatgagcgggataccgggggcggtgatggagggctcaccaccgctgaacgtcagcgtctgaaagagccggagcgtgaaaatcgtgaactgcaccgcagtaacgatatccttcgccaggcttccgcttattttgcgaaggcggagttcgaccgcctctggaaaaaatga

SEQ ID NO: 475447 - DNA, 1098 bp, Shigella flexneri
atggcgctttttcaacgagcaataaacacacaggcctatctaaaagcaggaattatggggtttgctggcgacggcaaaacctacacagcaagcgaactggctattggtctggtaatgcttatgcggcaacggggaattgaagctggtaaccgcccggtaatgtttctggacacagaaacaggctctgactgggttaaaccccgctttgatgcggaaaatatcgaattatttacggcaaaaacccgctcgtttgttgatctgcttgaagccattaatgaagcggaaagcagcggttccgtaatgatcatcgactccatcagtcacttctggaccggattatgcgacgagtatgccagacgccgaaaccgtaaacgaggactggaattttcagactgggcgtggctcaaacaggagtggcgacgctttaccgatcgatttgttaacagtcaggcgcacattattatgtgcgggcgtgcaggatatgagtatgactttttcgaaggtgatgatggcaaacgccagttggcaaaaaccggtataaaaatgaaagcagaaacagaaaccggttatgaaccctccatccggatccagatggagaagcaaatgaacatagaaaccggtcaggtgtggcgcaccgccagaatactaaaagatcgctccacccgtattgatggacaggtattttcaaacccaacatttaaaaactttcttcctcatatcgagtctcttaacctgggaggtgaacaccccggcatcgatacctcacgggataacagtgaattatttgccaacgacggtacaccgacatggctaaaagaaaagcgtgcaaaagaaatcgcacttgatgaaattatcgagttgctcaacaagcaccatgggggcaccagtaacgacgccaaacgcgcaaaagctgatttgctggaaaaaacattcacctcccgctcatgggaaagaatcaaaggtatggactggccgacaatcaaagctggtcgtaatgcactatggattgaactggaaggcgttgaatatgcattcccggatccacaaacacaaaacgaaacgcaacaagcaggatacgatgagaatattccggtgtaa

SEQ ID NO: 475448 - DNA, 327 bp, Shigella flexneri; identical to SEQ ID NO: 474582

SEQ ID NO: 475449 - DNA, 477 bp, Shigella flexneri; identical to SEQ ID NO: 5326

SEQ ID NO: 475450 - DNA, 381 bp, Shigella flexneri; identical to SEQ ID NO: 458903

SEQ ID NO: 475451 - DNA, 1044 bp, Shigella flexneri; identical to SEQ ID NO: 474572

SEQ ID NO: 475452 - DNA, 846 bp, Shigella flexneri; identical to SEQ ID NO: 474647

SEQ ID NO: 475453 - DNA, 375 bp, Shigella flexneri; identical to SEQ ID NO: 13405

SEQ ID NO: 475454 - DNA, 315 bp, Shigella flexneri; identical to SEQ ID NO: 474620

SEQ ID NO: 475455 - DNA, 378 bp, Shigella flexneri; identical to SEQ ID NO: 474621

SEQ ID NO: 475456 - DNA, 225 bp, Shigella flexneri
atgtcgcgtaaaggtaactgttacgacaacgctccgatggaaagcttctggggaacgctgaaaaatgagagtctgagccactatcgttttaataaccgggatgaagccatctcagtaatacgggaatacattgagattttctacaatcgtcagcgtcgtcactctcgtctggggaatatctccccggcagccttcagggaaaaatatcatcagatggctgcttaa

SEQ ID NO: 475457 - DNA, 900 bp, Shigella flexneri; identical to SEQ ID NO: 475360

SEQ ID NO: 475458 - DNA, 510 bp, Shigella flexneri
atgtcacatggtgtcgattcattgaccgatattagttacagggtaagggcgttctttgatgaggtgacattagcttaccgtccactaaatgacactcagaggaaaattgttgatggtttatctggtgggttaattgatggtctgaagatgcttgctgtggctgttactgctcaaaaggctgcaaatgtagcaggaggcttgttaaaccttgcaaacgctgttacttcattcggtgacgctgttaataaagctaaagctggcaaggctggttcttcaggtggtgcgctaaataaagtcggtagagttgtcctttatgctgagttggtaaattttgctcttgataatttaaaccctgaagcagctaagaatccgaacttacatcaatcaggtattggcacagaaacaaacttcaaccctgaatacaaaggtgattcatctaagccaatagttctatcgctgactggtttaatggtgcaactaataaaattgctaacttccaagaaccgatga

SEQ ID NO: 475459 - DNA, 546 bp, Shigella flexneri
atgttgcatttaaaaaatattactgcgggtaatccgaaaacagcagaacaatatcagatgacaaaacgatattcggtcacctggcttttttcagaagacggaaaaaactggtatgaagagctgaagaatttcgccagcgacacaataaaaatagcttacaccggagatggtcgcgtggtgtgggtcggtaaggatgtgacaggcatcgagccacgcaatgccagcgttatcgaagttccggatattaccgctaaccgacggattaccgcgccgggttactggttttaccgcaatgatgaatttgtctttgactacagactcaaagcggaagatgagcgtgatgcccttctggctcaggtcagtgcccggacaggggaatgggaagaagacctgctgctggggttaatcagcgacgaagataaagaaaagctgaaagcctgtcgtatttacgcgaaatcgctgcaggcgatggatttcagcaccatcactgataaatcctcatacaacgccattgaatggcccgcctctccggaaggttcttcctga

SEQ ID NO: 475460 - DNA, 288 bp, Shigella flexneri; identical to SEQ ID NO: 474636

SEQ ID NO: 475461 - DNA, 675 bp, Shigella flexneri; identical to SEQ ID NO: 472105

SEQ ID NO: 475462 - DNA, 675 bp, Shigella flexneri; identical to SEQ ID NO: 473842

SEQ ID NO: 475463 - DNA, 174 bp, Shigella flexneri
atgaactctcaaacaacactagatatcaccggctttcgcacttatttgccagaatcattacgtctcagattcgacgagcaactatctgtccgggctatcgcacagcagttaagactcagttattcccccattcacaatctctttcaacgaattaacgcctcaggtattgtctga

SEQ ID NO: 475464 - DNA, 381 bp, Shigella flexneri; identical to SEQ ID NO: 458903

SEQ ID NO: 475465 - DNA, 222 bp, Shigella flexneri; identical to SEQ ID NO: 8360

SEQ ID NO: 475466 - DNA, 684 bp, Shigella flexneri
atgtcccgttttgtcctcggtaactgcatcgatgttatggcccgtatccctgataacgccattgatttcatcctcaccgacccgccgtacctcgtcggttttcgtgaccgccaggggcgtaccattgccggcgataaaaccgatgaatggctgcaaccggcctgtaatgagatgtaccgcgtactcaaaaaagacgcgttaatggtgagcttctatggctggaatcgcgtcgatcgttttatgtctgcctggaaaaatgcgggattcagcgttgttggtcacctggtcttcaccaaaaactacacatcgaaggccgcatatgtgggctatcgccacgaatgtgcctacatcctggcaaaaggccgtccacgtctgccacaaaacccgctgccggacgtgctgggctggaaatattcgggcaatcgccatcacccgacggaaaagcccgttaccagcctgcaaccactgattgagagcttcacacatccgaacgcgattgtgctggacccgtttgcaggcagcggatcaacctgcgtggccgctcttcagtccggacgccggtatatcggtatcgagctgcttgaacagtatcaccgtgccggacagcaacgactgaccgccgtgcaacgggccatgcagcagggggccgcgaatgataactggtttgaaccggaggctgcgtaa

SEQ ID NO: 475467 - DNA, 900 bp, Shigella flexneri; identical to SEQ ID NO: 475352

SEQ ID NO: 475468 - DNA, 480 bp, Shigella flexneri
atggggtttgagcgcggagaatacgccaccattatggcgctgaccgctggcgtcagcatgaccttttcattctcgacgccatttgcgctgggaatttttaagccacgtacgttgatgatcacctcgcaggtgttattccttgcggcggggatcacccttgccgtttcaccttcccatgcggtttctctgtttggtatcacgctgatttgcgccggtttctcggtaggttttggcgtagcgatgagtcaggcgttaggaccattttcattacgcgcgggcgtagccagctcgaccttaggtattgcgcaggtttgcggttcgtcactgtggatttggctggccgcggtggttggtatcggcgcatggaatatgctgatcgggattctgattgcctgtagcatagtgagcctgttgctgattatgttcgtcgcgcctggacgccccgttgccgctcatgaagaaatccatcaccacgcttga

SEQ ID NO: 475469 - DNA, 288 bp, Shigella flexneri; identical to SEQ ID NO: 474636

SEQ ID NO: 475470 - DNA, 546 bp, Shigella flexneri; identical to SEQ ID NO: 475459

SEQ ID NO: 475471 - DNA, 288 bp, Shigella flexneri; identical to SEQ ID NO: 474636

SEQ ID NO: 475472 - DNA, 546 bp, Shigella flexneri; identical to SEQ ID NO: 475459

SEQ ID NO: 475473 - DNA, 288 bp, Shigella flexneri; identical to SEQ ID NO: 474636

SEQ ID NO: 475474 - DNA, 288 bp, Shigella flexneri; identical to SEQ ID NO: 474636

SEQ ID NO: 475475 - DNA, 675 bp, Shigella flexneri; identical to SEQ ID NO: 472105

SEQ ID NO: 475476 - DNA, 327 bp, Shigella flexneri
atgctgggagcggtggaacgccgcttcggcaacgatcttccgtcgtctccagtggagtggctgacggataatggttcatgctaccgggctaatgaaacacgccagttcgcccggatgttgggacttgaaccgaagaacacggcggtgcggagtccggagagtaacggaatagcagagagcttcgtgaaaacggtaagcgccccatcagcgacgtcttgtgaaaattgtcctgtctggcaacaatcgcgcccatctatattgatggacacgaacgatgaattcccagacaacaaaagatattccctgcttccgttcttatttgcctga

SEQ ID NO: 475477 - DNA, 189 bp, Shigella flexneri; identical to SEQ ID NO: 469030

SEQ ID NO: 475478 - DNA, 360 bp, Shigella flexneri
atgatctgtcagcctgagttcacagataaaacactctccaggaaacccggggcggttcagaaagtaaatgaaacagatgctgaatacctggtgcgtaaattcgatgagcttgaagctaaatgtgcagcacaggaaaacaaagtaataccagtgtcaactgaactgccaccagcaaatgaaagtgttttgttattcgatgctaacggagaaggctggctaattggctggcgttctctctggtacacctggggacaaaaagaaaccggagaatggcagtggacatttcaggtcggggaccttgaaaacgtcaatatcactcactgggcagtaatgccaaaagcaccggaggctggagcataa

SEQ ID NO: 475479 - DNA, 306 bp, Shigella flexneri; identical to SEQ ID NO: 399824

SEQ ID NO: 475480 - DNA, 204 bp, Shigella flexneri
atggtagtgtccgctattgccagtacacctcatattggctacgtaattaaaacagaaaataaagaaaccccattcactgtagttgatatcgacggtctatcaggaaactttaaaactcttgttgaaggtgccacaaaaatgtgcctagtttacatcggaaataatctgcccgcagaaaaaaagccgaatttctggcaaatctga

SEQ ID NO: 475481 - DNA, 645 bp, Shigella flexneri
atgagcacaaaaccactcttcctgttacggaaagcgaaaaaatcatccggtgaacctgacgtcgtcctgtgggcaagcgacgattttgaatcgaccagcaccactctggactatctgctcgttaagtcaggtaaaaaactgagcaactattttaaagctgttgccacaaattttcctgtcgttaatgaccttccccctgaaggtgagatcgattttacctggagtgaacgctatcaactcagcaaagactccatgacatgggaactaaaaccgggagcagcgccagacgacgttcaccaccaggataatgctcaagaaaccaaagaactggcggtaggccaggaagaaaacgcgcaggcagacgcccacgaggattgccaggattgcgaagtctctgtagccactttgcggttcacacagcgtcttctgcacatttttacgtatgctgccggggatcggaaatacctgcatcatgccacccgtgaacaacgcaaacacattactgctcttgagatggatcaggaaaacagctatgtccagaatctgctgttggccatacgcggcatggcagaaccgacaactctggataatgccgccctgctccgcctgactgatgcaattaaggctgaggtgtactggcaatag

SEQ ID NO: 475482 - DNA, 645 bp, Shigella flexneri; identical to SEQ ID NO: 474660

SEQ ID NO: 475483 - DNA, 267 bp, Shigella flexneri; identical to SEQ ID NO: 462029

SEQ ID NO: 475484 - DNA, 570 bp, Shigella flexneri; identical to SEQ ID NO: 474696

SEQ ID NO: 475485 - DNA, 300 bp, Shigella flexneri; identical to SEQ ID NO: 84330

SEQ ID NO: 475486 - DNA, 288 bp, Shigella flexneri; identical to SEQ ID NO: 474636

SEQ ID NO: 475487 - DNA, 315 bp, Shigella flexneri; identical to SEQ ID NO: 474620

SEQ ID NO: 475488 - DNA, 378 bp, Shigella flexneri; identical to SEQ ID NO: 474621

SEQ ID NO: 475489 - DNA, 546 bp, Shigella flexneri; identical to SEQ ID NO: 475459

SEQ ID NO: 475490 - DNA, 288 bp, Shigella flexneri; identical to SEQ ID NO: 474636

SEQ ID NO: 475491 - DNA, 288 bp, Shigella flexneri
gtgttgggctggaaatattcgggcaaccgccatcacccgacggaaaagcccgttaccagcctgcaaccgctgattgagagcttcacacacccgaatgcgatagtgctggacccgtttgcaggcagcggttcaacctgcgtcgccgccctccagtccggacgccggtatatcggtatcgagctgcttgagcagtatcaccgtgccggacagcaacgactggctgccgtacagcgggccatgcagcagggggccgcgaatgatgactggtttatgccggaggctgcgtaa

SEQ ID NO: 475492 - DNA, 180 bp, Shigella flexneri; identical to SEQ ID NO: 474761

SEQ ID NO: 475493 - DNA, 180 bp, Shigella flexneri
atgaataagccgcaactggcggaatcacagaagaccgctttgcttaccgaagcggagtctgtcatccggccgccggggcgtgctgtcaggctgaacagggaaacggatgaatccggggaggcccgggggcgggcctccgtttttccggagtcagtccggtctgtggtttatgcgatgtga

SEQ ID NO: 475494 - DNA, 204 bp, Shigella flexneri; identical to SEQ ID NO: 475480

SEQ ID NO: 475495 - DNA, 645 bp, Shigella flexneri; identical to SEQ ID NO: 474660

SEQ ID NO: 475496 - DNA, 645 bp, Shigella flexneri; identical to SEQ ID NO: 474660

SEQ ID NO: 475497 - DNA, 477 bp, Shigella flexneri; identical to SEQ ID NO: 5326

SEQ ID NO: 475498 - DNA, 303 bp, Shigella flexneri; identical to SEQ ID NO: 473532

SEQ ID NO: 475499 - DNA, 645 bp, Shigella flexneri; identical to SEQ ID NO: 474660

SEQ ID NO: 475500 - DNA, 219 bp, Shigella flexneri; identical to SEQ ID NO: 474644

SEQ ID NO: 475501 - DNA, 213 bp, Shigella flexneri; identical to SEQ ID NO: 474663

SEQ ID NO: 475502 - DNA, 372 bp, Shigella flexneri; identical to SEQ ID NO: 467509

SEQ ID NO: 475503 - DNA, 303 bp, Shigella flexneri; identical to SEQ ID NO: 473532

SEQ ID NO: 475504 - DNA, 189 bp, Shigella flexneri; identical to SEQ ID NO: 469030

SEQ ID NO: 475505 - DNA, 303 bp, Shigella flexneri; identical to SEQ ID NO: 474565

SEQ ID NO: 475506 - DNA, 261 bp, Shigella flexneri; identical to SEQ ID NO: 475411

SEQ ID NO: 475507 - DNA, 402 bp, Shigella flexneri
atgcggtacggttcactggccggatggcgttattccgcctttctgatgcttccccgttttgccgatatttttcagcagggaaaccgatggcttaactggctggagaagcagccggtgcagatgagccgcctggaacattatgccggtcaggatgaaattggcctgcgttacaacagccaccggacaaaacgagaagaaaaccttgtgatgagtggcgacgagtttatggaaaggttctcctggcatgtggcggataaggggttccggatagtgatacggggtcctgagtccggtgaagcggcgattactggaagatgtggtgtacgccataacggagacagtgagaaaaacggcgaggcaaatcacaaggagagggatgtatcagcagtgactgaaggttga

SEQ ID NO: 475508 - DNA, 180 bp, Shigella flexneri; identical to SEQ ID NO: 475493

SEQ ID NO: 475509 - DNA, 195 bp, Shigella flexneri; identical to SEQ ID NO: 464447

SEQ ID NO: 475510 - DNA, 177 bp, Shigella flexneri; identical to SEQ ID NO: 475365

SEQ ID NO: 475511 - DNA, 279 bp, Shigella flexneri; identical to SEQ ID NO: 127146

SEQ ID NO: 475512 - DNA, 153 bp, Shigella flexneri; identical to SEQ ID NO: 474734

SEQ ID NO: 475513 - DNA, 327 bp, Shigella flexneri; identical to SEQ ID NO: 474691

SEQ ID NO: 475514 - DNA, 396 bp, Shigella flexneri
atgttgttcggccagagttcagagaaaaagcgtcataagcttgaaaatcagatccgacaggcagaaaaacgactgtcggaactggaaaaccggctgaacacagccagaaatcttctggaagatgcatcgtcagtcacagattcacctgacaccagtcccccgtcagaaaacccgatcgccagtaagcctgaattcccgggacgaaaatcttcacgaaaaccgctgccggcagaacttccccgggagacacatcgccttctgcctgctgaaaccagttgcccggcctgtggaggtgttctgaaagaaatgggggaaacaatctcagagcaactggatatcattaatactgaaccgccccgggaatcctggagactaaacttcctgagaaagaggtaa

SEQ ID NO: 475515 - DNA, 327 bp, Shigella flexneri
atgactaaaaatactcgtttttcccccgaagtccgtcaacgggcagtccgtatggttctggaaagtcagggcgaatatgactcacaatgggcgacaatttgttccattgctccaaagattggctgtacgccggagactctgcgtgtctggggtcgccagcatgagcgggataccgggggcggtgatggagggctcaccaccgctgaacgtcagcgtctgaaagagccggaacgtgaaaatcgtgaactgcgccgcagtaacgatatccttcgccaggcttccgcttattttgcgaaggcggagttcgaccgcctctggaaaaaatga

SEQ ID NO: 475516 - DNA, 219 bp, Shigella flexneri; identical to SEQ ID NO: 474644

SEQ ID NO: 475517 - DNA, 303 bp, Shigella flexneri; identical to SEQ ID NO: 473532

SEQ ID NO: 475518 - DNA, 168 bp, Shigella flexneri; identical to SEQ ID NO: 474704

SEQ ID NO: 475519 - DNA, 381 bp, Shigella flexneri; identical to SEQ ID NO: 458903

SEQ ID NO: 475520 - DNA, 180 bp, Shigella flexneri; identical to SEQ ID NO: 474761

SEQ ID NO: 475521 - DNA, 327 bp, Shigella flexneri; identical to SEQ ID NO: 474724

SEQ ID NO: 475522 - DNA, 474 bp, Shigella flexneri; identical to SEQ ID NO: 474721

SEQ ID NO: 475523 - DNA, 561 bp, Shigella flexneri
ttgttgaccacttcaggtcaggagattgtcgtcgaaccgattgaacaggctattctcatctctgagcagactaagctgtgggacgccaagtcatccaccggattcactcagggcacacttcagcaggacgctatgaacatctgtgagaatgtggtccgtaccatcaacgctcgcatggtcgacgttctggaatcctctaagctgctgaagaccgtagagcttcctgtcctgactggtagcctgaccgctaaggcagacgctatcatggacgctctgtatgagaacaccgagccttctttcggttctgaggtgtctgactacggtattatcgcccatgagagccaactgaaagcactgtcccgtctggctgctaaacagggcttctctggtgaagacgctatcgtggatatgctgggtaccgacatcgcgtattacaacggtgaggacaaaggtgtgttcatgttggctaaacgcttcacggccctgagcttcggctgcttccgtcacgacggtgagaatattacggtcgtcctttcacgtgatggcgactctcagtcctga

SEQ ID NO: 475524 - DNA, 288 bp, Shigella flexneri; identical to SEQ ID NO: 474636

SEQ ID NO: 475525 - DNA, 444 bp, Shigella flexneri
atggctaaccatctgtcagaaatcgcagcagcaggcgaaaaggcacaacagaagtcccgggataatctggggctgaaaagtgcggccacgatggaagcacagagcgacatttacgaccggacaaaaggccgtctggcgatacccggcgcattcggctttgggtgtgcttttctgcctgaagatgttatccgttttgacactaagagtgatttcctggcctgggtaaggaatgcgctgccaggtgaatattccgttgctggcccctacggcatcatcatacccgacacacggtttgaaggggtgctcagcatccggtggactgatgcacgccctgagacaacagaaccgcggtacagagccaaatcccttactttttacggcattaacggccccatttatcacacccgctactgctactggcccatatccagactgactgggtga

SEQ ID NO: 475526 - DNA, 267 bp, Shigella flexneri; identical to SEQ ID NO: 463627

SEQ ID NO: 475527 - DNA, 327 bp, Shigella flexneri; identical to SEQ ID NO: 475515

SEQ ID NO: 475528 - DNA, 378 bp, Shigella flexneri; identical to SEQ ID NO: 474621

SEQ ID NO: 475529 - DNA, 291 bp, Shigella flexneri; identical to SEQ ID NO: 474740

SEQ ID NO: 475530 - DNA, 327 bp, Shigella flexneri
atgactaaaaatactcgtttttcccccgaagtccgtcaacgggcagtccgtatggttctggaaagtcagggcgaatatgactcacaatgggcgacaatttgttccattgctccaaagattggctgtacgccggagactctgcgtgtttggggtcgccagcatgagcgggataccgggggcggtgatggagggctcaccaccgctgaacgtcagcgtctgaaagagctggagcgtgaaaatcgtgaactgcgccgcagtaacgatatccttcgccaggcttccgcttattttgcgaaggcggagttcgaccgcctctggaaaaaatga

SEQ ID NO: 475531 - DNA, 588 bp, Shigella flexneri
atggcagccttcccggcggtgaaaacgttcgaagagtatgacttcacattcgccaccggagcaccgcagaagcaactccagtcgttacgctcactcagcttcatagaacgtaatgaaaatatcgtattactggggccatcaggtgtggggaaaacccatctggcaatagcgatgggctatgaagcagtccgtgtaggtatcaaggttcgcttcacaacagcagcagatctgttacttcagttatctacggcacaacgtcagggccgttataaaacgacgcttcagcgtggagtaatggccccccgcctgctcatcattgatgaaataggctatctgccgttcagtcaggaagaagcaaaactgttcttccaggtcatcgctaaacgttacgaaaagagcgcaatgatcctgacatccaatctgccgttcgggcagtgggatcaaacgttcgccggtgatgcagcactgacctcagcgatgctggaccgtatcttacaccactcacatgtcgttcaaatcaaaggagaaagctatcgactcagacagaaacgaaaggccggggttatagctgaagctaatcctgagtaa

SEQ ID NO: 475532 - DNA, 354 bp, Shigella flexneri; identical to SEQ ID NO: 466835

SEQ ID NO: 475533 - DNA, 186 bp, Shigella flexneri; identical to SEQ ID NO: 462789

SEQ ID NO: 475534 - DNA, 267 bp, Shigella flexneri; identical to SEQ ID NO: 463627

SEQ ID NO: 475535 - DNA, 390 bp, Shigella flexneri; identical to SEQ ID NO: 474671

SEQ ID NO: 475536 - DNA, 327 bp, Shigella flexneri; identical to SEQ ID NO: 474724

SEQ ID NO: 475537 - DNA, 156 bp, Shigella flexneri; identical to SEQ ID NO: 474739

SEQ ID NO: 475538 - DNA, 267 bp, Shigella flexneri; identical to SEQ ID NO: 474742

SEQ ID NO: 475539 - DNA, 303 bp, Shigella flexneri; identical to SEQ ID NO: 473532

SEQ ID NO: 475540 - DNA, 225 bp, Shigella flexneri; identical to SEQ ID NO: 474756

SEQ ID NO: 475541 - DNA, 189 bp, Shigella flexneri; identical to SEQ ID NO: 469030

SEQ ID NO: 475542 - DNA, 354 bp, Shigella flexneri
atgccactgctggataagctgcgtgagcagtacggggtcggaccgctatgcagcgaactgcatattgccccgtcaacgtattaccactgtcagcaacagcgacatcatccggataaacgcagtgcccgtgcgcagcgcgatgactggctgaagaaagagatactgcgcgtatacgatgaaaatcacaaggtatacggtgtaaagtctggcgtcagttgttacgggaaggtatcagagtggccagatgcactgtggcacgtctcatggcggttatgggacttgccggtgttctccggggtaaaaaggtccgtacgaccatcagccggaaagccgttgccgcaggcgaccgcgtaa

SEQ ID NO: 475543 - DNA, 312 bp, Shigella flexneri
atgccatggtccccagagggagaaccagtccgtaaattcattctcttcacggcttctgaccatggcttcggcagtgcggaggtcatttgctgtcactcccgacacgccatagaaacgcatttccttcacggcagtagagagctgaagtttctctgcgagcatggtctggaaggccaggtagacttctatctcatccacaaaatggagagttctgactttatcccgggcaatatcctccagaatttcgaggcggaacatttccctgcccagggagagcagagcgccggtatcattatcgaaaaggccttctga

SEQ ID NO: 475544 - DNA, 225 bp, Shigella flexneri; identical to SEQ ID NO: 468765

SEQ ID NO: 475545 - DNA, 327 bp, Shigella flexneri; identical to SEQ ID NO: 474733

SEQ ID NO: 475546 - DNA, 327 bp, Shigella flexneri; identical to SEQ ID NO: 471498

SEQ ID NO: 475547 - DNA, 177 bp, Shigella flexneri; identical to SEQ ID NO: 475365

SEQ ID NO: 475548 - DNA, 378 bp, Shigella flexneri; identical to SEQ ID NO: 474621

SEQ ID NO: 475549 - DNA, 381 bp, Shigella flexneri; identical to SEQ ID NO: 458903

SEQ ID NO: 475550 - DNA, 159 bp, Shigella flexneri; identical to SEQ ID NO: 474771

SEQ ID NO: 475551 - DNA, 189 bp, Shigella flexneri; identical to SEQ ID NO: 474766

SEQ ID NO: 475552 - DNA, 180 bp, Shigella flexneri
gtgaccgtccctgctgaactgctggcgtccctgattcagaccgccgaacaggcactgtggaaacgtgagtgggccgcccgtgataacggcctcgccgtcccggaatgcgtcacccgccgacaggcggtggttaatcaggcccgcgccctgctgaaaaacaacacacgcgaaaacgactga

SEQ ID NO: 475553 - DNA, 123 bp, Shigella flexneri; identical to SEQ ID NO: 463327

SEQ ID NO: 475554 - DNA, 213 bp, Shigella flexneri
atgctgggagcggtggaacgccgcttcggcaacgatcttccgtcgtctccagtggagtggctgacggataatggttcatgctaccgggctaatgaaacacgccagttcgcccggatgttgggacttgaaccgaagaacacggcggtgcggagtccggagagtaacgtgcccctattaagttgtcaagcatgttatgacccctgcggggtataa

SEQ ID NO: 475555 - DNA, 123 bp, Shigella flexneri; identical to SEQ ID NO: 463321

SEQ ID NO: 475556 - DNA, 927 bp, Shigella flexneri; identical to SEQ ID NO: 236357

SEQ ID NO: 475557 - DNA, 522 bp, Shigella flexneri; identical to SEQ ID NO: 236356

SEQ ID NO: 475558 - DNA, 396 bp, Shigella flexneri; identical to SEQ ID NO: 464981

SEQ ID NO: 475559 - DNA, 477 bp, Shigella flexneri
atgactaataagaaaatgtattttatattaatacttgttttcacattgctacaggtgtgtttttttgctctctggaaggctcgtgatggtagcacaacgtctcttgaatgtacgtcgacgttaacaagaaatgctaaaacagatcattctttatactactctgctaacctttcagtcattttaaaaaaagatggtagcggtagttttacgattgttggcttaactgatgaagatacaccgaggaaattttcccattcgtatttttttacctacaaaatagatagtaacggacggatctcaggtaatgctaaggccaaagtttcgggactggaaaatcagataaaggatgagaacttcagactcaattttctcgatgcatctttaacaggtaaaggcaatgcgaggctaagcaagtttaataatgtctatatttttagtatcccggggttgatcattaacacatgtgctccaatataa

SEQ ID NO: 475560 - DNA, 765 bp, Shigella flexneri; identical to SEQ ID NO: 474474

SEQ ID NO: 475561 - DNA, 312 bp, Shigella flexneri; identical to SEQ ID NO: 475318

SEQ ID NO: 475562 - DNA, 606 bp, Shigella flexneri
atgcacattggacaggctcttgatctggtatcccgttacgattctctgcgtaacccactgacttctctgggggattacctcgaccccgaactcatctctcgttgccttgccgaatcaggtactgtaacgctacgcaagcgccgtcttcccctcgaaatgatggtctggtgtattgttggcatggcgcttgagcgtaaagaacctcttcaccagattgtgaatcgcctggacatcatgctgccgggcaatcgccccttcgttgcccccagtgccgttattcaggcccgccagcgcctgggaagtgaggctgtccgccgcgtgttcacgaaaacagcgcagctctggcataacgccacgccgcatccgcactggtgcggcctgaccctgctggccatcgatggtgtgttctggcgcacaccggatacaccagagaacgatgcagccttcccccgccagacacatgccgggaacccggcgctctacccgcaggtcaaaatggtctgccagatggaactgaagtggcacactgaatttggccacctgaacagaggtgatatgctcacctcagaacaacacaggtgctccaatgaaaaaaagaaattttag

SEQ ID NO: 475563 - DNA, 378 bp, Shigella flexneri; identical to SEQ ID NO: 474621

SEQ ID NO: 475564 - DNA, 498 bp, Shigella flexneri
gtgaaagaaagcgcatttctgctgtggatcttagtggcagtattgagcgaaaaacggctgttgcagcaggtcattgtgctggattcgctgggctacagccgctggcaatgcctgaactggctgctgttgccctccgtcgcgccttcgctggcaatggcgatgctggcgattgttgcctggtcgctttcggtcgtggatgtggcgattattcttgggccaggtaatccaccgacgctggcagtaattagctggcagtggttaactcagggcgacgcggatcaacaaacgaaaggcgcactcgccagtctgctgctgatgctgttactcgccgcctacgttttggcgcagctggcggcgcactattccccgcgtagatggcattcgcaagcctgccacacctttattaccaggcactacgctggcgagttttttacccttaaccggtgtgctgtgtgtggttctgctggcgatcctcgcggatcagtcgacgatcaatag

SEQ ID NO: 475565 - DNA, 1035 bp, Shigella flexneri
atgatggtcatccgtcccgttgagcgctcagatgtctcggcgctgatgcagcttgccagcaaaacgggcggcggcctgacgtcgcttcccgccaatgaagccacgctttcggcgcgtatcgaaagggcaatcaaaacctggcaaggtgaactgcccaaaagcgagcagggctatgtgttcgtgctggaagatagcgagacaggcaccgtggcggggatttgcgctattgaggtggcggttgggctgaacgatccctggtacaactatcgcgtcggcacgttggttcacgcctcaaaagagctgaatgtctataacgcattgccgacgctgtttcttagtaacgatcacaccggcagcagcgagctgtgcacgctgtttctcgacccggactggcgcaaagagggcaacggctatttgctgtcgaaatcgcgctttatgtttatggcggcttttcgcgacaagtttaatgacaaagtggttgctgaaatgcgcggggtgattgacgaacacggctattcaccgttctggcaaagcctcggtaaacgcttcttttcgatggattttagccgcgccgattttctctgcggcaccgggcaaaaggcatttattgcagaactgatgccgaaacatccgatctatacccactttttatcccaggaagcccaggacgtcatcggtcaggtacatccgcaaaccgcgcctgcccgcgcggtgctggagaaagaaggttttcgttaccgcaactatatcgacatcttcgacggcgggccaacgcttgagtgtgacatcgaccgcgtgcgcgccatccgtaaaagtcggctggtggaagtggcagaagggcagcctgcgcagggcgattttccggcctgcctggtcgccaatgaaaattatcaccatttccgcgtggtgctggcgcgtaccgatccggcaaccgagcgtttgattttaaccgccgcacaactggatgccctcaaatgccacgcaggggatcgcgttcgtctggtgcgcctgtgcgcagaggagaaaacagcatga

SEQ ID NO: 475566 - DNA, 507 bp, Shigella flexneri
gtgatcgctggaggaatagtttttggcccgctcttagggacacaactctcattaattgccgcaacgctggcctcctcgtgctcattcctgctggcgcgctggctgggacgtgatttactgctgaaatacgtgggccatagccataccttccaggccattgaaaaaggcattgcgcgtaacggtattgattttcttattctgacccgcttaatcccgttgtttccttacaatattcaaaattacgcttacggattcaccaccatcgccttctggccttatacccttatttcggcactcacgaccctgcccggtattgttatttataccgtgatggcaagcgatctcgccaatgaaggcattacgctgcgctttattttacaactctgtctggcgggcctggcgctgtttattctcatccagctcgcaaaactctacgcccgacacaaacatgtggatctgtctgcttcgcgccgcagcccacttactcacccaaaaaatgaaggatag

SEQ ID NO: 475567 - DNA, 834 bp, Shigella flexneri
atgacctatatgcagcggggaaattatgtggcggttatcaaccctctcttctggagtgaagtgatgtctgatgacccgacattgcaatggggtgtgtatgatacggtgacgaaaacctttttctcgttaagcaaagaggcctcggcagcaacgttttctccgctgattcatttgaaggatttaaccgtacaaagaaatggctatttatatgcgacaatttattcgacaaaacgcccaattgcagccattgttgcgacttcatatcaacgtcttataacccatttttataatcatcttatttttgcgttgcccgccggtattttggggagtcttgttctgctattactctggctacgtattcgacaaaactatttatctcccaaacgtaaattgcaacgcgccctcgaaaaacatcaactttgtctttattaccagccaataatcgatatcaaaacagaaaaatgtatcggcgctgaagcgttgttacgttggcctggtgagcaggggcaaataatgaatccggcagagtttattccgctggcagaaaaggaggggatgatagaacagataactgattatgttattgataatgtcttccgcgatctgggcgcgtacctggcaacacatgccgatcgctatgtttctattaacctgtcggcctccgattttcatacgtcacggttgatagcgcgaatcaatcagaaaacagagcaatacgcggtgcgtccgcagcaaattaaatttgaagtgactgagcatgcatttcttgatgtcgaaaaaatgacgccgattaattctggctttccgccaggctggttacgaagtggcaattga

SEQ ID NO: 475568 - DNA, 318 bp, Shigella flexneri
atgagtcatcgtgcacgacaccaattactggcgttgccgggcattatctttttagttctctttcccatcattctttcgctatggattgccttcctttgggcaaaatcagaagtgaataatcagctccgaacctttgctcaactggcactggataaatccgagctggtcattcgccaggcagatttagtgagcgatgcagctgaacgctatcaggggcaagtttgcactccagcccatcaaaagcgaatgttgaatattattcgtggctatctttatattaatgaattcgtgataaccattttttatgctcatcgctga

SEQ ID NO: 475569 - DNA, 213 bp, Shigella flexneri; identical to SEQ ID NO: 472704

SEQ ID NO: 475570 - DNA, 1431 bp, Shigella flexneri; identical to SEQ ID NO: 472734

SEQ ID NO: 475571 - DNA, 1257 bp, Shigella flexneri
atgagcataataaaaaatagtgtctggaacctttttggctatgcaataccaactttaattgctatcccctcgctaggatttctcgctcgaggtttggggcctgaaggtttcggtatttatacaattgcaattgcacttgttgggtatgctggaatttttgatgtaggcctgactcgctctgttattagagaaattgcaattcatcgtgataatcatcatgaaagaaccaaggtaatttcaacaagtacatcttttttggtgctattttcatgctttggtgcttttttattattgattttctctgatggaattgttaattatctaaaaatttctggtgttgaacatagtgatatacaactagcatttaaactgttggctatttgcattccattatttattctaaatcaattatggtcagccattcttgagggggatgaaaaatttggcattgtaaatattcaaaaatctatatcaagctcttgcatcgcgggaattccggccatatttgttttttatagtgctacattgtcggcagcggttgctggtttaatatttgcaagagttatttcgattttagtctctgcctattatgtcaggaatgatattaaaatttcgggggttcatttttgttataaaacctttaaacgactctttttctttggcggttggatgacagtaagtaatatcataagtccggtcatggtgtattttgatcgatttatagtgtcaaatattatgggggcagataaagttgcattttattctgcaccagcggaggttattctaaaattaggaataatacctgcagcaatcgggagggcagtgtttccaaggttaagtaacatcaaagactttaaagaatttaaacgtaatgtaaataaatcattgcttttaatgtttctaatctgtttgccggtgataatcataggcttgttatattcagggcttgtattgaaaatatggtttggtgagaattatcaaattaattcctttaatatattaaatgtgttattgatcggttttttcttcaatgcgctggcaatgataccattctctgcaatccaggcattaggaaaatctaaaattactgctttgattcattgtgctgaattggttccttatttagcccttttgtattttatggtcgaaaaatatgggttactgggtgccgcaatatcctggagcatacgtgtaattttagatgctctgttattacaatggctttatactagaatgtgttctgtatatgaaaactaa

SEQ ID NO: 475572 - DNA, 891 bp, Shigella flexneri; identical to SEQ ID NO: 474659

SEQ ID NO: 475573 - DNA, 381 bp, Shigella flexneri; identical to SEQ ID NO: 472764

SEQ ID NO: 475574 - DNA, 168 bp, Shigella flexneri; identical to SEQ ID NO: 472633

SEQ ID NO: 475575 - DNA, 1053 bp, Shigella flexneri
ttgcgatatttattatttgtatttagttttatacttttaatttttaatttagttacattcaatttttcaatcacccaaaaatgtgtcagtctttttatatggttgcttttatttcctttttatggcttctttgtcggcttattagctggtaataaaataaatgatatactgtttgatgtgcaaccatacctttttatgctgtcacttatatatctatttacactaagatatactttaaaagtattttcatgtgagatttttattaaaatagttaatgcatttgcattatatggatcactgttatatatttcatacataattttgttgaatttcggtttgttaaattttaatttaatttatgaacacttatcattgactagcgagttcttttttcgtcccgatggggcttttttttccaaatccttctacttttttggtgtcggtgcgattatcagttttgtcgacaaaaaatatttaaaatgtctcataatagtgcttgcgatattattgacagaatcaagaggtgtattactttttacaacattatcactgttattagccagttttaaattacataagctatatttaaatactattataataatattgggcagcgttctatttataattatgctttacatggtcggatcacgcagtgaagattctgactctgttagatttaatgatttatatttttattataaaaatgttgatttagcgacgttcttgtttggaagaggatttggttcatttatattagatcgattaaggattgaaatagtacctcttgagatacttcagaaaacaggcgttattggtgtatttatatcattagttcctatgttgcttatctttttgaaaggctattttttaaatagtacaaaaacatcattaatgatgtcgttaatactttttttcagtattaccgtttctataactaatccatttctttttacacccatgggaatttttattataggcgttgtagttttatgggtattttctatagaaaatatccaaattagtaataacctcacttctggagcaaaataa

SEQ ID NO: 475576 - DNA, 396 bp, Shigella flexneri; identical to SEQ ID NO: 464981

SEQ ID NO: 475577 - DNA, 417 bp, Shigella flexneri; identical to SEQ ID NO: 473463

SEQ ID NO: 475578 - DNA, 378 bp, Shigella flexneri; identical to SEQ ID NO: 474621

SEQ ID NO: 475579 - DNA, 324 bp, Shigella flexneri
atggctataagcgacacaaaactgcgtactatttatggtaaaccatattctggcccacaagaagtggctgatgctgatggcctcagcgtacgaatttcaccgaagggggtcatccagttccagtaccgctatcgctggcatggcaagcctaatcgacttgggcttggtcgatacccatccctgtctttgaaggatgccagacagatcactgctgacttgcgaaagctctatttctcaggaacggatccacgcacttattttgaagagaaggtggagaactccatgacggtcgcccagtgtctcgactactggttcgacaactga

SEQ ID NO: 475580 - DNA, 303 bp, Shigella flexneri; identical to SEQ ID NO: 473532

SEQ ID NO: 475581 - DNA, 861 bp, Shigella flexneri; identical to SEQ ID NO: 473587

SEQ ID NO: 475582 - DNA, 231 bp, Shigella flexneri; identical to SEQ ID NO: 129443

SEQ ID NO: 475583 - DNA, 1605 bp, Shigella flexneri
atgagcattgatgcggatttaaaggctggaattattgatgccgcaggagctaaagaaagacgcagtattctggaacgtgagagtcaattgtatggttcatttgatggagcaatgaagttcattaaaggtgatgcaattgctggcatcattattatttttgtcaatttaataggaggtatttctgttggtatgagtcaacatggaatgtccctatctggtgcattatctacttataccatactaactattggtgacggattggtctctcagattcctgctctgttaatttctataagtgcaggatttatcgttacaagagttaatggtgatagcgataatatgggacgtaacataatgtcccagatatttgggaatccttttgttctcattgttacatcagctcttgccttggcgatagggatgttgccaggttttccgttttttgtttttttcctgatagcagttactttgacggctttattctattataaaaaggtcgtagaaaaagaaaaaagtctgtctgagtctgattctagtggctatactggtacatttgatattgataatagccatgactcatctttggcaatgatagaaaatctggatgctattagttcagaaaccgttcctttaattttattatttgccgaaaataagataaatgcaaatgatatggaaggtcttattgaaaggataagaagtcagttctttattgattatggtgtcaggcttccaactattttatatagaacaagcaatgagcttaaggtcgatgatattgttttgttaataaatgaggtgcgtgccgatagttttaatatatattttgacaaagtgtgtattacagatgaaaatggagatatagatgctctaggtattcctgttgtatcaacttcatataatgaacgtgttatttcttgggtagacgtttcatatacagaaaatctaactaatattgatgctaaaattaaaagtgctcaagatgaattttatcaccagttgtcacaagctttattaaacaacataaatgagatttttggtatacaagaaacaaaaaatatgttagatcagtttgaaaatcggtatcctgatctattaaaggaagtcttccgacatgtgactatacagagaatttctgaggtattacaaagattgcttggagaaaatatttctgttcgcaatttaaaacttattatggagtctttggcgctttgggctcccagagaaaaagatgtcataacattagttgaacatgtccgtgcatcactttctaggtatatttgtagtaaaatagctgtttctggtgagattaaagttgtgatgctttccggatatattgaggatgcaataagaaaagggataaggcaaacctctggtggctctttcttgaatatggatatagaggtttcggatgaggtaatggaaactttagcacatgctttgagagaattgagaaatgcaaaaaaaaatttcgttcttttggtatcagtagatatacgtaggtttgttaaaagacttatagataacagatttaagagtatactcgttatatcgtatgctgagattgatgaagcatataccattaatgtattaaagactatttag

SEQ ID NO: 475584 - DNA, 402 bp, Shigella flexneri
atgagtaacattaatttagttcaattagttagagatagtcttttcacgattggttgtcctccatcaattattacagatttagacagccattcagcgattaccatttctttggatagtatgcctgctattaatatagctcttgtcaatgagcaggttatgttatgggctaattttgatgcaccaagtgatgtaaaacttcagtcatctgcttataacatattaaatttaatgttaatgaactttagttatagcattaatgagctggtagagcttcatcgttctgatgagtacttacagttaagagttgttattaaagatgactacgttcacgatgggattgtttttgcagagattctgcatgagttttatcagaggatggaaatcttaaatggggtcttataa

SEQ ID NO: 475585 - DNA, 1293 bp, Shigella flexneri
atgagctatacaaaattgctcactcaattatcttttcctaatagaatctcggggccaatcttggaaacaagtcttagcgatgtttcgattggtgagatttgtaacattcaggctggaattgaaagtaatgaaattgttgcaagagctcaggttgtaggatttcatgatgaaaaaacaatattaagcttgattggaaattctcgtggactttcacggcaaacgttgattaagcccactgcccagtttcttcatacgcaagtcggccgtggattattgggagcagtagtcaatcctttaggggaggttactgataagtttgctgttacagataacagtgaaattctttatcgacctgtagataatgctcctccgctatatagtgaaagggctgcaattgagaagccttttttaacaggtattaaggttattgattctttactcacgtgtggtgaaggacagcgaatggggatttttgcgtcagctggttgtggcaaaacttttctcatgaatatgctcattgaacatagtggtgctgatatatatgttattgggttaattggtgagcgaggtcgagaggttactgaaacggttgattatttgaaaaactctgagaaaaaaagcaggtgtgttttagtatatgcaacttcggattactcttcggttgatcgttgtaatgctgcatatatagccactgctatagccgaattttttaggactgaaggacataaagtagcgctttttattgattcattaacaaggtatgccagagcattacgtgatgtggccttagccgctggagaatcacctgccagaagaggctatccggtttcggtttttgatagcttacccagacttcttgaaaggccaggaaagttaaaggcaggtggctctattactgcattttacactgttcttttggaggatgatgattttgctgatccattagctgaagaggtaagatccattttagatggacatatatatttgagcagaaatctagcccaaaaaggacaatttcctgcaattgattccttaaaaagtataagcagggtatttacacaggttgttgatgaaaaacatcgtattatggccgctgcatttcgggagctactttctgaaatagaagagctaaggacaattattgactttggtgaatacaaaccgggggagaatgcctctcaggataaaatctacaacaaaatatctgttgttgagagttttctgaagcaagattatcgactcggttttacttatgagcagacaatggagcttattggtgaaacaattagataa

SEQ ID NO: 475586 - DNA, 357 bp, Shigella flexneri
gtggaggcattagataaaaggattatatacttcctgcaactggagaatgacttagaacctgtaggcgctcagagtgttagtcagcttttcaatacaagacgtaagatcgctatagtaaaaaagcatattatccaatatcagtctgaacgaattcttctaaagggaagaattgaagaaattcaaaaagatattgatgaggcaaatgcttctaaaagaaaactgcttcataaagagagtaaaatatgtaaacggattggcttgattaaaagaaataactttgccaaacagttgatacttgatgagttatcacaagaggatatgaagtatggcattagacaatataaacctaaattttag

SEQ ID NO: 475587 - DNA, 1224 bp, Shigella flexneri
atgtcaattgactttaccccaggtataataaatacatatcacggcgatatttataactgcacaacaaataccgataatgttaaaacgccagacacaccgaagtggccttgtgataattgggaagaacaacaacccattaattccacattctctggagaaggatacaaccctgaacaatttgatttagcgcaacaacaactccaacaaattaatgcatgccacacgaacaccacatatacaaatgcagactactcaaaagttgtggttcaacttgtaagtcttattaataacattgaaacgataagttcgacaccacttacgcaacagacacaatcaatacttaatcagattcataacattagatacgaaaaggataaggattctgtatgtcaaatcattgttgtcgttaatccagaacccaacaatccaatcataactaaaattctcgtagaagaaggaatacccgaaagattcagtgtccaaaccgtttcttccgataataaaaattttgctgggcaacgagctgacttaccaactgatataagagacattcaaagcttgtacttaaaaatggcgaagctgtatattgagcacagtaaaaatgaaaataggatggaagcccttgctggatgcgactttattgatttcaacatgacagggcaagatatgtccaagctagtcctaaccttatcaaaattttattttgaagatctacttaatataaatttcactgacgcaaatttatttaacactattttttcacacaaggaaaatcccatccccaaactacataaatatgaacaacatcttgacaaacaaatcaatggtttgttttctacattgttaactattaatgacaactctttacgcgcgaaagcggaaattgcttcgagaataattgatttcttagaggcaaaggtagtgaatctttcatttgatgacatattaaaatataagcaagagttcaaaaaaatatgttataaacaacttcaagagtttacaacaccctctctatacaataaaattcaaaaatgggcaacaatgtctaaaaatgaattcatagcatttcattacgagacacttcaacccgaaaagatttcataccccttttatttaaagagagatctgcctaatgaaaaagatataaattatggggtggaaatagaaataccatctggcaaaagaattcgcttatcaaatcattatcagaatataataccataa

SEQ ID NO: 475588 - DNA, 957 bp, Shigella flexneri; identical to SEQ ID NO: 474468

SEQ ID NO: 475589 - DNA, 1005 bp, Shigella flexneri; identical to SEQ ID NO: 473958

SEQ ID NO: 475590 - DNA, 327 bp, Shigella flexneri; identical to SEQ ID NO: 475406

SEQ ID NO: 475591 - DNA, 342 bp, Shigella flexneri; identical to SEQ ID NO: 475405

SEQ ID NO: 475592 - DNA, 378 bp, Shigella flexneri; identical to SEQ ID NO: 474621

SEQ ID NO: 475593 - DNA, 474 bp, Shigella flexneri
atggatatcatcttttatcacccaacgttcgatacccaatggtggattgaggcactgcgcaaagctattcctcaggcaagagtcagggcatggaaaagcggagataatgactctgctgattatgttttagtctggcatcctcctgttgaaatgctggcagggcgcgatcttaaagcggtgttcgcactcggggccggtgttgattctattttgagcaagctacaggcacaccctgaaatgctgaacccttctgttccactttttcgcctggaagataccggtatgggcgagcaaatgcaggaatatgctgtcagtcaggtgctgcattggtttcgacgttttgacgattatcgcatccagcaaaatagttcgcattggcaaccgctgcctgaatatcatcgggaagattttaccatcggcattttgggcgcaggcgtactgggctgtaaagttgctcagagtctgcaaacctag

SEQ ID NO: 475594 - DNA, 999 bp, Shigella flexneri
atgaatataacaactctgactaatagtatttccaccccatcattcagtccaaacaataccaacggttcatcaaccgaaacagttaattctgatataaaaacaacgaccagttctcatcctgtaagttcccttactatgctcaacgacacccttcataatatcagaacaacaaatcaggcattaaagaaagagctttcacaaaaaacgttgactaaaacatcgctagaagaaatagcattacattcatctcagattagcatggatgtaaataaatccgctcaactattgaatattctttccaggaacgaatatccaattaataaagacgcaagagaattattacattcagctccgaaagaagccgagcttgatggagatcaaatgatatctcatagagaactgtgggctaaaattgcaaactccatcaataatattaatgaacagtatctgaaagtatatgaacatgccgttagttcatatactcaaatgtatcaagattttagcgctgttctttccagtcttgccggctggatctctcccggaggtaacgacggaaactccgtgaaattacaagtcaactcgcttaaaaaggcattggaagaactcaaggaaaaatataaagataaaccgctatatccagcaaataatactgttagtcaggaacaagcaaataaatggcttacagaattaggtggaacaatcggcaaggtatctcaaaaaaacgggggatatgttgtcagtataaacatgaccccaatagacaatatgttaaaaagcttagagaatctaggtggaaatggcgaggttgtgctagataatgcaaaatatcaggcatggaatgccggattctctgccgaagatgaaacaatgaaaaacaatcttcaaactttagttcaaaaatacagtaatgccaatagtatttttgataatttagtaaaggttttgagtagtacaataagctcatgtacagatacagataaactttttctccatttctga

SEQ ID NO: 475595 - DNA, 894 bp, Shigella flexneri
atggaaattcaaaacacaaaaccaacccagattttatatacagatatatccacaaaacaaactcaaagttcttccgaaacacaaaaatcacaaaattatcagcagattgcagcgcatattccacttaatgtcggtaaaaatcccgtattaacaaccacattaaatgatgatcaacttttaaagttatcagagcaggttcagcatgattcagaaatcattgctcgccttactgacaaaaagatgaaagatctttcagagatgagtcacacccttactccagagaacactctggatatttccagtctttcttctaatgctgtttctttaattattagtgtagccgttctactttctgctctccgcactgcagaaactaaattgggctctcaattgtcattgattgcgttcgatgctacaaaatcagctgcagagaacattgttcggcaaggcctggcagccctatcatcaagcattactggagcagtcacacaagtaggtataacgggtatcggtgccaaaaaaacgcattcagggattagcgaccaaaaaggagccttaagaaagaaccttgccactgctcaatctcttgaaaaagagcttgcaggttctaaattagggttaaataaacaaatagatacaaatatcacctcaccacaaactaactctagcacaatatatccctgtcaactgaacataaaacttctcttagttctcccgatatttctttgcaggataaaattgacacccagagaagaacttacgagctcaataccctttctgcgcagcaaaaacaaaacattggccgtgcaacaatggaaacatcagccgttgctggtaatatatccacatcaggagggcgttatgcatctgctcttgaagaagaagaacaactaa

SEQ ID NO: 475596 - DNA, 219 bp, Shigella flexneri
atgactaaaaatactcgtttttcccccgaagtccgtcaacgggcagtccgtatggttctggaaagtcagggcgaatatgactcacaatgggcagcgatttgttccattgccccaaagattggctgtatactggaaactctgcgtgtctgggtacgccagcatgagcgggataccgggggcggtgaggtgggctcaccaccgctgaacgtcagcgtctga

SEQ ID NO: 475597 - DNA, 264 bp, Shigella flexneri; identical to SEQ ID NO: 474403

SEQ ID NO: 475598 - DNA, 312 bp, Shigella flexneri
atgatagttaagtttcatgcccggggaaaaggtggtggcagtggtccggttgattacctgctgggaagggagcgtaaccgggaaggggcaacggtgcttcagggtaatccggaagaagtccgggaactcatcgatgccacgccatttgcgaagaaatacacgtccggtgttctgtcgttcgcggagaaggagctgccgccgggaggacgtgaaaaagtgatggcgagctttgagcgtgtactgatgcccggtctcgaaaaaaatcagtacagcatcctgtgggtggatgcaccaggacaagggacggcttga

SEQ ID NO: 475599 - DNA, 381 bp, Shigella flexneri; identical to SEQ ID NO: 458903

SEQ ID NO: 475600 - DNA, 378 bp, Shigella flexneri
atgcagtcgttgtacgactggatacagttgcagaggaaaacgctgtcgaaacatgcggagatggcgaaggcgttcggctatatcctgaatcactggaatgcgctgaacgagttctgtcgtgacggctgggtggaaatagacaacaacatcggtgaaaacgcgttacgatcggtggcggttggaagaaaaaattatctctttttcggctcagacaagggaggagaaagtgcggcgatcatctacagtctgctggtcacctgcaaacagaacgaagtggagccggaggactggttgcgcgaagtgatcgagaagctcaatgactggccgtcgaaccaagtgcatgaactgctgccctggaacttctcgtctgtaaaataa

SEQ ID NO: 475601 - DNA, 1401 bp, Shigella flexneri; identical to SEQ ID NO: 474418

SEQ ID NO: 475602 - DNA, 960 bp, Shigella flexneri; identical to SEQ ID NO: 474419

SEQ ID NO: 475603 - DNA, 267 bp, Shigella flexneri; identical to SEQ ID NO: 474508

SEQ ID NO: 475604 - DNA, 600 bp, Shigella flexneri; identical to SEQ ID NO: 474547

SEQ ID NO: 475605 - DNA, 513 bp, Shigella flexneri
atgttgcgcccggaaaaagggcacgaatttatgttgaatttactgttccatttaaaaatgaatggacgacagttctgttggttgattgtggggtctggttcgcctgaactgcgggagcatttacagtatcagattgacagtatgggcatgcatgatgatgtttttattgctgacaatgtttttcctgccgcccccgtatatcgggttgccagtctggtggttctgccttcagaaaacgaatcgtttggtatggtactggcagaagcatcggcattttctgtgcctgtactggccagtcagattggtggaatccctgatgttattcagaataaccagaccgggacattgttaccagcaggtaataagcacgcatggatgtgcgccctgaatgatttttttaatgaccctgggcgtttttatcagatggctcgccaggcaaaacaggatatagaagagcggtttgatattaataaaactgcgttaaaaatactcacattagcgaagcacaagtaa

SEQ ID NO: 475606 - DNA, 519 bp, Shigella flexneri
atgttgtcattgtttttcaataaaatagtgattgcccggttaacattttcagtcattctgactcaaaatggacacaccgcttttattggcggattacagggagcccccaaaaataccggacctgatgttattcggtgcgcaacccgggcctgttatgggcttttcccaaaacggattatttttgaagcattttgtgcgttgatgaaagcttgtaatgtctctgagtgtctggcagtcagtgagcacagtcatgttttccggcaattgagatactggtatcagaaacgcaaaacctttgttgctgtctacagtgatttctgggagtctgtagcagggaaaacctgtggtgactggtacaaattaccaacacaggtggttcgaaagccgctaagcaatatagctagtaaaaaacgctctgagtatcgaaaacgatacgctttgctggattatatccatgaaactgctatccgctctttggatgcatatcctgtaaactcagaacatcaggacttaaattaa

SEQ ID NO: 475607 - DNA, 513 bp, Shigella flexneri
atgttgcgcccggaaaaagggcacgaatttatgttgaatttactgttccatttaaaaatgaatggacgacagttctgttggttgattgtggggtctggttcacctgaactgcgggaacatttacagtatcagattgacagtatgggcatgcatgatgatgtttttattgctgacaatgtttttcctgccgcccccgtatatcgggttgccagtctggtggttctgccttcagaaaacgaatcttttggtatggtgctggcagaagcatcggcattttctgtgcctgtagtggccactcagattggtggaatccctgaggttattcagaacaaccagaccgggacattgttaccagcaggtaataagcacgcatggatgtgcgccctgaataatttttttaatgaccctgggcgtttttatcagatggctcgcctggcaaaacaggatatagaagagcggtttgatattaataaaactgcgttaaaaatactcacattagcgaagcacaagtaa

SEQ ID NO: 475608 - DNA, 951 bp, Shigella flexneri
atgttttctgtaagtaacttatcatttatcggtttccttaaaaggattattttttcctcagattcactaccggggaagtgggaacacagaaaatttcggttcatgtacattttgcgatgttctataaatccggttgtcagtattcgatattattatgaactgcgttccttgccgtgcattgaggatattctggcaatacaccccacgttgccagcaagaattcatcgcccttatttgcataaaggggggcgcgcctggacccgtggacaatatattcttgagcattatcgctttgtgcaaaatttgccagaaaaatattctaaatttttgtttccacaaaaatcggtatcattagtccaattcatcgggaaagatggagagaattttgatatccagtgttctcccagtggttttgaccgggaaggagagttgatgttgtcattgttttacaataaaacagttattgcccggttaacattttcagtcattctgactcaaaatggacacattgcttttattggcggattacagggagcccctaaaaataccggacctgatgttattcggtgcgcaacccgggcctgttatgggattttcccaaaacggattatttttgaagcattttgtgcgttgatgaaagcttgcaatatctctgagtgtctggcagtcagtgagcacagtcatgttttccggcaattgagatactggtatcagaaacgcaaaacctttgttgcggtctatagtgatttctgggagtctgtagcaggaaaaacctgtggtgactggtacagattaccaacccaggtgattcgaaagccgctaagcgatatagccagtaaaaaacgctctgagtaccgaaaacgatacgctttgctggattatatccatgaaactactatccgctctttggatgcatatcctgtacactcagaacatcagaatttaaattaa

SEQ ID NO: 475609 - DNA, 366 bp, Shigella flexneri; identical to SEQ ID NO: 462994

SEQ ID NO: 475610 - DNA, 231 bp, Shigella flexneri; identical to SEQ ID NO: 463573

SEQ ID NO: 475611 - DNA, 378 bp, Shigella flexneri; identical to SEQ ID NO: 474621

SEQ ID NO: 475612 - DNA, 873 bp, Shigella flexneri; identical to SEQ ID NO: 474510

SEQ ID NO: 475613 - DNA, 243 bp, Shigella flexneri
atgctgacagatatctttaacagtaattaccagtgttatggctatcgtcgcctgcatgcgatgctcaggcatgagggggggcggctatcagaaaaggttgtacgcagacttatggtggaggaacagcttgtcgtcagtcgtaaccgtcgtcgtcgctacagctcatattgcggagaaatcggaccggctccggataaccttatcgccagagattttaaggcggagcaacctaatcagaaatag

SEQ ID NO: 475614 - DNA, 1215 bp, Shigella flexneri; identical to SEQ ID NO: 474550

SEQ ID NO: 475615 - DNA, 303 bp, Shigella flexneri; identical to SEQ ID NO: 473532

SEQ ID NO: 475616 - DNA, 750 bp, Shigella flexneri; identical to SEQ ID NO: 475425

SEQ ID NO: 475617 - DNA, 495 bp, Shigella flexneri; identical to SEQ ID NO: 474618

SEQ ID NO: 475618 - DNA, 141 bp, Shigella flexneri; identical to SEQ ID NO: 474597

SEQ ID NO: 475619 - DNA, 189 bp, Shigella flexneri
atggcttatactggatttgcccctatatttccagacatctgttatcacttaacccattacaagcccgctgccgcagatattcccgtggcgagcgataacccagcgcactatgcggatgccattcgttataatgctcgaacgcctctgcaaggttctttgctgccgttaacccgtctggtttgggcatga

SEQ ID NO: 475620 - DNA, 519 bp, Shigella flexneri; identical to SEQ ID NO: 474573

SEQ ID NO: 475621 - DNA, 150 bp, Shigella flexneri
atgtggcccatttttcctgctgacgtaatatatttagaggattatcaaattcatgattaccgacggccattgcatcataaccaattagattcattccacgaatatcgggttcagccttctgaaggtctgattcaggtacaccggtgttaa

SEQ ID NO: 475622 - DNA, 411 bp, Shigella flexneri
atgaaaaagattaatgcaataattttattatcttctctgacctctgcctcggtatttgctggcgcatacgtcgaaaacagggaggcatataatcttgcctccgatcagggcgaggttatgctacgtgtgggttataacttcgatatgggcgcgggtattatgttaaccaatacctacacctttcagcgagaagatgaactaaaacatggctataatgaaattgaaggttggtatcctttattcaaaccaaccgataaattaaccatccagcccggtggcttaattaatgataagagtatcagttcgggtggtgcagtgtatctggacgtcggtaatgactccaacttactgatagtgttttatgttcagataatgcccgatgaccttgtcatgcagctccaccgattttga

SEQ ID NO: 475623 - DNA, 309 bp, Shigella flexneri
atggcggttatggggcttgccggtgttctccggggtaaaaaggtccacactaccgtcagccggaaagccgttgccgcaggcgaccgcgtaaaccgtcatcaaggcaatgtgccgcgtactccgggtggcccgcagcggctggtatacgtggtgtcagcggcggacaaggataaacacacgtcagcagttccgtcagcagttccgtcagcactgcgacagcgttgtccgcaaggcttttacccagtccagcgttacggtgccccacgcctgacggatgaactgtgtgctctggttaccactttaacgtaa

SEQ ID NO: 475624 - DNA, 243 bp, Shigella flexneri; identical to SEQ ID NO: 462679

SEQ ID NO: 475625 - DNA, 726 bp, Shigella flexneri
atgtcactcttccgcagaggtgaaatatggtacgccagtttcacattgccgaacggtaaaagatttaaacagtctcttggaacaaaggacaaaaggcaggcgacagaactccatgacaagctaaaggctgaagcatggcgggtcagcaaacttggtgaaatacctgatataacgttcgaggaagcgtgtgtcaggtggcttgaagagaaagcacataaaaaatcactggacgatgacaaaagccggatcggattctggcttcaacatttcgcaggaatacaactaagagacattactgaatcaaaaatttattcagcaatgcagaaaatgacgaaccggcgtcatgaggaaaactggaaactcagggcagaatcatgcagaaaaaaagggaaacctgttccagaatacacgccaaaaccagcgtccgttgcaacgaaggctacgcatctttcatttataaaggccctactaagagccgcagagcgtgaatggaaaatgctggataaggcaccaattattaaagtgcctcaaccaaagaataaacggatccgctggctggagccccatgaagcacaaaggctgattgatgaatgtccggagccattaaagtctgttgttgaatttgcactggcaacaggcttaagacgctcgaacatcatcaaccttgaatggcaacaaatagatatgcagcgccgggtggcatggataaacccggaagtgaggtag

SEQ ID NO: 475626 - DNA, 306 bp, Shigella flexneri; identical to SEQ ID NO: 399824

SEQ ID NO: 475627 - DNA, 741 bp, Shigella flexneri; identical to SEQ ID NO: 474595

SEQ ID NO: 475628 - DNA, 177 bp, Shigella flexneri; identical to SEQ ID NO: 475365

SEQ ID NO: 475629 - DNA, 930 bp, Shigella flexneri
atggtggatttgtgcaacgacttgttaagtataaaggaaggccaaaagaaagagtttacactccattctggtaataaagtttcctttatcaaagccaagattcctcataaaaggatccaagatttaaccttcgtcaaccaaaaaacgaatgtacgcgatcaagaatccctaacagaagaatcattagccgatatcataaaaactataaagctacaacaattcttccctgtaataggaagggagattgatggtagaattgaaattctggatggcactcgtagaagagcatctgcaatatatgcaggagcagatcttgaagttctatattcaaaagaatatatatctactcttgatgccagaaaactagcaaacgatatacaaacagcaaaagagcatagcatccgagaacttggtattggtcttaattttctgaaagtatcagggatgtcctataaagacatagccaaaaaagagaatctgtctcgcgcgaaagtcactcgtgcctttcaggcagcaagcgttccacaggaaataatatctctatttccaatcgcgtcagaacttaactttaatgactacaagatattattcaattattataaaggacttgaaaaggctaatgaatctcttagttctacactaccaatattaaaggaagaaataaaagaccttgatacaaatttgcccccggacatatataaaaaagaaattttaaacatcataaagaaaagcaaaaacagaaagcaaaacccttcgctaaaagttgactcgttatttatttctaaagacaaacggacttacataaaaagaaaagagaataaaacaaacagaactctaatatttacattatctaaaataaacaaaacagttcagagagaaatagatgaagctattcgggatataatttctcgccatctatcgtcttcataa

SEQ ID NO: 475630 - DNA, 378 bp, Shigella flexneri
atgcaatcgttgtacgactggatacagttgcagaggaaaacgctgtcgaaacatgcggagatggcgaaggcgttcgactatatcctgaatcactggaatgcgctgaacgagttctgtcgtgacggctgggtggaaatagacaacaacatcggtgaaaacgcgttacgatcggtggcggttggaagaaaaaattatctctttttcggctcagacaagggaggagaaagtgcggcgatcatctacagtctgctggtcacctgcaaacagaacgaagtggagccggaggactggttgcgcgaagtgatcgagaagctcaatgactggccgtcgaaccaagtgcatgaactgctgccctggaacttctcgtctgtaaaataa

SEQ ID NO: 475631 - DNA, 375 bp, Shigella flexneri; identical to SEQ ID NO: 13405

SEQ ID NO: 475632 - DNA, 315 bp, Shigella flexneri; identical to SEQ ID NO: 474620

SEQ ID NO: 475633 - DNA, 378 bp, Shigella flexneri; identical to SEQ ID NO: 474621

SEQ ID NO: 475634 - DNA, 360 bp, Shigella flexneri; identical to SEQ ID NO: 474567

SEQ ID NO: 475635 - DNA, 690 bp, Shigella flexneri; identical to SEQ ID NO: 474568

SEQ ID NO: 475636 - DNA, 381 bp, Shigella flexneri; identical to SEQ ID NO: 458903

SEQ ID NO: 475637 - DNA, 381 bp, Shigella flexneri; identical to SEQ ID NO: 458903

SEQ ID NO: 475638 - DNA, 366 bp, Shigella flexneri
atgattgatgtcttaggaccggagaaacgcagacggcgtactacacaggaaaagatcgctattgttcagcagagttttgaaccgggaatgacggtctcccttgttgcccggcaacacggtgtggcagccagccagttatttctctggcgcaagcaataccaggagggaagtcttactgctgtggccgcaggagaacaggtcgttcctgcctctgaacttgctgctgccatgaagcagattaaagaactccagcgcctgctcggcaagaaaacgatggaaaatgaactcctcaaagaagccgttgaatatggacgggcaaaaaagtggatagcgcacgcgcccttattgcccggggatggggagtaa

SEQ ID NO: 475639 - DNA, 333 bp, Shigella flexneri; identical to SEQ ID NO: 474593

SEQ ID NO: 475640 - DNA, 1053 bp, Shigella flexneri; identical to SEQ ID NO: 474612

SEQ ID NO: 475641 - DNA, 141 bp, Shigella flexneri; identical to SEQ ID NO: 474597

SEQ ID NO: 475642 - DNA, 201 bp, Shigella flexneri
atgaaggtacaggcaactacaaagcaaatggcgatggccatggtttatctgcaacttacactattgacggtttctcatttgctggtgcttatgcaaactctgaccgtactgattggcagtctggtgatggtaaaggcgaaagagccgaagtttgggcgttgtcaacaaaatatgacgctaacaatgtttatgctgctgtga

SEQ ID NO: 475643 - DNA, 279 bp, Shigella flexneri; identical to SEQ ID NO: 127146

SEQ ID NO: 475644 - DNA, 180 bp, Shigella flexneri; identical to SEQ ID NO: 474761

SEQ ID NO: 475645 - DNA, 879 bp, Shigella flexneri
gtggcggacctgacgtatgttgccacacaggagggatggttgtacctcgctggcatcaaagatgtttatacgtgcgaaattgtcggctacgccatgggagagcgcatgacaaaagagctgacaggtaaagccctgtttatggcgctcaggagccagcgcccacctgccgggctaatccaccactctgatcgaggttcacagtactgcgcatacgattaccgggtcatacaggagcagtttggtctgaaaacatcaatgtcgcgtaaaggtaactgttacgacaacgctccgatggaaagcttctggggaatatctccccggcagccttcagggaaaaatatcatcagatggctgcttaaaaaaagaacaaatggtagtgtccgctattgccagtacacctcagttccctacacagccaccgctgatgatgtcgcaccgacgggtcagcaaatctggcaggaactgcaaagtggcaaatggggtgagatagccccattcactgtgacaccagaaatgctggaagcggccagagaggccagacgtcaggaaattgaagcatggcgcacagaacaggaggcgaagccgttcacgtttgaatggaacggtcgtatctggaatgctggccccgactcactgggccgcctgtccccggtagtcatgctggcaaaatctgtcacagcacaaacacatatggcgtggagcgatgccgataatcagcaggtgaaactgtcgatgccggaactggaagaactggcggcagcaatggtgcaggcgcaggtcgatcgcaacgatgagatttatcgccgtcagcgtgaaatgaaagaggagctgagcggtctggatgatttggcttcaattcgggcgtttgacgttgagtaa

SEQ ID NO: 475646 - DNA, 561 bp, Shigella flexneri; identical to SEQ ID NO: 475523

SEQ ID NO: 475647 - DNA, 189 bp, Shigella flexneri; identical to SEQ ID NO: 469030

SEQ ID NO: 475648 - DNA, 198 bp, Shigella flexneri
atgtacaatcaattagccgcgccgatgcttgaagatttacgcagcgtgatgcaagaagaaacgcaaagctttcttgataagttaattcaggatgcggggtatcccgttgacaagacgggtaatgactccaacttactgatagtgttttatgttcagataatgcccgatgaccttgtcatgcagctccaccgattttga

SEQ ID NO: 475649 - DNA, 315 bp, Shigella flexneri
atgtacaatgatgttcttttccctggagaagacataaacaaaccgatcagcatcgctgcagccaaccgattcgtaaatagaataaggggagggatggatctaggttactggcgaacacatgatttcagaagaacgcttgttacacggctgtccgagatgtatgtcgagcctcatgttactgagcgaatgctcggtcatgaacttggcgggataatgtccgtatacaataaacacgactggatagaggctcagcgcaaagcgtatgagcttcacgctgataaattgttctggcacatcaggagcatttctgattaa

SEQ ID NO: 475650 - DNA, 378 bp, Shigella flexneri; identical to SEQ ID NO: 474621

SEQ ID NO: 475651 - DNA, 267 bp, Shigella flexneri; identical to SEQ ID NO: 474150

SEQ ID NO: 475652 - DNA, 687 bp, Shigella flexneri
atgtttgccacagcattgcaatccatagtgatgatggcagaactggcaattcgtggtccggaaaagttccagaaacgagtgttctggaaaggcctcgaaattcttgaggaaattcgacacaataatagaaatgtgatttttctggttccccatggctggagcgtggatattcctgcaatgttgctggcagctcagggaaaaaaaatggccgccatgtttcatcagcaacgaaatccagtgattgattatgtctggaattcagtacggcgtaaattcggggggcgcttacatgcccgggaggatgggataaaaccatttattcagtcagtacgccagggatactggggatattacctcccagatcaggatcatggtcctgaatacagtgaatttgctgatttttttgcgacctataaagcgacattaccaatcattggacgtctgatgaacatcagtcaggctatgattataccacttttcccggtttatgatgaaaaaaaacatctcctgactattgaaattcggccaccaatggatgcttgcattgccagcgcggacaataaaatgattgcccgacaaatgaacaaaacagtggaaattttggtggggccacatccggaacagtatgtctgggttttaaaattgttaaaaacacgcaaatcaaacgaagcggacccgtacccttga

SEQ ID NO: 475653 - DNA, 645 bp, Shigella flexneri; identical to SEQ ID NO: 474660

SEQ ID NO: 475654 - DNA, 204 bp, Shigella flexneri; identical to SEQ ID NO: 475480

SEQ ID NO: 475655 - DNA, 645 bp, Shigella flexneri; identical to SEQ ID NO: 474660

SEQ ID NO: 475656 - DNA, 645 bp, Shigella flexneri; identical to SEQ ID NO: 474660

SEQ ID NO: 475657 - DNA, 435 bp, Shigella flexneri; identical to SEQ ID NO: 35931

SEQ ID NO: 475658 - DNA, 510 bp, Shigella flexneri
gtgacgtttttttttgacgacagggaccaggcagtcccctacacagccaccgctgatgatgtcgcaccgacgggtcagcaaatctggcaggaactgcaaagtggcaaatggggtgagatagccccattcactgtgacaccagaaatgctggaagcggccagagaggccagacgtcaggaaattgaagcatggcgcacagaacaggaggcgaagccgttcacgtttgaatggaacggtcgtatctggaatgctggccccgactcactgggccgcctgtccccggtggtcatgctggcaaaatctgtcgcggcacaaacacatatggcgtggagcgatgccgataatcagcaggtgaaactgtcgatgccggaactggaagaactggcggcagcaatggtgcaggcgcaggtcgatcgcaacgatgagatttatcgccgtcagcgtgaaatgaaagaggagctgagcggtctggatgatttggcttcaattcgggcgtttgacgttgagtaa

SEQ ID NO: 475659 - DNA, 180 bp, Shigella flexneri; identical to SEQ ID NO: 474761

SEQ ID NO: 475660 - DNA, 267 bp, Shigella flexneri; identical to SEQ ID NO: 474742

SEQ ID NO: 475661 - DNA, 249 bp, Shigella flexneri; identical to SEQ ID NO: 474743

SEQ ID NO: 475662 - DNA, 303 bp, Shigella flexneri; identical to SEQ ID NO: 473532

SEQ ID NO: 475663 - DNA, 645 bp, Shigella flexneri; identical to SEQ ID NO: 474660

SEQ ID NO: 475664 - DNA, 300 bp, Shigella flexneri
atgatttactctaatcagcttcgttacactggcaaagatggtgtttacttccatctacaaggccaaccagataatttcttgtcactatcagcaactgaaaacatggaatttgatagccctatgatggttaccactcaaaatatgcaatcagggcagactgtaacagataatgtaatgcgttcacctagaactggtgtggttgtggttggtgaatggatttgcccctatatttccagacatctgttatcacttaacccattacaagcccgctgccgcagatattcccgtggcgagcgataa

SEQ ID NO: 475665 - DNA, 177 bp, Shigella flexneri; identical to SEQ ID NO: 475365

SEQ ID NO: 475666 - DNA, 267 bp, Shigella flexneri; identical to SEQ ID NO: 462029

SEQ ID NO: 475667 - DNA, 618 bp, Shigella flexneri; identical to SEQ ID NO: 474651

SEQ ID NO: 475668 - DNA, 180 bp, Shigella flexneri
atgaataagccgcaactggcggaatcacagaagaccgctttgcttaccgaagcggagtctgtcatccggcagccggggcgtgctgtcaggctgaacagggaaacggatgaatccggggaggcccgggggcgggcctctgtttttccggagtcagtccggtctgtggtttatgcgatgtga

SEQ ID NO: 475669 - DNA, 543 bp, Shigella flexneri
atgaacaatgaactccccgatgatattgagctgcttaaagccatgttgcgtaagcaacagagtcggcttcgacagtatgcctgtcaggtcgcgggctatgagcaggaaattgaacggctgaaagcgcaactcgacaggttgcgtcgtatgttgttcggccagagttcagagaaaaagcgtcataagcttgaaaatcagatccgacaggcagaaaaacgactgtcggaactggaaaaccggctgaacacagccagaaatcttctggaagatgcatcgtcagtcacagattcacctgacaccagtcccccgtcagaaaacccgatcgccagtaagcctgaattcccgggacgaaaatcttcacgaaaaccgctgccggcagaacttccccgggagacacatcgccttctgcctgctgaaaccagttgcccggcctgtggaggtgttctgaaagaaatgggggaaacaatctcagagcaactggatatcattaatactgaaccgccccgggaatcctggagactaaacttcctgagaaagaggtaa

SEQ ID NO: 475670 - DNA, 429 bp, Shigella flexneri; identical to SEQ ID NO: 474590

SEQ ID NO: 475671 - DNA, 357 bp, Shigella flexneri
atgcttccccgttttgccgatatttttcagcagggaaaccgatggcttaactggctggagaagcagccggtgcagatgagccgcctggaacattatgccggtcaggatgaaattggcctgcgttacaacagccaccggacaaaacgagaagaaaaccttgtgatgagtggcgacgagtttatggaaaggttctcctggcatgtggcggataaggggttccggatagtgatacggggtcctgagtccggtgaagcggcgattactggaagatgtggtgtacgccataacggagacagtgagaaaaacggcgaggcaaatcacaaggagagggatgtatcagcagtgactgaaggttga

SEQ ID NO: 475672 - DNA, 315 bp, Shigella flexneri; identical to SEQ ID NO: 474620

SEQ ID NO: 475673 - DNA, 504 bp, Shigella flexneri; identical to SEQ ID NO: 474723

SEQ ID NO: 475674 - DNA, 573 bp, Shigella flexneri
atgcaaattctaaacaaaatacttccacaggttgaattcgcgattcctcgcccatcatttgattcgttaagtcgcaataagcttgtaaagaaaatattatctgtttttaaaatcagggacagcgtcatagacaaaataaaagatagtaattcggggaatcaactattttgttggatgagccaagagcgaaccacttatgtctcttcaatgataaacagaagtatagatgaaatggccatacacaatggagttgttttgacctcagataacaaaaaaaacatatttgcagctattgaaaaaaaattcccggatataaaacttgatgaaaaatcagcacaaacatctatcagtcatacagcactaaacgagattgcctcatctggcctcagagcaaagattttaaaacgctatagcagtgacatggatttgtttaacacacaaatgaaggatcttacaaatctagtatccagttccgtctacgataaaatatttaatgaatcaacaaaagttttacaaatagaaataagcgcagaggttctaaaggctgtataccgtcaaagcaatacaaattaa

SEQ ID NO: 475675 - DNA, 381 bp, Shigella flexneri; identical to SEQ ID NO: 472764

SEQ ID NO: 475676 - DNA, 189 bp, Shigella flexneri; identical to SEQ ID NO: 469030

SEQ ID NO: 475677 - DNA, 303 bp, Shigella flexneri; identical to SEQ ID NO: 473532

SEQ ID NO: 475678 - DNA, 168 bp, Shigella flexneri; identical to SEQ ID NO: 474704

SEQ ID NO: 475679 - DNA, 303 bp, Shigella flexneri; identical to SEQ ID NO: 474565

SEQ ID NO: 475680 - DNA, 483 bp, Shigella flexneri; identical to SEQ ID NO: 474711

SEQ ID NO: 475681 - DNA, 429 bp, Shigella flexneri
atgcgtaactacgatttatcccccctgctgcgtcagtggataggttttgacaaactggctaacgcgctgcaaagcgcaaccgaacagcagacctttccgccgtacaacatcgaaaaaagcgatgataaccactaccgcatcacgcttgcgctggccgggttccgccaggaagatctcgacatccagctggagggtacgcgcctgaccgtgaaagggtcaccggaaaaaccagacaccgagaccaaatggctgcatcaggggcttgtcactcagccgtttagcctgagctttaccctggcagaccatatggaagtttctggcgcgacgttcactaacgggctgctgaacattgacctcacccgtaacgtgccggaagccattgcgcctcagcgcatcgccattagcgaacgcccggcgttgaacagctaa

SEQ ID NO: 475682 - DNA, 474 bp, Shigella flexneri; identical to SEQ ID NO: 474721

SEQ ID NO: 475683 - DNA, 267 bp, Shigella flexneri; identical to SEQ ID NO: 463627

SEQ ID NO: 475684 - DNA, 171 bp, Shigella flexneri
atgagtgttacagtaccgaatgatgattggacattgagttcattatctgaaacttttgatgatggaactcaaacattacaaggtgaactaacattggcactagataaattagctaaaaatccttcgaatccacagttgctcacatccaatcaacatcagcaacaagaataa

SEQ ID NO: 475685 - DNA, 294 bp, Shigella flexneri
atgaattacatttatccagtcaatcaggttgatattatcaaagccagtgattttcaatctcaagagatatcaagtctggaagacgtcgtgtcggctaaatatagtgatattaagatggatacagatattcaagtatcacaaataatggagatggtaagcaatccagaatcattaaacccagaatctttggccaagttacagacgacgctctcaaattattcaataggagtatcattagctggcacgttagcaagaaaaacagtttcggctgttgaaactttattaaagtcttaa

SEQ ID NO: 475686 - DNA, 189 bp, Shigella flexneri
atgactcgtgtattaaacgaattaaaaaccgaagcaacagataaaaaagaagaaatcatcgaaaaatcaataaaaattattgattattacaattctcttaaatcgccagatcttggaaccaaactttacattcacgacttattacagatcaataagcttttattgaataactctcattctaatatatag

SEQ ID NO: 475687 - DNA, 240 bp, Shigella flexneri
gtggacgtcggcgcgaaaagcgagatctaccgcatcatgaaccagatggcgcgcaaaggggtggcgattctgatgatctccagcgagctgccggaagtggtgggcatgagcgaccgggtgtacgtgatgcgcgaaggcagcatcgcgggtgaactgcacgggcgcgacatctctcaggaaaacattatgacgctggcaaccggcgtgaacgacactcatcatcaggcggtgcaatcatga

SEQ ID NO: 475688 - DNA, 267 bp, Shigella flexneri; identical to SEQ ID NO: 463627

SEQ ID NO: 475689 - DNA, 588 bp, Shigella flexneri
atggcagccttcccggcggtgaaaacgttcgaagagtatgacttcacattcgccaccggagcaccgcagaagcaactccagtcgttacgctcactcagcttcatagaacgtaatgaaaatatcgtattactggggccatcaggtgtggggaaaacccatctggcaatagcgatgggctatgaagcagtccgtgtaggtatcaaagttcgcttcacaacagcagcagatctgttacttcagttatctacggcacaacgtcagggccgttataaaacgacgcttcagcgtggagtaatggccccccgcctgctcatcattgatgaaataggctatctgccgttcagtcaggaagaagcaaaactgttcttccaggtcatcgctaaacgttacgaaaagagcgcaatgatcctgacatccaatctaccgttcgggcagtgggatcaaacgttcgccggtgatgcagcactgacctcagcgatgctgggccgtatcttacaccactcacatgtcgttcaaatcaaaggagaaagctatcgactcagacagaaacgaaaggccggggttatagcagaagctaatcctgagtaa

SEQ ID NO: 475690 - DNA, 219 bp, Shigella flexneri; identical to SEQ ID NO: 474644

SEQ ID NO: 475691 - DNA, 189 bp, Shigella flexneri; identical to SEQ ID NO: 469030

SEQ ID NO: 475692 - DNA, 156 bp, Shigella flexneri
atgctggagaatgagtaccctcagagggtggctgaccggctgaaagcatcaggtctgagcggtgatgcggatgcggagagggaagccggtgcacaggtgatgcgtgagactgaacagcagatttaccgtcagttgactgacgaggtactggcctga

SEQ ID NO: 475693 - DNA, 372 bp, Shigella flexneri
gtgctggatgcactggagcaggcgttatgggcccgtcgaccgtccggcacggtccatcacagtgataaaggttctcagtatgtatcgctggcctacacacagcggcttaaggaagccggattactggcatcaacaggaagtacaggcgactcgtatgacaacgcgatggcggagagcatcaatggtctttacaaagcggaggtaatacaccgtaagagctggaaaaaccgtgcagaagtggaactggccacactaacgtgggtggactggtataacaatcgacgattgctggaaaggctgggccacatccctccggcagaagcagaaaaagcttattatgcttccatcggaaacgatgatctgtcagcctga

SEQ ID NO: 475694 - DNA, 267 bp, Shigella flexneri; identical to SEQ ID NO: 463627

SEQ ID NO: 475695 - DNA, 513 bp, Shigella flexneri; identical to SEQ ID NO: 475605

SEQ ID NO: 475696 - DNA, 225 bp, Shigella flexneri; identical to SEQ ID NO: 474756

SEQ ID NO: 475697 - DNA, 378 bp, Shigella flexneri; identical to SEQ ID NO: 474621

SEQ ID NO: 475698 - DNA, 381 bp, Shigella flexneri
atgctgggagcggtggaacgccgcttcggcaacgatcttccgtcgtctccagtggagtggctgacggataatggttcatgttaccgggctaatgaaacacgccagttcgcccggatgttgggacttgaaccgaagaacacggcggtgcggagtccggagagtaacggaatagcagagagcttcgtgaaaacgataaagcgtgactacatcagtatcatgcccaaaccagacgggttaacggcagcaaagaaccttgcagaggcgttcgagcattataacgaatggcatccgcatagtgcgctgggttatcgctcgccacgggaatatctgcggcagcgggcttgtaatgggttaagtgataacagatgtctggaaatatag

SEQ ID NO: 475699 - DNA, 381 bp, Shigella flexneri; identical to SEQ ID NO: 458903

SEQ ID NO: 475700 - DNA, 219 bp, Shigella flexneri; identical to SEQ ID NO: 474644

SEQ ID NO: 475701 - DNA, 231 bp, Shigella flexneri; identical to SEQ ID NO: 129443

SEQ ID NO: 475702 - DNA, 381 bp, Shigella flexneri; identical to SEQ ID NO: 458903

SEQ ID NO: 475703 - DNA, 330 bp, Shigella flexneri
atgtccggataccatattattctgaaatcccgggtaaacaccccggaagtggtgatgcacactgttgctgatgtgatgacaggaaacgatggtgaatactgtttccatgcgcggactggaaaatatggtgtgtatctgaaacaggactggcacaacgagtacaacgttggcgacattgctgtatatgaggactcaaagcccggtacgctgaatgactttctgattgctcctgatgagggcgacctgaaaccagatgtcgtcaaacgctttgaggaaatggtggcgcaggcgcagcagagcaggccaaaaatgacattgatgctgcgctga

SEQ ID NO: 475704 - DNA, 186 bp, Shigella flexneri; identical to SEQ ID NO: 462789

SEQ ID NO: 475705 - DNA, 180 bp, Shigella flexneri; identical to SEQ ID NO: 465305

SEQ ID NO: 475706 - DNA, 1968 bp, Shigella flexneri
atgttaggccagccggtttccatgcttatcccggacgtagtgggctttaaacttaccggaaaattacgtgaaggtattaccgccacagacctggttctcactgttacccaaatgctgcgcaaacatggcgtggtggggaaattcgtcgaattttatggtgatggtctggattcactaccgttggcggatcgcgccaccattgccaatatgtcgccagaatatggtgccacctgtggcttcttcccaatcgatgcagtaaccctcgattacatgcgtttaagcgggcgcagcgaagatcaggtcgagttggtcgaaaaatatgccaaagcgcagggcatgtggcgtaacccgggtgatgaaccgatttttaccagtatgttagaactggatatgaatgacgttgaagcgagcctggcagggccaaaacgcccacaggatcgcgttgcactgcccgatgtaccaaaagcatttgccgccagtaacgaactggaagtgaatgccacgcataaagatcgcctgccagtcgattatgttatgaacggacatcagtatcagttacctgatggcgctgtggtcattgctgcgataacctcgtgcaccaacacctctaacccaagtgtgctgatggccgcaggcttgctggcgaaaaaagccgtaactcttggcctcaagcggcaaccgtgggtcaaagcgtcgttggcaccgggttcgaaagtcgtttctgattatctggcaaaagcgaaactgacaccgtatctcgacgaactggggtttaaccttgtgggatacggttgtaccacctgtattggtaactctgggccgctgcccgatcctatcgaaacggcaatcaaaaaaggcgatttaaccgtcggtgcggtgctgtccggcaaccgtaactttgaaggccgtatccatccgctggttaaaactaactggctggcctcgccaccgctggtggttgcctatgcgctggcgggaaatatgaatatcaacctggcttctgagcctatcggccatgatcgcaaaggcgagccggtttatctgaaagatatctggccatcggcacaagaaattgcccgtgcggtagaacaagtctccacagaaatgttccgcaaagagtacgcagaagtttttgaaggcacagcagagtggaaggaaattaacgtcacacgatccgatacctacggttggcaggaggactcaacctatattcgcttatcgcctttctttgatgaaatgcaggcaacaccagcaccagtggaagatattcacggtgcgcggatcctcgcaatgctgggggattcagtcaccactgaccatatctctccggcgggcagtattaagcccgacagcccagcgggtcgatatctacaaggtcggggtgttgagcgaaaagactttaactcctacggttcgcggcgtggtaaccatgaagtgatgatgcgcggcaccttcgccaatattcgcatccgtaatgaaatggtgcctggcgttgaaggggggatgacgcggcatttacctgacagcgacgtagtctctatttatgatgctgcgatgcgctataagcaggagcaaacgccgctggcggtgattgccgggaaagagtatggatcaggctcaagccgtgactgggcggcaaaaggacctcgtctgcttggaattcgtgtggtgattgccgaatcgtttgaacgaattcaccgttcgaatttaattggcatgggcatcctgccgctggaatttccgcaaggcgtgacgcgtaaaacgttagggctaaccggggaagagaagattgatattggcgatctgcaaaatctacaacctggcgcgacggttccggtgacgcttacgcgcgcggatggtagccaggaagtcgtaccctgccgttgtcgtatcgacaccgcgacggagttgacctactaccagaacgacggcattttgcattatgtcattcgtaatatgttgaagtaa

SEQ ID NO: 475707 - DNA, 240 bp, Shigella flexneri; identical to SEQ ID NO: 12429

SEQ ID NO: 475708 - DNA, 369 bp, Shigella flexneri; identical to SEQ ID NO: 471289

SEQ ID NO: 475709 - DNA, 558 bp, Shigella flexneri
ttgcacggtaaacagatcaataaccataatgccaacgaagccataaaccacggatttgcactggtaactgaggagcgccgctcaacgggaatttatgcctatctggatattggttttaactcgttaatttccaatattcgcaactacaaaaataaagttggtttactggataactcgcggatgaaaagcgatacccagtgggtgattgattcgatgcgggtaaaaacgccgggtcatcggacgcaaattggttcgctctccggtggtaatcagcaaaaggtgattattggtcgctggctactaacgcaaccagaaatattaatgctcgatgaaccgacgcgcggtattgatgtcggggcgaagtttgaaatttatcagttaattgccgaactggcgaagaaaggcaaggggattattattatctcctctgaaatgcctgagttgttagggataacagaccgtattctggtcatgagcaatggtctcgtttccggaattgtcgatacaaaaacaacaacgcaaaacgaaattctgcgtcttgcgtctttgcacctttaa

SEQ ID NO: 475710 - DNA, 1077 bp, Shigella flexneri; identical to SEQ ID NO: 471296

SEQ ID NO: 475711 - DNA, 564 bp, Shigella flexneri
gtgaaggaagccgggtgcctggcccacgcccgccgaaaaatccatgacgaggatgtgcgccgtccgacagaaatgactcaggaagcgctcagacggatagcagagttatacgacatagaagcggagatacgtggcagtccggcagaggaacggcttgcagtcagaaaagccagaagcgtccagttgatgcagtcgttgtacgactggatacagttgcagaggaaaacgctgtcgaaacatgcggagatggcgaaggcgttcgactatatcctgaatcactggaatgcgctgaacgagttctgtcgtgacggctgggtggaaatagacaacaacatcggtgaaaacgcgttacgatcggtggcggttggaagaaaaaattatctctttttcggctcagacaagggaggagaaagtgcggcgatcatctacagtctgctggtcacctgcaaacagaacgaagtggagccggaggactggttgcgcgaagtgatcgagaagctcaatgactggccgtcgaaccaagtgcatgaactgctgccctggaacttctcgtctgtaaaataa

SEQ ID NO: 475712 - DNA, 267 bp, Shigella flexneri; identical to SEQ ID NO: 462029

SEQ ID NO: 475713 - DNA, 657 bp, Shigella flexneri
gtgcgtatcgaccggattaaagcaacgttcggcgagcgtgaggtgttcagcgacgtaacatacaatcggctggtggaagtgctggacgagtggatcgccactcgctcgaacaataacgccctggagttgtttgccgagctccgtcggttctggaagttctgcgcacctactctttgcaacggccgcaatgttgccgccagtctgccagatgattatgtttcctcccgcgtacagaaacctacccccacacggctttttaccgatattgaatcaatcgcccgactctggctcaatgttgctgcctgcacctctgtacaccagaagaatgctgttcgcttcatgatcatcactggtgttcgtccgattaatgtccataacctgcgctgggactacgtttacgaggaggctggtgaaattgtttatccggaaggggttatcggcatgcgaggggctatgaaaacacaaaaggctttccgcctgccgataacgcctgagatccggcggattatcgacgagcagaaagcctggcgtgattcagttcctgagtgcaacagggattatgtatttttgcagccacgtgatccaatgcagccattttcaaaacgatcactggataagctggtgaaaacatacagcccggacggggctgtaaaatga

SEQ ID NO: 475714 - DNA, 267 bp, Shigella flexneri; identical to SEQ ID NO: 462029

SEQ ID NO: 475715 - DNA, 189 bp, Shigella flexneri; identical to SEQ ID NO: 470416

SEQ ID NO: 475716 - DNA, 267 bp, Shigella flexneri; identical to SEQ ID NO: 462029

SEQ ID NO: 475717 - DNA, 267 bp, Shigella flexneri; identical to SEQ ID NO: 462029

SEQ ID NO: 475718 - DNA, 417 bp, Shigella flexneri; identical to SEQ ID NO: 473463

SEQ ID NO: 475719 - DNA, 303 bp, Shigella flexneri; identical to SEQ ID NO: 473532

SEQ ID NO: 475720 - DNA, 225 bp, Shigella flexneri; identical to SEQ ID NO: 133446

SEQ ID NO: 475721 - DNA, 267 bp, Shigella flexneri; identical to SEQ ID NO: 462029

SEQ ID NO: 475722 - DNA, 267 bp, Shigella flexneri; identical to SEQ ID NO: 462029

SEQ ID NO: 475723 - DNA, 1413 bp, Shigella flexneri; identical to SEQ ID NO: 473650

SEQ ID NO: 475724 - DNA, 189 bp, Shigella flexneri
atgggactcattggatttgcccctatatttccagacatctgttatcacttaacccattacaagcccgctgccgcagatattcccgtggcgagcgataacccagcgcactatgcggatgccattcgttataatgctcgaacgcctctgcaaggttctttgctgccgttaacccgtctggtttgggcatga

SEQ ID NO: 475725 - DNA, 267 bp, Shigella flexneri; identical to SEQ ID NO: 462029

SEQ ID NO: 475726 - DNA, 267 bp, Shigella flexneri; identical to SEQ ID NO: 462029

SEQ ID NO: 475727 - DNA, 786 bp, Shigella flexneri; identical to SEQ ID NO: 473858

SEQ ID NO: 475728 - DNA, 846 bp, Shigella flexneri; identical to SEQ ID NO: 474162

SEQ ID NO: 475729 - DNA, 567 bp, Shigella flexneri; identical to SEQ ID NO: 474361

SEQ ID NO: 475730 - DNA, 483 bp, Shigella flexneri
atgtcgcgccagtgcacgcattatgggcgttggcctcaacacggttttacgtcacttaaaaaactcaggccgcagtcggtaacctcgcgcatacaaccgggcagtgatgtgattgtctgcgctgaaatggacgaacattggggctacgtcggtgctaaatcacgtcagcgctggctgttttacgcgtatgacaggatacggaggacggttgtggcgcacgtcttcggtgaacgcactctggccacactggagcgtcttctgagcctgctgtcggcctttgaggtcgtggtatggatgacggatggtggatttgcccctatatttccagacatctgttatcacttaacccattacaagcccgctgccgcagatattcccgtggcgagcgataacccagcgcactatgcggatgccattcgttataatgctcgaacgcctctgcaaggttctttgctgccgttaacccgtctggtttgggcatga

SEQ ID NO: 475731 - DNA, 2085 bp, Shigella flexneri; identical to SEQ ID NO: 474088

SEQ ID NO: 475732 - DNA, 564 bp, Shigella flexneri; identical to SEQ ID NO: 475711

SEQ ID NO: 475733 - DNA, 852 bp, Shigella flexneri; identical to SEQ ID NO: 474121

SEQ ID NO: 475734 - DNA, 372 bp, Shigella flexneri; identical to SEQ ID NO: 475390

SEQ ID NO: 475735 - DNA, 267 bp, Shigella flexneri; identical to SEQ ID NO: 462029

SEQ ID NO: 475736 - DNA, 246 bp, Shigella flexneri
atggaacgcagtaatttcttagtggctattatcatgctaattcttagatccctagcgattattcctgcctggttcgtcagcttaggccatgagattgttacattcctttttatcctggagatatgggggaacgcaggcgacgctttttcatctacatccgttggtaaatatagctttggtcactacgacttaagccttcctcaatcacagctattcgccgggcgatacggcaaacaaactaagtga

SEQ ID NO: 475737 - DNA, 267 bp, Shigella flexneri; identical to SEQ ID NO: 462029

SEQ ID NO: 475738 - DNA, 159 bp, Shigella flexneri; identical to SEQ ID NO: 10991

SEQ ID NO: 475739 - DNA, 213 bp, Shigella flexneri; identical to SEQ ID NO: 11486

SEQ ID NO: 475740 - DNA, 396 bp, Shigella flexneri
atggcaaataaaacagaaaagccgacacctaaaaaactaaaggatgccgcaaaaaaaggacagtcatttaaatttaaggatttaacgactgttgttattattctggtagggacatttactataatatcattcttttccttaagtgatgtaatgctcttatacagatatgtaataattaatgacttcgaaattaatgagggtaaatacttttttgcagtggttattgtcttttttaagataattggcttcccactttttttctgtgttctttcggctgtgttgccaacattggttcaaacaaagtttgttcttgcgactaaagctatcaagattgatttttcagtattaaaccctgttaagaatttttcaaaagcattctgcttcttattattctag

SEQ ID NO: 475741 - DNA, 240 bp, Shigella flexneri; identical to SEQ ID NO: 12429

SEQ ID NO: 475742 - DNA, 267 bp, Shigella flexneri; identical to SEQ ID NO: 462029

SEQ ID NO: 475743 - DNA, 564 bp, Shigella flexneri
gtgaaggaagccgggtgcctggcccacgcccgccgaaaaacccatgacgaggatgtgcgccgtccgacagaaatgactcaggaagcgctcagacggatagcagagttatacgacatagaagcggagatacgtggcagtccggcagaggaacggcttgcagtcagaaaagccagaagcgtccagttgatgcagtcgttgtacgactggatacagttgcagaggaaaacgctgtcgaaacatgcggagatggcgaaggcgttcggctatatcctgaatcactggaatgcgctgaacgagttctgtcgtgacggctgggtggaaatagacaacaacatcggtgaaaacgcgttacgatcggtggcggttggaagaaaaaattatctctttttcggctcagacaagggaggagaaagtgcggcgatcatctacagtctgctggtcacctgcaaacagaacgaagtggagccggaggactggttgcgcgaagtgatcgagaagctcaatgactggccgtcgaaccaagtgcatgaactgctgccctggaacttctcgtctgtaaaataa

SEQ ID NO: 475744 - DNA, 207 bp, Shigella flexneri
atgaagcccttcgtaatcctctggctcagtggatttgcccctatatttccagacatctgttatcacttaacccattacaagcccgctgccgcagatattcccgtggcgagcgataacccagcgcactatgcggatgccattcgttataatgctcgaacgcctctgcaaggttctttgctgccgttaacccgtctggtttgggcatga

SEQ ID NO: 475745 - DNA, 267 bp, Shigella flexneri; identical to SEQ ID NO: 462029

SEQ ID NO: 475746 - DNA, 207 bp, Shigella flexneri
atgtttggtgccagttatcgctacagtggtgctggagtcggttatcaggttgccagtgtggttggcggtggatttacaccttttattgccgctgcactcatcacttactttgccgggaactggcatagcatcgccatttatttgctggctggatgcctgatttctgcaatgaccgctttattgatgaaagacaatcaacgctcgtga

SEQ ID NO: 475747 - DNA, 213 bp, Shigella flexneri; identical to SEQ ID NO: 474424

SEQ ID NO: 475748 - DNA, 1605 bp, Shigella flexneri; identical to SEQ ID NO: 474409

SEQ ID NO: 475749 - DNA, 174 bp, Shigella flexneri
atgaataaagttacaaaaacagctattgtgggcttacttgcgcttttcgcaggtaatgccgctgcaaccgatggtgaaatagtttttgatggcggtaatgactccaacttactgatagtgttttatgttcagataatgcccgatgaccttgtcatgcagctccaccgattttga

SEQ ID NO: 475750 - DNA, 1401 bp, Shigella flexneri; identical to SEQ ID NO: 474418

SEQ ID NO: 475751 - DNA, 960 bp, Shigella flexneri; identical to SEQ ID NO: 474419

SEQ ID NO: 475752 - DNA, 303 bp, Shigella flexneri; identical to SEQ ID NO: 473532

SEQ ID NO: 475753 - DNA, 765 bp, Shigella flexneri; identical to SEQ ID NO: 474406

SEQ ID NO: 475754 - DNA, 267 bp, Shigella flexneri; identical to SEQ ID NO: 462029

SEQ ID NO: 475755 - DNA, 564 bp, Shigella flexneri
gtgaaggaagccgggtgcctggcccacgcccgccgaaaaacccatgacgaggatgtgcgccgtccgacagaaatgactcaggaagcgctcagacggatagcagagttatacgacatagaagcggagatacgtggcagtccggcagaggaacggcttgcagtcagaaaagccagaagcgtccagttgatgcagtcgttgtacgactggatacagttgcagaggaaaacgctgtcgaaacatgcggagatggcgaaggcgttcgactatatcctgaatcactggaatgcgctgaacgagttctgtcgtgacggctgggtggaaatagacaacaacatcggtgaaaacgcgttacgatcggtggcggttggaagaaaaaattatctctttttcggctcagacaagggaggagaaagtgcggcgatcatctacagtctgctggtcacctgcaaacagaacgaagtggagccggaggactggttgcgcgaagtgatcgagaagctcaatgactggccgtcgaaccaagtgcatgaactgctgccctggaacttctcgtctgtaaaataa

SEQ ID NO: 475756 - DNA, 333 bp, Shigella flexneri
atgtgtctggcgggggaaggctgcatcgttctctggtgtatccggtgtgcgccagaacacaccatcgatggccagcagggtcaggccgcaccagtgcggatgcggcgtggcgttatgccagagctgcgctgttttcgtgaacacgcggcggacagcctcacttcccaggcgctggcgggcctgaataacagcactgggggcaacgaaggggcgattgcccggcagcatgatgtccaggcgattcacaatctggtgaagaggttctttacgctcaagcgccatgccaacaatacaccagaccatcatttcgaggggaagacggcgcttgcgtag

SEQ ID NO: 475757 - DNA, 267 bp, Shigella flexneri; identical to SEQ ID NO: 462029

SEQ ID NO: 475758 - DNA, 189 bp, Shigella flexneri; identical to SEQ ID NO: 470416

SEQ ID NO: 475759 - DNA, 600 bp, Shigella flexneri; identical to SEQ ID NO: 474547

SEQ ID NO: 475760 - DNA, 1902 bp, Shigella flexneri
atgcataatgtaaataatactcaagcgccaacattcttatataaggcaacttcaccatcatcaacagaatacagcgagttaaaaagcaaaatatccgatatccatagttcgcaaacttctctaaaaacaccagcatcagtgtctgaaaaagaaaactttgcaacgtcttttaatcagaaatgtcttgattttttattttcttcctcagggaaagaagatgtgttaagaagcatttattccaactcaatgaatgcgtatgccaaaagcgagattctcgaattttcaaatgttttgtactccttagtacatcaaaatggtcttaattttgaaaacgaaaagggacttcaaaaaattgtcgcacagtattcggaactaattataaaagataaattatcccaagattctgcctttggaccatggtcggcaaagaataagaaactccatcaattacgacaaaacattgagcacagacttgcactattagcacaacaacacacatctggtgaagctttatcattgggacaaaaactcctcaatactgaagtatcatcatttatcaagaataatattcttgctgaattaaagttaagtaatgaaactgtttcatctctcaaactagatgatttagttgacgcacaggcaaaacttgcctttgatagtttgcgcaatcaacgtaaaaatactattgatagtaaaggatttggtataggtaaactgtcaagagacttaaatacagtagccgtgtttcctgagctgttgagaaaagtccttaatgatattttagaagatataaaagattcgcatcctatccaagatggcctccctacacctcccgaagatatgccagatggcggaccaacccccggagccaatgagaaaacatcccaacctgtaattcactatcatataaataatgataatagaacttacgataatagagtttttgacaacagagtatatgacaatagctatcacgagaacccagaaaatgatgcacagtctcctacttctcagacaaacgatctattatcccgtaacggaaactcattactaaatccacaaagagcactagttcaaaaagtaacttccgttctaccacactctatatcagatactgtccagacatttgcaaataattcagctttagaaaaggttttcaaccatactccagataattcggatggaataggttcagacctgttaactacgagtagtcaagaaagatctgcaaataactctctttctcggggacacaggcctctgaacatacagaactcttcaaccaccccccctctccacccggaaggagtgacaagcagtaatgataactcatcagatacaactaaaagtagcgcttctctttctcatagagtagcttcgcaaatcaataaattcaactcaaacactgattcaaaagtacttcagactgattttttatcaagaaatggagacacatatttaacacgggaaacgatatttgaagcttcaaaaaaagtaacaaactccctaagtaatcttatatctctcattggaactaaatcaggaacacaagaacgagagttacaggaaaaatcaaaggacattacaaaatccacaacagaacatagaataaacaacaaattaaaagttacagatgcaaatataagaaactacgtaacagaaaccaacgcagatacaattgataaaaatcatgcgatctatgaaaaggcaaaagaagtatctagcgccctcagcaaggtattgtcaaaaattgacgatacctctgcagaattacttacagatgatatatctgatttaaaaaataacaatgatattacagctgaaaacaataatatatataaagcagcaaaagatgtaaccacttccctatcaaaagtattaaagaatatcaataaggattaa

SEQ ID NO: 475761 - DNA, 690 bp, Shigella flexneri; identical to SEQ ID NO: 474568

SEQ ID NO: 475762 - DNA, 366 bp, Shigella flexneri; identical to SEQ ID NO: 474575

SEQ ID NO: 475763 - DNA, 906 bp, Shigella flexneri
gtggatagcgcacgcgcccttattgcccggggatggggagtaagcttagtcagccgttgtctccgggtgtcgcgtgcgcagttgcacgtcattctcagacgaaccgatgactggatggatggccgccgcagtcgtcacactgatgatacggatgtgcttctccgtatacaccatgttatcggagagctgcccacgtatggttatcgtcgggtatgggcgctgcttcgcagacaggcagaacttgatggtatgcctgcgatcaatgccaaacgtgtttaccggctcatgcgccagaatgcgctgttgcttgagcgaaaacctgctgtaccgccatcgaaacgggcacatacaggcagagtggccgtgaaagaaagcaatcagcgatggtgctctgacgggttcgagttctgctgtgataacggagagagactgcgtgtcacgttcgcgctggactgctgtgatcgtgaggcactgcactgggcggtgactaccggcggcttcaacagtgaaacagtacaggacgtcatgctgggagcggtggaacgccgcttcggcaacgatcttccgtcgtctccagtggagtggctgacggataatggttcatgctaccgggctaatgaaacacgccagttcgcccggatgttgggacttgaaccgaagaacacggcggtgcggagtccggagagtaacggaatagcagagagcttcgtgaaaacgataaagcgtgactacatcagtatcatgcccaaaccagacgggttaacggcagcaaagaaccttgcagaggcgttcgagcattataacgaatggcatccgcatagtgcgctgggttatcgctcgccacgggaatatctgcggcagcgggcttgtaatgggttaagtgataacagatgtctggaaatatag

SEQ ID NO: 475764 - DNA, 2034 bp, Shigella flexneri
atgatgatttataaaaatgataaaacatttcgtaatcttgaaatattcggagacagcggctctggagcatacttatatgataacaaactagaaaaatgggtattagtcggaacaacccatggtattgccagcgttaatggtgaccaactgacatggataacaaaatacaatgataaactggttagtgagttaaaagatacctatagtcataaaataaatctgaatggcaataatgtaaccattaaaaacacagatataacattacaccaaaacaatgcagataccactggtactcaagaaaaaataactaaagacaaagatattgtgttcacaaatgggggaaatgttctgtttaaggataatttggattttggtagcggtggtattatctttgacgaaggccatgaatataacataaacggtcagggatttacatttaaaggagcaggaattgatatcggaaaagaaagcattgtaaactggaatgcattgtattccagtgatgatgttttacacaaaataggccccggtactctgaatgttcaaaaaaaacagggggcaaatataaagataggtgaaggaaatgttattcttaatgaagaaggaacatttaacaatatataccttgcaagcggaaatggtaaggtaatactaaataaagataattcccttggcaatgatcaatatgcggggatattttttactaaacgtggtggcacgctagatttaaatggacacaatcagacttttactagaattgccgccactgacgatggaacaacaataactaactcagatacaacgaaagaagccgttctggcaatcaataacgaagactcctacatatatcatgggaacataaatggcaatataaaactaacgcacaatattaattctcaggataagaaaactaatgcaaaattaattctggatggtagtgtcaacacaaaaaatgatgttgaagtcagtaatgccagtcttaccatgcaaggccatgcaacagagcatgcaatattcagaagcacagcgagtcattgctccctggtatttctttgtggaacggactgggtcaccgttttgaaagaaacagagagttcatataataaaaagttcaattctgattacaaaagtaataatcagcagacctcatttgatcagcctgactggaaaaccggggtgtttaaatttgatacattacacctgaacaatgctgacttttcaatatcacgcaatgccaatgttgaaggaaatatatcagcaaataaatcagctatcacaatcggcgataaaaatgcttacattgataatcttgcagggaaaaatattactaataatggttttgacttcaaacaaactatcagtactaatctatccataggagaaactaaatttacaggtggcatcactgcacataacagccaaatagccataggtgatcaagctgtagttacacttaatggtgcaacctttctgaataatactcctataagtatagataaaggagcaaaagttatagcacaaaattccatgttcacaacaaaaggtattgatatctccggtgaactgactatgatgggaatccctgaacagaatagtaaaactgtaacgccgggtctccactacgctgctgatggattcaggctgagtggtggaaatgcaaatttcattgccagaaatatggcatctgtcaccggaaatatttatgctgatgatgcagcaaccattactctgggacagcctgaaactgaaacaccgactatatcgtctgcttatcaggcatgggcagagactcttttgtatggctttgataccgcctatcgaggcgcaataacagcccccaaagctacagttagcatgaataatgcgatctggcatctaaatagccagtcatcaattaatcgtctagaaacaaaagacagtatggtgcgttttactggtgacaatgggaagtttacaacccttacagtggacaaccttactatagatgacagtgcatttgtgctgcgtgcaaatctggcccaagcagatcagtga

SEQ ID NO: 475765 - DNA, 858 bp, Shigella flexneri
gtgactgatcttcaacaaacttattaccgccaggtaaagaacccgaatccggtgttcacaccccgtgaaggtgcccggacgcttccgttctgcgggaaactgatggaaaaggcggtgggcttcacctcccgttttgatttcgccattcatgtggcacatgcccgttcgcttggtctgcgtcggcgcatgccaccggtactacgtcgccgggccattgatgcgctgctgcaggggctgtgtttccactatgacccgctggccaaccgcgtgcagtgctccatcaccacgctggccattgagtgcggactggcgacggagtctgctgccggaaaactctccatcacccgggccacccgggccctgacgttccttgcagagctgggactgattacctaccagacggaatatgacccgcttatcgggtgctacattccgaccgatatcacgttcacaccggctctgtttgctgcccttgatgtgtctgaggatgcagtggcagctgcgcgccgcagtcgtgttgaatgggaaaacagacagcgcaaaaagcaggggctggataccctgggtatggatgaactgatggcgaaagcctggcgttttgttcgtgagcgtttccgcagttaccagacagagcttaagtcccgtggaatgaagcgtgcccgtgcgcgtcgtgatgcggacaggcagcgtcaggatattgtcaccctggtgaaacggcagctgacgcgtgaaatctcggaaggacgcttcactgctaatggtgaggcggtaaaacgtgaagtggagcgtcgtgtgaaggagcgcatgattctgtcacgtaaccgtaattacagccggctggccacagcttccccctga

SEQ ID NO: 475766 - DNA, 264 bp, Shigella flexneri; identical to SEQ ID NO: 474403

SEQ ID NO: 475767 - DNA, 366 bp, Shigella flexneri; identical to SEQ ID NO: 462994

SEQ ID NO: 475768 - DNA, 888 bp, Shigella flexneri; identical to SEQ ID NO: 474634

SEQ ID NO: 475769 - DNA, 954 bp, Shigella flexneri; identical to SEQ ID NO: 474502

SEQ ID NO: 475770 - DNA, 873 bp, Shigella flexneri; identical to SEQ ID NO: 474510

SEQ ID NO: 475771 - DNA, 294 bp, Shigella flexneri; identical to SEQ ID NO: 474511

SEQ ID NO: 475772 - DNA, 528 bp, Shigella flexneri
atggcagttcgtggcattaacaaggtcattcttgtcggtcgtctgggaaaagatccggaagtccgttacatcccaaacgggggcgcagtggcaaacctgcaggtggccacgtcagaaagctggcgtgacaaacagacgggggagatgcgggagcagacagaatggcatcgcgtggtgctgttcggcaagctcgcggaagtggctggtgaatatctgcgcaagggcgcgcaggtctacatcgaggggcaactccgtacccgtagctgggaagataacggtatcacccgttacgtcactgaaattcttgttaagaccacgggcaccatgcagatgctgggacgtgcaccacagcagaacgctcaggcgcaaccgaagcctcagcagaatgggcagccacagagtgctgacgcgacgaaaaaaggtggcgcgaaaacgaaaggccgtggacgtaaggccgcgcagccggagcctcagccgcaaccgccggagggggaggattacgggttttcagacgacatcccgttctga

SEQ ID NO: 475773 - DNA, 198 bp, Shigella flexneri; identical to SEQ ID NO: 475408

SEQ ID NO: 475774 - DNA, 366 bp, Shigella flexneri
atgattgatgtcttagggccggagaaacgcagacggcgtaccacacaggaaaagatcgctattgttcagcagagttttgaaccgggaatgacggtctcccttgttgcccggcaacatggtgtagcagccagccagttatttctctggcgcaagcaataccaggagggaagtcttactgctgtggccgcaggagaacaggtcgttcctgcctctgaacttgctgccgccatgaagcagattaaagaactccagcgcctgctcggcaagaaaacgatggaaaatgaactcctcaaagaagccgttgaatatggacgggcaaaaaagtggatagcgcacgcgcccttattgcccggggatggggagtaa

SEQ ID NO: 475775 - DNA, 906 bp, Shigella flexneri
gtggatagcgcacgcgcccttattgcccggggatggggagtaagcttagtcagccgttgtctccgggtgtcgcgtgcgcagttgcacgtcattctcagacgaaccgatgacgggaaagatggtcgccgcagccgtcactcagatgatacggatgtgcttctccgtatacaccatgttatcggagagctgcccacatatggttatcgtcgggtatgggcgctgcttcgcagacaggcagaacttgatggtatgcctgcgatcaatgccaaacgtgtttaccggctcatgcgccagaatgcgctgttgcttgagcgaaaacctgctgtaccgccatcgaaacgggcacatacaggcagagtggccgtgaaagaaagcaatcagcgatggtgctctgacgggttcgagttctgctgtgataacggagaaaaactgcgagtcacgttcgcgctggactgctgtgaccgtaaggcactgcactgggcggtcactaccggcggcttcaacagtgaaacagtacaggacgtcatgctgggagcggtggaacgccgcttcggcaacgatcttccgtcgtctccagtggagtggctgacggataatggttcatgctaccgggctaatgaaacacgccagttcgcccggatgttgggacttgaaccgaagaacacggcggtgcggagtccggagagtaacggaatagcagagagcttcgtgaaaacgataaagcgtgactacatcagtatcatgcccaaaccagacgggttaacggcagcaaagaaccttgcagaggcgttcgagcattataacgaatggcatccgcatagtgcgctgggttatcgctcgccacgggaatatctgcggcagcgggcttgtaatgggttaagtgataacagatgtctggaaatatag

SEQ ID NO: 475776 - DNA, 186 bp, Shigella flexneri; identical to SEQ ID NO: 462789

SEQ ID NO: 475777 - DNA, 585 bp, Shigella flexneri
gtggatagcgcacgcgcccttattgcccggggatggggagtaagcttagtcagccgttgtctccgggtgtcgcgtgcgcagttgcacgtcattctcagacgaaccgatgactggatggatggccgccgcagtcgtcacactgatgatacggatgtgcttctccgtatacaccatgttatcggagagctgcccacgtatggttatcgtcgggtatgggcgctgcttcgcagacaggcagaacttgatggtatgcctgcgatcaatgccaaacgtgtttaccggctcatgcgccagaatgcgctgttgcttgagcgaaaacctgctgtaccgccatcgaaacgggcacatacaggcagagtggccgtgaaagaaagcaatcagcgatggtgctctgacgggttcgagttctgctgtgataacggagagagactgcgtgtcacgttcgcgctggactgctgtgatcgtgaggcactgcactgggcggtgactaccggcggcttcaacagtgaaacagtacaggatgtcatgctgggagcggtggaacgccgcttcggcaacgatcttccgtcgtctccagtggagtag

SEQ ID NO: 475778 - DNA, 750 bp, Shigella flexneri; identical to SEQ ID NO: 475425

SEQ ID NO: 475779 - DNA, 234 bp, Shigella flexneri; identical to SEQ ID NO: 466988

SEQ ID NO: 475780 - DNA, 384 bp, Shigella flexneri
atgcgggagcagacggaatggcaccgcgtggtgctgttcggcaagctcgcggaagtggcaggtgaatatctgcgcaagggtgcgcaggtctacatcgaaggtcagcttcgcacccgtagctgggaagataacggtatcacccgttacgtcactgaaattcttgttaagaccacgggcaccgtgcagatgctgggacgtgcaccacagcagaacgctcaggcgcaaccgaagcctcagcagaatgggcagccacagagtgctgacgcgacgaaaaaaggtggcgcgaaaacgaaaggccgtggacgtaaggccgcgcagccagagcctcagccgcaaccgccggagggggaggattacgggttttcagacgacatcccgttctga

SEQ ID NO: 475781 - DNA, 519 bp, Shigella flexneri; identical to SEQ ID NO: 474592

SEQ ID NO: 475782 - DNA, 378 bp, Shigella flexneri; identical to SEQ ID NO: 474621

SEQ ID NO: 475783 - DNA, 741 bp, Shigella flexneri; identical to SEQ ID NO: 474595

SEQ ID NO: 475784 - DNA, 267 bp, Shigella flexneri; identical to SEQ ID NO: 462029

SEQ ID NO: 475785 - DNA, 858 bp, Shigella flexneri
gtgactgatcttcaacaaacttattaccgccaggtaaagaacccgaatccggtgttcacaccccgtgaaggtgcccggacgcttccgttctgcgggaaactgatggaaaaggcggtgggcttcacctcccgttttgatttcgccattcatgtggcacatgcccgttcgcttggtctgcgtcggcgcatgccaccggtactacgtcgccgggccattgatgcgctgctgcaggggctgtgtttccactatgacccgctggccaaccgcgtgcagtgctccatcaccacgctggccattgagtgcggactggcgacggagtctgctgccggaaaactctccatcacccgggccacccgggccctgacgttccttgcagagctgggactgattacctaccagacggaatatgacccgcttatcgggtgctacattccgaccgatatcacgttcacaccggctctgtttgctgcccttgatgtgtctgaggatgcagtggcagctgcgcgccgcagtcgtgttgaatgggaaaacagacagcgcaaaaagcaggggctggataccctgggtatggatgaactgatggcgaaagcctggcgttttgttcgtgagcgtttccgcagttaccagacagagcttaagtcccgtggaatgaagcgtgcccgtgcgcgtcgtgatgcggacaggcagcgtcaggatattgtcaccctggtgaaacggcagctgacgcgtgaaatctcggaaggacgcttcactgctaatggtgaggcggtaaaacgcgaagtggagcgtcgtgtgaaggagcgcatgattctgtcacgtaaccgtaattacagccggctggccacagcttccccctga

SEQ ID NO: 475786 - DNA, 546 bp, Shigella flexneri; identical to SEQ ID NO: 475459

SEQ ID NO: 475787 - DNA, 288 bp, Shigella flexneri; identical to SEQ ID NO: 474636

SEQ ID NO: 475788 - DNA, 471 bp, Shigella flexneri
atgcactgtggcacgtctcatggcggggcttcgtctatgtggcgttcatcattgatgtgtttgccggatacatcgtggggtgccatggaaacgacattcgtgctggatgcactggagcaggcgttatgggcccgtcgaccgtccggcacggtccatcacagtgataaaggttctcagtatgtatcgctggcctacacacagcggcttaaggaagccggattactggcatcaacaggaagtacaggcgactcgtatgacaacgcgatggcggagagcatcaatggtctttacaaagcggaggtaatacaccgtaagagctggaaaaaccgtgcagaagtggaactggccacactcacgtgggtggactggtataacaatcgacgattgctggaaaggctgggccatactcctccggcagaagcagaaaaagcttattatgcttccatcggaaacgatgatctggcagcctga

SEQ ID NO: 475789 - DNA, 237 bp, Shigella flexneri; identical to SEQ ID NO: 474596

SEQ ID NO: 475790 - DNA, 288 bp, Shigella flexneri; identical to SEQ ID NO: 474636

SEQ ID NO: 475791 - DNA, 351 bp, Shigella flexneri
atggtagtgtccgctattgccagtacacctcacctggtgtatatccgcactcgcgaaacatatggaacccggcggctccagacggagctggcagataacggaattatcgtcggtcgtgacagactggcacgtcttcgtaaggagctgaggctgcactgtaagcagaaacgcaagttcagggcgaccacaaactctgaccacaatctgccggttacgccgaatctgctgaatcagaactttacgcccacagcacctaatcaggtctgggtcgcagattcagttgtccaggccttccgaaatcaaccgactgaaggcgctggtcgcgaaactgcagcgtatgcagttcggtaa

SEQ ID NO: 475792 - DNA, 495 bp, Shigella flexneri; identical to SEQ ID NO: 474618

SEQ ID NO: 475793 - DNA, 189 bp, Shigella flexneri; identical to SEQ ID NO: 469030

SEQ ID NO: 475794 - DNA, 288 bp, Shigella flexneri; identical to SEQ ID NO: 474636

SEQ ID NO: 475795 - DNA, 546 bp, Shigella flexneri; identical to SEQ ID NO: 475459

SEQ ID NO: 475796 - DNA, 267 bp, Shigella flexneri; identical to SEQ ID NO: 474742

SEQ ID NO: 475797 - DNA, 225 bp, Shigella flexneri; identical to SEQ ID NO: 133446

SEQ ID NO: 475798 - DNA, 204 bp, Shigella flexneri; identical to SEQ ID NO: 475480

SEQ ID NO: 475799 - DNA, 645 bp, Shigella flexneri; identical to SEQ ID NO: 474660

SEQ ID NO: 475800 - DNA, 303 bp, Shigella flexneri; identical to SEQ ID NO: 473532

SEQ ID NO: 475801 - DNA, 633 bp, Shigella flexneri
atggcattaaatcagaaaaagaaagcaaatgtagtttcaaggccggtgattttgacacaagagaatattccggctatatttgataataacaggactttttatgtgtcattagttggtgagcgcaattcttcgttggagcatgttacgtatggaacattgataaatgttatacctcgcttttcatctcggggacaaattgagatgtctttaacgatagaggatggaacaggaaatagtcagtcaaattacaattataataatgaaaatacatctgtccttccagaagttggaaggaccaaaatcagtacaatagcgagagttccacaaggcaaaagtttgttgataggtggttatacgcatgaaacgaactctaacgaaataatatctattccttttctctcctctattcctgtaatcggtaatgtgttcaagtataaaacaagtaatatcagtaatattgtaagggtttttctgattcaaccccgtgagataaaggagtcaagttattataatactgcagaatataaaagcctcatatctgaaagagaaatacaaaagactacacaaataatcccatctgaaactactttgctggaagacgaaaaatcattggtttcatacttaaattactaa

SEQ ID NO: 475802 - DNA, 189 bp, Shigella flexneri; identical to SEQ ID NO: 469030

SEQ ID NO: 475803 - DNA, 645 bp, Shigella flexneri; identical to SEQ ID NO: 474660

SEQ ID NO: 475804 - DNA, 273 bp, Shigella flexneri; identical to SEQ ID NO: 474599

SEQ ID NO: 475805 - DNA, 771 bp, Shigella flexneri
atgaatgaaacgctgaatgcactgatttatcgccacgccagcaacctgttgctggcgcagggctggccggaagaaacggatgttgaccagcgtaacccgaagtatccgggctggatcagcatttacgtgcggctggatgcgccccggctggcgacgttacttatcaaccgtcacggcggcgtactgccgccgctcctggcctccgccattcacaaactgaccggaaccggagcggaacttgttctgtccggcagtcagtggcagtcgctgccggtacttccggcagacggaacgcaggtgtctttcccgtatgccggtgagtggctgaccgaagacgaaatcagggccgttcttgatgcggtacgcgatgcagtatgcagtgtcagttaccaggtggcagaagatgcgcggcgtatccgtgcggcgctgaccaccaccggtcagacgttgctgacccgccagacgcgccgctttcgcctggtggtgaaggaaagcgatcacccctgctggctcgatgaatacgacgaaaacctgcccgtggtgctcgatgccatcctgaaccggggcgctcgtttttcgtcggtggaaatgtatctggtcagtgagtgtgtggagcatatcctgtccagtgggctggcctgcgatgtgctgcgtataccggatgaaccgccccgccgctggtttgaccgtggtgttctgcgggaggtggtcctggaagcccggagtgaaatccgcagcatggcggatgcactggcaaaaatcaggggctga

SEQ ID NO: 475806 - DNA, 315 bp, Shigella flexneri; identical to SEQ ID NO: 474620

SEQ ID NO: 475807 - DNA, 378 bp, Shigella flexneri; identical to SEQ ID NO: 474621

SEQ ID NO: 475808 - DNA, 303 bp, Shigella flexneri; identical to SEQ ID NO: 473532

SEQ ID NO: 475809 - DNA, 447 bp, Shigella flexneri
gtggcgttcatcattgatgtgtttgccggatacatcgtggggtggcgggtctcatcgtccatggaaacgacattcgtgctggatgcactggagcaggcgttatgggcccgtcgaccgtccggcacggtccatcacagtgataaaggttctcagtatgtatcgctggcctacacacagcggcttaaggaagccggattactggcatcaacaggaagtacaggcgactcgtatgacaacgcgatggcggagagcatcaatggtctttacaaagcggaggtaatacaccgtaagagctggaaaaaccgtgcagaagtggaactggccacactcacgtgggtggactggtataacaatcgacgattgctggaaaggctgggccatactcctccggcagaagcagaaaaagcttattatgcttccatcggaaacgatgatctggcagcctga

SEQ ID NO: 475810 - DNA, 267 bp, Shigella flexneri; identical to SEQ ID NO: 474150

SEQ ID NO: 475811 - DNA, 267 bp, Shigella flexneri; identical to SEQ ID NO: 462029

SEQ ID NO: 475812 - DNA, 519 bp, Shigella flexneri; identical to SEQ ID NO: 474573

SEQ ID NO: 475813 - DNA, 243 bp, Shigella flexneri; identical to SEQ ID NO: 474685

SEQ ID NO: 475814 - DNA, 645 bp, Shigella flexneri; identical to SEQ ID NO: 474660

SEQ ID NO: 475815 - DNA, 219 bp, Shigella flexneri; identical to SEQ ID NO: 474644

SEQ ID NO: 475816 - DNA, 213 bp, Shigella flexneri; identical to SEQ ID NO: 474663

SEQ ID NO: 475817 - DNA, 267 bp, Shigella flexneri; identical to SEQ ID NO: 474706

SEQ ID NO: 475818 - DNA, 639 bp, Shigella flexneri
gtggctggagtgcttgaggggagattatctggcggtactgcagcggaattttgtaattctgcggtggttgcgttgcaggctgctggcctggatgtctgtcgtgagtatccggtgccagagcgtggtgacggttgcggagggcggattgatatcgtcgtgactgacaggaacggtgtccggtgtgggatcgagcttgaccgaaattctccgcgacagaaatcactgctcaaaatcggtgctgttgaaaccgggatatgtgtcttgcggcgcagtgatatcgcaaggcacaccgagcagggaattctggttatcggtggggctgttcgccagaaaaaatttgacccgttgtcagttgatctgcccgactggttgccagaaacactctggcatgagtgggtccagttcaggcaggcattgcgaaaaccgattcgaacggagctgggcgctaacggggcgatacgggaactggaaaaattccgtcagcagggttttacacctgagcaggtgattcgacacagcatcgccaatgaataccagggcctgttcgcgccgaaaggtgttcggcctgagacgttgctccgacaggttaacaccgtctcgttgccggacagtgcgatcccgccaggcttcagggggtaa

SEQ ID NO: 475819 - DNA, 267 bp, Shigella flexneri
gtgttcactgttaacggacaggtaattccgttaaattacggaaacttcgatgcccgctataaatatcgaacagagggggtacaggatgtacggtatggccatgaaatgtattacagccccggcagtaacaccgtttcgtggagattttgcgcaccttcgggacacgggctgtcagggatggcgatatcggataccggccgtaactcagcggataacgttgacggtgtgtattaccgaccactgcaaaaactgattaatggcacctag

SEQ ID NO: 475820 - DNA, 366 bp, Shigella flexneri; identical to SEQ ID NO: 474684

SEQ ID NO: 475821 - DNA, 303 bp, Shigella flexneri
atgagcagaaaaacccaacgttactctaaagagttcaaagccgaagctgtcagaacggttcttgaaaatcaactttcgatcagtgaaggcgcttcccgattatctcttcctgaaggcactttaggacaatgggttaccgccgccagaaaagggctcggtactcctggttcccgcacggtggctgaactggaatctgaaattctgcaactgcgtaaggcgttaaatgaagctcgccttgagcgcgatatattaaaaaaagcaacagcgtattttgcacaggagtcgctgaaaaatacgcgttaa

SEQ ID NO: 475822 - DNA, 402 bp, Shigella flexneri; identical to SEQ ID NO: 475507

SEQ ID NO: 475823 - DNA, 684 bp, Shigella flexneri; identical to SEQ ID NO: 475102

SEQ ID NO: 475824 - DNA, 222 bp, Shigella flexneri; identical to SEQ ID NO: 8360

SEQ ID NO: 475825 - DNA, 684 bp, Shigella flexneri
atgtcccgttttgtcctcggtaactgcatcgatgttatggcccgtatccctgataacgccattgatttcatcctcaccgacccgccgtacctcgtcggttttcgtgaccgccaggggcgtaccattgccggcgataaaaccgatgaatggctgcaaccggcctgtaatgagatgtaccgcgtactcaaaaaagacgcgttaatggtgagcttctatggctggaatcgcgtcgatcgttttatgtctgcctggaaaaatgcgggattcagcgttgttggtcacctggtcttcaccaaaaactacacatcgaaggccgcatatgtgggctatcgccacgaatgcgcctacatcctggcaaaaggccgtccacgtctgccacaaaacccgctgccggacgtgctgggctggaaatattcgggcaatcgccatcacccgacggaaaagcccgttaccagcctgcaaccgctgattgagagcttcacacatccgaacgcgattgtgctggacccgtttgcaggcagcggatcaacctgcgtggccgctcttcagtccggacgccggtatatcggtatcgagctgcttgaacagtatcaccgtgccggacagcaacgactgaccgccgtgcaacgggccatgcagcagggggccgcgaatgataactggtttgaaccggaggctgcgtaa

SEQ ID NO: 475826 - DNA, 684 bp, Shigella flexneri
atgtcccgttttgtcctcggtaactgcatcgatgttatggcccgtattcctgataacgccattgatttcatcctcaccgatccgccatatctcgtcggttttcgtgaccgtcaggggcgtaccattgctggtgataaaactgatgaatggctgcaaccggcctgtaatgaaatgtaccgcgtactcaaaaaagacgcgctgatggtgagcttctatggctggaaccgcgtcgatcgctttatgtctgcctggaaaaatgcgggattcagcgttgttggtcacctggtcttcaccaaaaactacacatcgaaggccgcatatgtgggctatcgccacgaatgcgcctacatcctggcaaaaggccgtccacgtctgccacaaaacccgctgccggacgtgttgggctggaaatattcgggcaaccgccatcacccgacggaaaagcccgttaccagcctgcaaccgctgattgagagcttcacacatccgaacgcgatagtgctggacccgtttgcaggcagcggttcaacctgcgtcgccgccctccagtccggacgccggtatatcggtatcgagctgcttgagcagtatcaccgtgccggacagcaacgactgaccgccgtgcaacgggccatgcagcagggggccgcgaatgataactggtttgaaccggaggctgcgtaa

SEQ ID NO: 475827 - DNA, 381 bp, Shigella flexneri; identical to SEQ ID NO: 472764

SEQ ID NO: 475828 - DNA, 282 bp, Shigella flexneri; identical to SEQ ID NO: 474702

SEQ ID NO: 475829 - DNA, 318 bp, Shigella flexneri
atgaacatggttgagaatatgctcgatcaggcattcaaaaagcttaatcctcacgagcatcctgttctgcactctgaccagggatggcagtatcgtatgagaagatatcaaaatatccttaaagaacatggtattaaacaaagcatgtccagaaaaggcaattgtctggataatgctgtggtggagtgtttctttggaaccttaaagtcggagtgtttttatcttgatgagtggattttcccctatatttccagacatctgttatcacttaacccattacaagcccgctgccgcagatattcccgtggcgagcgataa

SEQ ID NO: 475830 - DNA, 612 bp, Shigella flexneri
atgaattcccagacaacaaaagatattccctgcttccgttcttatttgcctgatgccctgcgtttaagatttgaagataaactgaccatccgggccatcgctcagcgtctgggtctcagtcattccacaatacatacgctttttcagcgatttcttgcatccggtatcgcatggccattgcccgattcagtttcattcgctcaacttgacgccatcctttatgccaacagaaagaaggaattaacagagcctcaaatcagagaaggctcatggcgaaaagaacggcgaaccagctatagccgtgaatttaaggtccgtctggctaagcaggcgttacagcctggggctgttgttgcccggatcgccagagaacacgatatcagggatttcagtgcccagtactcccaccggaacgtatatagtatccccacaatttttcattacgggatgttcagagcattcattaccggggtcatattgcgccctgtccggggggccggatgcacatgtctctggcgcaatgcccgggctttttattcgcacatcgtgaggaatgcaccgtggaaattaaaaaaatcattaatccccgttataccgaaagtggcgcagtag

SEQ ID NO: 475831 - DNA, 645 bp, Shigella flexneri; identical to SEQ ID NO: 474715

SEQ ID NO: 475832 - DNA, 684 bp, Shigella flexneri
atgtcccgttttgtcctcggtaactgcatcgatgttatggcccgtattcctgataacgccattgatttcatcctcaccgatccgccatatctcgtcggttttcgtgaccgtcaggggcgtaccattgctggtgataaaactgatgaatggctgcaaccggcctgtaatgaaatgtaccgcgtactcaaaaaagacgcgctgatggtgagcttctatggctggaaccgcgtcgatcgctttatgtctgcctggaaaaatgcgggattcagcgttgttggtcacctggtcttcaccaaaaactacacatcgaaggccgcatatgtgggctatcgccacgaatgcgcctacatcctggcaaaaggccgtccacgtctgccacaaaacccgctgccggacgtgctgggctggaaatattcgggcaatcgccatcacccgacggaaaagcccgttaccagcctgcaaccgctgattgagagcttcacacatccgaacgcgattgtgctggacccgtttgcaggcagcggatcaacctgcgtggccgctcttcagtccggacgccggtatatcggtatcgagctgcttgaacagtatcaccgtgccggacagcaacgactgaccgccgtgcaacgggccatgcagcagggggccgcgaatgataactggtttgaaccggaggctgcgtaa

SEQ ID NO: 475833 - DNA, 708 bp, Shigella flexneri; identical to SEQ ID NO: 474718

SEQ ID NO: 475834 - DNA, 288 bp, Shigella flexneri; identical to SEQ ID NO: 474636

SEQ ID NO: 475835 - DNA, 684 bp, Shigella flexneri; identical to SEQ ID NO: 475832

SEQ ID NO: 475836 - DNA, 267 bp, Shigella flexneri; identical to SEQ ID NO: 463627

SEQ ID NO: 475837 - DNA, 285 bp, Shigella flexneri; identical to SEQ ID NO: 474730

SEQ ID NO: 475838 - DNA, 261 bp, Shigella flexneri
atgaggcgcttcgcaggcgcatgtcgtttcgttttcaatcgtgctctggcacgtcagaatgagaatcatgaggccggtaataaatacatcccttacgggaaaatggcttcctggctggttgagtggaaaaatgccactgaaacgcaatggcttaaagattctccctcacagccattgcaacagtcactgaaagaccttgagcgggcttacaaaaacttcttccggaagcgggctgcttttccccgattcaaaaagcggtga

SEQ ID NO: 475839 - DNA, 267 bp, Shigella flexneri; identical to SEQ ID NO: 463627

SEQ ID NO: 475840 - DNA, 303 bp, Shigella flexneri; identical to SEQ ID NO: 474565

SEQ ID NO: 475841 - DNA, 219 bp, Shigella flexneri; identical to SEQ ID NO: 474644

SEQ ID NO: 475842 - DNA, 372 bp, Shigella flexneri
gtgctggatgcactggagcaggcgttatgggcccgtcgaccgtccggcacggtccatcacagtgataaaggttctcagtatgtatcgctggcctacacacagcggcttaaggaagccggattactggcatcaacaggaagtacaggcgactcgtatgacaacgcgatggcggagagcatcaatggtctttacaaagcggaggtaatacaccgtaagagctggaaaaaccgtgcagaagtggaactggccacactaacgtgggtggactggtataacaatcgacgattgctggaaaggctgggccacatccctccggcagaagcagaaaaagcttattatgcttccatcggaaacgatgatctggcagcctga

SEQ ID NO: 475843 - DNA, 180 bp, Shigella flexneri; identical to SEQ ID NO: 474761

SEQ ID NO: 475844 - DNA, 327 bp, Shigella flexneri; identical to SEQ ID NO: 471498

SEQ ID NO: 475845 - DNA, 267 bp, Shigella flexneri; identical to SEQ ID NO: 462029

SEQ ID NO: 475846 - DNA, 186 bp, Shigella flexneri; identical to SEQ ID NO: 462789

SEQ ID NO: 475847 - DNA, 192 bp, Shigella flexneri; identical to SEQ ID NO: 8281

SEQ ID NO: 475848 - DNA, 135 bp, Shigella flexneri
atgaagaaaggcgatgcggctgaacatgcagagttccatatgaaagacaaccgctgggtgcctggctggatgtgtgcaccacatccacagacagataccactgaacgcactgataacctggctgatgccgcctga

SEQ ID NO: 475849 - DNA, 123 bp, Shigella flexneri; identical to SEQ ID NO: 463327

SEQ ID NO: 475850 - DNA, 162 bp, Shigella flexneri
atggaagatttagcagatgttatttgccgagccttgggtatccctttaattgatatcgatgatcaagcaatcatgcttgatgatgatgtgctaatatatattgaaaaagaaggagattcaataaatttattatgccctttttgtgcattgcctcagacataa

SEQ ID NO: 475851 - DNA, 123 bp, Shigella flexneri; identical to SEQ ID NO: 463321

SEQ ID NO: 475852 - DNA, 1149 bp, Shigella flexneri
ttgagtgttaatgggctttctatcatacctgaaaatttctttactcttcttagcggtaattttaaagctgactggcgttgggatgtctctaaagagacgtttcctaaggataagtttgatagctatgttaaatctgtgttttctaaaatagacttttataaacaatgtggtgtgattaacccacaaaatgccaacacggcttattttggcgatacagatggaagagtaggcgctgtactttattcattgctcgtttcagggcatataggcatcagggaaaagggttggagtttattatgtgaattattaaaacacgaagacatggcttcatctgcatacatacataaaaataataaattgctctacaatttattaaatacgagagacatgatattgaatgagttgcatcaacatgtttttttaaaggacgatgcgataaccccttgtatcttccttggggatcatacaggcgatagatttagtactatttttggtgataaatatatccttactttgctaaattctatgcgaaatatggagggtaataaagatagccgtattaataaaaatgtcatcgttctggctggaaatcatgaaatcaattttaatggtaactatactgcacgactagaaaattataaactctctgccggtgatacgtataacttaattaaaacgctcgatgtttgtaattataactcagaaactaaagttttaaccagtcatcacggaataataagaaatgaagaaaatcaatgttattgtctcggtgctttgcaggttccatttaatcagatgaaagacccaattgatcctgaggaattagcaaatatatgtaataaaaaacataaacaacacatggatgatcatcttctccatctaattagaagcaatgctatagcacccacacctgtatatgaaaattattttaataacactactgctttcagaccaaaacctgaagatatcttcaaatgtggacagacgctcaaaaaaactaaacagaaatttggccattatggattaggggtagaccagcatcaaaaaattgataattataccatggggctaaattcttggaagatagcacctaacgaacgtggtgataaaaaaggtgtcccagggcttagttgttttcaacctcaataa

SEQ ID NO: 475853 - DNA, 210 bp, Shigella flexneri
atgacggatggctggccgctgtatgaatcacgcctgaagggaaagctgcacgttatcagcaagcgttacactcagcacattgagcgacataatctgaatctgagacaacatctggcaaggctgggacggaagtcactgtcgttctcaaaatcggtggagctgcatgacaaggtcatcgggcattatctgaacataaaacactatcagtaa

SEQ ID NO: 475854 - DNA, 204 bp, Shigella flexneri
atgtatctgcataacaaaaacaatatgcgccatttttgcattactaataagaaaaagcaaaaaacatcgatattcatttttgttcaatggattttctggcctatcgttattattgtgctactggttatcattttcatcttgccaggatcgcacgtaatcacgttattcggggactttatctgcgggatattacccttcaggtaa

SEQ ID NO: 475855 - DNA, 375 bp, Shigella flexneri
atgacaaaagagctgacaggtaaagccctgtttatggcgctcaggagccagcgcccacctgccgggctaatccaccactctgatcgaggttcacagtactgcgcatacgattaccgggtcatacaggagcagtttggtctgcaaacatcaatgtcgcgtaaaggtaactgttacgacaacgctccgatggaaagcttctggggaacgctgaaaaatgagagcctgagccactatcgttttaataaccgggatgaagccatctcagtaatacgggaatacattgagattttctacaatcgtcagcgtcgtcactctcgtctggggaatatctccccggcagccttcagggaaaaatatcatcagatggctgcttaa

SEQ ID NO: 475856 - DNA, 771 bp, Shigella flexneri
atgtctgatgacccgacattgcaatggggtgtgtatgatacggtgacgaaaacctttttctcgttaagcaaagaggcctcggcagcaacgttttctccgctgattcatttgaaggatttaaccgtacaaagaaatggctatttatatgcgacaatttattcgacaaaacgcccaattgcagccattgttgcgacttcatatcaacgtcttataacccatttttataatcatcttatttttgcgttgcccgccggtattttggggagtcttgttctgctattactctggctacgtattcgacaaaactatttatctcccaaacgtaaattgcaacgcgccctcgaaaaacatcaactttgtctttattaccagccaataatcgatatcaaaacagaaaaatgtatcggcgctgaagcgttgttacgttggcctggtgagcaggggcaaataatgaatccggcagagtttattccgctggcagaaaaggaggggatgatagaacagataactgattatgttattgataatgtcttccgcgatctgggcgcgtacctggcaacacatgccgatcgctatgtttctattaacctgtcggcctccgattttcatacgtcacggttgatagcgcgaatcaatcagaaaacagagcaatacgcggtgcgtccgcagcaaattaaatttgaagtgactgagcatgcatttcttgatgtcgaaaaaatgacgccgattaattctggctttccgccaggctggttacgaagtggcaattga

SEQ ID NO: 475857 - DNA, 318 bp, Shigella flexneri; identical to SEQ ID NO: 475568

SEQ ID NO: 475858 - DNA, 744 bp, Shigella flexneri; identical to SEQ ID NO: 463220

SEQ ID NO: 475859 - DNA, 375 bp, Shigella flexneri; identical to SEQ ID NO: 475109

SEQ ID NO: 475860 - DNA, 210 bp, Shigella flexneri; identical to SEQ ID NO: 9340

SEQ ID NO: 475861 - DNA, 1413 bp, Shigella flexneri; identical to SEQ ID NO: 473650

SEQ ID NO: 475862 - DNA, 1158 bp, Shigella flexneri; identical to SEQ ID NO: 473787

SEQ ID NO: 475863 - DNA, 153 bp, Shigella flexneri
atgctgacgaaatatgcccttgtggcagtcatagtgctgtgtttgacggtactgggatttacgcttctggccggagactcgctgtgtgagtttacggtgaaggaacgtaatattgagttcagggctgttctcgcttacgaaccgaagaagtag

SEQ ID NO: 475864 - DNA, 783 bp, Shigella flexneri
atggtcacttttgagacagttatggaaattaaaatcctgcacaagcagggaatgagtagccgggcgattgccagagaactggggctctcccgcaataccgttaaacgttatttgcaggcaaaatctgagccgccaaaatatacgccgcgacctgctgttgcttcactcctggatgaataccgggattatattcgtcaacgcatcgccgatgctcatccttacaaaatcccggcaacggtaatcgctcgcgagatcagagaccagggatatcgtggcggaatgaccattctcagggcattcattcgttctctctcggttcctcaggagcaggagcctgccgttcggttcgaaactgaacccggacgacagatgcaggttgactggggcactatgcgtaatggtcgctcaccgcttcacgtgttcgttgctgttcccggatacagccgaatgttgtacatcgaattcactgacaatatgcgttatgacacgctggagacctgccatcgtaatgcgttccgcttctttggtggtgtgccgcgcgaagtgttgtatgacaatatgaaaactgtggttctgcaacgtgacgcatatcagaccggtcagcaccggttccatccttcgctgtggcagttcggcaaggagatgggcttctctccccgactgtgtcgccccttcaggctgagggatccccacaaaattactgctaataaaccagcaccatatttcggtaggttctggacagatggtttagaactgtgctcagtactgttcgtcttaaaataa

SEQ ID NO: 475865 - DNA, 495 bp, Shigella flexneri; identical to SEQ ID NO: 474618

SEQ ID NO: 475866 - DNA, 1227 bp, Shigella flexneri
atgttttctcaagggaccagtttcaaatcactaaatctttctattgaagcgccatctggagcacggtcatcatttcggtcacttgagcatctcgataaggtgtccaggcactatatctctgagataatacaaaaagttcatcctctttcttcagacgaacgtcacttactttctattattattaattctaattttaacttcagacatcaaagtaactctaatctgtcaaataatattcttaatattaaatcctttgataaaattcagtctgaaaatatacaaacacataagaatacatactctgaggatattaaagaaatctctaaccacgattttgttttttttggggtcgaaatttccaatcatcaagaaaaactcccactaaataaaacacatcatactgtagattttggcgccaatgcgtatatcattgatcatgactctccatatggatatatgacattaaccgatcactttgataatgctattccacctgttttttaccatgagcaccaatcatttttcttagataactttaaagaggttgtggatgaagttagcaggtatgtgcatggtaatcaggggaaaactgatgttccaatatttaacactaaagatatgaggcttggaattgggttgcatcttattgattttataagaaagagtaaagatcaaggattcagagagttttgttataacaaaaatattgatcctgttagtctggatagaattataaactttgtgtttcagcttgagtatcatataccaagaatgctaagtacagataacttcaaaaaaataaaactcagagacatatctttggaggatgcgattaaagcatctaattatgaagagattaacaataaagtgactgataaaaaaatggctcatcaggcccttgcttattctttaggcaataaaaaagctgatatagcactttatttactatctaaatttaattttacaaaacaagatgtcgcagagatggagaaaatgaaaaacaatagatattgtaatctgtatgatgttgaatacttacttagtaaagatggtgccaactataaagtgctagaatattttatcaataatggattggttgatgtaaacaaaaaatttcaaaaagcaaatagtggggacactatgcttgacaatgcaatgaaaagcaaagattcaaaaatgattgatttttttattaaaaaatggagcggtatcaggcaaacgatttga

SEQ ID NO: 475867 - DNA, 372 bp, Shigella flexneri
atgcccggctcactcttgacctggcgtgataaaaacgggctgcagcgtaaagtcctcgacaaggaaaatctggcgtgggatgaagatttaacaaagcactgtctggatttttctctgctggaaaagaaagtgttctggcgtaaaggacctgcttgtaaacaggaagaattacccggactcgatccggagcagtttcaacccatcagtgatgctgtcgcccagcatcaggactcgctttataccatcatcgaaacagagtctggtgaccgtaagctggagatcgtgaaacttgatgatcccaatcttattatcaacaaacgtttcaacgccgcgaaacgccacggctatttacttacgcgtgccgaagggtag

SEQ ID NO: 475868 - DNA, 306 bp, Shigella flexneri
gtgtttgaatctgacggaccgctgatcttactggataaccgttctccggatgaacgcgaagcccatcttaatgaccatccctttttgcgcagatggtatgcccgcgataaccgctacatttacagctttgatggcgcgcagctctggcgataccgcaccgctgatccgaaacaagttcgcttaatctggaaggaacaacattcgggatatgtctatggcgtaaattacaaaacgggatatctggacggaaaaattactgatgacggcgaatttattcctgccccgcgcaatgaggcgacaaaatga

SEQ ID NO: 475869 - DNA, 501 bp, Shigella flexneri; identical to SEQ ID NO: 236350

SEQ ID NO: 475870 - DNA, 597 bp, Shigella flexneri; identical to SEQ ID NO: 17091

SEQ ID NO: 475871 - DNA, 720 bp, Shigella flexneri; identical to SEQ ID NO: 474534

SEQ ID NO: 475872 - DNA, 435 bp, Shigella flexneri; identical to SEQ ID NO: 236353

SEQ ID NO: 475873 - DNA, 1959 bp, Shigella flexneri; identical to SEQ ID NO: 236354

SEQ ID NO: 475874 - DNA, 234 bp, Shigella flexneri; identical to SEQ ID NO: 8563

SEQ ID NO: 475875 - DNA, 441 bp, Shigella flexneri; identical to SEQ ID NO: 30631

SEQ ID NO: 475876 - DNA, 1902 bp, Shigella flexneri; identical to SEQ ID NO: 263385

SEQ ID NO: 475877 - DNA, 357 bp, Shigella flexneri; identical to SEQ ID NO: 475671

SEQ ID NO: 475878 - DNA, 381 bp, Shigella flexneri
atgtttgccttccggtgtgctatgcaaatgttcgtagtcgaaggtgaaaggttcgtagtaatcatcaatctgctgcggcaccaccgggttggcgaagattttggttattacgcccatcttgctgcccagacgcggacggatcttgccattcacatcgcggacccagccgccttgccactcttcctgatcttcccagtttttcggataaccaatgcccggtttggtttcgacgttgttaaaccatgcgtactccatgccttcgcgtccggtccagacgttgttacaggtcaccgaacaggtatggcagccgatacatttatcgaggttaagcaccatgccgacttgcgaacgtattttcattttttcgcctcctgtacctga

SEQ ID NO: 475879 - DNA, 645 bp, Shigella flexneri; identical to SEQ ID NO: 474042

SEQ ID NO: 475880 - DNA, 210 bp, Shigella flexneri
atgacggatggctgtccgctgtatgaatcacgcctgaagggaaagctgcacgttatcagcaagcgttacactcagcgcattgagcgacataatctgaatctgagacaacatctggcaaggctggtacggaagtcactgtcgttctcaaaatcggtggagctgcatgacaaagtcatcgggcattatctgaacataaaacactatcagtaa

SEQ ID NO: 475881 - DNA, 945 bp, Shigella flexneri; identical to SEQ ID NO: 474087

SEQ ID NO: 475882 - DNA, 2085 bp, Shigella flexneri; identical to SEQ ID NO: 474088

SEQ ID NO: 475883 - DNA, 1179 bp, Shigella flexneri; identical to SEQ ID NO: 474543

SEQ ID NO: 475884 - DNA, 417 bp, Shigella flexneri
ttgtgctggaaagttcagggcaacgtcacgggtcatgtgctgatttctctggcggccatatgcctggcattattcactaccgcatttattatcatttcgcaactcacgcgcggcgttaatacgttttacaatacattgttccccattattggctatgcggggtcaattatcaccatgatatggggttgggcactgttagcaggtaatgatgtgatggcagacgagtttgttgccggccatgttatttttggcgttggtatgattgccgcatgtgtatcgacggtacaggcttattcttcattaatcggtaattgcctcattgccgttcccgttttactcaccctgctcggtttcatttggtctattacgctgttacatagtgccgacataactccgcattatgtcgccttgggttaa

SEQ ID NO: 475885 - DNA, 1248 bp, Shigella flexneri; identical to SEQ ID NO: 474213

SEQ ID NO: 475886 - DNA, 534 bp, Shigella flexneri; identical to SEQ ID NO: 475393

SEQ ID NO: 475887 - DNA, 339 bp, Shigella flexneri; identical to SEQ ID NO: 473924

SEQ ID NO: 475888 - DNA, 351 bp, Shigella flexneri
atgataacgctgccgaccggtaccaaaatctggatcatcgctggcatcacagatatgcgttgtggcttcaatggcctggcttcgaaggtgcagaacacgctgaaagatgacccgttctccgggcatatcttcgtcttccggggccgcagtggcaaaatggtgaaaatactgtgggccgatcgtgacgggttatgcctgttcaccaaacgtctggccggtgacccgggaagggaaagtgcacctgacgccagctcagttatccatgctactggaggggatcgcgtggcaacatcccaaacggacagaacggcctggcatccggatataacccgtgataaaacaagggaatga

SEQ ID NO: 475889 - DNA, 675 bp, Shigella flexneri; identical to SEQ ID NO: 473842

SEQ ID NO: 475890 - DNA, 189 bp, Shigella flexneri; identical to SEQ ID NO: 474354

SEQ ID NO: 475891 - DNA, 960 bp, Shigella flexneri; identical to SEQ ID NO: 474419

SEQ ID NO: 475892 - DNA, 273 bp, Shigella flexneri; identical to SEQ ID NO: 474417

SEQ ID NO: 475893 - DNA, 159 bp, Shigella flexneri; identical to SEQ ID NO: 474771

SEQ ID NO: 475894 - DNA, 378 bp, Shigella flexneri; identical to SEQ ID NO: 474621

SEQ ID NO: 475895 - DNA, 375 bp, Shigella flexneri
atgacaaaagagctgacaggtaaagccctgtttatggcgctcaggagccagcgcccacctgccgggctaatccaccactctgatcgaggttcacagtactgcgcatacgattaccgggtcatacaggagcagtctggtctgaaaacatcaatgtcgcgtaaaggtaactgttacgacaacgctccgatggaaagcttctggggaacgctgaaaaatgagagcctgagccactatcgttttaataaccgggatgaagccatctcagtaatacgggaatacattgagattttctacaatcgtcagcgtcgtcactctcgtctggggaatatctccccggcagccttcagggaaaaatatcatcagatggctgcttaa

SEQ ID NO: 475896 - DNA, 750 bp, Shigella flexneri; identical to SEQ ID NO: 475425

SEQ ID NO: 475897 - DNA, 327 bp, Shigella flexneri; identical to SEQ ID NO: 475432

SEQ ID NO: 475898 - DNA, 288 bp, Shigella flexneri; identical to SEQ ID NO: 474636

SEQ ID NO: 475899 - DNA, 690 bp, Shigella flexneri
atgaataaccagtatttacagtttgttcgtgagcagctcattatcgccaccgctgatttgagtggggcgacaaaaggtcagcttgaagcctggcaggagaatgccatgttcgatacagggcgttacaggcgtaaaaaaatccggtaccgcgatgaggtgaccggaaaaatgataacgcgggataatccaccaatcccgggaaaacaatcactggcgaagggggcgtcaattcctctggtcagtcaggttgcgttttcgacatcatcgtggcggcgggctgttctgtctcttgaagagcactataaagcctggttgttgtggtgttacagcggaagtatttgctgggagtatcagatcaccataacccactgggcgtggaatgaatttaatgctcaatccggtaccaggaaaattgcagagaaaacacaggaacgcctgaaaaaattaatctggctggcggcgcaggcggtaaaagcagaactttttggtggggaaggttatgaatatcaggagctggcattactggcgggagtaacaaccaaaaactggtccaaaacatttactggtcactgggttgtaatgaaacacatttttcaccgactggatagtgaggctttattgtttgtgatgagaacacgttcagaacaaaaagcggcattttcaaagcaaagtattgcaaaagtagattaa

SEQ ID NO: 475900 - DNA, 360 bp, Shigella flexneri; identical to SEQ ID NO: 474567

SEQ ID NO: 475901 - DNA, 138 bp, Shigella flexneri; identical to SEQ ID NO: 474566

SEQ ID NO: 475902 - DNA, 273 bp, Shigella flexneri; identical to SEQ ID NO: 474495

SEQ ID NO: 475903 - DNA, 726 bp, Shigella flexneri; identical to SEQ ID NO: 475625

SEQ ID NO: 475904 - DNA, 429 bp, Shigella flexneri; identical to SEQ ID NO: 474590

SEQ ID NO: 475905 - DNA, 675 bp, Shigella flexneri; identical to SEQ ID NO: 473842

SEQ ID NO: 475906 - DNA, 333 bp, Shigella flexneri; identical to SEQ ID NO: 474593

SEQ ID NO: 475907 - DNA, 957 bp, Shigella flexneri; identical to SEQ ID NO: 474468

SEQ ID NO: 475908 - DNA, 288 bp, Shigella flexneri; identical to SEQ ID NO: 474636

SEQ ID NO: 475909 - DNA, 288 bp, Shigella flexneri; identical to SEQ ID NO: 474636

SEQ ID NO: 475910 - DNA, 378 bp, Shigella flexneri
atgtctgtagtgatatcaggtgcgctgactgatggcgcaggtatctccatgtccggataccatattattctgaaatcccgggtaaacaccccggaagtggtgatgcacactgttgctgatgtgatgacaggaaacgatggtgaatactgtttccatgcgcggactggaaaatatggtgtgtatctgaaacaggactggcacaacgagtacaacgttggcgacattgctgtatatgaggactcaaagcccggtacgctgaatgactttctgattgctcctgatgagggcgacctgaaaccagatgtcgtcaaacgctttgaggaaatggtggcgcaggcgcagcagagcaggccaaaaatgacattgatgctgcgctga

SEQ ID NO: 475911 - DNA, 282 bp, Shigella flexneri; identical to SEQ ID NO: 474702

SEQ ID NO: 475912 - DNA, 288 bp, Shigella flexneri; identical to SEQ ID NO: 474636

SEQ ID NO: 475913 - DNA, 546 bp, Shigella flexneri; identical to SEQ ID NO: 475459

SEQ ID NO: 475914 - DNA, 303 bp, Shigella flexneri; identical to SEQ ID NO: 474752

SEQ ID NO: 475915 - DNA, 303 bp, Shigella flexneri; identical to SEQ ID NO: 474682

SEQ ID NO: 475916 - DNA, 303 bp, Shigella flexneri; identical to SEQ ID NO: 473532

SEQ ID NO: 475917 - DNA, 300 bp, Shigella flexneri; identical to SEQ ID NO: 84330

SEQ ID NO: 475918 - DNA, 315 bp, Shigella flexneri; identical to SEQ ID NO: 474620

SEQ ID NO: 475919 - DNA, 267 bp, Shigella flexneri; identical to SEQ ID NO: 462029

SEQ ID NO: 475920 - DNA, 327 bp, Shigella flexneri
atgactaaaaatactcgtttttcccccgaagtccgtcaacgggcagtccgtatggttctggaaagtcagggcgaatatgactcacaatgggcgacaatttgttccattgctccaaagattggctgtacgccggagactctgcgtgtctgggttcgccagcatgagcgggataccgggggcggtgatggagggctcgccaccgctgaacgtcagcgtctgaaagagctggagcgtgaaaatcgtgaactgcgccgcagtaacgatatccttcgccaggcttccgcttattttgcgaaggcggagttcgaccgcctctggaaaaaatga

SEQ ID NO: 475921 - DNA, 645 bp, Shigella flexneri; identical to SEQ ID NO: 474660

SEQ ID NO: 475922 - DNA, 189 bp, Shigella flexneri; identical to SEQ ID NO: 470416

SEQ ID NO: 475923 - DNA, 303 bp, Shigella flexneri; identical to SEQ ID NO: 473532

SEQ ID NO: 475924 - DNA, 327 bp, Shigella flexneri; identical to SEQ ID NO: 475530

SEQ ID NO: 475925 - DNA, 378 bp, Shigella flexneri; identical to SEQ ID NO: 475600

SEQ ID NO: 475926 - DNA, 180 bp, Shigella flexneri; identical to SEQ ID NO: 474761

SEQ ID NO: 475927 - DNA, 366 bp, Shigella flexneri; identical to SEQ ID NO: 474684

SEQ ID NO: 475928 - DNA, 192 bp, Shigella flexneri; identical to SEQ ID NO: 474676

SEQ ID NO: 475929 - DNA, 366 bp, Shigella flexneri
atgctggaagcggccagagaggccagacgtcaggaaattgaagcatggcgcacagaacaggaggcgaagccgttcacgtttgaatggaacggtcgtatctggaatgctggccccgactcactgggccgcctgtccccggtggtcatgctggcaaaatctgtcgcagcacaaacacatatggcgtggagcgatgccgataatcagcaggtgaaactgtcgatgccggaactggaagaactggcggcagcaatggtgcaggcgcaggtcgatcgcaacgatgagatttatcgccgtcagcgtgaaatgaaagaggagctgagcggtctggatgatttggcttcaattcgggcgtttgacgttgagtaa

SEQ ID NO: 475930 - DNA, 366 bp, Shigella flexneri; identical to SEQ ID NO: 474684

SEQ ID NO: 475931 - DNA, 327 bp, Shigella flexneri; identical to SEQ ID NO: 475515

SEQ ID NO: 475932 - DNA, 267 bp, Shigella flexneri; identical to SEQ ID NO: 474706

SEQ ID NO: 475933 - DNA, 249 bp, Shigella flexneri; identical to SEQ ID NO: 462412

SEQ ID NO: 475934 - DNA, 564 bp, Shigella flexneri
gtggcggacctgacgtatgttgctggcatcaaagatgtttatacgtgcgaaattgtcggctacgccatgggagagcgcatgacaaaagagctgacaggtaaagccctgtttatggcgctcaggagccagcgcccacctgccgggctaatccaccactctgatcgaggttcacagtactgcgcatacgattaccgggtcatacaggagcagtctggtctgaaaacatcaatgtcgcgtaaaggtaactgttacgacaacgctccgatggaaagcttctggggaatatctccccggcagccttcagggaaaaatatcatcagatggctgcttaaaaaaagaacaaatggtagtgtccgctattgtcagtacacctcatatggagatgggcacaaattaccattcaataaagttcgttgggtggcgctggttggaggagacaaagaatcatttgtccagatgggctgggaaaaaaatataagcgattatttaaaaaatatgtgtagttatcttggtattgaagatgccgatgtcactttcttgtgtaatacagtggtattcgggtaa

SEQ ID NO: 475935 - DNA, 492 bp, Shigella flexneri
gtgcatgtcgatgtcgataccggtgtcggcctggaatttatccagtgcatcgtgcagcggttgcgggaactcatagttaccggtgtaggtcacgccgaaagtcggcaccacgccgatggtattttcgtcgcaggcttcaatcatgcgtttcgggtccataaacaactgaccggggcgcatagggatctcacgcagctccacatcccagtagcgggcgaatttatgccagcagatttgcaccggaccgcacaccaggtttggtttatccgttggtttgcctgcagcttccatacgcttgcgccaacgccatttcatcgccatcccgccgagcatacaggcctcggaagaaccaatggtgttggtgccaacggcctgaccatttttcggcgcaggcgcatgccacagatcggcaaccatgtttacgcaacgcaggtcgatggctgcggattgcggatattcttctttgtcgatccagtttttgttaatggataa

SEQ ID NO: 475936 - DNA, 327 bp, Shigella flexneri; identical to SEQ ID NO: 466843

SEQ ID NO: 475937 - DNA, 474 bp, Shigella flexneri; identical to SEQ ID NO: 474721

SEQ ID NO: 475938 - DNA, 327 bp, Shigella flexneri; identical to SEQ ID NO: 473546

SEQ ID NO: 475939 - DNA, 480 bp, Shigella flexneri
gtgaatcactacttcactactgatgatggttacaggatcatctcggcacgttttggtgtcccccgaacccaggtcaggacatgggttgccctctatgaaaaacatggagaaaaaggcttaattcccaaacctaaaggtgttagtgctgatccagagttgcgtattaaggtcgtgaaagctgtgattgagcagcacatgtcccttaatcaggctgctgctcactttatgcttgctggtagtggttctgtagccaggtggctgaaggtttatgaagagcgcggagaagctggtttacgcgcgctcaagattggcaccaaaagaaacattgcaatatcagttgatccagaaaaagcggcatcagcattggagctgtcaaaagaccgacgcattgaggatcttgaaaggcaagttcgatttcttgaaacgcggcttgtgtatctaaaaaagctgaaagccttagctcatcccacgaaaaagtga

SEQ ID NO: 475940 - DNA, 375 bp, Shigella flexneri; identical to SEQ ID NO: 475895

SEQ ID NO: 475941 - DNA, 396 bp, Shigella flexneri; identical to SEQ ID NO: 464981

SEQ ID NO: 475942 - DNA, 375 bp, Shigella flexneri
atgacaaaagagctgacaggtaaagccctgtttatggcgctcaggagccagcgcccacctgccgggctaatccaccactctgatcgaggttcacagtactgcgcatacgattaccgggtcatacaggagcagtttggtctgaaaacatcaatgtcgcgtaaaggtaactgttacgacaacgctccgatggaaagcttctggggaacgctgaaaaatgagagcctgagccactatcgttttaataaccgggatgaagccatctcagtaatacgggaatacattgagattttctacaatcgtcagcgtcgtcactctcgtctggggaatatctccccggcagccttcagggaaaaatatcatcagatagctgcttaa

SEQ ID NO: 475943 - DNA, 285 bp, Shigella flexneri; identical to SEQ ID NO: 474730

SEQ ID NO: 475944 - DNA, 354 bp, Shigella flexneri; identical to SEQ ID NO: 466835

SEQ ID NO: 475945 - DNA, 231 bp, Shigella flexneri; identical to SEQ ID NO: 129443

SEQ ID NO: 475946 - DNA, 267 bp, Shigella flexneri; identical to SEQ ID NO: 462029

SEQ ID NO: 475947 - DNA, 312 bp, Shigella flexneri; identical to SEQ ID NO: 474748

SEQ ID NO: 475948 - DNA, 303 bp, Shigella flexneri; identical to SEQ ID NO: 474565

SEQ ID NO: 475949 - DNA, 294 bp, Shigella flexneri
gtgctacgtgtgggttataacttcgatatgggcgcgggtattatgttaaccaatacctacacctttcagcgagaagatgaactaaaacatggctataatgaaattgaaggttggtatcctttattcaaaccaaccgataaattaaccatccagcccggtggcttaattaatgataagagtatcagttcgggtggtgcagtgtatctggacgtcggtaatgactccaacttactgatagtgttttatgttcagataatgcccgatgaccttgtcatgcagctccaccgattttga

SEQ ID NO: 475950 - DNA, 327 bp, Shigella flexneri; identical to SEQ ID NO: 474733

SEQ ID NO: 475951 - DNA, 303 bp, Shigella flexneri; identical to SEQ ID NO: 473532

SEQ ID NO: 475952 - DNA, 225 bp, Shigella flexneri; identical to SEQ ID NO: 474756

SEQ ID NO: 475953 - DNA, 378 bp, Shigella flexneri
atgcagtcgttgtacgactggatacagatgcagaggaaaacgctgtcgaaacatgcggagatggcgaaggcgttcgactatatcctgaatcactggaatgcgctgaacgagttctgtcgtgacggctgggtggaaatagacaacaacatcggtgaaaacgcgttacgatcggtggcggttggaagaaaaaattatctctttttcggctcagacaagggaggagaaagtgcggcgatcatctacagtctgctggtcacctgcaaacagaacgaagtggagccggaggactggttgcgcgaagtgatcgagaagctcaatgactggccgtcgaaccaagtgcatgaactgctgccctggaacttctcgtctgtaaaataa

SEQ ID NO: 475954 - DNA, 396 bp, Shigella flexneri
atgttgttcggccagagttcagagaaaaagcgtcataagcttgaaaatcagatccgacaggcagaaaaacgactgtcggaactggaaaaccggctgaacacagccagaaatcttctggaagatgcatcgtcagtcacagattcacctgacaccagtcccccgtcagaaaacccgatcgccagtaagcctgaatccccgggacgaaaatcttcacgaaaaccgctgccggcagaacttccccgggagacacatcgccttctgcctgctgaaaccagttgcccggcctgtggaggtgttctgaaagaaatgggggaaacaatctcagagcaactggatatcattaatactgaaccgccccgggaatcctggagactaaacttcctgagaaagaggtaa

SEQ ID NO: 475955 - DNA, 219 bp, Shigella flexneri; identical to SEQ ID NO: 474644

SEQ ID NO: 475956 - DNA, 288 bp, Shigella flexneri; identical to SEQ ID NO: 474636

SEQ ID NO: 475957 - DNA, 303 bp, Shigella flexneri
atgagcagaaaaacccaacgttactctaaagagttcaaagccgaagctgtcagaacggttcttgaaaatcaactttcgatcagtgaaggcgcttcccgattatctcttcctgaaggcactttaggacaatgggttaccgccgccagaaaagggctcggtactcctggttcccgcacgctggctgaactggaatctgaaattctgcaactgcgtaaggcgttaaatgaagctcgccttgagcgagatatattaaaaaaagcaacagcgtattttgcacaggagtcgctgaaaaatacgcgttaa

SEQ ID NO: 475958 - DNA, 261 bp, Shigella flexneri; identical to SEQ ID NO: 475411

SEQ ID NO: 475959 - DNA, 267 bp, Shigella flexneri; identical to SEQ ID NO: 462029

SEQ ID NO: 475960 - DNA, 126 bp, Shigella flexneri; identical to SEQ ID NO: 469585

SEQ ID NO: 475961 - DNA, 156 bp, Shigella flexneri; identical to SEQ ID NO: 474739

SEQ ID NO: 475962 - DNA, 1812 bp, Shigella flexneri
atgctcagaaatatttcatcctgtttatttccacatatcagcacaattacatcccccaaccattatttgtccgaatgggatgattgggagaaacaggggttaccggaagaacagcgtactgaggcggtaagaagacttcgtgcatgtcttacctctaaggggcataaactggacctgcgagccttggagctttcctcgctacctgtactccctgcttgcattaaaaagcttgatgtgagctgtaataaattaaccatccttactgatttacctgaaaatattaaagaacttattgcaagagataatttcttaacacatatatctgcattaccacattatctaataactttggatgtgtccgaaaatcaattagagaatctgccgttattaccagacaccatcaaatcactaagcgcagagtataataggttatccacactgccttcattacccttgaatttaaaaaaacttgaggttaggaacaacgaactgcaaactcttccatctctgccttctaatcttaagatacttaaggttgcgcacaaccatcttactgaactgccccctttacctaggagactgcaacttctttttgcatatagcaatagattaagcaacttaccaaacatccaagaaaatattatcatgagaagatttttttattttgaaaacaaccaaataactacaatcccgacaaatctttttcgtttagatcctcatataactattgagattgcaaataaccccttatcagatcaaactctgctattcttaatacagcaaacttcggttccaaattttaacgggcctcagtttcgtatttccctgtcagaccaaaacagactgtttttacgccagatgttgccgcaaaatttacattcgcgccatatcagagtcatcactgaaggggggcagaactttcagatcccccctcttcccgaaactgtggcagcctggtttcctgaagcagatcgtcgggaggtttctacacaatggacttctttttccaccgaggagaattcccgggcattctccgcgttccttgaccgcctttccgataccgtctctgcacgcaatacctccggattccgtgaacaggtcgctgcatggctggaaaaactcagtgcctctgcggagcttcgacagcagtctttcgctgttgctgctgatgccactgagagctgtgaggaccgtgtcgcgctcacatggaacaatctccggaaaaccctcctggtccatcaggcatcagaaggccttttcgataatgataccggcgctctgctctccctgggcagggaaatgttccgcctcgaaattctggaggatattgcccgggataaagtcagaactctccattttgtggatgagatagaagtctacctggccttccagaccatgctcgcagagaaacttcagctctccactgccgtgaaggaaatgcgtttctatggcgtgtcgggagtgacagcaaatgacctccgcactgccgaagccatggtcagaagccgtgaagagaatgaatttacggactggttctccctctggggaccatggcatgctgtactgaagcgtacggaagctgaccgctgggcgcaggcagaagagcagaaatatgagatgctggagaatgagtaccctcagagggtggctgaccggctgaaagcatcaggtctgagcggtgatgcggatgcggagagggaagccggtgcacaggtgatgcgtgagactgaacagcagatttaccgtcagctgactgacgaggtactggccctgcgattgtctgaaaacggctcacaactgcaccattcataa

SEQ ID NO: 475963 - DNA, 2190 bp, Shigella flexneri; identical to SEQ ID NO: 472004

SEQ ID NO: 475964 - DNA, 483 bp, Shigella flexneri; identical to SEQ ID NO: 471681

SEQ ID NO: 475965 - DNA, 780 bp, Shigella flexneri
atgatggaactgcaacatcaacgactgatggcgctcgccgggcagttgcaactggaaagccttataagcgcagcgcctgcgctgtcacaacaggcagtagaccaggaatggagttatatggacttcctggagcatctgcttcatgaagaaaaactggcacgtcatcaacgtaaacaggcgatgtatacccgaatggcagccttcccggcggtgaaaacgttcgaagagtatgacttcacattcgccaccggagcaccgcagaagcaactccagtcgttacgctcactcagcttcatagaacgtaatgaaaatatcgtattactggggccatcaggtgtggggaaaacccatctggcaatagcgatgggctatgaagcagtccgtgcaggtatcaaggttcgcttcacaacagcagcagatctgttacttcagttatctacggcacaacgtcagggccgttataaaacgacgcttcagcgtggagtaatggccccccgcctgctcatcattgatgaaataggctatctgccgttcagtcaggaagaagcaaaactgttcttccaggtcatcgctaaacgttacgaaaagagcgcaatgatcctgacatccaatctgccgttcgggcagtgggatcaaacgttcgccggtgatgcagcactgacctcagcgatgctggaccgtatcttacaccactcacatgtcgttcaaatcaaaggagaaagctatcgactcagacagaaacgaaaggccggggttatagctgaagctaatcctgagtaa

SEQ ID NO: 475966 - DNA, 744 bp, Shigella flexneri; identical to SEQ ID NO: 463220

SEQ ID NO: 475967 - DNA, 393 bp, Shigella flexneri; identical to SEQ ID NO: 472257

SEQ ID NO: 475968 - DNA, 429 bp, Shigella flexneri
atgctgggggttatacaaaacctatgttgttgtcgtccggattcaccgcttgctgatagtaagcagcgtaaccagaagttaccgcaacaagactttgaggattttaagaacgacgttattaatgtcattaacaacaatgaagatatttattttcttagagagagtaatttactgaatgcgtttattcggacgtgcaaaaaaagagatgataacagttacggaaatatgatatttacgctttattttgataacgatatctatgggaacagaattatcaaagcatcgctgaacggcggagagttgcagttattaagcacagggtgtagcaatgataacattctccattttggtaatgactccaacttactgatagtgttttatgttcagataatgcccgatgaccttgtcatgcagctccaccgattttga

SEQ ID NO: 475969 - DNA, 981 bp, Shigella flexneri
gtgatctctgaatgcttctggacggcggcggcgaaacacgcggatattgttctgcctgcgactacctcttttgagcgtaatgatctcaccatgaccggtgattacagtaatcagcatctggtgccgatgaagcaagtggtgccgccacgctatgaagcgcgtaatgattttgatgtttttgccgagttgagtgaacgttgggagaagggcggctatgcgcggtttacggaaggaaaaagtcagctgcaatggctggaaacgttttataacgttgcccggcagcgcggggcaagccagcaggttgaattgccgccatttgctgagttctggcaagccaaccagttaattgagatgccggaaaacccggacagcgagcggtttattcgcttcgctgatttttgccgcgatccgctggcgcatccgttaaaaaccgccagcggcaagattgaaatcttctcacagcgtattgccgattacggttacccggattgccctgggcatccaatgtggctggagccggacgaatggcagggcaatgccgaaccagaacagttgcaggtactttctgcccatccggcgcaccgcctgcacagccagctgaattacagttctctgcgcgaattgtacgcggtagcaaaccgtgagcctgtcaccattcatcctgacgatgctcaggcgcgcggcataaccgaaggggatatggtgcgggtgtggaactcccgtgggcagatccttgccggagcggtcattagcgagggaattaaacctggcgtgatttgcattcacgaaggggcatggccggatctggatttaaccgctgacggtatttgtaaaaacggcgcagtgaacgtgctgaccaaagatctccccagctcgcggctggggaatggctgtgcgggtaatacgacgctggcatggctggaaaaatacaacggtccggaactgacacttacagcgtttgaaccaccggccagctcataa

SEQ ID NO: 475970 - DNA, 213 bp, Shigella flexneri
gtgaactatggtgagatcacccgccagttaattgcttccttacagaagaaatctaacttctcgctgcaactcagcagcgaagtccgcgccctaaagcgtaatgacgataacacctggaccgttaccgttgccgatctgaaaaacggcactgcacagaacatccgcgccaaatttgtctttatcggcgcgggcggtgcggcgctgaagctctga

SEQ ID NO: 475971 - DNA, 339 bp, Shigella flexneri; identical to SEQ ID NO: 470966

SEQ ID NO: 475972 - DNA, 1098 bp, Shigella flexneri; identical to SEQ ID NO: 473280

SEQ ID NO: 475973 - DNA, 2037 bp, Shigella flexneri; identical to SEQ ID NO: 473399

SEQ ID NO: 475974 - DNA, 1263 bp, Shigella flexneri
atggcactgactgacgcaaaaatccgggcagcaaagcctactgacaaggcttataaactcactgacggggctggcatgttcctgctggtacatcctaatggttcccgttactggcgtctccgttatcgtattctgggtaaggagaagactctggcacttggtgtgtatccagaagtttctctctccgaagctcgtacaaaacgggatgaggcccgaaaactgatttcagaggggattgacccttgcgaacagaaaagagttaaaaaagtagtccctgatttacagctctcttttgaacatattgcacgacgctggcatgccagtaataaacaatgggcacaatcacacagcgataaagtactcaaaagcctcgagacacacgttttcccctttatcggcaaccgggatatcacaacactcaataccccggacctgcttatccctgttcgtgctgcagaagcaaaacaaatttatgaaatcgctagtcgtctgcagcaaagaatatctgctgtaatgcgttacgccatacagtctggcatcatcagatataacccggctctggatatggctggtgcattgaccacggtaaaacgccagcatcgccccgctctgaatctttcacgcctgcctgaacttctgtcgcgtattgacggttataaaggccagcctgtcacccggcttgccgttatgctgaatttactggtttttattcgttccagtgaactcagatatgcccgctggtctgaaattgatattgacaatgccatgtggactattccagccgaacgcgaacctctgcctggcgtaaaattctcacaccggggctccaagatgcggacaccacatcttgtgccactcagtaaacaggctgtagccatactgacagaacttcagacatgggcaggtgaaaatggtctgatatttacgggtgcacatgacccgcgtaaaccaatcagtgaaaatactgtaaataaagccctgagggtgatggggtatgacacaacccaggaagtctgtggccatggattccgggcgatggcgtgcagtgcattgattgaatcaggtttgtggtcccgcgatgctgtggaacgtcagatgagccatcaggaacgtaacggtgtacgtgctgcttacattcataaagcagaacatctggaagaacggcgactgatgctacagtggtgggccgattttctggatgcaaacagagaaaaatttatcagtccatttgaatatgcaaagattaataacccattaaaataa

SEQ ID NO: 475975 - DNA, 648 bp, Shigella flexneri; identical to SEQ ID NO: 26229

SEQ ID NO: 475976 - DNA, 726 bp, Shigella flexneri; identical to SEQ ID NO: 463893

SEQ ID NO: 475977 - DNA, 1320 bp, Shigella flexneri; identical to SEQ ID NO: 463894

SEQ ID NO: 475978 - DNA, 753 bp, Shigella flexneri; identical to SEQ ID NO: 463895

SEQ ID NO: 475979 - DNA, 1785 bp, Shigella flexneri; identical to SEQ ID NO: 261932

SEQ ID NO: 475980 - DNA, 1131 bp, Shigella flexneri; identical to SEQ ID NO: 463897

SEQ ID NO: 475981 - DNA, 384 bp, Shigella flexneri; identical to SEQ ID NO: 463898

SEQ ID NO: 475982 - DNA, 1035 bp, Shigella flexneri; identical to SEQ ID NO: 463899

SEQ ID NO: 475983 - DNA, 213 bp, Shigella flexneri; identical to SEQ ID NO: 34064

SEQ ID NO: 475984 - DNA, 1749 bp, Shigella flexneri; identical to SEQ ID NO: 463928

SEQ ID NO: 475985 - DNA, 561 bp, Shigella flexneri; identical to SEQ ID NO: 34065

SEQ ID NO: 475986 - DNA, 639 bp, Shigella flexneri; identical to SEQ ID NO: 463930

SEQ ID NO: 475987 - DNA, 648 bp, Shigella flexneri
gtggccagatgcactgtggcacgtctcatggcggttatgggacttgccggtgttctccggggtaaaaaggtccgtacgaccatcagccggaaagccgttgccgcaggcgaccgcgtaaaccgtcagttcgtggcagaacgacctgaccagctgtgggtggctgattttacttacgtcagcacatggcggggcttcgtctatgtggcgttcatcattgatgtgtttgccggatacatcgtggggtggcgggtctcatcgtccatggaaacgacattcgtgctggatgcactggagcaggcgttatgggcccgtcgaccgtccggcacggtccatcacagtgataaaggttctcagtatgtatcgctggcctacacacagcggcttaaggaagccggattactggcatcaacaggaagtacaggcgactcgtatgacaacgcgatggcggagagcatcaatggtctttacaaagcggaggtaatacaccgtaagagctggaaaaaccgtgcagaagtggaactggccacactaacgtgggtggactggtataacaatcgacgattgcaggaaaggctgggccacatccctccggcagaagcagaaaaagcttattatgcttccatcggaaacgatgatctggcagcctga

SEQ ID NO: 475988 - DNA, 600 bp, Shigella flexneri
ttgaacgagttaatagcattagagtttaaagatgaatatggggcagtggtaattgatgtagatgctatgcaaagtaaaagcgctgagcgtttgtgtaatgaggattttaacggtagctattttaactctggtgtaatgtatattaatttacgggaatggttaaaacaaagactaacggaaaaattctttgatctattatcagatgagtcaattataaaaaaattaaagtacccggatcaagatattttaaacttaatgtttctacatcatgctaaaatattaccgagaaaatataattgtatttatactataaagtcagaatttgaagaaaaaaatagtgaatattacacccggtttattaatgatgacactgtcttcatacattatactggtataactaagccatggcatgattgggcgaactacgcctctgcagattattttcgtaatatttataatatatcaccatggagaaatataccttataaaaaagctgttaaaaaacatgagcacaaagaaaaatataaacacttgctttaccagaaaaaatttctcgatggtgtttttacagcaattaaatataatgttatgaaaggttaa

SEQ ID NO: 475989 - DNA, 918 bp, Shigella flexneri
atgaacagaagaagaaagctgttaataccgttgttattctgcagcgcgatgctcaccgcctgcgatgacaaatcggcggaaaacgccgccgccatgacgcctgaggtcggtgtcgtcacactctcccctggttcggtcaatgtgttgagcgaattgcccggtagaaccgttccttatgaagttgccgagatacgtccccaggtgggcggtattatcattaaacgcaactttatcgaaggcgataaagtgaaccagggcgattcgctgtatcagattgatcctgcacctttacaggccgagctaaactccgccaaaggctcgctggcgaaagcgctctctaccgccagcaatgcccgcatcacctttaaccgccaggcatcgttgctgaagaccaactacgttagccgtcaggattacgacaccgcgcgcacccagctgaatgaagcagaagccaatgtcaccgtcgccaaagcggctgttgaacaggcgacgatcaatctgcaatacgcgaatgtcacctcgccgattacgggcgtcagcgggaaatcgtcggtgaccgtcggcgcactcgttaccgctaatcaggcagattcgctggttaccgtacaacgtctggacccgatttatgtcgatctcacgcagtcggtgcaagatttcttacgcatgaaagaagaggtcgccagtgggcaaatcaaacaggttcagggcagtacgccagtacagctcaatctggaaaatggtaaacgttacagccagaccggcacgctgaaattctccgacccgacggttgatgaaaccacgggctccgtgacgttacgggcgattttccccaacccaaatggtgacttgctgcctggcatgtatgtcacggcattagtggatgaaggtagccgccagaatgtatttatgactaggtaa

SEQ ID NO: 475990 - DNA, 339 bp, Shigella flexneri; identical to SEQ ID NO: 473924

SEQ ID NO: 475991 - DNA, 531 bp, Shigella flexneri; identical to SEQ ID NO: 463907

SEQ ID NO: 475992 - DNA, 195 bp, Shigella flexneri; identical to SEQ ID NO: 463908

SEQ ID NO: 475993 - DNA, 192 bp, Shigella flexneri; identical to SEQ ID NO: 463909

SEQ ID NO: 475994 - DNA, 234 bp, Shigella flexneri; identical to SEQ ID NO: 463910

SEQ ID NO: 475995 - DNA, 624 bp, Shigella flexneri; identical to SEQ ID NO: 463911

SEQ ID NO: 475996 - DNA, 171 bp, Shigella flexneri; identical to SEQ ID NO: 463912

SEQ ID NO: 475997 - DNA, 414 bp, Shigella flexneri; identical to SEQ ID NO: 463913

SEQ ID NO: 475998 - DNA, 384 bp, Shigella flexneri; identical to SEQ ID NO: 463914

SEQ ID NO: 475999 - DNA, 600 bp, Shigella flexneri; identical to SEQ ID NO: 463915

SEQ ID NO: 476000 - DNA, 213 bp, Shigella flexneri
atggaagttaagaccaaagaagactggctgtatcagttccgtcgttgttcatcccgggagacactggaaaaagtgatttcccacacgcgttataagcttactccagcggagatggaagccttcaactctgcggtcgatcaccggctggcagaactgaccatgaacaaactttacgatcgtgttcccgcttcagtctggaaatatgttacctga

SEQ ID NO: 476001 - DNA, 792 bp, Shigella flexneri
atgacaacacgtataactttcaatatgactagtgatgagacgctgcgaattgtggatgagtactgtcatacccacaaactttcgcgctctaaggtaatcgacgcattactcagcgccacagcacctgtccttaacgatattaactgttattatcaacttgcaggcgaactgcagtcacgcttattaaatggagtgtatcaacgggatcttcctcgcaaacgcaatgtcgtcagtgcagagaagtattgtctggaaatctgggaaaacaaacttttcaccagaagagtcctggagtttgacagttcaaatggtgttctgtacgcgctgaaacataaaagacactatcgccgggataagatgattggaagggttgaaagtcggtatatcaaagacatttgcgaataccagatgcagctatccggggagaagacgaaatatgcctgttttatttatatcgaaagaacaatatacaatcacgataatccatcgggcgaaacacctgtaaaagtggctgttggtaatgcagtcatcctgctggcaaaagacgtgatatatgacgagtacttttttgatctgcggcagtcatttttcgtgagcgttaaagatctgatggcctctggcgcaaaaggtattccggagacacagaaatatccggacgtttattgctggatcccgcttttctccataaattccggcgtggtcattaccccggtctataaaattgatccccggaaacccgtaacggtaaaaaaaccggatcagatcactgttgtttgtaattacagagaataa

SEQ ID NO: 476002 - DNA, 207 bp, Shigella flexneri
atgaagaccccagtttcgctgatggatgaccagatggtcgacatggcgtttatcactcaactgaccggcttaaccgataagtggttttataagctcatcaaagatggtgcctttccggcccccatcaaactcggccgcagctcccgatggctgaaaagtgaagtggaagcctggttgcaggcgcgtattgcacaatcccgtccgtaa

SEQ ID NO: 476003 - DNA, 573 bp, Shigella flexneri
atgcaaaaacttgaaaaccggtgtgatctgctgctaattcagcatcagaaatggatggcaagtgtaacccggtttattgtcgctcatggaatgggctctccgcatcttcatggttatcaccgcctgaccctggcccacttttttctaccggaaaaaggcaccatcatctcagtggcaccacagggactctatcaggtcgtcaacccgggaacgccaccgttcattcctgccattcaggaagggttaatgaccagcattcagacccatgaaatcatgctgcttacgcattttaatctgggcggcgttttactcagtgagctacatcgtctgggcgaaagccggctggcaaacaggctgaacagcctgctccggcgtttcgacgatcgtgatctctaccacacgctaatatggctgtgctggtatgatctgatgtgtgcccactccatgcagccctggactgaagagttaaagcataaatcacatgcagagcttgaaaactgggctgtggcgcgcaaacgggaaaagcgcgagctggaactgatgattgacgagtacctgttatacgcctgttga

SEQ ID NO: 476004 - DNA, 762 bp, Shigella flexneri
gtgcgtggcgttgaacgcagctgcttcgaacgcggttatagtctcgtcctttgcaataccgaaggcgatgaacagcggatgaatcgcaatctggaaacgctgatgcaaaaacgcgttgatggcttactgttactgtgtaccgaaacgcatcagccttcgcgtgaaatcatgcaacgttatccgacagtgcctaccgtgatgatggactgggctccgttcgatggcgacagcgatcttattcaggataactcgttgctgggcggagacttagcaacgcaatatctgatcgataaaggtcatacccgtatcgcctgtattaccggtccgctggataaaactccggcgcgcctgcggttggaaggttatcgggcggcgatgaaacgtgcgggtctcaacattcctgatggctatgaagtcactggtgattttgaatttaacggcgggtttgacgccatgcgccaactgttatcacatccgctgcgtcctcaggccgtctttaccggaaatgacgctatggctgttggcgtttaccaggcgttatatcaggcagagttacaggttccgcaggatatcgcggtgattggctatgacgatatcgaactggcaagctttatgacgccaccattaaccactatccaccaaccgaaagatgaactgggggagctggcgattgatgtactcatccatcggataacccagccgacccttcagcaacaacgattacaacttactccgattctgatggaacgcggttcggcatag

SEQ ID NO: 476005 - DNA, 327 bp, Shigella flexneri
atgattaaaacaacgttactattttttgctactgcgctgtgtgaaattattggatgctttctgccctggttgtggttaaaacgaaacgccagtatctggctgttgcttccggcggggatttcactggcgctgtttgtctggttgttaacgttgcatcctgcggcgagtgggcgtgtttacgcggcttatggtggcgtttatgtctgcacggcattgatgtggctgcgcgttgtggatggcgtgaaactaagtctttatgactggacgggtgcgttgattgcgctttgcggaatgttgatcattgttgcgggctgggggcgcacgtag

SEQ ID NO: 476006 - DNA, 645 bp, Shigella flexneri
atgagtaaacttttggatcgctttcgctacttcaaacaaaagggcgaaacctttgccgatggtcacggacaggtgatgcatagcaaccgcgactgggaggacagctatcgccagcgttggcagttcgacaaaatcgtgcgttccacccacggcgttaactgtacaggctcctgtagctggaaaatctacgttaaaaatggtctggtgacctgggaaatccaacagaccgactacccgcgcactcgccctgacctgcccaatcatgaacctcgcggctgcccgcgtggcgcaagttactcctggtatctttacagcgctaaccgcctgaaatacccgctcattcgtaaacgactgattgaactgtggcgcgaagccctcaaacaacacagcgatccggtactggcgtgggcatcgattatgaacgatccgcaaaagtgcctgagctacaaacaagtgcgtgggcgcggcgggtttatccgctccaactggcaggaactaaaccagctgattgccgccgctaacgtctggaccatcaaaacctacggcccggatcgcgttgccggtttctcgccgatcccggcgatgtcgatggtttcttacgccgccggaacgcgttatctgtcgctgcttggcggcacctgttaa

SEQ ID NO: 476007 - DNA, 483 bp, Shigella flexneri
atgttgagaatgaccccacttgcatcagcaatcgtagcgttattgctcggcattgaagcttatgcagctgaagaaacctttgatacccattttatgataggtggaatgaaagaccagcaggttgcaaatattcgtcttgatgataatcaacccttaccggggcagtatgacatcgatatttatgtcaataagcaatggcgcgggaaatatgagattattgttaaagacaacccgcaagaaacatgtttatcaagagaagttatcaagcggttaggcattaatagcgataacttcgccagcggtaagcaatgtttaacatttgagcaacttgttcagggtgggagctatagctgggatatcggggtttttcgtctcgatttcagtgtcccgcaggcttgggtggaagaactggaaagtggctatgttccaccggaaaactgggagcggggtattaatgcgttggtaatgactccaacttactga

SEQ ID NO: 476008 - DNA, 675 bp, Shigella flexneri; identical to SEQ ID NO: 471685

SEQ ID NO: 476009 - DNA, 327 bp, Shigella flexneri; identical to SEQ ID NO: 475406

SEQ ID NO: 476010 - DNA, 564 bp, Shigella flexneri; identical to SEQ ID NO: 475711

SEQ ID NO: 476011 - DNA, 471 bp, Shigella flexneri
atgctggagccacaactgcagtacacctggcaggggctctccctggatgacggccaggataacgccggttatgtgaagttcgggcatggcagtgcacaacatgtgcgtgccggcttccgtctgggcagccacaacgatatgacctttggcgaaggcacctcatcccgtgacactctgcgcgacagtgcaaaacaccgtgtgagtgaactgccggtgaactggtgggtacagccttccgttatccgcactttcagctcccggggtgacatgagcatgggtacagccgccgccggcagtaacatgacgttctctccctcacagaatggcacttcactggatctgcaggccggactggaagcccgtgtccgggaaaatatcaccctgggcgttcaggccggttatgcccacagcgtcagcggcagcagcgctgaaggttataacagtcaggccacgctgaatgtgaccttctga

SEQ ID NO: 476012 - DNA, 378 bp, Shigella flexneri; identical to SEQ ID NO: 34147

SEQ ID NO: 476013 - DNA, 378 bp, Shigella flexneri
atgaatacattacccgacactcacgtacgggaggcatcgggctgcccgtctcccatcaccatctggcagacactgctcacccgactgctggaccagcactatggcctcacgctgaatgacacaccgttcgctgatgaacgtgtgattgagcagcatattgaggcagggatttcactgtgtgacgcggtgaactttctcgttgaaaaatacgcgctggtacgtaccgaccagccgggattcagcgcaggagccccgtcgcagttaatcaacagcattgatattctccgggcacgccgggcaaccggcctgatgacacgcgacaactacagaacggtaaataacattaccctgggtaaacatccgggggcgaaacaatga

SEQ ID NO: 476014 - DNA, 423 bp, Shigella flexneri; identical to SEQ ID NO: 235052

SEQ ID NO: 476015 - DNA, 843 bp, Shigella flexneri; identical to SEQ ID NO: 235051

SEQ ID NO: 476016 - DNA, 375 bp, Shigella flexneri; identical to SEQ ID NO: 472550

SEQ ID NO: 476017 - DNA, 198 bp, Shigella flexneri; identical to SEQ ID NO: 4462

SEQ ID NO: 476018 - DNA, 759 bp, Shigella flexneri
atgaaccttcagctcgccgttctgatttatggtggtgttaccggcagtaccacctgccttaacaacctgccagcccccctcgttaattaccgtgttcagcgcaagtccgtatttgtgcacatactggtttcctccctccagccgggtattatgtgcctctccgtgtaccgtctggtcaccgcctgtgtaaatgagagtgtcccgggatacccccgaagaccagataacctgtcggccattgttgttgatggtggtggattcagcagtccccccgaccatctgaccagtggacacattttcagactccggaccaccttctgcaccggtgttgacgatggttccggttgccagtccgccatgttttatggtctggtaaccatcctggttaataattgtaccggcagctttccctcccccgtgtacccactgctcacctctgttatccagcgtggtgttcaccgccagtccgttaaggctctgccctccgccatcacgaataaccgtatcactggcagttcctcctgcctgcacaatctgacgaccatttgcggtgacagtggtgtttctgcctgtgccacccgcttttatccattgcccgccggtgttttcgtcactgtccggccccagctcaagcccggtactgacagtcacgccatcagctgttccggatacaaactggttgtcatggtttaccagtgttccgccattcactgtttcacccgggtgcacaacgatgtcagcagacagcaccgggagtga

SEQ ID NO: 476019 - DNA, 273 bp, Shigella flexneri
atgaatctgtccggcatggctgaggtcatccaccaccgactgaaccgtggcgttatcggggatattccaggtggcaccggatgtcagggtgacattcgtggggtcaatggcaccgttcagcactgtgctgccggtcagcttcagggccgtgccgcgctgagcgatgacatccgtggtgacggtactgttgttcagcgtcagcgtgccttcattcaggttgacggctttctgggtgagtgtggtgttgctgacagtgagtgtgccacttcctga

SEQ ID NO: 476020 - DNA, 216 bp, Shigella flexneri; identical to SEQ ID NO: 474400

SEQ ID NO: 476021 - DNA, 210 bp, Shigella flexneri
atgaattcccagacaacaaaagatattccctgcttccgttcttatttgcctgatgccctgcgtttaagatttgaagataaactgaccatccgggccatcgctcagcgtctgggtctcagtcattccacaatacatacgctttttcagcgatttcttgcatccggtatcgcatggccattgcccgattcggtaatgactccaacttactga

SEQ ID NO: 476022 - DNA, 261 bp, Shigella flexneri; identical to SEQ ID NO: 475411

SEQ ID NO: 476023 - DNA, 267 bp, Shigella flexneri; identical to SEQ ID NO: 462029

SEQ ID NO: 476024 - DNA, 510 bp, Shigella flexneri
atggtcgggaagcgctgtcatgagcgcactgaccagcgtatccagttcccagccggtgcgggccgatacggccacaaccggatgtacaggccggaacagacggaataccgcctccgttttttcgcgaatgttctgtgcctgtgcgggagagggctgaataccggccatatcccattcatggcagggctccgttttgtcggcctgtgtcaccacaaacagcacctgctgatgtccgcactgcaggatgtgtcgccagaaatactcatccacagacagggcccggtcatcggctttaatcagccacagcaccaggtccagttcaggcagaatgtcacggtacagggcttcatactctgcatccctgtcccggctctcgcccaccccgggcaggttagtgataaccatgctgtgaccgtgaccactcagacggaagcgctgcacttcccgggtgccggcgtgaacatcactgaccggtgtgacctccccctgaaacagtgcattacagagtga

SEQ ID NO: 476025 - DNA, 372 bp, Shigella flexneri; identical to SEQ ID NO: 467509

SEQ ID NO: 476026 - DNA, 342 bp, Shigella flexneri
atgaacccactgctcgcctctgttaatcagcgtggtgttcaccgccagtccgttcaggctctgccccccgccgtcacgaataaccgtatcactggctgttcccccctccagcacgacctgacgaccatttgtggtgacagtggtatttccggctatcccgctattctgtatccattgcccaccggtgttttcttcactgtccggccccagttccagcccggtactgatggtcattccgttggccgtaccgaagacaatctggttgtcatgatttgtcagtgttccgccgttcacggtttctccagcctgtacaaccgtgtcagcagccagtgccgggactga

SEQ ID NO: 476027 - DNA, 393 bp, Shigella flexneri
atgtccctccagtacatccaggcgaccgccattttccagaacgacgttatctgccatgccatttcccacggagaaattccccagacggtttgtgccggtgacagttgccgcagtactggtaaccagtgcaccgcccgtgttctgggtgactgcagtggcttccccgccggcatgtaccctcagttcaccgttctgatttatggtggtgttaccgacagcgccacctgccttaacaacctgccagcccccctcgttaattactgtgttcagcgcaagtccgtccttgtgcacatactggtaaccgccattcagtgtggtattcagagcccttccgtgtaccgactggtcaccacctgcgtaaatgagagtgtcacgggctatcccggaagataa

SEQ ID NO: 476028 - DNA, 861 bp, Shigella flexneri
atggctgcgggagcctgccagaatccggtcatagtccattgcctgtgtcagcatggaggcatacagggggacttcagcacgataagcattttcactgcgcaggtaccagtcttcatcgctgtcacggttcagggtgtagttaaaggcgccggcctgaagcgggcgactcagggcaaatgcaccttcttctgtggtggcaccattctgtgcatccacaacccggataccctgtccggaggttgccaccccgaggttactgtttccgacatttgtaaacgcaagccaggttttgccggttgcctgaccaccattaatcaccagctggtcagaggcattgctgccatcaaggcgaacacgcatattgatggtgccaccctgaccggtgaggttactggtggtcagtttatggaacgttaccggggagtcgccttttgcaacagcacggctcagcgcggcttcctgtgtcgtctgattatcaaagtgaatctctcctgcgttaacaatatcgccggtactgaccacatcgccattcagtaccatgctggcacctttactgagctgtgttctgccactcagacttcccccggcagccagcgtcagtgttccacgatgtccgacagtggtgttgcctgcctgtcccccggcattaaccgtaaagctgccgccattttccagcagcaggccgctggcctgaccggatatgccatcaatactgaacctaccgctggcattggtcccctcaacagtggcaccactgtctgcaatcagggcaccaccggatgtcatggtgacacctgtcgccttaccaccggcagacactgccagggtaccgccgtcatccacccgtgttttctgcgctga

SEQ ID NO: 476029 - DNA, 726 bp, Shigella flexneri; identical to SEQ ID NO: 475625

SEQ ID NO: 476030 - DNA, 564 bp, Shigella flexneri
gtgaaggaagccgggtgcctggcccacgcccgccgaaaaacccatgacgaggatgtgcgccgtccgacagaaatgactcaggaagcgctcagacggatagcagagttatacgacatagaagcggagatacgtggcagtccggcagaggaacggcttgcagtcagaaaagccagaagcgtccagttgatgcaatcgttgtacgactggatacagttgcagaggaaaacgctgtcgaaacatgcggagatggcgaaggcgttcgactatatcctgaatcactggaatgcgctgaacgagttctgtcgtgacggctgggtggaaatagacaacaacatcggtgaaaacgcgttacgatcggtggcggttggaagaaaaaattatctctttttcggctcagacaagggaggagaaagtgcggcgatcatctacagtctgctggtcacctgcaaacagaacgaagtggagccggaggactggttgcgcgaagtgatcgagaagctcaatgactggccgtcgaaccaagtgcatgaactgctgccctggaacttctcgtctgtaaaataa

SEQ ID NO: 476031 - DNA, 303 bp, Shigella flexneri; identical to SEQ ID NO: 372516

SEQ ID NO: 476032 - DNA, 546 bp, Shigella flexneri
atgttgcatttaaaaaatattactgcgggtaatccgaaaacagcagaacaatatcagatgacaaaacgatattcggtcacctggcttttttcagtagacggaaaaaactggtatgaagagctgaagaatttcgccagcgacacaataaaaatagcttacaccggagatggtcgcgtggtgtgggtcggtaaggatgtgacaggcatcgagccacgcaatgccagcgttatcgaagttccggatattaccgctaaccgacggattaccgcgccgggttactggttttaccgcaatgatgaatttgtctttgactacagactcaaagcggaagatgagcgtgatgcccttctggctcaggtcagtgcccggacaggggaatgggaagaagacctgctgctggggttaatcagcgacgaagataaagaaaagctgaaagcctgtcgtatttacgcgaaatcgctgcaggcgatggatttcagcaccatcactgataaatcctcatacaacgccattgaatggcccgcctctccggaaggttcttcctga

SEQ ID NO: 476033 - DNA, 294 bp, Shigella flexneri; identical to SEQ ID NO: 474477

SEQ ID NO: 476034 - DNA, 633 bp, Shigella flexneri; identical to SEQ ID NO: 474478

SEQ ID NO: 476035 - DNA, 546 bp, Shigella flexneri; identical to SEQ ID NO: 475459

SEQ ID NO: 476036 - DNA, 372 bp, Shigella flexneri; identical to SEQ ID NO: 467509

SEQ ID NO: 476037 - DNA, 303 bp, Shigella flexneri; identical to SEQ ID NO: 473532

SEQ ID NO: 476038 - DNA, 849 bp, Shigella flexneri; identical to SEQ ID NO: 474529

SEQ ID NO: 476039 - DNA, 267 bp, Shigella flexneri; identical to SEQ ID NO: 462029

SEQ ID NO: 476040 - DNA, 690 bp, Shigella flexneri
atgaataaccagtatttacagtttgttcgtgagcagctcattatcgccaccgctgatttgagtggggcgacaaaaggtcagcttgaagcctggcaggagaatgccatgttcgatacagggcgttacaggcgtaaaaaaatccggtaccgcgatgaggtgaccggaaaaatgataacgcgggataatccaccaatcccgggaaaacaatcactggcgaagggggcgtcaattcctctggtcagtcaggttgcgttttcgacatcatcgtggcggcgggctgttctgtctcttgaagagcactataaagcctggttgttgtggtgttacagcggaagtatttgctgggagtatcagatcaccataacccactgggcgtgggatgaatttaatgctcaatccggtaccaggaaaattgcagagaaaacacaggaacgcctgaaaaaattaatctggctggcggcgcaggcggtaaaagcagaactttttggtggggaaggttatgaatatcaggagctggcattactggcgggagtaacaaccaaaaactggtccaaaacatttactggtcactgggttgtaatgaaacacatttttcaccgactggatagtgaggctttattgtttgtgatgagaacacgttcagaacaaaaagcggcattttcaaagcaaagtattgcaaaagtagattaa

SEQ ID NO: 476041 - DNA, 546 bp, Shigella flexneri; identical to SEQ ID NO: 475459

SEQ ID NO: 476042 - DNA, 288 bp, Shigella flexneri; identical to SEQ ID NO: 474636

SEQ ID NO: 476043 - DNA, 378 bp, Shigella flexneri; identical to SEQ ID NO: 475910

SEQ ID NO: 476044 - DNA, 153 bp, Shigella flexneri; identical to SEQ ID NO: 474734

SEQ ID NO: 476045 - DNA, 267 bp, Shigella flexneri; identical to SEQ ID NO: 474742

SEQ ID NO: 476046 - DNA, 927 bp, Shigella flexneri
gtgaaagaagcaccgattggtatcgaggtcatccccgcgcacgtcactgaatatctgaacaaggtactgactgaaaccgatcatgccaaccctgatccggaaatcgtggatattgcctgcggtcgctcctctgccccgatgccgcagcgtgtaacagaagaaggaaaacaggatgatgaagaaaaaccgcagccatctggcgcaatggcagatgaacaggcaacggctgaaacaatggaaccggatgcaactgaacatcatcagaacacgcagccgctggatgctcagtcacaggtaaattctgttgatgagaaatatcaggaactgcgggaagaactccatgaagcccggaaaaacattccgcccaaaaatcctgtcgatgcagacaaattactggctgcctctcgcggagaatttgttgaagggattagcgacccgaatgatccgaaatggattcccggtcatcatatctcctcaaatgaagtcaaaaaaacggaaaatgaagtgcgacagactgaagataaacagcaccagaacatcgaaccggaggagggaacaccctgcaatcagactggcgaggataactgccctgactgtggcgcggtgatgggagacgcaacttatcaggaaacttttgacgaaaaaaaaccagatgaagcacaggaagaagagccgaagaaaacggaaaaagctgatgatttgttaccggagaacgctggcagcgatcagcataatgatagcaataatgaaactggcgaagatgaactcaactggaaaaaacaggtgttgattgcggcggtttacggtttatgtgcgaatcctgcgtgcatagcctatgcgcctgcaatccctgacatcgcaatgatgattgccaacaagcttgaaaattttggagtgaccagtgatgagcgcttacccgatttttga

SEQ ID NO: 476047 - DNA, 303 bp, Shigella flexneri; identical to SEQ ID NO: 473532

SEQ ID NO: 476048 - DNA, 474 bp, Shigella flexneri
atgaaaacattgtctcagaacaccacctcttcggtctcagcaccggagactgacctgcaacaactggttgccagcctcgtccctgatgaacaacgtatcagtttctggccgcagcactttggcctcattccacagtgggtgaccctggagccccgtatcttcggctggatggaccgtctttgcgaaaactactgcggtggtatctggaatctgtacaccctgaacaacggcggggcatttatggcacccgaaccggatgacgatgatggcgaaaactgggtactgttcaatgccatgaacggtaaccgcgctgaaatgagcccggaagccgccggcattgccgcctgtctgatgacgtacagtcatcatgcctgtcgtacggagtgttatgccatgacggtccattattaccggctgcgggattacgccctgcagcatccggaatgcagcgccattatgcgcatcatcgattga

SEQ ID NO: 476049 - DNA, 141 bp, Shigella flexneri
atgctgaaaggcgggatttccggtcgcagtgccagaggaaaacgtatccacacccgtgccattcacagcatcgacaccgatattaagctcaaccgcgcattgtgggtgatggcggaaacgctgctggagagcctgcgctga

SEQ ID NO: 476050 - DNA, 219 bp, Shigella flexneri; identical to SEQ ID NO: 474644

SEQ ID NO: 476051 - DNA, 213 bp, Shigella flexneri; identical to SEQ ID NO: 474663

SEQ ID NO: 476052 - DNA, 189 bp, Shigella flexneri
atgatctggcagcctgagttcacagataaaacactctccaggaaacccggggcggttcagctggtcacctgcaaacagaacgaagtggagccggaggactggttgcgcgaagtgatcgagaagctcaatgactggccgtcgaaccaagtgcatgaactgctgccctggaacttctcgtctgtaaaataa

SEQ ID NO: 476053 - DNA, 327 bp, Shigella flexneri; identical to SEQ ID NO: 466843

SEQ ID NO: 476054 - DNA, 300 bp, Shigella flexneri; identical to SEQ ID NO: 475664

SEQ ID NO: 476055 - DNA, 543 bp, Shigella flexneri; identical to SEQ ID NO: 475669

SEQ ID NO: 476056 - DNA, 999 bp, Shigella flexneri
atggatagttatatcgcgattacactgtttggctgtttttttgtgctggtctttattggtgtgcccatttcgttctcaatcggtattgccactgtagcttcaatgcttttgatgtttccctgggatatcgcggcaatcactgtttcgcaacgactggctaatggactggataactttgccctgttggcaatcccctttttcatctttgccggaacactgatgaacagcggcggtattgcgatacgtttgattaacctcgcccaggtaatggttggccgcgttcctggttcgcttggtcatgtgaacgtcctggcgaatatgatgtttggttccatttctggttcagccgttgcggcagctgctgccgttggtggcacactgaatcccattcagaccaaagaaggttatgatccggcattttctaccgctgtaaacgtctcatcttgtattactggattactgataccgccctcaaacgtgttaattgtgttttccctgacagctggcggcgtttctgtagcatcgctgtttatggcgggatatttgccagggatcttaatgggtcttgcggtaatgatagtctgcggcattattgctaaacgccgtggctacccgctttcagaaagagcaacctttgctcaggcctgtaaagcgtttctggatgccttaccaagtttgcttctggtgttcattgtgatgggcggcatttttaccgcaactgaagcgtcagcaattgccgttgtctacacatttattctctcggtgctgatttaccgggaagtaaaatggcgccatttacccaaactgattctggagtcggttgttaccacttcgattgtattactgttgatcggtttttccgtgggcatgtcctgggcaatgactaatgctgatattccttatatgatcagcgacgcattgatggggatttctgataacccactgatcatattgctgctgattaatatcgtcttattggtaatgctgccaacttactga

SEQ ID NO: 476057 - DNA, 189 bp, Shigella flexneri; identical to SEQ ID NO: 470416

SEQ ID NO: 476058 - DNA, 369 bp, Shigella flexneri; identical to SEQ ID NO: 474687

SEQ ID NO: 476059 - DNA, 327 bp, Shigella flexneri; identical to SEQ ID NO: 471498

SEQ ID NO: 476060 - DNA, 570 bp, Shigella flexneri; identical to SEQ ID NO: 474696

SEQ ID NO: 476061 - DNA, 327 bp, Shigella flexneri; identical to SEQ ID NO: 475530

SEQ ID NO: 476062 - DNA, 654 bp, Shigella flexneri
atgggacgctggcttgctggcaggctcatgaaagagctggggctggtcagctgtcagcagccgactcaccggtataaacgtggtggtcatgaacatgttgctatccctaactaccttgaaaggcagttcgccgtgaccgagccaaatcaggtgtggtgcggtgatgtgacctatatctggacgggtaagcgctgggcgtacctcgccgttgttctcgacctgttcgcaagaaaaccagtgggctgggccatgtcgttctcgccggacagcaggctcaccatgaaagcgctggaaatggcatgggaaacccgtggtaagcccggcggggtgatgttccacagcgatcagggcagtcattatacgagcaggcagttccggcagttattgtggcgataccagatcagacagagtatgagccggcgcggaaactgctgggataacagcccaatggaacgcttcttcaggagtctgaagaacgaatggatgccggtggtgggttacgtaagcttcagcgaggcagctcacgccataacggactatatcgttggatattacagtgcactaagaccgcacgaatataacggtgggttacccccaaacgaatcggaaaatcgatactggaaaaactctaactcggtggccagtttttgttga

SEQ ID NO: 476063 - DNA, 645 bp, Shigella flexneri; identical to SEQ ID NO: 474715

SEQ ID NO: 476064 - DNA, 222 bp, Shigella flexneri
atgagcagaaaaacccaacgttactctaaagagttcaaagccgaagctgtcagaacggttcttgaaaatcaactttcgatcagtgaaggcgcttcccgattatcccttcctgaaggcactttaggacaatgggttaccgccgccagaaaagggctcggtactcctggttcccgcacggtggctgaactggaatctgaaattctgcaactgcgtaaggcgtga

SEQ ID NO: 476065 - DNA, 276 bp, Shigella flexneri; identical to SEQ ID NO: 16135

SEQ ID NO: 476066 - DNA, 378 bp, Shigella flexneri
atggacgaacagtggggctatgtcggggctaaatcgcgccagcgctggctgttttacgcgtatgacagtctccggaagacggttgttgcgcacgtattcggtgaacgcactatggcgacgctggggcgtcttatgagcctgctgtcaccctttgacgtggtgatatggatgacggatggctggccgctgtatgaatcccgcctgaagggaaagctgcacgtaatcagcaagcgatatacgcagcgaattgagcggcataacctgaatctgaggcagcacctggcacggctgggacggaagtcgctgtcgttctcaaaatcggtggagctgcatgacaaagtcatcgggcattatctgaacataaaacactatcaataa

SEQ ID NO: 476067 - DNA, 327 bp, Shigella flexneri; identical to SEQ ID NO: 462700

SEQ ID NO: 476068 - DNA, 372 bp, Shigella flexneri; identical to SEQ ID NO: 475693

SEQ ID NO: 476069 - DNA, 372 bp, Shigella flexneri; identical to SEQ ID NO: 471761

SEQ ID NO: 476070 - DNA, 222 bp, Shigella flexneri; identical to SEQ ID NO: 463060

SEQ ID NO: 476071 - DNA, 315 bp, Shigella flexneri
atgagagttgagcagaataatttcagggaaatgttctccgtttatctctccggcccgccgcagacgcagcatgtgttttgtgtatccccggcggcccgggtcgcgcacacgggtctggcaggcgaaaaagggctgaaaaccttcccgctgcaggctttccagtacggtgatagtggggatgtacgtatagttctggcttcgggacgtgtgtttatcttccccgaaaatccccggcacatagtgcatcagttcttcgtgtgtcagcggacggtcacggcgtatctggttcgcagcataaccaaaacgactggctag

SEQ ID NO: 476072 - DNA, 231 bp, Shigella flexneri; identical to SEQ ID NO: 129443

SEQ ID NO: 476073 - DNA, 267 bp, Shigella flexneri; identical to SEQ ID NO: 462029

SEQ ID NO: 476074 - DNA, 219 bp, Shigella flexneri
atgcctgtcccggtggcactgactgatacgccggagccgaccagaccagttacaaatcccttctggcgtaacaagcatgatgagcgccctgagggggctcccggaaacgccccacggtgcgagctgcatcttaaatcaggtgtggtaaaactgtttgaccctctcactccggaactgttacgggcgctaatccgcgaaatgaaagggggtatccgatga

SEQ ID NO: 476075 - DNA, 327 bp, Shigella flexneri; identical to SEQ ID NO: 473546

SEQ ID NO: 476076 - DNA, 303 bp, Shigella flexneri; identical to SEQ ID NO: 473532

SEQ ID NO: 476077 - DNA, 303 bp, Shigella flexneri; identical to SEQ ID NO: 473532

SEQ ID NO: 476078 - DNA, 267 bp, Shigella flexneri; identical to SEQ ID NO: 474150

SEQ ID NO: 476079 - DNA, 288 bp, Shigella flexneri; identical to SEQ ID NO: 474636

SEQ ID NO: 476080 - DNA, 273 bp, Shigella flexneri
gtggcgcacgtcttcggtgaacgcactctggccacactggagcgtcttctgagcctgctgtcggcctttgaggtcgtggtatggatgacggatggtggatttgcccctatatttccagacatctgttatcacttaacccattacaagcccgctgccgcagatattcccgtggcgagcgataacccagcgcactatgcggatgccattcgttataatgctcgaacgcctctgcaaggttctttgctgccgttaacccgtctggtttgggcatga

SEQ ID NO: 476081 - DNA, 267 bp, Shigella flexneri; identical to SEQ ID NO: 462029

SEQ ID NO: 476082 - DNA, 219 bp, Shigella flexneri; identical to SEQ ID NO: 474644

SEQ ID NO: 476083 - DNA, 189 bp, Shigella flexneri; identical to SEQ ID NO: 470416

SEQ ID NO: 476084 - DNA, 1980 bp, Shigella flexneri; identical to SEQ ID NO: 470939

SEQ ID NO: 476085 - DNA, 2004 bp, Shigella flexneri; identical to SEQ ID NO: 470942

SEQ ID NO: 476086 - DNA, 381 bp, Shigella flexneri
atggacccgtatgtggtggaagaagatccgggcgttaaatcggtgcgcaatatctacgactactataagcaacaccactatgaaaccattgtgatgggcgcgagcttccgtcgcaccgaacaaatcctcgccttaaccggctgcgatcgactgactatcgcaccgaatttgctgaaggagctgcaggaaaaagtttctccagtggtacgtaaattaatcccgccttctcagacgttcccacgcccagcacccatgagcgaagcggagttccgttgggagcacaatcaggatgcgatggcggtagaaaaactgtctgaaggcattcgtctgttcgctgttgatcaacgcaaactggaagatcttcttgccgccaaactataa

SEQ ID NO: 476087 - DNA, 207 bp, Shigella flexneri
atggaacgcttcttcaggagtctgaagaacgaatggatgccggtggtgggttacgtaagcttcagcgaggcagctcacgccataacggactatatcgttggatattacagtgcactaagaccgcacgaatataacggtgggttacccccaaacgaatcggaaaatcgatactggaaaaactctaactcggtggccagtttttgttga

SEQ ID NO: 476088 - DNA, 834 bp, Shigella flexneri
atggtctgccagatggaactgaccagccatctgctgacggctgcagccttcggcacgatgaagaacagcgaaaatgagcttgctgagcaacttatagaacaaaccggcgataacactctgacgttaatggataaaggttattactcactgggactgttaaatggctggagcctggcgggagaacaccgccactggatgatacctctcagaaagggagcgcaatatgaagagctcagaaaactgggtaaaggcgatcatctggtgaagctgaaaaccagcccgcaggcacgaaaaaagtggccgggactgggaaatgaagtgacagcccgcctgctgaccgtgacgcgcaaaggaaaagtctgccatctgctgacgtcgatgacggacgccatgcgcttccccggaggagaaatggcggatctgtacagtaatcgctgggaaatcgaactgggatacagggagataaaacagacgatgcaactgagcaggctgacgctgagaagtaaaaagccggagcttgtggagcaagagctgtggggtgtcttactggcttataatctggtgagatatcagatgattaaaatggcggaacatctgaaaggttactggccgaatcaactgagtttctcagaatcatgcggaatggtgatgagaatgctgatgacattgcagggcgcttcaccgggacgtataccggagctgatgcgcgatcttgcaagtatgggacaacttgtgaaattaccgacgagaaggggaagggccttcccgagagtggtaaaggagaggccctggaaataccccacagccccgaaaaagagccagtcagttgcttaa

SEQ ID NO: 476089 - DNA, 618 bp, Shigella flexneri; identical to SEQ ID NO: 471395

SEQ ID NO: 476090 - DNA, 189 bp, Shigella flexneri; identical to SEQ ID NO: 470416

SEQ ID NO: 476091 - DNA, 834 bp, Shigella flexneri
atggtctgccagatggaactgaccagccatctgctgacggctgcagccttcggcacgatgaagaacagcgaaaatgagcttgctgagcaacttatagaacaaaccggcgataacactctgacgttaatggataaaggttattactcactgggactgttaaatggctggagcctggcgggagaacaccgccactggatgatacctctcagaaagggagcgcaatatgaagagctcagaaaactgggtaaaggcgatcatctggtgaagctgaaaaccagcccgcaggcacgaaaaaagtggccgggactgggaaatgaagtgacagcccgcctgctgaccgtgacgcgcaaaggaaaagtctgccatctgctgacgtcgatgacggacgccatgcgcttccccggaggagaaatggcggatctgtacagtcatcgctgggaaatcgaactgggatacagggagataaaacagacgatgcaactgagcaggctgacgctgagaagtaaaaagccggagcttgtggagcaagagctgtggggtgtcttactggcttataatctggtgagatatcagatgattaaaatggcggaacatctgaaaggttactggccgaatcaactgagtttctcagaatcatgcggaatggtgatgagaatgctgatgacattgcagggcgcttcaccgggacgtataccggagctgatgcgcgatcttgcaagtatgggacaacttgtgaaattaccgacgagaaggggaagggccttcccgagagtggtaaaggagaggccctggaaataccccacagccccgaaaaagagccagtcagttgcttaa

SEQ ID NO: 476092 - DNA, 231 bp, Shigella flexneri
ttgagcgatggtcagctaaaagatggcggcaaaggtattaagatagatgaagttgtcaaaggaagcccagctgctcaggctggcttgcaaaaagacgatgtgatcattggcgtcaaccgcgatcgggtgaactcgattgctgaaatgcgtaaagtgctggcggcaaaaccggccatcatcgccctgcaaattgtacgcggcaatgaaagcatctatctgctgatgcgttaa

SEQ ID NO: 476093 - DNA, 738 bp, Shigella flexneri
atgacatcagacaatatcgctgaatatgttggtgagaataatcaatttactgagaagcctgtagctgaataccccccggtgatacaggataatacagtgaccactaaagactatctgtacagcaataatattgatactgaccttttagtggttatcggagggcttattgttatattgtttctcatgatgcttatcatgtactttattaattctctcaggcataaggaattaactgaaatactgacaaaaatatcttttcctgaaaaatccgggagcaatttgcttaaaccggaggcggtcagctgtaatttgttgtccctgtgtgtgctggcaccggtattctgtacacccagaaagctggctgaagtttccagggagatcatcgtggcgagtgcgcaggaaattgcatggacgccggggagcagtcgtattgatggtcatcagggcgaaaatattacctggtctctgtcatcgcagtctcctgccgataagtatgatctcatcaataaaacgtcccgtgtttctcctgacagtggccgtttttatgaaccggacacagttctggatcaccgtgaacgggtacgcctttttattcagatccagtttccgcacgggagtgactggtctgaagtattgcgcctgactgatattgttacagagaaggtctcttccggcagggctgcaggcgggtatcaccaccggcatacagggtacacctggtctgtttctgtgaattaa

SEQ ID NO: 476094 - DNA, 492 bp, Shigella flexneri
atgagatgtttagctcatattgctctggtaacggtgatacagtttatcgcctgctatctggttggttgggggaaggccgaaacagtttttatgctgttcttcatagtactatggcagggactgtttatatggttgttctctcaaatacgaaaaaaacggaatgtgtcggatgagtttaagtttagtaaaggtgtttggtatataacgatgccagtatcttccttactctctccgttattaagcctgatggtttttatcattggtacactatacgaattaaggcgagttagtggttgcataagcataaaaaaatggggtcaaaatcaactcaaaaaccaatatgatgggagtgaaaagttagacttcgggggcattgaacagcccccaacgacctactataacccttcaaccggataccctatgcatggaggctttgactcagcgggaaatacttttgggactcgttggcaggattattatgacaggcaataa

SEQ ID NO: 476095 - DNA, 1851 bp, Shigella flexneri
atgaaacgtattttacctctgatactggctctggttgccggcatggcacaggctgacagcaacagtgattaccgggccggttctgattttgcccgtcagattcaggggcagggtacaggcagtattcagggctttaagccacaggagagtatccccggctataacgcgaatccggacgagacaaaatattacggtggcgtgactgccggcggggatggcggcctgaaaaatgacggcaccacggaatgggcgaccggtgaaaccggaaaaaccatcacagagtccttcatgaacaagccgaaagacattctgtcaccggatgcaccgttcattcagaccggcagggatgtggtgaaccgggctgacagcattgtgggaaataccggacagcagtgcagtgcgcaggagataaaccgcagtgaattcacaaactatacctgtgagcgggacacgatggtggaggagtactgcacacggactgccagtatcaccggggactggaaatacacggatgaatatcgtgaagtgacgataccgcactcacagttccggttcagtatgaacgggctgaaactggtgttcagtgtcacggctccggtaaccggtacagtggaaagtgcatcattgtctgtatacgccgcttttttcttcctgaactcccgttataccttcatgaatacaacctttaatgtcggcctggcaaacgggcagtcggatacttaccccctgtccggggcgacaggtttgcaggtgacacaggggcaggttctgaccggtagtggctgtactgctaacggtaattgcctcccgcacgggaatggtgacaggaaagtctatgaatcgcttgtcagtggtgcttccacctttacgctgaaactcaggatgaaggtccgtgataaagaatgggttccccgggtggagtgggtggagagttgtccgtttaataaagcggatggcgtgctgacaggcactgagtgttcagagccgggtggtacgaaaaccggagtgatggaaggtaaaccttggaacatcacacaggcatgctgggcataccgggataaatatgtcactcagtccgcagataacggcacctgtcagaaatatgtcgataatccggcctgtacgctggcctcacgtcagtgcgcgttttattccgatgagggaacctgtctgcatgagtacgccacgtactcctgcgagtcaaaaacatcaggaaaagtgatggtctgtggtggtgatgtcttctgccttgacggtgaatgcgataaggcacagagcggaaaaagcagtgattttggtgaagcagtatcacagctggctgcgcttgccgccgcaggtaaggatgttgccgccctgaatggtgtggatgtcagggctttcacgggtgaggcgaaattctgccgtaaggccgcagccggcttcagtaactgctgtaaggatggcggctggggtcaggatgtggggctggcaaagtgcaacagtgaagaaaaggcgctgggaaaggcaaaggacaataaactgacggtgagtgtgggtgagttctgttcgaaaaaggtgctgggggtctgcctgcagaaaaagcgcagctactgccagtttgattcgaagctggcgcagatagtccagcagcaggggcgtaacgggcagttgcgtatcgggtttggcagtgcgaagcatcctgactgtcgggggattacggttgatgagctgcagaaaattcagttcgacagactggatttcactaacttctacgaagacctgatgaataaccagaaaatcccggacagtggcgttctgacgcagaaagtgaaagagcagattgctgaccagctgaaacaggcaggacagtaa

SEQ ID NO: 476096 - DNA, 348 bp, Shigella flexneri; identical to SEQ ID NO: 75646

SEQ ID NO: 476097 - DNA, 219 bp, Shigella flexneri; identical to SEQ ID NO: 26202

SEQ ID NO: 476098 - DNA, 474 bp, Shigella flexneri
atgcataaatcagaagctgaaaaaatagattctattctggatgaacatcaacagatatatcgcagacataaccgaatagataacatcctggcgttttttgcgtgtattgcatggattccctgtattattgctgcgttcggcgttgatggtatatatctgaaaatcctgtttgcggtccttgcctgctgtggtgcggtatgcttttttattttcttcttcaccctcctgccggaatcactcatggtcctcagccgtcagagcctgcttcagcttatgcgtctgactgaagacgtaccggatgcgagacaggaactgcttaaccgtctgctgtccggtaaaaaactgactggtcgggatgaaaaggatatccggcgtctctggcaggagaaagtggatgcaatgcaggagtctgccacccgtcagcgtgaacaggataccatccggaagtttactgaagggaataaatccgaatga

SEQ ID NO: 476099 - DNA, 414 bp, Shigella flexneri
atgcataaatcagaaaatgaaaaaatagattttattctggatgagcatgagcggatattcagaaaacaaggttctttgtgtatggcactgggtaagggctttttagttatagctattctttgtggtgttgccacattctgtgtttctggcctgtatctgaaatccctgtgcctgtccgttgcctgctgttgtggggtattcagtcgtatttttaattattacagcgtaccggaggaatcacgcatggtactcagtcgtcaggaattactccggcttatgcatctgacagaagacgtaccagatgtgagacaggaactgcttaaccgtttgttgtccggtaaaaaactgactggtcgggatgaacaggatatccggcgtctctggcaggaaaggcagaggaaacactatgcataa

SEQ ID NO: 476100 - DNA, 567 bp, Shigella flexneri
atggcgggtgatgcactgacattccgtgtggcgtttgtcgttcgctggctgctgtgggtcgtcaggtttgtggttatctggccgctggccacaatggccctgatggctctgtttgttttatggaaggacaacaccacgccggggaaattactggttaaggagattaacttcgtaagacaaacagcacctgccggacagttcccggtcagtgaatgctggttttcttcctctgattcttcaggcagatcagaaatacaggatatctgccattaccgcgcggctgatgctgcagattatgtcagggagactgaccggtcactgatgcaactggtcaccgcattctgggcaacgctggcacttatgtatatgtcgtttgcggcaggcaccgggaaatatccgatgtggcccggaaaaatgaaatgtgtccgggtgggaaccgcagatgaacatctgaaggaagtttatacggaagatacttctctgtcggaaaaaatcaggaaatgccatgtttatttccctgatgacagggcaaacagaaacaacggagataaaaatgaacatgcgtaa

SEQ ID NO: 476101 - DNA, 360 bp, Shigella flexneri
atgaatactgttttaagtgttcagggtgcttctgcgcccgtcaaaaagaagtcgtttttttctaaattcactcgtctgaatatgcttcgcctggttcgtgcagtgatcccggttgctgttctgatgatgttgttccctgagttagctatggctgctggtaaaggcgacctgatggctaaaggtaacgatacggttaaggcgaccttcggtaaggactccagtatcgttaaatgggttgttctggctgaggtgctggtcggtgcggtcatgtacatgatgaccaaaaacgtcaagttcctggtcggctttgccatcatctctgtatttattgctgtgggtatgagcgtcgttggcctctga

SEQ ID NO: 476102 - DNA, 228 bp, Shigella flexneri; identical to SEQ ID NO: 8295

SEQ ID NO: 476103 - DNA, 687 bp, Shigella flexneri; identical to SEQ ID NO: 5771

SEQ ID NO: 476104 - DNA, 384 bp, Shigella flexneri; identical to SEQ ID NO: 7741

SEQ ID NO: 476105 - DNA, 822 bp, Shigella flexneri
atgcgattagcttcccgttttggtcgatataattctattcgccgtgagcgcccgttaacggatgacgaattaatgcagtttgttccatctgtcttttctggtgataaacatgaatcccggagtgagcgttatacatatatcccaaccatcaatatcatcaataagttacgtgatgaaggtttccagccattctttgcctgtcagagtcgggttcgtgatttgggacgccgcgaatacagtaaacatatgttacgtcttcgcagggaagggcatattaacgggaaagaagttcctgaaattatcctgcttaattcacatgatggttcatccagttatcagatgatcccaggaatttttcgttttgtctgcacaaatggcctggtgtgcggaaataattttggcgaaatccgcgttccacataaaggtgatattgtcgggcaggttatcgagggagcgtatgaagtgctcggtgtctttgataaggtcactgataatatggaggcgatgaaagaaattcatcttaacagtgacgagcaacatttatttggcagagctgcactgatggtcaggtatgaagatgaaaataaaacgccagtgacgcctgaacaaataattactccccgtcgtcgggaagataaacagaacgatctctggacaacctgtcagcgggttcaggagaatatgataaaaggtggattgtcggggcgaagtgcctccggtaaaaataccaggacaagagccattacaggtattgatggtgatatccgaatcaacaaggcgttatgggtgattgccgaacagttcagaaagtggaagtcatga

SEQ ID NO: 476106 - DNA, 213 bp, Shigella flexneri; identical to SEQ ID NO: 5358

SEQ ID NO: 476107 - DNA, 528 bp, Shigella flexneri
atggcagttcgtggcattaacaaggtcattcttgtcggtcgtctgggaaaagatccggaagtccgttacatcccaaacgggggcgcagtggcaaacctgcaggtggccacgtcagaaagctggcgtgacaaacagacgggggagatgcgggagcagacagaatggcatcgcgtggtgctgttcggcaagctcgcggaagtggctggtgagtatctgcgcaagggcgcgcaggtctacatcgaaggtcagcttcgcacccgtagctgggaggataacggtatcacccgttacgtcaccgaaattcttgttaagaccacgggcaccatgcagatgctgggacgtgccgcaggtactcagactcagccggaagaggcgcaacagttcagcggtcagcctcagccggaatcacagccggaaccgaaaaaaggtggcgcgaaaacgaaaggccgtggacgtaaggccgcgcagcccgagcctcagcagccgtctgaacccgcgtatgacttcgatgacgacattccgttctaa

SEQ ID NO: 476108 - DNA, 1257 bp, Shigella flexneri
ttgctggcggcctcagaacagcttacagccaataagttagatgaatatgaattagtcggagaactagcgcttacaggcgctctgcgtggcgttcccggtgcaatctccagtgcaactgaagctattaagtcgggcagaaaaattatcgtcgcgaaagataacgaagatgaagtggggctaattaacggtgaaggatgcctgatagccgatcatctgcaggctgtctgtgcgtttctggaaggtaagaacactctcgaacgcccgaaaccaactgatgcagtatcccgggcgctacaacatgatctcagtgatgttgtcggtcaggagcaaggaaaacgaggactggaaattaccgccgctggtgggcacaaccttttactgattgggccgccgggaacaggtaaaacaatgctcgccagccgtattaatggcctgttgccagatttaagcaatgaagaggcactggagagcgctgcgatattaagtctggtaaatgctgaatcagtacaaaaacaatggcggcagcgcccgttccgctcacctcatcacagtgcgtcgttaactgcgatggtgggcggtggtgcaattccagggccaggtgaaatttcgttggcgcataacggcgtgctttttcttgatgagctacctgaatttgaacggcgtacactggatgccttgcgagagccgattgaatccgggcagatccatctttcacgcacacgagcaaaaataacctatccagcccgtttccagcttgttgcggcgatgaatcccagccctaccggacattatcagggaaaccataaccgctgcacgccagaacagacattacgttatctcaaccggctctcggggccctttctcgaccgcttcgatctctcactggagatcccattaccaccccccggcattttgagtaaaacggtagtgccgggagaaagcagcgccaccgttaaacaacgcgtaatggccgccagagagcgccaatttaagcggcagaataaactgaatgcctggctggatagtccggaaatacgccaattctgcaaacttgagagcgaagatgcgatgtggttggaagaaacgctgatccatctggggttatcgattcgtgcctggcagcggttactgaaagttgcacgaaccattgctgatattgatcagtctgacattatcacacgtcagcatttgcaggaggcagttagctatcgtgcgattgaccgtttgctcatccatctgcaaaaactactgacataa

SEQ ID NO: 476109 - DNA, 1086 bp, Shigella flexneri; identical to SEQ ID NO: 471896

SEQ ID NO: 476110 - DNA, 462 bp, Shigella flexneri
gtgagtaataaaattctcaccaaccagaccaacctgacctcgacgttctataccggttctatcggtcatgatgtcagtaccggcgtggaatttacccgtgaaacgcagactaactatggcgttaatccggtgacgttaccggcggtaaatatttatcatcctgacagcagaattcatcccggcggcctgacgcgcaacggcgcaaacgccaatggtcagacggataccttcgcaatttacgccttcgatacgctgcaaatcacccgtgattttgagctgaacggcgggatccgtctggataattatcatactgaatatgacagtgccaccgcctgcggcggcagcggacgcggtgccatcacctgcccagctggtgtggcaaaaggttctccagtcaccaccgtcgacaccgccaagtcgggcaatctggtgaactggaaagccgggcgctgtaccacctga

SEQ ID NO: 476111 - DNA, 897 bp, Shigella flexneri; identical to SEQ ID NO: 471964

SEQ ID NO: 476112 - DNA, 435 bp, Shigella flexneri
atgtggcgttcatcattgatgtgtttgccggatacatcgtggggtgccatggaaacgacattcgtgctggatgcactggagcaggcgttatgggcccgtcgaccgtccggcacggtccatcacagtgataaaggttctcagtatgtatcgctggcctacacacagcggcttaaggaagccggattactggcatcaacaggaagtacaggcgactcgtatgacaacgcgatggcggagagcatcaatggtctttacaaagcggaggtaatacaccgtaagagctggaaaaaccgtgcagaagtggaactggccacactaacgtgggtggactggtataacaatcgacgattgctggaaaggctgggccacatccctccggcagaagcagaaaaagcttattatgcttccatcggaaacgatgatctggcagcctga

SEQ ID NO: 476113 - DNA, 2496 bp, Shigella flexneri; identical to SEQ ID NO: 471596

SEQ ID NO: 476114 - DNA, 309 bp, Shigella flexneri
atgctggtgttaagcgataaatcgctgattgcgccgccaaaacttaccgcgtggattgaaaccgtggcggcagaaattggcgttccgttgcaggcggatatgttcagtaacggcggcacggacggtggagcggtgcacttaaccggtactggcgtacccacattggtaatggggcctgccacccgccacggacattgcgcggcatcgattgccgattgccgcgacattttgcagatggagcaacttttatctgcccttattcaacgtcttacgcgtgagacggttgttcaactgacggatttcagatga

SEQ ID NO: 476115 - DNA, 834 bp, Shigella flexneri
atggtctgccagatggaactgaccagccatctgctgacggctgcagccttcggcacgatgaagaacagcgaaaatgagcttgctgagcaacttataggacaaaccggcgataacactctgacgttaatggataaaggttattactcactgggactgttaaatggctggagcctggcgggagaacaccgccactggatgatacctctcagaaagggagcgcaatatgaagagctcagaaaactgggtaaaggcgatcatctggtgaagctgaaaaccagcccgcaggcacgaaaaaagtggccgggactgggaaatgaagtgacagcccgcctgctgaccgtgacgcgcaaaggaaaagtctgccatctgctgacgtcgatgacggacgccatgcgcttccccggaggagaaatggcggatctgtacagtaatcgctgggaaatcgaactgggatacagggagataaaacagacgatgcaactgagcaggctgacgctgagaagtaaaaagccggagcttgtggagcaagagctgtggggtgtcttactggcttataatctggtgagatatcagatgattaaaatggcggaacatctgaaaggttactggccgaatcaactgagtttctcagaatcatgcggaatggtgatgagaatgctgatgacattgcagggcgcttcaccgggacgtataccggagctgatgcgcgatcttgcaagtatgggacaacttgtgaaattaccgacgagaaggggaagggccttcccgagagtggtaaaggagaggccctggaaataccccacagccccgaaaaagagccagtcagttgcttaa

SEQ ID NO: 476116 - DNA, 216 bp, Shigella flexneri; identical to SEQ ID NO: 5123

SEQ ID NO: 476117 - DNA, 873 bp, Shigella flexneri
atgaatccgtctgatgccattgaggcaattgaaaaaccgctctcctccctgccttactcactttcccgtcacatcctggaacatctgcgcaaactcaccagtcacgaacccgtgattggcattatgggtaaaagcggggccggtaaatcctcactctgtaatgcactgtttcagggggaggtcaccccggtcagtgatgttcacgccggcacccgggaagtgcagcgtttccgtctgagtggccatggtcacagcatggttatcactgacctgcccggggtgggcgagagccgggacagagatgcagagtatgaagccctgtaccgtgacattctgcctgaacttgacctggtactgtggctgattaaagccgatgaccgtgccctgtctgtggatgagtatttctggcgacacatcctgcaccggggacatcagcaggtgctgtttgtggtgacgcaggccgacaaaacggagccctgccatgaatgggatatggccggtattcagccttctcccgcacaggcacagaatattcgcgaaaaaacggaggcggtattccgtctgttccggcccgtacatccggttgttgccgtatcggcccgcaccggctgggaactggatacgctggtcagtgcgctaatgacagcacttcccgaccatgccgccagtcccctgatgacccgcctgcaggacgggctgcgcacggaatctgtccggggtcaggcccgtgaacagtttaccggtgcggtggaccggatatttgacacggcggagagcgtctgtgttgcctctgttgcccgtaaggttctgcgcgctgttcgtgacaccgtggtctctgttgcccgcgcggtatggaactggattttcttctga

SEQ ID NO: 476118 - DNA, 918 bp, Shigella flexneri; identical to SEQ ID NO: 22868

SEQ ID NO: 476119 - DNA, 129 bp, Shigella flexneri; identical to SEQ ID NO: 463439

SEQ ID NO: 476120 - DNA, 603 bp, Shigella flexneri; identical to SEQ ID NO: 7227

SEQ ID NO: 476121 - DNA, 267 bp, Shigella flexneri; identical to SEQ ID NO: 463441

SEQ ID NO: 476122 - DNA, 177 bp, Shigella flexneri; identical to SEQ ID NO: 463442

SEQ ID NO: 476123 - DNA, 216 bp, Shigella flexneri; identical to SEQ ID NO: 5123

SEQ ID NO: 476124 - DNA, 393 bp, Shigella flexneri; identical to SEQ ID NO: 472257

SEQ ID NO: 476125 - DNA, 1314 bp, Shigella flexneri
atggctgaaagaataaggtatgtattccttgcaattttttgtgcattactgtgcaaggagtcaattgacatatggatgatgaataatggcgacttcgatagggccataacacctttcatgaatgggatcagacagttctcacatgatggcacattactttataccctgaaggaaaatttcagttcaattgtgaactatgagtataaaagctcatttagttatattctttatttatacgcttatgttatatcgatattcacacacacatttgatcttaggttatggtcatctctttccaaaatcgtgtatatttgtgcgttatataaactatttgtagaaataaacaataaaaaatattcttatcttttatttccggtatcagcattattgctatttactccttccatactttcacaattcacagcattttatcaggagcaaatagtaatcactttacttccggtaattacttatataattcttaaaaaagaaatatcaaggtttgataaagtattactagttgcatgcgcagcgctaatcgccacatcaaaatctcagttcttctatattcccattttaatttctttaatttcaataatatttattgacataagagataaaaaatttcacttagctatggtaattgcgacgataattgcattgtcattttcatttttctcgccaagcgcaactaaatataacagctatcactccctttatttcgggactttgctatacaataaaagcaatggaaaagaaaatccatcgtgggccgtggacgaatgcattggtgttgatgcatggggaaataaatttgatttggataagggagctgttaccacaaaagatgctggagcctgcttcgcaaaaaataaagaaaggggattgaaggattctttgcttttgatgctaaagcaaccttccatgttcctccttcttccttttgattctggagttcgaacccaattaactgaagattacttccatgtcttcaaggaaaataagctaataataagtaagagtgtttttttgaatgaagttcaaaaaataaaagactctgctctatcaactgtgaggattcctgttgcatttatagccatgatagcatcactgatttttatccgaaaaaaatattctgttgcaatctttacattatctgcttttagcatctctcagttttatattagcttcattggcgaaggatatagagatttagacaagcatctttttgcaatgaacttttcatttgacctaatgatatttatagtactatcaattatattggataaggtagcatcaggaatttataagtaa

SEQ ID NO: 476126 - DNA, 612 bp, Shigella flexneri
atgactctgaggtgtctgttaaacctgtggcgattcattattaactctaattttaacaataattccagccagtaccccgtcagccaggttgtagtattgggcggtaattattcttacccggaaggggttaagatgacactagagatgcgcggtaatacctgccttggggttggctatacggcaagcgcatcgaggccagatgttagtataagtggatattccgccaatgagcaggctatttttatcgattatgataacttatggatcccatcacaatcaccggttgtggatgctactgttaaatggaaaagctctcctgacttcgcttttggtgtgagcgttgttggtgcgactggagcaatgggaaacaggagaaatatactcagtgttacaaggggagcgactggggtttatacagtaaatgcaaatcatgatatagcaaacgtggctgtagaaataactactgtaggggtaccaggatacggaataataggtggttatcctaccgcaaactcattcgttgtaaggatgtacaatactgcaggcgctcccactgacatagatttcatagcattaggaaaagactatagagcaagatttaacgctacataa

SEQ ID NO: 476127 - DNA, 297 bp, Shigella flexneri
atgagcggtaagcgttatcccgaagagtttaaaattgaagcggtaaaacaggttgttgatcgcggccattctgtttccagcgtggcaacacgtctcggtatcaccacccacagtctttatgcctggataaaggcatatggcccggattcctcaaccaataaagtccagtcagacgctcaggctgagatccgacgcctccagaaagagctgaagcgggttaccgacgaacgggacatattgaatctacagcggcgtacttcgcaaagctgtccgactgaggtacgcctttatccgtga

SEQ ID NO: 476128 - DNA, 813 bp, Shigella flexneri
gtgctggatgtgcatccgagtggtttttacgcctggcttcagcagccggattcacggcggcatcatgctgacctgaggctgacggggctgataaagcagttctggctggagtcgggttgcgtttatggttatcgcaagatccacctcgacctgcgggataccggacaacagtgcggagttaaccgtgtctggcgactgatgaagcgtgccgggataagggctcaggtcgggtaccgtagcccacgggcacgtaagggtgaaaccagcatcgtgacgcccaacaggctccagcggcagttcaactcggaagcaccggatgagcgttgggtaacggacatcacctacatccggactcacgaaggctggctgtatctggctgtggttgttgacctgttctcgcgcaaagttattggctggtcaatgcagccccggatgacaaaggatattgtcctgaatgcacttctgatggccgtgtggcgacgtaatcctcaaaagcaggtgctggttcattctgatcaaggcagtcagtacacaagctatgagtggcagtcgttcctgaaatcacacgggctggagggcagtatgagccgtcgcggtaactgtcatgacaacgcagtcgcagaaagttttttccagctactgaaacgtgaacggataaagaaaaagatctacggaacgcgagaagaagctcgcggtgatatttttgattacatcgaaatgttttataacagtaagcgtcggcatggttcgagtgatcatatgccaccaactgaatacgaaaaccaatattatcagcggctcggaagtgtctag

SEQ ID NO: 476129 - DNA, 594 bp, Shigella flexneri
gtgatcatatgccaccaactgaatacgaaaaccaatattatcagcggctcggaagtgtctagattatctgtggcgattcatatttctgcatcaactgaatatcttgctgtgggtgtcggtatccctgcatattcctgtttagatgctcctggctcatataaagctggttatgcaatttgccgttctgcagattttaactcatgggaatatgtgccagaccatcgcggtgaaaacgtttatagcaccgaaacaggagaatcgaaagaaatcacagctctgggtgattaccctgaaaatacaaccactatcgccccgttaacgccatatgataaatgggatggtgagaaatgggtgacggatactgaggcacagcatagcgccgcagtaggtgcagcagaagtacagcgccagtctctggttgatgctgctatggcttccatcagtctgattcagctgaaattgcaggccggacgtaaactgacgcaggcagaaacaacccgccttaacgctgtgctggattacattgacgcggtgacggcaacagataccagcaccgcgccggatgtcatctggcctgaactgccggaggcgtag

SEQ ID NO: 476130 - DNA, 651 bp, Shigella flexneri
atgcatcgtatagacacgaaaaccgcgcagaaggataagttcggcgcgggtaagaacggttttacccgtggtaacccccagactggcacgcctgccaccgatctggatgatgactactttgacatgttgcaggaggagctttgcagcgtggtggaggcatccggtgccagcctggagaaggggcggcacgatcagttgcttaccgcacttcgcgcgctgctgttaagccgcaagaatccgtttggcgatatcaaatcggatggcacggtgaaaacggctctcgaaaaccttggtttgggagaagcagctaaaaggaatgtaggtacaggggcgaatcagatacctgatatgagcctgttcgcgtcaagtaataccgcaacggctgctgcgcaaaaatttccgtctggattaattttacagtgcggtcagttgaatggctcccctaatgtatcttcaacatacgggatgaggttcccgatgacattctcaagagtccttgctgtcacagttacattgaacgttactggcgcggctgggcagccgactgtatcggcgacaaatgtccataacactggatttaatattactgtgtcgcccggttcaggatatggtgcatcttctgatgcgtattacattgcaatgggatattaa

SEQ ID NO: 476131 - DNA, 585 bp, Shigella flexneri
atggacgtgacaaacgatgattacatccgtctgttgtcggcactgttgccacccggtccggcgtggtcagccagagatccggcgattgccggtgcggcaccgtcattaacccgcgttcatcagcgtgcggatgccctgatgcgggagctggatccgcacaccaccactgaactgataaaccgctgggagcgtctgtgcggtctgccggatgaatgtattcccgcagggacacagacccttcgccagcgtcagcaacgactggatgcgaaggttaacctggcgggcggcatcaatgaggatttttaccttgcacagcttgctgccctgggcagaccagacgctaccatcacgcgatacgacaaaagcacgttcacctgctcatctgcctgtactgacgcggtgaatgcgccggaatggcggtattactggcaggtcaacatgccagtcgccaccaacaccacctggatgacatgtggcgatccctgtgattccgcgctgcgcttctggggggacaccgttgtcgagtgtgtgcttaacaaactctgcccgtcgcatacctatgtgatttttaaatatccggagtaa

SEQ ID NO: 476132 - DNA, 1059 bp, Shigella flexneri
atggcggacagtgaatttcagcgcccgacgctggcagaaaatatcagtatgctccgtaacgatttattcgccaggctggacgtcagcgacacgctccggcgcatggatgaagacgtgcgggcaaaggtgtatgcggcggcgctgcatacggtttacggttacatcgattatctggcaatgaacatgctgcctgacctgtgcgatgagtcctggctggcgcgacatgctgcgatgaaacggtgtccgcgcaagggggccacggctgccagcgggtatatgcgctgggaaggtgtcagcgatggcctgaaggtgaccgccgggagtgttattcagcgcgatgacctggtgcagtacacggcaactgccgatgcaaccagcaccggtggtgtcctgcgcgtgccgatcgcctgctcaagtgcaggcgcggtcggtaacgctgacgacggtacgtcattaatcctggtcacgccggtgaatggtctgccgtcttccggcgtggcagataccctgacaggtggatttgatactgaagagctggaaacgtggcgcgcccgcgtcattgagcggtattactggacgcctcagggcggggctgacggggactatgtcgtctgggctaaagaagtgcccggcattacccgcgcatggacataccgacactggatgggaacggggactgtcggtgtgatgattgccggcagtgacctgattaatcccattccggaagaatcaacggaaacggcggcaagacaacatatcgggccactggccccggtggcaggctctgatttgtatgtattcaggccggtggcgcataaagtggattttcatatccgtgtgacgccggacacaccggaaatacgggctgccattaccgccgagttgcgttcgttcctgctgcgtgatggttatccgcagggagaactgaaggtgtcacgtatcagtgaagcgatttccggtgcgaacggggaatacagccatcagttgcttgcaccggcggacaatatctccattgcaaaaaatgaactggcggtactggggacgatttcatggacgtga

SEQ ID NO: 476133 - DNA, 426 bp, Shigella flexneri
atggaactgtggctgacggtgaacggtaaacgcacctgcgccagcgcaccgctggatccgctgacccgcgccgtggtgatttccctgtttacctggcggcgggcggagcctgatgacaacgccgacgtcccgatgggatggtggggggatacctggcctgcggtacagaatgaccgttacggctcccgactgtggctgcttcagcgcagcaaactgaccaatcagctggtgcagacggtaaggggatatatccgcgaatgcctgcaatggatgattgatgacggcgtggtgtcccgtattgatctggatatccgccgcaccgggattaatgagctgggtaacagtatcaccctctggcgtcgtgatggaccagtaatgatttcttttgatgatctgtggagtgcgataacgcatggcggacagtga

SEQ ID NO: 476134 - DNA, 549 bp, Shigella flexneri
atgaggacgattgaagccatgcagcgacaactcctcggcctgattgggcgggcagtggtgaaaagcatcagtgccgccacgaaatgtcagaccgtggatgtgtccctgattgccggtgaacccaaagccgggattgaacatcttgaaccctacggttttaccgcaagggcaaacagcggtgcggaagcggtggtgttgtttccggatggcgaccgttctcatgcggtggttgttacggtgtcggaccggcgctaccgcctgaaagggctgcagacgggtgaggtggctgtctatgacgatcaggggcagtctgtgacgctgacccgggaggggatcgtggtggacggtgcaggtaaaacgatcacgtttcgcaatgcgcctaaggcacgttttgaaatggacctggaagtgacaggacaggtgaaagacctgtgcgactccggcggcaccaccatgtcagcgatgcggcttgcctataacgggcatcgtcacagagagaacggtcagggcagtaacaccgacaaacctgataaagcgatggaggcatga

SEQ ID NO: 476135 - DNA, 1080 bp, Shigella flexneri
atgaacgacaatgtcacgctacgggtaaatggccgggagtggaatggctggacatcggtgcgcatcggtgccggtattgaacggctggcgcgggatttcagtgtggagatcacccgccagtggccgggagatgagggtattaccacgcttcagccgcgcattaaaaacggttcaaaagtggaggtgctgattggtgatgagctggtgatcaccggctgggtggaggcgacgcccgttcgttacgatgcccgttcggtcagcaccggtattgccggacgcagtctgaccgctgacctgattgactgtgcagccgaaccgacacagtttaacggacgatcgctggtacagattgcgcaggcgcttgctgcgcctttcggcattgaggtggtgaacagcggtgcgccgtcgggtgttattcctgatgttcagcctgatcacggtgaaacggtgattgaggtaatcaacaaaatactcggtcagcagcaggcactggcttacgacgacccgcacggcaggctggtgattggcggtattggctcaacgcgggcacatactgcgctggtactcggggaaaacatcctttcctgcgatacggagaagagtatccgggagcgattttctgtttaccaggtggcggggcagcgtgccggaaacgacgatgatttcggtgaggccaccaccaccgcgctgcgggcccgcacagaggacgcatttattgcccgttaccgtccgatgtatatcaggcagacagggcaggctacgggggcaggctgtattgcgcgtgctgactttgaagcccggcaacgggcggcgcggacggatgaaaccacctatgtggtgcagggctggcgacagggtaacggtacgctgtggcagcccaaccagcgggtgattgtctttgatccggtctgtggtttcgacaataccgaactgcttgtttcggaagtcacgtttactcaggaccagaacggcaccctgacggaaatccgtgtcggcccgcctgatgcttatctgcctgaacccgaagcccccggcgcgcggaaaaagaaaaaagccagagtacaggaggacccgttctga

SEQ ID NO: 476136 - DNA, 1377 bp, Shigella flexneri
atggatttatcctcatttcccacccgaccttcattactttcgtcgtcttcaggctggcgtgacagacttcaggacgcgtcatttcgcggcgtgccgtttaaggttgaagaagaaagtgcgggaaccggtcgccgtgtggaaacacatgaatacccgaaccgcgacaaaccctataccgaagacctggggaaaatcacttttcgcccgtccatcacggcttatgtggtgggagatgactgctttgaccagcgcgatcgcctgattgacgcgctgaataaacccggtcccggcacgcttgtccatccgacatacggtgagctgaaagtctgtgttgacggagaagttcgggtcagcacatcgaagagtgaagggcgtattgtccgctttgacctgaagtttgtcgaagcgggagaactctcttaccccacatcaggtgcggcgacggcgcagacgctgatgtcatcctgttctgcactggatgactgcatcagtgacagcttcagcggtttcagtatcgatggtgtggcggatttcgtgcagaacgacgttatcggtaatgccagcataatgctggggtatgtttctgatgcgatgaaagtggtggattctgccgtatcggatgccgccaggctgttgcagggggatatctcggtacttctgccgccgccatcgtcaggcaaaaatttcgttgagcaggtgcagaaaatgtggcgtaccgggaaacgcctttatggtaacgccagcgacctggtcaccatgatcaaaacgctttccggtgtcagcctcggcagcgatctgcaaccccgcggcgtctggaaaacggacagtaaaaccaccgccacggcgacgcagcagcgtaacgtggttgccagcacccttcgtacgaccgcaatcagcgaagcggcgtatgccgtcacccgattgcctgcgccaacaacttccgcggtgatgcagaatgccgcagtggggcaggcaacaacacccgcgcagagcacttgctggccttccgtcacgcatccggcactgaacaatgcaccggcggtgaaaaacacggttgacctgccgacgtgggaagaactgactgacattcgcgacacactgaatacggcaattgataaggagttgtcccgtacaaccagcgatgcgctgtttctggcgctgcgccgggtgaaagcagatctgaatgcggatatcaacacgcgccttgaacagtctgcacggatcattcagcgcacaccggatgaggttttacccgcgctggtgctggcggcgacctggtttgataacgcggcgcgtgacgcggacattatccggcgtaatgccattacgcatcccggctttgtgccggtgatccctctgaaggtgccagtgcaatga

SEQ ID NO: 476137 - DNA, 1908 bp, Shigella flexneri
atggctgataattttcagctgaaagccatcatcaccgctgttgacaggctgtccggcccgcttaaaggtatgcagcgtcagcttaagggatttcagaaagaagtctccagccttgctctgggcgctgccggggcgggtactgcaataatgggggcactggcactccctgtaaaatcagccatcacccttgaatcgaagatggctgatgtccgcaaagtggtggacggtctggatacgccggatgcgtttaaggccatgacggagcaggtacgcgctttgtctactgagcttcccatgtctgcagacgggatcgcggaaattgtggcggctggcggtcaggccgggattgcacgtgatgaactgatgcagtttgccactgatgcggtgaagatgggcgtggcctttgataccacggctgaagagtccgggcagatgatggcccagtggcgtactgcgtttaatatgacgcaggatgaagtggccgggctggctgacaaaatcaactaccttggtaataccggcccagcgaacgcgaagaaaatctccgatattgttacgcgtattggtcctttaggtggtgttgcaggtgtggcttccggcgaaatcgcggcaatgggggcaaccattgccgggatgggcgtggagtcagaaattgccgccacaggggtcaagaacttcatgctttccctgaccgcgggaaattctgcgacaaaatcgcagaaacaggcattgcgttttctgcggatcaatccgaagaaattagctgctgatatgcagaaagatgcccggggcaccatgctgtctgtactggatgcgatggctaaagtgcctaaagaaaaacaggcagctgtgctgaatgccctgttcgggaaagagtctctgggcgcgatagcacctctgctgactaaccttgatttgttgcgtaccaacttcaggcgggttgcggattcccagcagtatggcagttcgatgcagaaggaatatgcttcgagggcagcgacgacggaaaaccagcttttacttctgcaaaatcaacttgatgccatttcttccacgctgggggaaacgtttcttcctgaggttaatgatggtcttgaagcggtaaaaccgctccttgaggaagtgagaacgtttgtccgtgaaaacccggagctcgttaagaccattgctaaaatcggtctggctttactgacagtgggggccgctgcaggctctttgtccagaatcatgaaagttctcggcggtgtgatgaatatgacgcctgctaaggggctgattgctcttctggttggtggcgcttacctcattattgataattgggaaaccgtaggccctgtcataaaaaaagtctggcacgtggtggatgaaacggcgcaggtgatggggggatgggaaactgttctgaaagcgattgccctgtttatggcaaccaaatgggttgctgacgttaccaaatccattaccgcagtgaccagagagatgcgtacgctggggaaggtatcggcagaaacgggattgatggggaaaggccgcggctttatcgggaaggccggggtatatggttttttgggaaccctgatgtatgagccggttaaagatactctggaaagtgttgttcctgaagatacggttaactggctggataataaagggctgtttctggcttcagactggacgcctttttttgatcgtaaagagtacgagcagtatcaggccagcctgagccagtacaaacccaatgttccgctgttgaatccatcttcttccatgacacagcacagcgagctgaaagtcacgttcgagaatgctccgctaggtatgaagataattgatgtaccgggcaaagccgatcccctgatgaaaatcacgcacgatgtggggtattccccttttcgttttccacgataa

SEQ ID NO: 476138 - DNA, 324 bp, Shigella flexneri
gtgattgagcttgtacttaaaaaaccgatcatcgcccacaaagaaacactgcatgtgctggaaatacgtgagcctacgtatgacgagattgaggcgctggggttccctttctctgtttcgcctgatggtggtatgaaaatggacagtcaggtggcgctgaaatatatcccgcttctggccgggatcccgcgctcgtctgcagcgcagatgacgaagctggatattttcaaggcaggcatgattgtaatgcgtttttttaccggcttggagacggaagagagctccggaagcgattctacaatgtcgcgtggttctggaaattaa

SEQ ID NO: 476139 - DNA, 357 bp, Shigella flexneri
atggcccgtatcgggggaacctgttatttcaaaattgacggtcagcagctatcgctgaccggcggcattgaggtgcccatgaacaggacggtcaatgatgacatcatcggcctggacggttcagtggaccgcaaggaaactcaccgtgcgccttatgtcaaagggaccttcaaggtgccgaagaattttccggtgagcaaaatcacctcgtctgatgagatgaccatcactgccgagctggcgaacggtcaggtctatgtattgtcgtctgcctggctgcacggcgaagcgaaccataatgccgaagaaggcacggttgatcttgagttccacggtgaagaaggggattaccagtga

SEQ ID NO: 476140 - DNA, 1497 bp, Shigella flexneri
atgacgataagctttaacaccattccgtcgaatacgctggttccgctgttttatgcggaaatggataaccaggctgcgaatactgcacaggacagcggagcatcgctgctgattggtcatgccaataacggtgcagagattgttgccaacagtctggtgctgatgccgtcggcagactatgcacgccagatttgtggtacgggaagtcagctggcgcgtatggtcgaggcttatcgccagaccgacccgtttggtgagctgtatgtgattgccgttccggaagccacaggcgcggcggcaacggttacgctgacggtgaccggggaagcaaccgaaagcggcacggtgaatgtctatgtgggacgtacccgcgtgcaggctccggtgaccaacggcgataacgtcacgacgattgccagcagtatcaaagatgccatcaatgccgttccggccctgccgtttacggcttcatcttcggcaggcgtggtcacactgaccgcgcgtcataaggggctttgcgggaatgaaattcctgtcagcctcaattactacggctttggtgggggcgaagtgctgccagcgggcgtacagattgccgtggcgacgggtaccgccggaacgggtgctccggttctcaccggcgcggtggctgcaatggcggatgagccgtttgattatatcggcctgccgttcaacgacacggcctccgttaacacgctggtgaccgagatgaacgataccagcggtcgctggagctatgcgcgtcagctgtatggtcatgtgtatacggcaaagatcggcacgctgtcagaactggtgaccgcaggtgaccagtttaaccagcagcacattaccctggcggggtacgaaaaagacacccagacgcctgccgatgagctggcggcaagccgtaccgcccgcgcagcggtgtttattcgcaacgatccggcacgtcccacgcagaccggtgagctggtgggtatgctgcctgcgccgaaggggaaacggttcacgatgaccgaacaacagaccctgctgtctcatggcgtggcaacggcgtatgtcgaaagcggggtactgcgcattcagcgtgatgtcaccacgtacaggaaaaacgcttacggggttgcggataacagctacctcgacagcgagacgctgcataccagcgcgtatgtactgcgcaaactgaaatccgtcattaccagtaagtacgggcgtcacaagcttgccagtgacggtacccgctttggtcccggtcaggcgattgtcaccccggcggtgatcaaaggggaactgctggcaacctaccgtcagcttgagcgagcggggatcgtggaaaactacgaactgtttaagcagtacctggttttggagcgtgatgccagcgatccgaaccgcctgaacacgctgttcccgcctgactatgttaaccagttgcgtgtctttgccgtggttaaccagctccgtcttcagtattcagaggagtctgcataa

SEQ ID NO: 476141 - DNA, 171 bp, Shigella flexneri
atgtttgtcaaacctgttaaagggcggtcagttcctgaccctgcccgcggcgaccttttgcccgccgaagggcgaaatgttgacgagaacaactactggctgcgccgtgaagcagcgggtgatatccggcgcgtgaataaaaaggtgaacaccgatgacgataagctttaa

SEQ ID NO: 476142 - DNA, 561 bp, Shigella flexneri
atgaaactgactcctgttattgctgcgctgcgtgcccgctgtctgtattttgaaaaccgggtggcaggcgcggcccagttcaaaaatctgccggaggtcggaaagttgaaactcccggcggcatatgtggtaccgggtgatgactctccgggagaaaacaaaagtcagaccgactactggcaggagctgaaagagggcttctccgtggttgtcatactgagtaacgggcgtgatgagcgcggtcagtttgcctcgtatgatgtggtggacgatgtccggcagatgctctttaaggctctgctgggctggaacccggaagcgtgcggtaacccgattacctatgacggcggcacgctgctggatctgaatcgtcatgagctgatttatcagttcgatttttcggtcatcagcgagctgaccgaagacgatacccgccagcaggatgacctgaacagtctggatgaactgcgaacgctggcgattgatgttgattatctcgatcccggtaacgggcctgacggcgatatcgaacatcacaccgaaataccccttccttcctga

SEQ ID NO: 476143 - DNA, 525 bp, Shigella flexneri; identical to SEQ ID NO: 28259

SEQ ID NO: 476144 - DNA, 411 bp, Shigella flexneri
atgaaaattcgtcaggcgcagaccagcgcaacctacattctgccggaccccggtgaactgaataaacgcgtcctgatccgccagcgggtggatatgcccgcggataactttggcgtggagcctcaatacccggttacgttccggacatgggcgaaggttatccagaccagtgccaccacctggcaggaaaccgcgcagaccggggacgccatcacccattacatcaccattcgctaccgccgggggatcactgctgattatgaggtggtctgtgatgaccgtgtgtaccgggtgaaacgtcagcgtgatctgaacggggcgcggcgctttctgctgctggagtgtacggaactgggtgccgaagaacaaatgggaggacgcagtggatcagacagcatttttacacgttga

SEQ ID NO: 476145 - DNA, 324 bp, Shigella flexneri
atgcttctgacaatggaagagattaaagcccaactccggctggatgaggatttcgatgttgatgaccgccatctgcaactgctggcctgtgcggcacaaaagcggacggaaacgtatctgaaccggaagctctatgcaccggatgaaaccattccggacagcgatccggacgggctgcacctgccggatgatattcgtctggggatgctgatgcttatcagccatttttacgaaaaccgctcgtcggttacggaagtggagaaactcgacatgccgcagagttttggctggcttgtcggcccgtacaggtactttccgcaatga

SEQ ID NO: 476146 - DNA, 201 bp, Shigella flexneri; identical to SEQ ID NO: 4095

SEQ ID NO: 476147 - DNA, 1206 bp, Shigella flexneri
atggcggttgatattaaagatgtcgaacaggtcgcgcaggagctgcagcagaagtttgacgacttcaaagcaaagaacgacaagcgcgtggatgcgattgagcaggaaaaaggcaagcttgccgggcaggtggaaaccctgaacgggaaactcagcgagctggaaaacctcaaaagcgatcttgaaaaagagctgcttgagctgaaacgtccggcaggtggtgcgcaaaataaactggccaccgagcataaagaagcgtttgtgggcttcctgcgtaaaggccgtgaagatggtctgcgcgatctggagcgcaaggcattacaggtgggcaccgatgaagacggcggctatgccgtgccggaagcactggatcgcaacattctcaccctgctgaaagatgaagtggtgatgcgccaggaagccacggtgatcaccgttggtggttccgactacaaaaaactggtgaatctgggcggcacggcttccggatgggttggcgagactgacgcgcgctcccagactgccacctcaaaactgggcctgattgaacctttcatgggggaaatctacggtaacccgcaggccacccagaaaatgctggatgatgcctttttcaacgtggaagcatggatcaacagcgagctggcaaccgaatttgccgaacaggaagaaattgcctttaccaccggcgatggtaccaagaagccgaaagggttcctggcgtatgaatccacggatgaaaccgataaggtccgggcgttcggcaaacttcagcatattgtatccggcgacgcgacggcggtgaccgcagacgccattatcaaactgatttacacgctgcgtaaggcacaccgcacaggcgcgaagttcatgatgaacaacaatagcctgtttgccatccgtctgctgaaagacagcgagggtaactatctgtggcgtccggggctggagctggggcagccgtcctctctggcgggttacggtatcgctgaaaacgaacagatgccggatatcgccgctgatgcgaaagccattgcatttggtaacttcaaacggggttacaccatcgttgaccgtatcggcacccgcattctgcgtgacccgtacaccaataaaccgtttgtcggtttttataccaccaaacgcaccggcggcatgctggtcgattcgcaggccatcaaactgctgaagattgcagtggcgtaa

SEQ ID NO: 476148 - DNA, 183 bp, Shigella flexneri
atgatcatgctgattctcgcgcctctggtgggcgtgctgggggcgcttttgctggcgtatggtgcctggctgatttatcccccggcggggtttgttgttgccggggcgttgtgtctgttctggtcgtggctggtggcgcgatatctcgaccgtacacagtcgtctgtcggcggaggtaaatag

SEQ ID NO: 476149 - DNA, 1734 bp, Shigella flexneri
atgagccggaaatcttaccccaacgtaaatgctgcaaatcagtatgcccgggatgtcgtgcgcggaaagattgttgcctgccagtttgtgattcaggcctgccagcgccatcttgatgacctgatggcggaaaaaagtaagtcgtttcgttaccgcttcgacaaggacctggctgaacgggccgcgaaatttattcagctgttgccgcacaccaagggggagtgggcattcaaacggatgcccatcacgctggagccgtggcagctatttgtgatctgctgtgcgtttggctgggtcaataaaggcacccggttgcgccgcttccgggaggtgtacaccgaaatcccccgtaagaacggcaaatcagcaatctctgccggtgttgccctgtattgttttgcctgtgataacgagtttggcgcggaagtgtattccggtgccacgacagagaaacaggcgtgggaagtctttcgcccggcgcgactgatgtgtaaacgcacacccatgctgacggaagcgttcgggattgaggttaacgcctcaaacatgaaccgtccggaggatggcgcgcggtttgaaccgctgatcggcaacccaggtgatggttcatcaccccactgtgccgtggttgatgaatatcacgagcatgccaccgatgcgctttataccacaatgcttaccgggatgggggcgcgacgtcagccactgatgtgggccatcaccaccgccgggtacaacattgaggggccgtgctacgacaaacggcgggaagtcatcgagatgctcaacggctcggtgcctaacgatgaactgttcgggatcatctataccgttgatgaaggtgacgactggaccgacccgcaggtgctggaaaaagccaatccaaatattggcgtgtcggtttatcgcgaatttttgttaagtcagcagcagcgtgcgaaaaataacgcccgtctggcaaacgtctttaaaacaaaacacctcaatatctgggtgtcggcgcgttcggcgtatttcaacctggtgagctggcagagctgcgaggataaatcactgactcttgagcagttcgaggggcagccgtgcattctggcctttgacctggcgcgtaagctggatatgaacagcatggcgcgactttatacccgcgagattgacggtaaaacgcattactacagtgtggccccgcgtttctgggtaccgtatgacacggtgtatagcgtcgagaaaaatgaagatcgccggacagccgaacgctttcagaaatgggtggaaatgggcgttctgaccgttaccgatggtgcagaggtggattatcgctacatcctcgaagaggccaaagcggcgaacaaaatcagcccggtcagtgagtcacccatcgaccctttcggagcgaccgggctgtcacatgaccttgctgatgaagacctgaatcccgttactatcgtccagaacttcgccaatatgtccgacccgatgaaagagctggaggcagcgattgaatcgggacgctttcatcatgacggcaatcccatcatgacctggtgtatcggcaatgtggtcggcaaaaacatgccaggtaacgatgatttagtgaagcccgtcaaagagcaggcggaaaacaaaatcgatggtgcagttgcgctgattatggcggttggcagagccatgctgtacgagaaagaagacacgctgtctgaccacattgagtcctatgggatccgctcgctttaa

SEQ ID NO: 476150 - DNA, 495 bp, Shigella flexneri
atggctggaacggcggggcgttccgggcgtcgccccaagccaacggcgcgcaaggcgctggccggaaaccccggcaagcgagccctgaacaaagatgaacccgtttttacgcccatcaaaggtgttgagccaccggagtggttcgctgaagaagagctccctctcgccacgatcatgtggcaactgacaaccaaagaactctgcggtcagggcctgctgtgcgtgactgacctcgcagtgcttgagcggtggtgcgtggcctatgagttctggcgacgtgccgtgaaaaatattgccagacagggcaacaccatcaccggtgcaatgggcggcatggtcaaaaatccggagctgaccgccaaaaaagaacaggagtccgagatgagcagtacgggggcaatgctcggactcgaccccagcagccgccagcgtctgattggcctggcggggcagaagaaagccactaacccgtttctgaaaattatcgaatcatga

SEQ ID NO: 476151 - DNA, 351 bp, Shigella flexneri
atgcccccacgaaccccaaaagcctgccgtgttcgcggctgctcccataccaccactgactcgtcaggctattgcgaaagccacaaaagcgaaggctggaagcaatacaagccaggccagtcccgtcatcagcgcggctacggttcgaagtgggactgtatccgcgcgcgtgtcctgaagcgtgacaaaggcctgtgtcagttatgtctgcgtgctggtgtggtgcgtgaggcgaaaaccgttgaccacatcatccctaaagcgcgtggcggcactgatgccgacagtaatctacagagcctgtgttggccgtgtcataaggcgaagacggcccgtgaatggctgaagtaa

SEQ ID NO: 476152 - DNA, 123 bp, Shigella flexneri
atgcttcgttccaaaagtcagttgactgtaattattactacgtcaccttatgccgaagaccttttccgcttcactttgagcctgattcacttctacctgaccggctcgcctctatccttctga

SEQ ID NO: 476153 - DNA, 393 bp, Shigella flexneri
atgaagttgagctataagctggctatctctgcattcttctttactgtcatcggttctttcatctggtctgctaaccactactacagcaaatatcagcacgaaaagaaacgtgctgatgaggctgtacgaaatgctgaatcagcaacagccattaccaataacgtcctgcaatcactacaaatcgtcaatacagttctggaggctaaccagcatgcaaaacaacagatcgcactggagtcacagagaacccaggctgatatcaaagtggctgttgcggatgatgattgtgctgtacgccctgtgcctgctgccgctgctgaccggttgcgaaagttcgcggacagtttacgtgccagttccggctataccgttaccggcgagtctgaccgctga

SEQ ID NO: 476154 - DNA, 477 bp, Shigella flexneri
atgcaggtactaaattcccagcgtatagctttcctcgatatggtggcatggtcagaaggaacggataacgggcgacaaccgacacgtaaccacggttatgatgttattgttggcggcgaactgtttactgattactctgatcaccctcgcaaacttgtcacgctaaacccaaaactcaaatcaacagccgccggacgttaccagcttctttcccgttggtgggatgcctatcgcaagcagcttggcctgaaagacttctctccgaaaagccaggacgctgtggcattgcagcagattaaagagcgtggcgctttaccgatgattgatcgcggcgatattcgtcaggctatcgatcgttgcagcaatatctgggcgtcgttacctggtgcaggttacggtcagtatgaacataaaatcggtgacctgatttcccggtttaaagaggctggtggggtggtaaatgaagttgagctataa

SEQ ID NO: 476155 - DNA, 327 bp, Shigella flexneri
atgcctcataacccaaatacttggctggagttgttccagagctggtggcgtggagacacaccgctgggcgcagtgattatgtcgattgttatggctggtttacgtattgcctattttggcggtggtggcggctggaagcgaaaaacactcgaaattctactctgtggcgctctgacgctgacttttgcatccgctcttgagtatgtcggatggcctaaatcactatctgttgccattggtggtggtgtggggctgatcggtgttgatgctattcgtggggctgcaatgcgagtaatcggtaataagtttggtggctctaaggagtaa

SEQ ID NO: 476156 - DNA, 1071 bp, Shigella flexneri
atgaaagaaagccgcagcaaggtcattcaatataaacgtgcagtcatccctaattgcacagcaacgcttcaacagatcatagaatctataatttctgaaaatggcgcagcctataaagttagcgcaagaagagaacagattaacccctccgatagcaatagtggatttagagtggttaaccgcagcagcactttcaagacagtgttattcgggcaacttattttgtttgaacaaggtaaaagccaaacacttatgacaatcgctgatgatgtcaattattatgacatcaatgctataacatcgaagcaaattaaattagccgaagacgaaaaaataagtgaagctgaaaaacaaaaaataacacgagaatttattgattcaatactttactttgggattcgtgataatcatgtgatgatcgtccaatcaccggctctaaggactaaagacatagaaagccatcttaattggttaatccattcatttagcactatttttaatggtgacgacttccttgtacttcaagataaaccaactgaagacaccataaaaaaaatgcatgaaagtccagtcaagaaaataaatttcggcagtatcccaatcaaaaattctgattctgaagatgtagttaaaataaataatataagtaacacaaacgacctccccacaacaataaaagaacaggtcgaaaaagttaagaaaataaaattcatgccaactggtaaaggtggcgatattataaaagctgcttttggcgaagcatggtttaataatttacaactggaagattctcttgatgaatccaatttacaagttaatctagaaataacctatttccgcaagacaaacaaagatggtcaacgtgtactcgatactttagcaacttcactcagaaatatagacgatgaagatattagtataaaccttcaaggtggtggcataattaaaggcagtgatttaaaactatccggtaaagtaaacgtccaatataacaatggacttattgatgaaaatgatttatatttacaaatggctgacttcaaaggttcaaactggagaagtaaaagttaa

SEQ ID NO: 476157 - DNA, 327 bp, Shigella flexneri
atgagcttctttaaatttattataagattcttatccgccttcgcttttgggtttgcaatattttactttgcatctagaaaaattgacttaagtggcatatctactccatggtcattaataaccttattagcattccctttcagttattgtatcgcagccttttttaaagtttctgaagccgacgaaaacacatcactatcagataatgaactaagaagattacgaccgataattgatgcaaaaaaaagacatcttggatttcttatctttttttatcttattgctgctttttcaggagcaattggggtaatgactccaacttattga

SEQ ID NO: 476158 - DNA, 378 bp, Shigella flexneri
atggacgaacagtggggctatgtcggggctaaatcgcgccagcgctggctgttttacgcgtatgacagtctccggaagacggttgttgcgcacgtattcggtgaacgcactatggcgacgctggggcgtcttatgagcctgctgtcaccctttgacgtggtgatatggatgacggatggctggccgctgtatgaatcccgcctgaagggaaagctgcacgtaatcagcaagcgatatacgcagcgaattgagcggcataacctaaatctgaggcagcacctggcacggctgggacggaagtcgctgtcgttctcaaaatcggtggagctgcatgacaaagtcatcgggcattatctgaacataaaacactatcaataa

SEQ ID NO: 476159 - DNA, 657 bp, Shigella flexneri; identical to SEQ ID NO: 475713

SEQ ID NO: 476160 - DNA, 183 bp, Shigella flexneri; identical to SEQ ID NO: 467533

SEQ ID NO: 476161 - DNA, 639 bp, Shigella flexneri
atgatacctctcagaaagggagcgcaatatgaagagctcagaaaactgggtaaaggcgatcatctggtaaagctgaaaaccagcccgcaggcacgaaaaaagtggccgggactgggaaatgaagtgacagcccgcctgctgaccgtgacgcgcaaaggaaaagtctgccatctgctgacgtcgatgacggacgccatgcgcttccccggaggagaaatggcggatctgtacagtcatcgctgggaaatcgaactgggatacagggagataaaacagacgatgcaactgagcaggctgacgctgagaagtaaaaagccggagcttgtggagcaagaactgtggggtgtcttactggcttataatctggtgagatatcagatgattaaaatggcggaacatctgaaaggttactggccgaatcaactgagtttctcagaatcatgcggaatggtgatgagaatgctgatgacattgcagggcgcttcaccgggacgtataccggagctgatgcgcgatcttgcaagtatgggacaacttgtgaaattaccgacgagaaggggaagggccttcccgagagtggtaaaggagaggccctggaaataccccacagccccgaaaaagagccagtcagttgcttaa

SEQ ID NO: 476162 - DNA, 210 bp, Shigella flexneri
atgacagatggctgtccgctgtatgaatcacgcctgaagggaaagctgcacgttatcagcaagcgttacactcagcgcattgagcgacataatctgaatctgagacaacatctggcaaggctgggacggaagttactgtcgttctcaaaatcggtggagttgcatgacaaggtcatcgggcattatctgaacataaaacactatcagtaa

SEQ ID NO: 476163 - DNA, 834 bp, Shigella flexneri; identical to SEQ ID NO: 476088

SEQ ID NO: 476164 - DNA, 231 bp, Shigella flexneri; identical to SEQ ID NO: 463432

SEQ ID NO: 476165 - DNA, 834 bp, Shigella flexneri; identical to SEQ ID NO: 476088

SEQ ID NO: 476166 - DNA, 210 bp, Shigella flexneri
atgacggatggctgtccgctgtatgaatcacgcctgaagggaaagctgcacgttatcagcaagcgttacactcagcgcattgagcgacataatctgaatctgagacaacatctggcaaggctggtacggaagtcactgtcgttctcaaaatcggtggagctgcatgacaaggtcatcgggcattatctgaacataaaacactatcagtaa

SEQ ID NO: 476167 - DNA, 1395 bp, Shigella flexneri; identical to SEQ ID NO: 473084

SEQ ID NO: 476168 - DNA, 225 bp, Shigella flexneri; identical to SEQ ID NO: 133446

SEQ ID NO: 476169 - DNA, 207 bp, Shigella flexneri; identical to SEQ ID NO: 24440

SEQ ID NO: 476170 - DNA, 210 bp, Shigella flexneri; identical to SEQ ID NO: 9340

SEQ ID NO: 476171 - DNA, 153 bp, Shigella flexneri; identical to SEQ ID NO: 473234

SEQ ID NO: 476172 - DNA, 207 bp, Shigella flexneri; identical to SEQ ID NO: 24440

SEQ ID NO: 476173 - DNA, 1098 bp, Shigella flexneri; identical to SEQ ID NO: 473276

SEQ ID NO: 476174 - DNA, 276 bp, Shigella flexneri; identical to SEQ ID NO: 6180

SEQ ID NO: 476175 - DNA, 363 bp, Shigella flexneri
atgcgtgatattcagatggttcttgagcgttgggggggatgggctgctagtgataattcaggcgttgactattctccaatcgcagcaggatttaaagggcttttaccacaaacaggtaaaaacagactctcatgtactgatgccgacggattaatcattgaggggtgccttgctcggctgaagaagaaaaaaccttatgagcattcgttactagtagcacattatttgtatggtctttctaagagaaaaattgctaaagaaaagaaaaaggacgagaaacttatacgcattgagattaaaatggctgaaggatttatcgaaggttgtctttcaatgttggatattagattagaaatggattga

SEQ ID NO: 476176 - DNA, 990 bp, Shigella flexneri
gtgagagcactactgacccctgaaattgccccgcgtatggggatcgtattgttcagacctggttcagagctgatgcccctgtttatgcaggggcgtgtcctgctggagcctgagccggaacgttattcatctttcgccagcggtgccgttccggcggcatcacaaccgctggcggatgatcctgccgttcgggccgtgttccgcaatgaggcagtgatccgtcgtgctggtggcgtggaatgtcttgaaagctggttacttcgtgaaaaaggctgccagtggcctcattccgactggcacagcgagaacatgaccacaatgcgacacgctccgggcgcaatccgtctgtgctggcactgcgataaccagctgcgcgatcagttcacggaacggctggaatcaatggcaacggataactgtgcccgctgggtgttgtctgttgtgcgtcgggatctcggttttgatgatagtcacgttgtgacaatgccggaactgtgctggtggctggttcgtaatgacctggcggatgccttaccggaaagtgcagcccgtaaggcactgagattaccaaagcctgttgtgccgtctgtcacccgggaaagtgaccttgtgccttcggttcctgccaccagcatcatccaggataaggcaaaaaaggtgctggcgctgaaagtggatccggagtcgccggactcttttatgttacgcccaaaacgtcgccgctgggttaacgaaaagtacacgcgttgggttaagacgcagccgtgcgcatgttgtggaaaacctgctgatgatccccaccacctgataggccacggtcaggggggaatgggtacaaaagcgcatgacctctttgtgttgcctttgtgcagaaagcatcacgacgagctgcatgcggataccgtggcatttgaagagaagtatggctctcagctggagctgatatttcgttttatcgatcgtgcgctggcaactggcgtgctggcctga

SEQ ID NO: 476177 - DNA, 816 bp, Shigella flexneri
atgaatcagttgcttgtaattgatggcgtttctgtgcgccagtacttcgaatctaactactgtcttaacgaccttcagaaagctgctcttcttgccgctggtgagaatcgctcctcccgttcgctggaagttcacgagtttatgcgtcgtcctgaaacgaaggctcttgtggaattattggaagaagaaactacgggagattcccgtagtattcctgtcatcaccattcaggggcgcaatggtgggacgtatgtctgtaaagagctggtctatgcatatgcaatgtggatcagcccggcattcagcttaaaagtgatacgtacttttgatgcgcttcataattcatcaccagaagaaaccacatccgacaaaattaaatccggggtcattctgcttgaatcagcagcaaagactctaaatctgtcaaactcctcgaaacttggtgcataccagaaattatcaaaggtagctggtcttcctgaacttatgccgatctatgccattgatgcacctgctgatgcgccagatggttcaagccgccctacgctgtcgctgagtgcactgctgaagcagtatggtatccgcctgacggctaatcaggcatatcaccagatggtgaagctggggatcgtcgagcagcgcgaacgatacagccgtacctcgattaacaacatcaaaaaattctggtcgctgacagcgaaaggctgcatgttcggcaagaacatcaccagtcccgcaaatccgcgcgagacgcagccgcatttcttcgaatcccgattccctgagctgttaaagctgctcgataccgttcattga

SEQ ID NO: 476178 - DNA, 204 bp, Shigella flexneri; identical to SEQ ID NO: 28021

SEQ ID NO: 476179 - DNA, 327 bp, Shigella flexneri
atgacgacgttaactcaatgccagcagcaggtgctggatatgctgatttcttatcagaaagaacgtggcttcccgccaaccaatcaggaggtggcaaccatgctgggataccgttcggtgaatgcagcggtggagcatcttcgcgcactggagaaaaaaggcgtcatcacgataaagcgtggtgtggcccgggggatcacgcttcataccgtggtgaaggacgacgacagcgaggcggtcgggattatccgctcactgcttgccggtgaggaaaacgccaggctgcgtgcagcccactggttacatgagaggggcctgaaagtatga

SEQ ID NO: 476180 - DNA, 495 bp, Shigella flexneri
gtgatcatgagtcttttgaatgaagttcagaaatacattgaagcccatccggggtgtacttccggagacattgcggatgcttttgcaggttactcacggcagcgcgttctgcagtcagcaagcaagttacgtcagagtgggcgtgtggctcaccgttgtgaaggggatacacgcagacatttcccgcgcctgactgagagagcgcaggaggcggaaccgcaaccagttcgtgaaaccagacctgtgcgcaatttctatgtcggcactaacgacccgcgggagattttgtgcctgacccgccaggctgaagaactggagtccaggggcttataccgtcgtgctgcaacggtgtggatggcggcattccgtgaaagccactcccagccagaacgaaacaattttctggcgcgtcgtgagcagtgtttacggaaaagcagcaagcgcgctgtatcgagtgatgagtggtatctgtcagggaattacgtgggggcgtaa

SEQ ID NO: 476181 - DNA, 942 bp, Shigella flexneri
atgagcactaaattaaccggctatgtatgggatggttgcgcagcgtcaggcatgaaattatccagcgtggcaattatggcccgcctggctgatttcagtaatgacgaaggtgtgtgctggccatcaattgaaaccattgcccgtcagattggcgcggggatgagtaccgtcagaacggctatcgcacggctggaagcagaaggctggttaacgcgtaaggcgcgtcgccagggtaaccgcaatgcgtcgaatgtttatcagcttaacgttgcgaagcttcaggcagcggcattttctcaactgtcagattctgacccgtcaaaatctgacgcatcaaaatctgacccgtcaaaatttgatgcgtcgaaatctggcaaaaaagcgggttttcacccgtcagaatctggcggggatccgtcagtaaaatcaaaacatgatccgtcagataaaaaaacttctcgtccggacgcttcgcaaccggacacgcagacggctgaacaggagtttttaactcgccatcctgatgcggttgtattcagccctaaaaagcgccagtggggaacgcaggatgatttgacctgcgcacagtggctctggaaaaaaatcatcgccctgtacgagcaggccgccgaatgtgacggcgaggtggttcgtcccaaagaaccgaactggacagcctgggcaaacgaaattcgcctgatgtgtgtgcaggatggtcgtactcacaaacaaatctgcgagatgtacagccgcgtcagccgcgatccgttctggtgccgtaacgtgctcagcccgtcgaagctgcgggaaaaatgggatgagctttccctgcgcttatcgccgtccgtcagcacgtacacagaaaaacgcgaagacccgtacttcaaagccagttacgacaacgtggactacagccagatcccggcaggattcagggggtga

SEQ ID NO: 476182 - DNA, 339 bp, Shigella flexneri
atgaacagtttaacaacacactaccgtcgctcgcaactgattgcgcttcctgtaccgggtggaaaagcgaaggtggagtattgctatgcagtgaatgtaccaggtgacagggaaattgtaacccacagctttgcagagtgggctgtgggggatttcaaccggcagaaggagacagtcctttgcgacaagttaatcgctggttcaaagatcactacggagtgcccgtcagagtcattcgttgggagccggaaacacaacgggttatctacctccgtgaaggctatgagcatgagtgcttcagcccgctcgaacagtttcgtcgtaaattcagggaaatag

SEQ ID NO: 476183 - DNA, 552 bp, Shigella flexneri
gtgggtaagcatcactggaaagtagaaaaacagcctgagtggtacgtgaaagctgtcagaaaaactatcgcaaagttgccgggtggttacgctgaagcagctgactggctggatgtaacagagaacgcattatttaaccgccttcgtgccgatggcgatcagattttcccgctgggatgggcaatgattttgcaacgtgctggtggaactcacttcattgctgacgctgtggcgcagtctgcaaatggcgtctttgtgtctcttcctgacgtcgaggatgtggacaacgccgatattaaccagcgtctgctggaagtcattgaacagatcggcagttattcaaaacagattcgttcagcaatcgaagacggtgtagtggaaccgcatgagaagacagcaattaacgacgagctgtacctctcaatttcgaagctgcaggagcatgcagcactggtctacaaaattttttgcatttcagaaagtaatgacgcccgcgagtgtgcagctccgggcgccgtggcgtgtcgtgactgtggagaaactaacgcatga

SEQ ID NO: 476184 - DNA, 201 bp, Shigella flexneri; identical to SEQ ID NO: 8760

SEQ ID NO: 476185 - DNA, 675 bp, Shigella flexneri
atgaaaacaatccatgacatccggcggtctaacgccagaaaactgagagatggtgttggcgggaattcttcctttgccactatgattgatcgcgagccaacccagaccagcaggtttatgggagatggtgctactaaaaatatcggtgacagcatggcacgacacatcgaaaaatgtttcgacctgcctgttggatggctcgatcaagaacaccagacaacgaacatcacaaaaaaacctgatgtttcaatcactaataaacaaatcacattagtccctgtcatatcatgggtacaggccggagcatggaaagaagttggatattctgaggttgatttgagcacagcagaaacgtatccctgccctgtaccctgtggggaaatgacttatatcttgcgggtgataggtgattcaatgattgatgagtaccgcccgggagacatgatttttgtcgatcctgaagtaccagcctgccacggtgacgacgttattgcattgatgcacgatacaggtgaaaccaccttcaaaaggttgatagaagatgggacacagcgttatctcaaagcgttaaacccaaactggcctgagccttacattaagatcaacggtaattgctctataattggaactgtgattttctcaggaaaaccaagaagatacaaaatcaaagcctaa

SEQ ID NO: 476186 - DNA, 207 bp, Shigella flexneri
atgcacaaaacagaacccaaaatcgtcgcgcccggatacacaaatgaggaaatttacgagtggatggcaaagaagctggcagctataaaccagcttcgtgaagtgctgtcttatcgacaggaaacaatagactccttaaaaaaactggatcaggaaatcacggttttatcacaggatgttactttagatattgtgcagacaaattag

SEQ ID NO: 476187 - DNA, 435 bp, Shigella flexneri
atgtccggtaatatctacacgctgtacaaatcccactgtgaaaatgttggaaagtatcggggcattgaaatcagtggggtagtgtcatcagtcgaaataagcaaagtggaatcaagggcaacattacttactcttctggaccttgtcttacatgagcaccggaagaaattcggcactccctataatcagttgaatgggaaaaaggctctggttcaccttattctgatgaagcatcactggatgccaaaacagattaatgagatgaaatttgatgaacttcttctttcaattcaggatgaactcacacttgataaaataagcgtaaccgcccagaaatttttagattatcgagactggagatcacaaattcatcactttgatgattttgacgaaaatgaatgggatcctaatttgtctgcacaatatctaaagtaa

SEQ ID NO: 476188 - DNA, 363 bp, Shigella flexneri
atggctagcgaacgcagtactgatgtgcaggcatttatcggggagctggacggcggcgtatttgaaaccaaaatcggcgcagttctcagtgaagtcgcttccggtgtgatgaacacgaaaaccaaaggtaaggtctcactcaacctggaaatcgaaccatttgatgagaaccgtgtgaaaatcaaacacaaactctcatatgttcgcccgactaaccgcgggaaaatttccgaagaagacaccaccgaaacgccgatgtatgtcaatcgcggtggtcgcctgactattctgcaggaagaccagggacagttactgactcttgccggtgaacctgacggaaaactccgcgcagcaggtcgttaa

SEQ ID NO: 476189 - DNA, 825 bp, Shigella flexneri
atgtctcagaacttagacgcaaccgcaattaatcaaatccatgcccttatttctgctcagggtgttaatgaaattatcagtaagattggtgccgatgctgtggcattgcctgagaatttccgcattcatgatctggaaaaatttaatttaaatcgcttccgtttccgtggtgcgctttccactgccagcatcgatgactttacccgttattctaaagatcttgcagatgaaggcacccgctgctttatcgatgctgataatatgcgtgccgtcagtgtgcttaacctgggtactattgatgaaccaggtcacgcagataacaccgccacactcaaactgaaaaagacagcaccgttctctgctctgttgtctgttaacggcgagcgtaactcccagaagtcactggcagaatggattgaagactgggccgactatcttgtgggctttgatgctaatggtgacgctattcaggcaacaaaagcggctgcggctgtccgtaaaatcacgattgaagcaaaccagaccgctgattttgaagataatgacttcagcggcaaacgctccctgatggagtctgtcgaagcgaagaccaaagacattatgccagtggcatttgaatttaaatgcgttccgtttgaaggtctgaaagaacgtccgtttaaattacgcctcagtattatcactggcgatcgtcctgtactggttctgcgcattattcagctggaggcggtgcaggaagaaatggctaacgaatttcgtgatctgcttgttgagaaattcaaggacagcaaagtagaaacctttattggtactttcaccgcctga

SEQ ID NO: 476190 - DNA, 537 bp, Shigella flexneri
atgtcatttattaaaactttttccgggaagcatttttattatgacaggataaataaagacgacatcgatattaacgatatcgcggtttccctttcaaatatctgtcgctttgccggtcatctttcgcacttctacagcgtcgcccaacatgcggttctttgcagccagttggtgccgcaggaatttgcttttgaagcgttaatgcatgatgcaacagaagcgtattgccaggacattcccgcaccactgaaacgccttcttcctgactataaacaaatggaagaaaaaatagacgccgtaatccgtgagaaatacgggttacccccagttatgagtacgcccgtgaaatatgccgatctcatcatgctggcaaccgaacgccgcgatctcgggcttgatgatggctctttctggcctgtactggaaggtatcccggcaacagagatgttcaacgtgattccactggcaccgggccatgcctacgggatgtttatggaacgctttaacgagttatcggagttacgcaaatgcgcatga

SEQ ID NO: 476191 - DNA, 363 bp, Shigella flexneri; identical to SEQ ID NO: 12787

SEQ ID NO: 476192 - DNA, 267 bp, Shigella flexneri; identical to SEQ ID NO: 462029

SEQ ID NO: 476193 - DNA, 834 bp, Shigella flexneri; identical to SEQ ID NO: 476088

SEQ ID NO: 476194 - DNA, 189 bp, Shigella flexneri; identical to SEQ ID NO: 470416

SEQ ID NO: 476195 - DNA, 1218 bp, Shigella flexneri; identical to SEQ ID NO: 463472

SEQ ID NO: 476196 - DNA, 576 bp, Shigella flexneri
atgacattatcaaatgcagcatcccgcgcactggagcgctttcacaaagaaaatatggatactgtcagacagaatcctcatatgggtacatttgaagacattattgtcagaaaaagagagcaggttgtcaggatagcagcacttctggaactggagaaagatccagactcgacagtaataacgctggaaagtactaatagcgccatttatctcattgaattttatttcaagcatcttatatataaacttgaatcccttcgggaaatatccccggctgagaaacttgataaatggcttcagaaaagaattatcacaacagcaggttacatattccagaaaagttatattttacaatatgccccatatgctctcaggaaaaaatgtgttctggatgaagcacttgacatactggcggaacaaaggaaaataaggattgatgataacctggttgtttatataggaaacacgattacaccatccgaactggcaaaaaaactaaatattcctgcattcgatgccggagttttcatttgtgatcatcaaaacatactgaagtatcaccgaaacagactatag

SEQ ID NO: 476197 - DNA, 531 bp, Shigella flexneri
  misc_feature (515)..(524): n is a, c, g, or t
atgatgacgacaaaactatcactccctgaacttgacacaactaaactgcctgacaggtgccaggcattacttgatgaaatgcatgaagaaacaggaatacgccgtgaaatacttctgtctgttatgctgacggtcatggctgcctcggtccaggatacgcatgaagttgaactttccggagggcaacgtaccagccttcagatatttatgtgtctttcatcagcatcaggcagtggaaaaacctctgcctgcgcaaaattaatcgctcctgttcatgaaacagaagaagaactacatcaggcatatatcgacgataaaaaaaactatgaccgaatgatggaaatgtggacaacagataaaaaaatcctggagcggagatataaaaaggaaattgaaagatccccggaaaatgctgctgctgcacgagcagcacttgaaaagtgtatagcaaataaacccgaacctcccgtacaacaggttctcatcgtgaatgacgcgacaccagaagggatagnnnnnnnnnngctttga

SEQ ID NO: 476198 - DNA, 288 bp, Shigella flexneri; identical to SEQ ID NO: 15969

SEQ ID NO: 476199 - DNA, 1071 bp, Shigella flexneri
atgaacattgagttactgcaacagttgtgcgaagccagcgccgttagcggcgatgaacaggaagttcgcgacatcctgataaacacgctggaaccttgcgttaatgaaatcacctttgatggtctgggcagctttgttgcccgtaagggaaataaaggtccaaaagttgccgttgtcgggcatatggatgaagtcggctttatggtcacccacatcgacgagagcggttttctgcgtttcaccaccattggtggctggtggaatcagtcgatgctcaaccatcgggtaaccatacgcacacacaagggagtgaaaatccctagtgtgattggtttcgtcgcgcctcatgcgttaacggaaaagcaaaggcaacagccgctgtcatttgatgagatgttcattgatattggcgcaaacagtcgcgatgaggtggaaaaacgcggtgtggcgatgggcgattttattagcccggaagccaattttgcctgctggggcgaagataaagtggtcggcaaggcgctggataaccgcatcggctgcgcaatgatggctgaactattgcagacggtgaataatcccgaaattacgctgtatggcgtcggcagcgtggaagaagaagttgggctacgcggggcacaaacctcggcggaacacattaaaccggatgtagtgatcgtgctggataccgctgtcgcaggcgatgttccgggcattgataacattaaatacccgctgaaactgggccaggggccggggctgatgctgtttgacaagcgctacttccccaaccagaaactggtagcagcgttaaaaaactgtgccgcacataacgatttaccgctgcaattttccaccatgaaaaccggagcgacggatggcgggcgctacaacgtgatgggcggcgggcgtccggttgttgcgctgtgcctgccaacccgctatctgcacgctaacagcggcatgatttcaaaagccgattacgatgctctgctcacgttgatacggggttttctgacgaccttaaccgcggagaaagtcaacgcgtttagccagttccgtcaggtggattaa

SEQ ID NO: 476200 - DNA, 276 bp, Shigella flexneri
atgttaaagcagaaaattaaaacaatatttgaagcattgctatatataatgcttacttattggttaatagattctttttttgctttcaataagtatgactggatgcttgagtcgggaggcaatatttgcagtataccttccgtttcaggcgaagatcgtatattgcaagcaatgattgcagcattttttcttcttacgccacttattattcttatcttaagaaaactctttatgcgggaaatgttcgagttttgggtaatgactccaacttactga

SEQ ID NO: 476201 - DNA, 828 bp, Shigella flexneri; identical to SEQ ID NO: 470776

SEQ ID NO: 476202 - DNA, 480 bp, Shigella flexneri
atgaccaatattaatacagcttgtgtaaaaaataatgccagttatcaacttaataacgcattacctaacaaagaaaccatctccagcaatttttgtgaacgactagaacaatggggtaataaatcggttaataatggtgaagaaagagcaattgccgtggagcgaattaaagaagcttacaattcgaacatggcatctcttgatttgtcatatcttgatttgagtgaattaccgcctatcccctcgacagttaatacgttaaatctggaaaacaattgtctaacttgtcttgacttagctgacaatgccagtctcgttaatatcaacctcagcgttaataaaattaacacgataacctttccaaaagaaccaaaactggaaaacatttatattgatcataacaatctggaaagtttagatttaaaaaatcagcattcattggttaatctggaagcgcaaaataatagcctaaaaaaatga

SEQ ID NO: 476203 - DNA, 954 bp, Shigella flexneri; identical to SEQ ID NO: 474502

SEQ ID NO: 476204 - DNA, 231 bp, Shigella flexneri; identical to SEQ ID NO: 474501

SEQ ID NO: 476205 - DNA, 1596 bp, Shigella flexneri; identical to SEQ ID NO: 473547

SEQ ID NO: 476206 - DNA, 225 bp, Shigella flexneri; identical to SEQ ID NO: 133446

SEQ ID NO: 476207 - DNA, 207 bp, Shigella flexneri; identical to SEQ ID NO: 24440

SEQ ID NO: 476208 - DNA, 480 bp, Shigella flexneri; identical to SEQ ID NO: 464934

SEQ ID NO: 476209 - DNA, 147 bp, Shigella flexneri
atgcgcaaatatcgcctaagtgaagaacagcgagcctttagttatcaggaagatggcactaaaaaaagtgtgttattacggcagattatcgccattagcgattttaacgatgtgatagcggctggatcgatcgcgaaacggtgttag

SEQ ID NO: 476210 - DNA, 2181 bp, Shigella flexneri
atgatcaagttatctgaaaaaggcgtgtttctcgccagtaataacgaaataattgccgaagaacatttcaccggcgaaattaaaaaagaagaagcaaaaaaaggcactattgcctggtctattctctcttctcataatacgtccggaaatatggataaacttaaaattaagtttgattcattagcctctcacgatattacctttgttggtattgtacagaccgctaaagcgtccggaatggaacgtttcccgctgccgtatgtgctgaccaactgccataactcactctgcgccgtcggcggcaccattaacggtgatgaccatgtttttggtttatcggcagctcagcgttatggcggtatttttgtgcctccgcatattgcggtcatccatcaatatatgcgtgagatgatggctggcgggggcaaaatgatcctcgggtcagacagccacacccgttacggtgcattagggacaatggcagtcggtgagggtggcggtgagttggtaaaacagctgcttaatgacacctgggatatcgactatccgggcgtggttgcggtgcatctgaccggaaaacctgcgccgtatgtggggctacaggatgtggcgctggctatcattggcgcggtgttcaaaaacggttacgtcaaaaacaaagtcatggagttcgttggaccgggcgttagcgcgctctctaccgatttccgtaacagcgttgacgtgatgaccacggaaaccacctgtttaagctccgtctggcaaactgatgaagaagtgcataactggctggcgctgcacggtcgcggccaggattactgccagcttaaccctcaaccgatggcgtactacgatggctgcatcagcgttgatttaagcgccatcaaaccaatgattgcgctgccgttccacccgagcaacgtgtatgaaatcgacacactgaaccagaacctgaccgacattctgcgtgagattgaaattgagtccgaacgcgtggcgcacggtaaagccaaactctcgctgctggataaagtggaaaatggtcgcctgaaagtgcagcaggggattatcgcgggctgttctggcggtaactacgaaaacgtcatcgcggcggcgaatgcactgcgcggtcaatcctgtggcaatgacaccttctcgctggcggtttacccgtcatcacagccggtgtttatggatctcgccaaaaaaggtgtggtagcagatttgattggcgcaggcgcaatcatcagaaccgcattctgtggcccatgctttggcgcgggcgatacgccaatcaacaacggtttgagtattcgccacaccacgcgtaacttcccgaaccgcgaaggctctaagccagccaatgggcagatgtcagcggtggcgttgatggacgctcgttctatcgctgcgactgcggcaaacggtggctatttaacctctgccagcgaacttgattgctgggacaacgtgccggagtacgccttcgatgtaacgccgtataaaaaccgtgtttatcagggctttgtgaaaggggcaactcagcaaccgctgatttacggaccgaacattaaagactggccggaattgggtgcgctgactgacaatatcgtcctgaaagtgtgctcgaagatcctcgacgaagtcaccaccaccgacgaactgattccttccggtgaaacctcttcttatcgttcaaatccgattggtctggcggggaatgtcagcgagctgacagaggtgtttgcgcgcattaagcagattgctggtcaggagcatattgatccgctgcaaactgaaattggcagcatggtctatgcggtgaaaccaggcgatggttctgcgcgtgaacaggcggcgagctgccagcgtgtgattggcggtctggcgaatattgccgaggagtacgcgactaaacgctaccgttctaacgtcatcaactgggggatgttaccgctgcagatggcggaagtgccaacctttgaagtgggggattacatttacatccctggcattaaagcggcgctggataatccgggtacgacgtttaaaggttatgtgatccatgaagatgcgccggtaacggaaattacgctttacatggaaagcctgacggctgaagagcgcgagattatcaaggcgggtagtttgattaacttcaataaaaaccgtcagatgtaa

SEQ ID NO: 476211 - DNA, 453 bp, Shigella flexneri
gtggcggacctgacgtatgttgctggcatcaaagatgtttatacgtgcgaaattgtcggctacgccatgggagagcgcatgacaaaagagctgacaggtaaagccctgtttatggcgctcaggagccagcgcccacctgccgggctaatccaccactctgatcgaggttcacagtactgcgcatacgattaccgggtcatacaggagcagtctggtctgaaaacatcaatgtcgcgtaaaggtaactgttacgacaacgctccgatggaaagcttctggggaacgctgaaaaatgagagcctgagccactatcgttttaataaccgggatgaagccatctcagtaatacgggaatacattgagattttctacaatcgtcagcgtcgtcactctcgtctggggaatatctccccggcagccttcagggaaaaatatcatcagatgactgcttaa

SEQ ID NO: 476212 - DNA, 1158 bp, Shigella flexneri
atgcacgttacagccaagccctccagttttcaatgtaatctcaaatgtgattactgtttttaccttgaaaaagagtcgcagtttactcatgaaaaatggatggatgacagcactctgaaagagttcatcaaacaatatatcgaagcgtctggcaatcaggtctattttacctggcaaggcggtgaacccactctggctggcctggattttttccgtaaagttattcactatcaacaacgctatgcaggccaaaaacgtatttttaatgcattacaaacgaatggcattttattgaataatgaatggtgtgcctttctcaaagaacatgaatttctggttggtatctcgatcgatggcccccaggagttacatgaccgttacagacgcagtaattcaggtaacggtacttttgcaaaagtgatagcagccatcgagcgtctgaaatcatatcaagtagagtttaatacgttaaccgtcattaataacgttaatgtccattatcctcttgaggtttatcattttttaaaatctatcggcagtaaacatatgcaatttatcgaattgctagaaaccgggacgccgaatattgatttcagtggtcatagtgagaacacattccgtatcattgatttttctgtgcctcccacggcttatggcaagtttatgtcaaccatttttatgcaatgggttaaaaacgatgtgggtgaaattttcattcgtcagtttgaaagctttgtcagccgttttttggggaatgggcatacaagttgtattttccaggagtcctgcaaggataatctggttgttgaaagtaatggagacatttacgaatgcgaccattttgtctatccacagtacaaaattggaaacattaataaatctgaactcaaaacgatgaacagtgtacaactgacagcgcaaaaaaaacggatttcagcgaaatgtcagcaatgtgcatataaacctatctgcaatggcggttgtcctaagcatcgtattactaaagtaaacaatgagactgtttcttatttttgcgaaggttataaaatccttttttcaaccatggtaccttatatgaacgccatggttgagttagctaagaacagagtaccgctttaccacattatggatgttgcaaaacaaatggagaataattaa

SEQ ID NO: 476213 - DNA, 216 bp, Shigella flexneri; identical to SEQ ID NO: 5123

SEQ ID NO: 476214 - DNA, 660 bp, Shigella flexneri; identical to SEQ ID NO: 52324

SEQ ID NO: 476215 - DNA, 378 bp, Shigella flexneri; identical to SEQ ID NO: 16790

SEQ ID NO: 476216 - DNA, 2967 bp, Shigella flexneri; identical to SEQ ID NO: 59353

SEQ ID NO: 476217 - DNA, 561 bp, Shigella flexneri; identical to SEQ ID NO: 15275

SEQ ID NO: 476218 - DNA, 201 bp, Shigella flexneri; identical to SEQ ID NO: 5005

SEQ ID NO: 476219 - DNA, 1014 bp, Shigella flexneri; identical to SEQ ID NO: 5004

SEQ ID NO: 476220 - DNA, 876 bp, Shigella flexneri; identical to SEQ ID NO: 8102

SEQ ID NO: 476221 - DNA, 780 bp, Shigella flexneri; identical to SEQ ID NO: 15990

SEQ ID NO: 476222 - DNA, 216 bp, Shigella flexneri; identical to SEQ ID NO: 5123

SEQ ID NO: 476223 - DNA, 153 bp, Shigella flexneri; identical to SEQ ID NO: 475863

SEQ ID NO: 476224 - DNA, 714 bp, Shigella flexneri; identical to SEQ ID NO: 471222

SEQ ID NO: 476225 - DNA, 207 bp, Shigella flexneri; identical to SEQ ID NO: 24440

SEQ ID NO: 476226 - DNA, 384 bp, Shigella flexneri
ttggtacgccagcccaacggcggtactcgcaaacttccctgctaccaaattacccgcggcggcttcgccttccttgctatgggcttcactggtaaacgtgccgcccggttcaaagaggcatacatcaatgcctttaaccagatggagaggagcttatcaggagctggtgcggctgacatgtcatctgtcgcacaaaacgccagaggcgtatacctgcatttgcgtgaaatccatcaaatctggacaagccagctttacccaatgcttaaggccgttgaatctccgctggctggcaaactgtacgaccgtgtaggtgatgctgtttttggtgctgcacttgttgattccaggctgaatggttctgacaaggaggtgcgcccatga

SEQ ID NO: 476227 - DNA, 219 bp, Shigella flexneri; identical to SEQ ID NO: 473975

SEQ ID NO: 476228 - DNA, 834 bp, Shigella flexneri
atggtctgccagatggaactgaccagccatctgctgacggctgcagccttcggcacgatgaagaacagcgaaaatgagcttgctgagcaacttatagaacaaaccggcgataacactctgacgttaatggataaaggttattactcactgggactgttaaatggctggagcctggcgggagaacaccgccactggatgatacctctcagaaagggagcgcaatatgaagagctcagaaaactgggtaaaggcgatcatctggtgaagctgaaaaccagcccgcaggcacgaaaaaagtggccgggactgggaaatgaagtgacagcccgcctgctgaccgtgacgcgcaaaggaaaagtctgccatctgctgacgtcgatgacggacgccatgcgcttccccggaggagaaatggcggatctgtacagtaatcgctgggaaatcgaactgggatacagggagataaaacagacgatgcaactgagcaggctgacgctgagaagtaaaaagccggagcttgtggagcaagagctgtggggtgtcttactggcttataatctggtgagatatcagatgattaaaatggcggaacatctgaaaggttactggccgaatcaactgagtttctcagaatcatgcggaatggtgatgagaatgctgatgacattgcagggcgcttcaccgggacgtataccggagctgatgagcgatcttgcaagtatgggacaacttgtgaaattaccgacgagaaggggaagggccttcccgagagtggtaaaggagaggccctggaaataccccacagccccgaaaaagagccagtcagttgcttaa

SEQ ID NO: 476229 - DNA, 207 bp, Shigella flexneri; identical to SEQ ID NO: 24440

SEQ ID NO: 476230 - DNA, 129 bp, Shigella flexneri
atggcggaaaatcgtgttgaggccaacgccaataaagcgggcggttgcccggcatccgacgccattcatggccatatcaatgattttctggtgtgtaccgggttgagaggcggtgtaagtgaactgtag

SEQ ID NO: 476231 - DNA, 1521 bp, Shigella flexneri
atgtttttaatttcaattattcaaatgttctcggttatgattataatgcttaatataaaaataaaagatgcatttagagcaattattctgcttttacttctattactatccatggttatatctattgaaataagcagcattatatcaataggtgagtacatacccacacttgcactagcaaatatatcagagacaaatagtgttggctggaaaataaaactactaccttttcttgtgttcttgtcatttatgattgcatcattgattttgaaaagattgataaaagaaaaaaaaataagaaatataatgattgttgtttttttattatcattgttaataccaatatctccaataaatgcttttttttcttcatcatataaagtttattcggaagcaaaagaatacaatatgtcaccacatgaaataagtgatataaagtcaaaatacacaaaagaaatagtaacaaacgacagttactcacatgaaataataaatggaaacggaaaaaatattttagtaatatttattgaaggtatgtcttcattggtaatatctaaggagctaaccccgaatttatatgaatttagaaaaaaatcaatatcatttaacaactattacaaccataccgcagctacatttagaggtttaagaggacagttaacctcatcatatcaaatgaccggtgggtaccataaagataattctggccttggccaagcatctaaagtagagatcgaacataaactaaatacttacaattacataacaaaattaccaatcatacttgaggaaaatggttaccatacatattttcaagcatctaattcaatagatgacccattgagtttaatgctatcaactttaaagtttaatcatatatacggaagggaggactataacaaaaagtcaggtgaactcacagacaaagagtctttcgatttattatttaaaaaattaaatgaggctaaacaacctttcttctatggtgtttatactgtaggtacacaccttggcttagatagccctgatgtaaagttttatgatgggagaaatgaatatttaaatcactttcatcaattagaccattggtttggtgattttatatctcattttaataagacaagcttatcgaaagatacaattatcataatcacaagtgaccatgcaagttacccatcagaagattacaaaaaaacattcaaaactgataatactttttttgttgatcagattccattaataatatggagtaatggtgttgagttcaaagacattaatgcacacggtttaaattcactatctttaacgccaacaatactagatattcttgggatcaaggagtcacacaacatgttcataggtgagtctctatttgaaaaagaaaaaaataaaaatgaactcaactgtacatctgcaataggtgacctgtatgtgaaaacgtgtaatggaaaaatggaaatcgagaaaagaaaagaaaaaacagaattaataaaacaattgcaactttttggtgatagataa

SEQ ID NO: 476232 - DNA, 732 bp, Shigella flexneri
gtgcgcatcgcagggaaagaacgcgctattctggcgaaatacatccagttcaatcagcctcacgccatgttctggctgggatttgatgttgaccgcatcggcgcagccattgactggagcgaccgcaacgctcccgcacctacgctgaccatcaccaaccccgaaaacggacacgcgcacctgctttatgcgctggaaacctctatacgcacagcacctgacggaaaaatgaaaccgttacgctacgcagctgccgtagagaatgcgctacgtagaaaattgggagctgacacgggatattctgggctaatttgcaagaatccgaaccacagtcactggaaaattgccgccgattatggtttaggccgtaactgcactctgttcgacaaaacccgcaagtgggcatatcgtgccatccgtcaggggtggcctgagtatgagcagtggttacaagcctgctatgaacgagcctgtgcctacaatttacaattcgtatcaccattaagtgaaaatgaagttcttggaatatcaaaaagcatctcaaaatggacagcgaataatttttcagaggatcgttttattgagtatgtaaaaaatacgcaccgttcagaaattcaaagaaagagagggggtaaaggaggaaagctaagcaattcaggaggacggcctaaaggtagttttaatattaattcctataactttaaaaaaagaatgggagtctttaggtgttag

SEQ ID NO: 476233 - DNA, 237 bp, Shigella flexneri
atgaccgagatggaaaggcagcttctgagcgccttagaaagcttacaaacaagttacgaacaacagcaacaggcgtggcaggacagttacagcagcgtgcaacgcatgttcgagactacctcacaggcactggagcgcaacgacagggtatgtctgaacttgagcaatcaggtaaacgccttgcacgaacaggtcgaacgcttgagcagcgatctgagccgattaacacgctcgtaa

SEQ ID NO: 476234 - DNA, 273 bp, Shigella flexneri
ttgaaaaaaatattcatcctatcggcagcgctgatcatggcaggatacgcaacaaagcaatatccacaggccgcgaacgtcaccggtccagaatcttccgcaatggattgcaaagcggtagctctggaaatcgccaaaacgcgcagtgtacaacaagaaattgaggaaaccggcgaatttgacgggcgcaccgtattaggtttcctgggtgattttgggataggaaatggcatggcaaaaggcgaagcccgcaaaaagcagctaaccggctaa

SEQ ID NO: 476235 - DNA, 369 bp, Shigella flexneri
atggcgaattttaaccctggtccaagaacagccattgcggctgtcagggattccaagaacgatatagaaacctggaagaaaaatggtatccgtagggaagagattgtgactgtgctgaatgaacgttacggcctgaatatctcactggttgcgtttgataaggctctttacagattgagaaaaagtacagatgaaccgtctcttgctgatgtggattctgtgtctgctgcagaaacgaatttctctgaagccagtgggcctgacaatggtttttttctgtccgggaatgacttcatgcgagcagaagaagaatctcaaagagtggttgagtcattcagagatagccttagcaggaagaaaggattctga

SEQ ID NO: 476236 - DNA, 150 bp, Shigella flexneri
atgccatctgaacatgatgaacaactggattcgactgatacgcagcttcccggcgaatatgacctttttgatttaatggtgcaggttactgaagagaacctgcacgccccggtggcttttgggccgcctgtcggccgggaagcgttatag

SEQ ID NO: 476237 - DNA, 288 bp, Shigella flexneri
gtggcccacgtttttggtgaacgcacaatgttcacgctggagcgtcttctgagcctgctatcggcctttgacgtggtggtattgatgacggacggatggccgctttatgaatcccgcctgaaggaaaagctgcacgttatcagcaagcgatatacgcagcgaattgagcggcataatctgaggcagcatctggtaaggccgggacggaagtcactgtcgttctcaaaatcggtggagctgcatgacaaagtcatcgggcattatctaaacataaaacactatcagtaa

SEQ ID NO: 476238 - DNA, 834 bp, Shigella flexneri
atggtctgccagatggaactgaccagccatctgctgacggctgcagccttcggcacgatgaagaacagcgaaaatgagcttgctgagcaacttatagaacaaaccggcgataacactctgacgttaatggataaaggttattactcactgggactgttaaatggctggagcctggcgggagaacaccgccactggatgatacctctcagaaagggagcgcaatatgaagagctcagaaaactgggtaaaggcgatcatctggtgaagctgaaaaccagcccacaggcacgaaaaaagtggccgggactgggaaatgaagtgacagcccgcctgctgaccgtgacgcgcaaaggaaaagtctgccatctgctgacgtcgatgacggacgccatgcgcttccccggaggagaaatggcggatctgtacagtcatcgctgggaaatcgaactgggatacagggagataaaacagacgatgcaactgagcaggctgacgctgagaagtaaaaagccggagcttgtggagcaagagctgtggggtgtcttactggcttataatctggtgagatatcagatgattaaaatggcggaacatctgaaaggttactggccgaatcaactgagtttctcagaatcatgcggaatggtgatgagaatgctgatgacattgcagggcgcttcaccgggacgtataccggagctgatgcgcgatcttgcaagtatgggacaacttgtgaaattaccgacgagaaggggaagggccttcccgagagtggtaaaggagaggccctggaaataccccacagccccgaaaaagagccagtcagttgcttaa

SEQ ID NO: 476239 - DNA, 3054 bp, Shigella flexneri
atgacctggggcgagcaaaccgacgtaccggaatctgccgactggtataactccagctacatcatcgcttgggggtctaacgtaccgcagacacgtacgccggacgcccacttctttaccgaagtacgctacaaaggcactaaaaccatcgccattacccctgactactctgaagtggccaaattgtgcgaccagtggctggcaccgaaacaaggcactgatagcgccctggcgatggcaatggggcatgtgattttaaaagagtttcatctcgataatcccagcgactactttatcaactactgccgccgctacagcgacatgccgatgctggtaatgctggagcctcgcgacgatggtagctacgttcccgggcgcatgatccgcgcatctgacctggtggatggactgggcgaaagcaacaatccgcagtggaaaaccgtagcagttaataccgcaggtgaattggtagtgccgaacggttcgattggtttccgctggggagaaaaaggcaaatggaatctggaatccattgccgccggtacggaaaccgaattgtcgttaaccctgctcggtcaacatgacgctgttgcaggcgtggccttcccctactttggcggcattgaaaatccgcattttcgcagcgtaaaacacaatccggtgctggtgcgccaattgcccgttaaaaacctgacgttagtcgatggcaacacctgtccggtggtcagtgtttatgatttggtactggcgaattacggcctcgatcgcgggctggaagatgaaaacagcgcgaaagattacgctgaaatcaaaccgtacaccccagcctggggtgagcaaattaccggcgtaccgcgccagtatattgaaaccatcgcccgcgaatttgccgatatcgcccataaaacgcatgggcgctcaatgattatcctcggcgcaggtgttaaccactggtatcacatggacatgaactaccgcgggatgatcaatatgctgatcttctgcggttgtgtcgggcaaagcggtggcggctgggcacactatgtcggccaggaaaaactgcgcccacaaaccggctggttgccactggcctttgcgctcgactggaaccgaccaccgcgccagatgaacagcacctcgtttttctacaatcattccagccaatggcgctatgaaaaagtctctgctcaggagttactttcaccgctcgccgatgccagtaagtacagcggtcatctgattgatttcaacgttcgcgccgaacgtatgggctggctaccttctgcgccgcagctggggcgtaacccgctcgggattaaagctgaagccgacaaggccggattatcccccacagaatttaccgcccaggcgctgaaatcgggcgatttacgtatggcctgcgaacaaccagatagcggcagcaatcatccgcgtaatttgtttgtctggcgctctaacctgcttggctcctccggcaaaggccacgagtatatgcagaagtatctgctggggaccgaaagcgggattcagggcgaggaactcggtgccagcgacgggatcaaaccggaagaagtcgagtggcaaactgcggcgattgaaggcaagctcgacctgctggtgacgctcgacttccgcatgtccagtacctgcctgttctccgatatcgttctgcccaccgccacctggtatgaaaaagacgatatgaacacctcggatatgcatccatttattcatccgctttctgcggcggtcgatccggcctgggaatcacgcagcgactgggaaatctacaaaggtattgccaaagcattttcgcaagtgtgcgtgggccatcttggcaaagaaaccgacgtggtattacaaccactgctgcatgactctccggcagagctctcacagccgtgtgaagtgctcgactggcgcaaaggcgaatgcgatctgatcccgggtaaaaccgcgccgaatattgtggcggtggagcgcgactaccctgctacgtatgaacgctttacctcgctcgggccattgatggacaaacttggcaatggcggtaaagggatttcgtggaatacccaggatgaaatcgatttcctcggcaaactcaattacaccaagcgtgatggcccggcacaggggcgtccgctgattgacaccgccattgacgcttcagaagtgattctggcactggcaccggaaaccaacggtcatgttgcagtcaaagcgtggcaggcgctgggcgagatcaccgggcgcgaacatacccatctggcgctgcacaaagaggacgagaagattcgctttcgcgatattcaggcgcagccgcgtaaaattatctccagccccacatggtccggtctggaaagcgatcacgtatcctataacgcgggatacaccaacgttcatgagttaattccgtggcgcacgctgtcgggacgccagcagctctatcaggatcatccgtggatgcgtgcttttggtgaaagcctggtggcttatcgcccgcctatcgacacccgtagcgtcagtgagatgcgccagataccgccaaacggcttccaggaaaaagcacttaacttcctgacgccgcaccagaaatggggcattcactcaacctacagtgaaaacctgctaatgctgacgctctctcgcggtggaccgattgtctggatcagcgaaacagatgcccgagaactgaccattgtcgataacgactgggtggaagtatttaacgccaacggcgcgctgactgcccgcgcggtggtcagccaacgtgtaccgccgggcatgaccatgatgtatcacgcccaggaacgcattatgaatattcctggttcggaagtaactggcatgcgcggcggcattcataactcggtcacccgcgtttgcccgaaaccgacgcatatgattggcggttacgcgcagctggcctggggctttaactactacggcaccgtcggctcgaaccgcgacgaattcatcatgatccgcaagatgaagaacgttaactggctggatgatgaaggtcgcgatcaggtacaggaggcgaaaaaatga

SEQ ID NO: 476240 - DNA, 243 bp, Shigella flexneri; identical to SEQ ID NO: 464857

SEQ ID NO: 476241 - DNA, 174 bp, Shigella flexneri; identical to SEQ ID NO: 30365

SEQ ID NO: 476242 - DNA, 375 bp, Shigella flexneri
gtgtcagacaaactctccgggataactcatcccgatgacaatcacgaccgcccctggtgggggcttccctgcacagtgaggccctgttttggcgctcgtctggtgcaagagggtaaccgcctgtattaccttgccgaccgcgccggtatcagaggccgcttcagcgacgcagatgcataccatctggaccaggcctttccgctgctgatgaaacaactggaactcatgctcaccagcggtgaactgaatccccgatatcagcataccgtcacgctgtatgcaaaagggctgacctgcgaagccgacaccctcggctcctgtggttacgtttatctggctgtttatccgacaccagcacccgcaaccacctcataa

SEQ ID NO: 476243 - DNA, 375 bp, Shigella flexneri
atgaaaacattatccgacacacatgtacgggaggtatctcgctgcccgtctcccgtcaccatctggcagacactgctcatccgactgctggaccagcattatggcctcacactgaatgacacaccgtttgtcgatgaacgtgtgattgagcagcatattgaggcaggcatttcactgtgtgatgcagttaattttctcgtggaaaaatacgcgctggtgcgtaccgaccagccgggattcagcacctgtccccgctctcagttaataaacagtattgatatcctccgggctcgccgggcgaccggcctgatgacccgcgacaattacagaacggtaaataacattaccctgggtaagtatccggaggcgaaatga

SEQ ID NO: 476244 - DNA, 492 bp, Shigella flexneri; identical to SEQ ID NO: 463435

SEQ ID NO: 476245 - DNA, 198 bp, Shigella flexneri; identical to SEQ ID NO: 81716

SEQ ID NO: 476246 - DNA, 564 bp, Shigella flexneri; identical to SEQ ID NO: 463434

SEQ ID NO: 476247 - DNA, 207 bp, Shigella flexneri; identical to SEQ ID NO: 24440

SEQ ID NO: 476248 - DNA, 207 bp, Shigella flexneri; identical to SEQ ID NO: 476087

SEQ ID NO: 476249 - DNA, 270 bp, Shigella flexneri
atggcacaggttaatatgagtttaagaatcgacgctgaactgaaggatgcttttatggccgctgcaaaaagcatggaccgtaatggctctcagttaatccgggattttatgcgccagaccgttgaacggcagcataatacctggtttcgtgaccaggttgaggcaggacgtcagcaactcgggcgcggcgatgtgcttccccatgacatggtcgaatcttccgctgctgcatggcgggatgaaatgagcaggaaggttgccggtaaatga

SEQ ID NO: 476250 - DNA, 282 bp, Shigella flexneri
atgatggagatattctggaccatgctggccagccaggacagaaagcgcattcgtgagtacattgcggagcagaacctgatggctgccattgaactggacgaacggattggttattcagccagcagcctggccgggcagccgtataaaggccgcaacggtcgtgtggaaggtacccgggaactggttattcacccccattttgttctggtttatgaggtcgacagccagtggggaaaagtgtatatcctgcgcgtattgcatactgcacagaagtggccatag

SEQ ID NO: 476251 - DNA, 882 bp, Shigella flexneri
atgtctgaaacatcaaaatttatagatgcagttaagaagtactattcagatgataaaaatacgcttgatttttattcagaactgttttgtgaaatggaacaaaaggacctattagatagtaactttatctcacaaatgaataataatgagaattcccgacagagattatcagaattactgatgtttaaatattgtttgacatcttctgtaggggcgatatcgagcgaagatagtggacctgacattaagtttaattttaacgacagaaaagtaaatattgaagttgttacgccatttataactaaacaagaggaggcttcttggagtgtttttgaattttctttgacagaaagcaaaggctacaaaaggagtcaaaatattcccagtatagatactttacatcccaggataacaggttctttgaaggaaaaactaataaaatataaaaaatattttgctgcgaataaagtcaatgatgatgatataaatatcatctgcataaatgttggttttattgaaaatatagattgtgtggatttccctaatttaaaaaatttgttctataagcaagaaataatccgtccagaacgtaatagtgaagggggtatatcattgtcgatagaaaaacatgatttcatagtaaaaaaagataacggtgaagcttttagaacaagttacattgataatgaagaggaatgtttgcatatagatggagtttggcttataaactgcaatgaaagaagttttaaggagattaaaaaatttaaatatgatgattttaaaatatatgaaaatgttatttatcaaaaaagtaattcaaaaataccagatgaattgctgacttctctgagcataaataaacccaaacgagtttgcgtataa

SEQ ID NO: 476252 - DNA, 357 bp, Shigella flexneri
atgtctggcaataacgtttttgatgggttgttttccagcccggagcgcgatattgctgccagtcacggaaaccccgtattcatataccatgttgatgatgataaaatagctaaatcccgcgatcttgatgctcgttttcaagaggtttatgccttcttacataacgaactggatactgctgacgtagaggaaatagctgatcgcgtcatgtgggataacaattcagatatcgaagatttcgcagatattctctcgccacgcctcggcagcgattgttctattcttgtttgtttatacgcaaactcgtttgggtttatttatgctcagagaagtcagcaattcatctggtatttttga

SEQ ID NO: 476253 - DNA, 354 bp, Shigella flexneri
atgatggacaagcgcagaaccattgcctttaagctaaatccagatgtaaatcaaacagataaaattgtttgtgatacactggacagtatcccgcaaggggaacgcagccgccttaaccgggctgcactgacggcaggtctggccttatacagacaagatcccagggcccctttccttttatgtgaactgctgacgaaagaaaccacattttcagatatcgtgaatatattgagatcgctatttccaaaagagatggccgattttaattcttcaatagtcactcaatcctcttcacaacaagagcaaaaaagtgatgaagagaccaaaaaaaatgcgatgaagctaataaattaa

SEQ ID NO: 476254 - DNA, 963 bp, Shigella flexneri
atgttggtattcattgatgacggttcaacaaacatcaaactacagtggcaggaaagcgacggaacaattaaacagcacattagcccgaacagcttcaaacgcgagtgggcagtttcttttggtgataaaaaggtctttaactacacactgaacggcgaacagtattcatttgatccaatcagcccggatgctgtagtcacaaccaatatcgcatggcaatacagcgacgttaatgtcgttgcggtgcaccacgccttactgaccagtggtctgccggtaagcgaagtggatattgtttgcacacttcctctgacagagtattacgacaggaataaccaacccaatacggaaaatattgagcgtaagaaagcaaacttccggaaaaaaattacattaaatggtggggatacattcacaataaaagatgtaaaagtcatgcctgaatctataccggcaggttatgaagttctacaagaactggatgagttagattctttattaattatagatctcgggggcaccacattagatatttctcaggtaatggggaaattatcggggatcagtaaaatatacggagattcatctcttggtgtatctctggtcacatctgcagtaaaagatgccctttctcttgcgagaacaaaaggaagtagctatcttgctgacgatataattattcacagaaaagataataactatctgaagcaacgaattaatgatgagaacaaaatatcaatagtcaccgaagcaatgaatgaagcacttcgtaaacttgagcaacgtgtattaaatacactcaatgaattttctggttatactcatgttatggttataggtggtggcgcagaattaatatgcgatgcagtaaaaaaacacacacagattcgtgatgaacgtttttttaaaaccaataactctcaatatgatttagttaacggtatgtatctcataggtaattaa

SEQ ID NO: 476255 - DNA, 255 bp, Shigella flexneri
atgactgatcaagctgaaaaaaagcactctgcattttggggtgttatggttatagcaggtacagtaattggtggaggtatgtttgctttacctgttgatcttgccggtgcctggtttttctggggtgcctttatccttatcattgcctggttttcaatgcttcattccgggttattgttattagaagcaaatttaaattatcctgtcggctccagttttaacaccatcaccaaagatttaataggtaacacctag

SEQ ID NO: 476256 - DNA, 459 bp, Shigella flexneri
atggaatggcaacaattgcttaactgcaaccgtcggaaagataatctaaaaaaaaccaacatagcatttttacatccccttgctagcggaagacaagagatcgagcgggattacgaccgattactttttgctgcaccaactcgtcggcttgcggataaaacacaagttttcccgttagatcaaaatgacagcatacggacgaggctgactcattctcacgaagtagcaaactttgctcgcgggataggaatgaggctcgctttcgagatgaaggagcacatctttggcgaaatacccacggggattgtcgttgaacgcgacgttcctgctctgttagcagcgatcggactggcacacgatctcggtaatccaccatttgggcatctgaagtggtcaacaaaaactggccaccgagttagagtttttccagtatcgattttccgattcgtttgggggtaa

SEQ ID NO: 476257 - DNA, 375 bp, Shigella flexneri
atgacaaaagagctgacaggtaaagccctgtttatggcgctcaggagccagcgcccacctgccgggctaatccaccactctgatcgaggttcacagtactgcgcatacgattaccgggtcatacaggagcagtttggtctgaaaacatcaatgtcgcgtaaaggtaactgttacgacaacgctccgatggaaagcttctggggaacgctgaaaaatgagagcctgagccactatcgttttaataaccgggatgaagccatctcagtaatacgggaatacattgagattttctacaatcgtcagcgtcgtcactctcgtctggggaatatctcctcggcagccttcagggaaaaatatcatcagatgactgcttaa

SEQ ID NO: 476258 - DNA, 1299 bp, Shigella flexneri; identical to SEQ ID NO: 463543

SEQ ID NO: 476259 - DNA, 720 bp, Shigella flexneri; identical to SEQ ID NO: 463544

SEQ ID NO: 476260 - DNA, 939 bp, Shigella flexneri; identical to SEQ ID NO: 463545

SEQ ID NO: 476261 - DNA, 246 bp, Shigella flexneri; identical to SEQ ID NO: 463546

SEQ ID NO: 476262 - DNA, 765 bp, Shigella flexneri
gtgaccagctgctacgaaacacttgcggtgtacatttgtctgataaggaaaaataaaattaatgatgtgctgcagcattatgatgacatggaaagaaaaggattgtttggtgaattaccttcaggatatgtcaggggggcattatcgttgcttcggacagcactggaggttaaagtaaatagaaaaaatataaagtatggctcgttgttttattggcttgaccatgtaaaagcctatcaggatgcatttattgaaaaaataccacttattgatcctgtatataaggagggtgaaatacagtatgatgcgaacaattttaccctgatgcgtgttattaagatgtataattgtatgcttgaaaagatcagtacgaaaccatatattgcgcccccatatattacaggtttgcttgatgacgtagagaaggtgctggataagataaatattctgatagataaagagtatgtttatgatggtaagacgctggcagaagtcattatggaaaacaaagtattatccagtcgcgaacgtaaagaaactatgatagggcttttcacaggcagtaagaaatatactttactgcaatgtgttgagaagcttggtgtattagttcactatgtgaaatcaccggtcgatgaaattaaaaatgtgatgatgttgtatggcgataaggccgaaaacaggaacagacgcagaatgatatatgatgcgttaaccattatttgtgaagatgacatcaggaataaccctcctgagctgtcgtga

SEQ ID NO: 476263 - DNA, 564 bp, Shigella flexneri; identical to SEQ ID NO: 463476

SEQ ID NO: 476264 - DNA, 219 bp, Shigella flexneri; identical to SEQ ID NO: 15966

SEQ ID NO: 476265 - DNA, 297 bp, Shigella flexneri; identical to SEQ ID NO: 463478

SEQ ID NO: 476266 - DNA, 342 bp, Shigella flexneri; identical to SEQ ID NO: 463479

SEQ ID NO: 476267 - DNA, 834 bp, Shigella flexneri; identical to SEQ ID NO: 476228

SEQ ID NO: 476268 - DNA, 261 bp, Shigella flexneri
atgacacagggctggcgggaggataaatgcccgtctgtccgcgccgggaaaagaccgcgcgccggtggcgctgaaaggggccgcgctcacgcgccgcccctttcattacgcggacgttctgatgggggcttctgtcttttcagatctgtcatttgtctgttactgatgatgttgttgttcctgctactgctactgctactgctactgctactgctactgctactgctactgctactgctcttctttttcctgccgctctga

SEQ ID NO: 476269 - DNA, 906 bp, Shigella flexneri
gtggatagcgcacgcgcccttattgcccggggatggggagtaagcttagtcagccgttgtctccgggtgtcgcgtgcgcagttgcacgtcattctcagacgaaccgatgactggatggatggccgccgcagtcgtcacactgatgatacggatgtgcttctccgtatacaccatgttatcggagagctgcccacgtatggttatcgtcgggtatgggcgctgcttcgcagacaggcagaacttgatggtatgcctgcgatcaatgccaaacgtgtttaccggctcatgcgccagaatgcgctgttgcttgagcgaaaacctgctgtaccgccatcgaaacgggcacataccggcagagtggctgtgaaagaaagtaatcagcgatggtgctctgacgggttcgagttccgctgtgataacggagaaaaactgcgtgtcacgttcgcgctggactgctgtgatcgtgaggcactgcactgggcggtgactaccggcggcttcaacagtgaaacagtacaggacgtcatgctgggagcggtggaacgccgcttcggcaacgatcttccgtcgtctccagtggagtggctgacggataatggttcatgctaccgggctaatgaaacacgccagttcgcccggatgttgggacttgaaccgaagaacacggcggtgcggagtccggagagtaacggaatagcagagagcttcgtgaaaacgataaagcgtgactacatcagtatcatgcccaaaccagacgggttaacggcagcaaagaaccttgcagaggcgttcgagcattataacgaatggcatccgcatagtgcgctgggttatcgctcgccacgggaatatctgcggcagcgggcttgtaatgggttaagtgataacagatgtctggaaatatag

SEQ ID NO: 476270 - DNA, 888 bp, Shigella flexneri; identical to SEQ ID NO: 474634

SEQ ID NO: 476271 - DNA, 255 bp, Shigella flexneri
atgattgttcgtccacaacaacactggctgcgccgtatttttgtctggcacggctcagtattatccaagatatcctcgcgcttactactcaattttctcttttctattgctgttatattcatgctgccctggtacacgcatctgggcatcaaattcaccctcgcaccgttcagcattctcggtgtcgccatcgccatttttcttggttttcgtaataatgccgggtacgcccgccgggtacgcccgttacgttga

SEQ ID NO: 476272 - DNA, 477 bp, Shigella flexneri; identical to SEQ ID NO: 475559

SEQ ID NO: 476273 - DNA, 834 bp, Shigella flexneri; identical to SEQ ID NO: 476088

SEQ ID NO: 476274 - DNA, 834 bp, Shigella flexneri
atggtctgccagatggaactgaccagccatctgctgacggctgcagccttcggcacgatgaagaacagcgaaaatgagcttgctgagcaacttatagaacaaaccggcgataacactctgacgttaatggataaaggttattactcactgggactgttaaatggctggagcctggcgggagaacaccgccactggacgatacctctcagaaagggagcgcaatatgaagagctcagaaaactgggtaaaggcgatcatctggtgaagctgaaaaccagcccgcaggcacgaaaaaagtggccgggactgggaaatgaagtgacagcccgcctgctgaccgtgacgcgcaaaggaaaagtctgccatctgctgacgtcgatgacggacgccatgcgcttccccggaggagaaatggcggatctgtacagtaatcgctgggaaatcgaactgggatacagggagataaaacagacgatgcaactgagcaggctgacgctgagaagtaaaaagccggagcttgtggagcaagagctgtggggtgtcttactggcttataatctggtgagatatcagatgattaaaatggcggaacatctgaaaggttactggccgaatcaactgagtttctcagaatcatgcggaatggtgatgagaatgctgatgacattgcagggcgcttcaccgggacgtataccggagctgatgcgcgatcttgcaagtatgggacaacttgtgaaattaccgacgagaaggggaagggccttcccgagagtggtaaaggagaggccctggaaataccccacagccccgaaaaagagccagtcagttgcttaa

SEQ ID NO: 476275 - DNA, 288 bp, Shigella flexneri
atgaaaatcgaagaattgcgtgaaatttttagtgaaaatggcctctatgctgtgcgcgttgagaatggagcgattgtcagccattgccgcattagatgtttgcaatctcaacaaaggaagagcggtgctgtgttattttatttttgtaatggacttctgacggacggttttattttgcgtgaggacgaatttgtcacatcattacgggttttgaaaaagattggttttaaggctggttttctgcttttgctgaagaataaactcatctacaatcttgagcaggattga

SEQ ID NO: 476276 - DNA, 249 bp, Shigella flexneri; identical to SEQ ID NO: 25922

SEQ ID NO: 476277 - DNA, 1455 bp, Shigella flexneri; identical to SEQ ID NO: 474451

SEQ ID NO: 476278 - DNA, 1842 bp, Shigella flexneri
atgaggccaagtgaacttagcgacctgctttgggcgcaggttgacagggtggctccgcacctgttgccaaacggcaagatagaggggcatgagtgggttgccggtaacgtcaacggtgacaagggaaacagccttaaggtcaaccttatcggcaagaaaaaatgggctgatttcgctgagggagacggcggtgacatgcttgatttgtggatggcatgtcgtggaattaacctgcatcaggctatgcaggaagcgaaagcatttctcggtatcaaggatgacgatcaccatttcgatgccagacgtgagaagaaattctccagacctgatcgtaagaaaatcgcccgctacgttaccagaacagaatcccatcttgagtacctgcaatcgcgtggcatatcgccagaagtcgtaaagcgctacgaggttgtcagcggcaaggtgtggaatggagaacgagaactggatgctctggtgcttccgtacaaacgcgatggtgagttgttgcaggtcaagcgaatcagcactgagcgcccggacgggaagaaagtcattatggcagaaggtgattgcgaaccttgcctgttcggatggcaggctctggacgctggcgtgagggcggttgtgctttgcgaaggcgaaattgattgtatgagctatgcgcaatacggcatctcggcgttatccgtgccgtttggtggcgggaaaggcgctaagcaacagtggattgagtttgagtatcacaacctcgacaggtttgaggaaatattcatctcgatggacgttgatgatgttggtcgtgaagccgcaagggaaatcgtaagccgactcggtgaacatcgttgccgtcttgttactctgccgtacaaagacatcaacgaatgcctgatgaacggtgttaccgaggatgaaatctggcagtacatcggcacggcatcctacttcgatcctgaagaactctacagtgcgcgagagttttaccaggacactatcaacgctttctacggcaagcagcagtatctgtttaatccaccgtgggaatctctggcagataaattccagttccgtgaggcagagttgacgctggtcaatggtgtgcacggtcacggaaaggcatgcccactgaatgagcctattcttttagctgatgggacatggactactcacgggaatgtaaaaattggcgatcaggtggcgtcagtagacggcaatccgtcaactgtcactgggatattcccgcagggtgttagagatgtttaccgagtcacatttgaagatggtcgttatgttgattgcgcaggcgatcacctatgggaggtcactagtcgtggattcacgaaaggcgagaaacgccgcgtgatagataccttcgggttgaagcggttgagtgaaacgaagaggcacaaaaatggcgttaggattcctgaaataactggtgactttggcgaccactcagagccattagcatgggttatcggctcccttctcggggatggtagtcttagcaatgggagcgtgaagttttcaaacgtcgagccatacatgatcgagcgtatgaaggctgaactgcctgattacaacttctctggagatggtaaggactggctgatatcaacggcgcgtggtcaggtaaatccactcatggagaccctgcgaggttatggactaatggggtgcacagcaaaaaacaaattcatccctcgtgtgtttttttccgcaaataaatcaacgcgtataggcatgctgtgtggtctgcttgaaacggatgggtatgtcgagaaggatggaacgcttgttttttcctcagcaagtgaagaactgcgcaatgaagtggcacactga

SEQ ID NO: 476279 - DNA, 303 bp, Shigella flexneri; identical to SEQ ID NO: 473532

SEQ ID NO: 476280 - DNA, 267 bp, Shigella flexneri; identical to SEQ ID NO: 462029

SEQ ID NO: 476281 - DNA, 2031 bp, Shigella flexneri; identical to SEQ ID NO: 474425

SEQ ID NO: 476282 - DNA, 267 bp, Shigella flexneri; identical to SEQ ID NO: 474508

SEQ ID NO: 476283 - DNA, 147 bp, Shigella flexneri
atgacttttaactgttccgcgtgcgctcagccgcattcaccgcatcacaaaattcactttaaaaagggcggacatcagccagcaatgaaactgatgccgccaaaggtaccaatcaacatggagtgttgtggcgtggttgtcacttaa

SEQ ID NO: 476284 - DNA, 504 bp, Shigella flexneri
atgccgggcaaccgcccgcattatgggcgttggcctcaacacgattttccgccatttaaaaaactcaggccgcagtcggtaacctcgcgcatacagccgggcagtgacgtcatcgtctgcgcggaaatggacgaacagtggggatacgtcggggctaaatcgcgccagcgctggctgttttacgcgtatgacaggctccggaagacggttgttgcgcacgtattcggtgaacgcactctggccacactggagcgtcttctaagcctgctgtcggcctttgaggtcgtgatatggatgacggatggctggccgctgtatgaatcccgcctgaagggaaagctgcacgtaatcagcaagcgatatacgcagcgaattgagcggcataacctgaatctgaggcagcacctggcacggctgggacggaagtcgctgtcgttctcaaaatcggtggagctgcatgacaaagtcatcgggcattatctgaacataaaacactatcagtaa

SEQ ID NO: 476285 - DNA, 849 bp, Shigella flexneri; identical to SEQ ID NO: 474529

SEQ ID NO: 476286 - DNA, 771 bp, Shigella flexneri; identical to SEQ ID NO: 474499

SEQ ID NO: 476287 - DNA, 378 bp, Shigella flexneri; identical to SEQ ID NO: 474621

SEQ ID NO: 476288 - DNA, 267 bp, Shigella flexneri; identical to SEQ ID NO: 462029

SEQ ID NO: 476289 - DNA, 207 bp, Shigella flexneri; identical to SEQ ID NO: 476087

SEQ ID NO: 476290 - DNA, 834 bp, Shigella flexneri; identical to SEQ ID NO: 476088

SEQ ID NO: 476291 - DNA, 546 bp, Shigella flexneri; identical to SEQ ID NO: 475459

SEQ ID NO: 476292 - DNA, 225 bp, Shigella flexneri; identical to SEQ ID NO: 133446

SEQ ID NO: 476293 - DNA, 327 bp, Shigella flexneri; identical to SEQ ID NO: 474582

SEQ ID NO: 476294 - DNA, 273 bp, Shigella flexneri; identical to SEQ ID NO: 468624

SEQ ID NO: 476295 - DNA, 741 bp, Shigella flexneri; identical to SEQ ID NO: 474595

SEQ ID NO: 476296 - DNA, 213 bp, Shigella flexneri
atgactccgattgatttcatacataaaaatgtaacaaccgagttaataaagcttgggtacgaccagaacgcggctatgactggcgctgacatggcggtggagcattaccgccgttgttcacaagccagcagaaaaggccgagttttcgatgactgcctgtacattgcaaaacagtgggcaggtaggcagaaaagggaaaaaatgacaacctga

SEQ ID NO: 476297 - DNA, 519 bp, Shigella flexneri
atgacttctatgtcacatggtgtcgattcattgaccgatattagttacagggtaagggcgttctttgatgaggtgacattagcttaccgtccactaaatgacactcagaggaaaattgttgatggtttatctggtgggttaattgatggtctgaagatgcttgctgtggctgttactgctcaaaaggctgcaaatgtagcaggaggcttgttaaaccttgcaaacgctgttacttcattcggtgacgctgttaataaagctaaagctggcaaggctggttcttcaggtggtgcgctaaataaagtcggtagagttgtcctttatgctgagttggtaaattttgctcttgataatttaaaccctgaagcagctaagaatccgaacttacatcaatcaggtattggcacagaaacaaacttcaaccctgaatacaaaggtgattcatctaagccaatagttctatcgctgactggtttaatggtacaactaataaaattgctaacttccaagaaccgatga

SEQ ID NO: 476298 - DNA, 438 bp, Shigella flexneri
atgtctgtagtgatatcaggtgcgctgactgatggcgcaggtatccccatgtccggataccatattattctgaaatcccgggtaaacaccccggaagtggtgatgaacactgttgctgatgtgatggcaggaaacgatggtgaatactgtttccatgcgcggactggaaaatatggtgtgtatctgaaacaggactggcgcaacgagtacaacgttggcgacattgctgtatatgaggactcaaagcccggcacgctgaatgactttctgattgctcctgatgagggcgacctgaaaccggatgtcgtcaaacgctttgaggaaatggtggcgcaggcgcagcagagcgccggggccgcagccggaaacgcacagcagacggcgcaggatgtggcggcagccggggcgtgctgtcaggctgaacagggaaacggatga

SEQ ID NO: 476299 - DNA, 546 bp, Shigella flexneri; identical to SEQ ID NO: 475459

SEQ ID NO: 476300 - DNA, 459 bp, Shigella flexneri
atgcaacacgctcatgacatcggacacggtgacgataatcacgctacgccccttcgccatcagccggttgccaatcgcggctgcaagatgattttttccggtgccgggcttaccgctgaacacaaaattcgtacagcctgtcatcagttcgtcagctatggatttcgcctgactcagtgcatgtcgctgaccgtcgttctgcgcccggtaattcgcaaacgaacacttccggtgcaacggctggatgccggagcggttcaggattttttccacccgcaactgacgattcaggcggttgatctcctcgcaacgtttctggccttcagcaagttgccactcgcgccactccgcaaccgttctgaatggggcggttacatgtggtggggtcagtctgcggatacgctccagaacgcctcctgtcgcaatatttttcatggtctgttaccccctgaagcctag

SEQ ID NO: 476301 - DNA, 564 bp, Shigella flexneri
gtgaaggaagccgggtgcctggcccacgcccgccgaaaaatccatgacaaggatgtgcgccgtccgacagaaatgactcaggaagcgctcagacggatagcagagttatacgacatagaagcggagatacgtggcagtccggcagaggaacggcttgcagtcagaaaagccagaagcgtccagttgatgcagtcgttgtacgactggatacagttgcagaggaaaacgctgtcgaaacatgcggagatggcgaaggcgttcgactatatcctgaatcactggaatgcgctgaacgagttctgtcgtgacggctgggtggaaatagacaacaacatcggtgaaaacgcgttacgatcggtggcggttggaagaaaaaattatctctttttcggctcagacaagggaggagaaagtgcggcgatcatctacagtctgctggtcacctgcaaacagaacgaagtggagccggaggactggttgcgcgaagtgatcgagaagctcaatgactggccgtcgaaccaagtgcatgaactgctgccctggaacttctcgtctgtaaaataa

SEQ ID NO: 476302 - DNA, 546 bp, Shigella flexneri; identical to SEQ ID NO: 475459

SEQ ID NO: 476303 - DNA, 1188 bp, Shigella flexneri
atgctcccccgttttgccgatatttttcagcagggaaaccgctggcttaactggctggagaaacaaccggaaggggcagtccgtccggtggtaattgaatcagtgacaaaaatcatggcctgcgggaccacactgatgggctacacgcagtggtgttgttcatcaccggactgttgccatacaaaaaaggtctgcttccggtgtaaaagccgctcctgcccgcactgcggggtgaaggctggcgcacagtggatacagtatctgctgagcctggtcccctactgcccgtggcagcatattgtgttcacacttccctgccagtactggtccctggtgttccacaaccggtggttactggcagagatgagccgcattgcagcggatgtgatactggaaatctgccatcaggcagatgtggagccggggatattcacggtgatccacacatgggggcgtgaccagcagtggcatccgcatatccatttatcgacaactgccggtggtgtgacgtcgggccacacctggaaaaatcttcatttttacgcccgtaaggtgatgagcatgtggcgctaccggataacacggttgctgtcacggaaataccctgacctggtgatgccggatgcgctggcagcagaaggaagcagtaaacgggaatggaatcgcttcctggacacgcattaccgccgtggctggaatgtcaacgtatcccgggtaatggataatgccacccatgtggcggtgtactttggctcttacctgaaaaagccaccggtgccgatgagtcgtctggagcattatgccggtcaggatgaaatcggtctgcgttacaacagtcaccgaacaaaacgggaagaatacctgttgatgagtggagatgagttcatggaaaggttctcctggcatgtggcggataaggggttccgtatggtgaggtactacggttttttgagtccggcgaaacggcggttactggaagaagtggtgtacatcataacggagacagtgagaaaaacggcgatgcaaatcacctggagagggatgtatcagaggttactgaaggttgacccgctgaagtgcgtgctgtgcgggagtcagatgcgttttacggggctgaagcggggctaccgtctggcagagcaggtcctgatgcatgagccgctggcccggatgcggtggtgcggctga

SEQ ID NO: 476304 - DNA, 402 bp, Shigella flexneri
gtgtggggggatatcccggacaacagcgtccagccgggagccggaaatggtgaaccggtcacggcagaggtactggcacagcggcaggctgaagaggccatccgccgtgaaacggaacgccgcgcagatgaaattgtcagaaaaatggcagagaacaaacctgacctgccggatggcaaaacagagcaggctgtcagggaaattgccgggcaggagcgtgaccgggctgacataactgaacgggaagccgcgctgccggagagtgtactgcgtgaaccacaacgggtgcgggaagcggtccgggaagttgcccgggaaaatttgctgcaggagcgtctgcagcagatggagcgggatatggttcgtgacctgcagaaagagaaaaccccgggcggagactga

SEQ ID NO: 476305 - DNA, 747 bp, Shigella flexneri
atgacaacggataacacgaacacgacacgtaacgattcactggctgcacggaccgatacctggtttcagtcatttctggtctggtcacccgggcagcgggatatcatcaaaacggtggcactggtgctgatggtactggaccacatcaatctgatattccagctgaagcaggaatggatgtttctggccgggcgaggagcctttccgctttttgccctggtgtgggggctgaatctgtcccgtcatgcgcatatccggcaaccggccattaaccggctgtggggatgggggattattgcccagttcgcatattatctggccggttttccctggtatgaggggaatatcctgtttgcctttgcagtggcggcacaggtgctgacgtggtgtgaaacgcgcagtgggtggcgtacagcagcggccattcttctgatggccctgtgggggcctttgtccggcaccagttacggcattgccgggctgctgatgctggcagtcagccaccggctgtaccgggcggaagacagagcggaacgtctggcgctggtcgcctgtctgctggctgttattccggcgcttaaccttgccaccagtgatgcagcggcggtggctggtcttgtgatgacggtgctgaccgttggtctggtgtcgtgtgcaggaaaatcattaccccgtttctggcccggggattttttcccggtattctacgcctgtcatctggctgtgctgggcgttctggcgctgtga

SEQ ID NO: 476306 - DNA, 276 bp, Shigella flexneri; identical to SEQ ID NO: 6180

SEQ ID NO: 476307 - DNA, 546 bp, Shigella flexneri; identical to SEQ ID NO: 475459

SEQ ID NO: 476308 - DNA, 147 bp, Shigella flexneri
atgcaacattacgtcgatctcttcttcgttctgtatatgaacgacattacctttactcagaatgtttttcatcgcggtgaagaacatcgtatccctggtaattataagaaacataaccgactcctggtgcggacattaactttataa

SEQ ID NO: 476309 - DNA, 216 bp, Shigella flexneri; identical to SEQ ID NO: 474400

SEQ ID NO: 476310 - DNA, 834 bp, Shigella flexneri
atggtctgccagatggaactgaccagccatctgctgacggctgcagccttcggcacgatgaagaacagcgaaaatgagcttgctgagcaacttatagaacaaaccggcgataacactctgacgttaatggataaaggttattactcactgggactgttaaatggctggagcctggcgggagaacaccgccactggatgatacctctcagaaagggagcgcaatatgaagagctcagaaaactgggtaaaggcgatcatctggtgaagctgaaaaccagcccgcaggcacgaaaaaagtggccgggactgggaaatgaagtgacagcccgcctgctgaccgtgacgcgcaaaggaaaagtctgccatctgctgacgtcgatgacggacgccatgcgcttccccggaggagaaatggcggatctgtacagtcatcgctgggaaatcgaactgggatacagggagataaaacagacgatgcaactgagcaggctgacgctgagaagtaaaaagccggagcttgtgaagcaagagctgtggggtgtcttactggcttataatctggtgagatatcagatgattaaaatggcggaacatctgaaaggttactggccgaatcaactgagtttctcagaatcatgcggaatggtgatgagaatgctgatgacattgcagggcgcttcaccgggacgtataccggagctgatgcgcgatcttgcaagtatgggacaacttgtgaaattaccgacgagaaggggaagggccttcccgagagtggtaaaggagaggccctggaaataccccacagccccgaaaaagagccagtcagttgcttaa

SEQ ID NO: 476311 - DNA, 354 bp, Shigella flexneri; identical to SEQ ID NO: 466835

SEQ ID NO: 476312 - DNA, 276 bp, Shigella flexneri; identical to SEQ ID NO: 6180

SEQ ID NO: 476313 - DNA, 267 bp, Shigella flexneri; identical to SEQ ID NO: 462029

SEQ ID NO: 476314 - DNA, 303 bp, Shigella flexneri; identical to SEQ ID NO: 473532

SEQ ID NO: 476315 - DNA, 423 bp, Shigella flexneri; identical to SEQ ID NO: 474638

SEQ ID NO: 476316 - DNA, 207 bp, Shigella flexneri; identical to SEQ ID NO: 24440

SEQ ID NO: 476317 - DNA, 645 bp, Shigella flexneri; identical to SEQ ID NO: 474715

SEQ ID NO: 476318 - DNA, 369 bp, Shigella flexneri; identical to SEQ ID NO: 474687

SEQ ID NO: 476319 - DNA, 351 bp, Shigella flexneri; identical to SEQ ID NO: 464002

SEQ ID NO: 476320 - DNA, 402 bp, Shigella flexneri; identical to SEQ ID NO: 474686

SEQ ID NO: 476321 - DNA, 267 bp, Shigella flexneri; identical to SEQ ID NO: 462029

SEQ ID NO: 476322 - DNA, 570 bp, Shigella flexneri; identical to SEQ ID NO: 474696

SEQ ID NO: 476323 - DNA, 366 bp, Shigella flexneri
atgctggaagcggccagagaggccagacgtcaggaaattgaagcatggcgcgcagaacaggaggcgaagccgttcacgtttgaatggaacggtcgtatctggaatgctggccccgactcactgggccgcctgtccccggtagtcatgctggcaaaatctgtcacagcacaaacacatatggcgtggagcgatgccgataatcagcaggtgaaactgtcgatgccggaactggaagaactggcggcagcaatggtgcaggcgcaggtcgatcgcaacgatgagatttatcgccgtcagcgtgaaatgaaagaggagctgagcggtctggatgatttggcttcaattcgggcgtttgacgttgagtaa

SEQ ID NO: 476324 - DNA, 378 bp, Shigella flexneri; identical to SEQ ID NO: 476158

SEQ ID NO: 476325 - DNA, 207 bp, Shigella flexneri; identical to SEQ ID NO: 24440

SEQ ID NO: 476326 - DNA, 267 bp, Shigella flexneri; identical to SEQ ID NO: 462029

SEQ ID NO: 476327 - DNA, 579 bp, Shigella flexneri
atgttcgatacagggcgttacaggcgtaaaaaaatccggtaccgcgatgaagtgactggaaaaatgataacgcgggataatccaccaatcccgggaaagcaatcgctggcgaaggggacgtcaattcctctggtcagtccggttgagttttcgacatcatcgtggcggcgggctgttctgtctcttgaagagcactataaagcctggttgttgtggtgttacagcgggagtatttgttgggaatatcagatcgcgataacacagtgggcgtggaatgaatttaatgctcaatccggtaccagaaaaattgcagggaaaacgcaggaacgcctgaaaaaattaatctggctggcggcgcaggcagtaaaagcagaactttttggtggggaaggttatgaataccaggagctggcattactggcgggagtgacaactaaaaactggtccaaaacatttactcgtcactgggttgcaatgaaacacatttttcaccgactggatagtgaggctttattgtttgtaatgagaacacgttcaaaaaaaagacggcattttcaaagcaaagtgttgcaaaagtag

SEQ ID NO: 476328 - DNA, 327 bp, Shigella flexneri; identical to SEQ ID NO: 475432

SEQ ID NO: 476329 - DNA, 219 bp, Shigella flexneri; identical to SEQ ID NO: 474644

SEQ ID NO: 476330 - DNA, 522 bp, Shigella flexneri
atgataacgcgggataatccaccaatcccgggaaaacaatcgctggcgaaggggacgtcaattcctctggtcagtccggttgagttttcgacatcatcgtggcggcgggctgttctgtctcttgaagagcactataaagcctggttgttgtggtgttacagcggaagtatttgctgggagtatcagatcaccataacccactgggcgtggaatgaatttaatgctcaatccggtaccagaaaaattgcagagaaaacacaggaacgcctgaaaaaattaatctggctggcggcgcaggcggtaaaagcagaactttttggtggggaaggttatgaatatcaggagctggcattactggcgggagtaacaaccaaaaactggtccaaaacatttactggtcactgggttgtaatgaaacacatttttcaccgactggatagtgaggctttattgtttgtgatgagaacacgttcagaacaaaaagcggcattttcaaagcaaagtattgcaaaagtagattaa

SEQ ID NO: 476331 - DNA, 231 bp, Shigella flexneri; identical to SEQ ID NO: 129443

SEQ ID NO: 476332 - DNA, 303 bp, Shigella flexneri; identical to SEQ ID NO: 473532

SEQ ID NO: 476333 - DNA, 210 bp, Shigella flexneri; identical to SEQ ID NO: 9340

SEQ ID NO: 476334 - DNA, 366 bp, Shigella flexneri
gtggcagctgcgcgccgcagtcgtgttgaatgggaaaacagacagcgcaaaaaacaggggctggataccctgggtatggatgaactaatagcgaaagcctggcgttttgtgcgtgagcgtttccgcagttaccagacagagcttaagtcccgtggaataaaacgtgcccgtgcgcgtcgtgatgcgaacagggaacgtcaggatatcgtcaccctggtgaaacggcagctgacgcgtgaaatctcggaagggcgctttactgctaatggtgagacggtaaaacgcgaagtggagcgtcgtgtgaaggagcgcatgattctgtcacgtaaccgcaattacagccggctggctacagcttccccctga

SEQ ID NO: 476335 - DNA, 459 bp, Shigella flexneri
atgtcccgtttcgtatttattttgctgtgttttatcccatatttagggagagctgattgttgggataaggctggtgaaaggtacaatattccatcaagtttgttaaaagcgattgcggaaaaagaatccggatttaataaatctgcagtcaatgttaataacaatggaagtaaagattatggtataatgcaaataaatgactttcattctaaaagacttagagaaatgggatattctgaggaaatgctaattagtcatccatgtctttctgtacattatgcagcaaagttattaaatgagtttatgatgatgtatggaagagggtgggaggctgttggagcctataatgcaggaacgtctccgaaaaagaaaaaagaaagattaaagtacgcagaggatatctatagacgctatttgcggatagcagcagagagcaagcagaataatcgaaggatataa

SEQ ID NO: 476336 - DNA, 474 bp, Shigella flexneri; identical to SEQ ID NO: 474721

SEQ ID NO: 476337 - DNA, 213 bp, Shigella flexneri; identical to SEQ ID NO: 474663

SEQ ID NO: 476338 - DNA, 261 bp, Shigella flexneri; identical to SEQ ID NO: 475838

SEQ ID NO: 476339 - DNA, 186 bp, Shigella flexneri; identical to SEQ ID NO: 462789

SEQ ID NO: 476340 - DNA, 495 bp, Shigella flexneri; identical to SEQ ID NO: 475079

SEQ ID NO: 476341 - DNA, 327 bp, Shigella flexneri
atgactaaaaatactcgtttttcccccgaagtccgtcaacgggcagtccgtatggttctggaaagtcagggcgaatatgactcacaatgggcgacaatttgttccattgctccaaagattggctgtacgccggagactctgcgtgtctggggtcgccagcatgagcgggataccgggggcggtgatggagggctcaccaccgctgaacgtcagcgtctgaaagagccggaacgtgaaaatcgtgaactgcgccgcagtaacaatatccttcgcctggcttccgcttattttgcaaaggcggagttcgaccgcctctggaaaaaatga

SEQ ID NO: 476342 - DNA, 231 bp, Shigella flexneri; identical to SEQ ID NO: 129443

SEQ ID NO: 476343 - DNA, 579 bp, Shigella flexneri
atgttcgatacagggcgttacaggcgtaaaaaaatccggtaccgcgatgaagtgactggaaaaatgataacgcgggataatccaccaatcccgggaaagcaatcgctggcgaaggggacgtcaattcctctggtcagtccggttgagttttcgacatcatcgtggcggcgggctgttctgtctcttgaagagcactataaagcctggttgttgtggtgttacagcgggagtatttgttgggaatatcagatcgcgataacacagtgggcgtggaatgaatttaatgctcaatccggtaccagaaaaattgcagggaaaacgcaggaacgcctgaaaaaattaatctggctggcggcgcaggcagtaaaagcagaactttttggtggggaaggttatgaatatcaggagctggcattactggcgggagtaacaaccaaaaactggtccaaaacatttactggtcactgggttgtaatgaaacacatttttcaccgactggatagtgaggctttattgtttgtaatgagaacacgttcaaaaaaaagacggcattttcaaagcaaagtgttgcaaaagtag

SEQ ID NO: 476344 - DNA, 327 bp, Shigella flexneri; identical to SEQ ID NO: 474582

SEQ ID NO: 476345 - DNA, 327 bp, Shigella flexneri; identical to SEQ ID NO: 474724

SEQ ID NO: 476346 - DNA, 213 bp, Shigella flexneri
atgaatggattcagaaacagttcacggaacggccaggtctggcgttaccagcgtgccggcgggcgggccgttattctggaagtcagtggacgctggatggaagcggcagaagcatggcgacgggctgcctgtgttgcgcctaggacagactggcagcagtttgcccggaaaagggctgaacactgccaccggcgctgccggggaagggtgtaa

SEQ ID NO: 476347 - DNA, 459 bp, Shigella flexneri
gtggcgatagcccacatatgcggccttcgatgtgtagtttttggtgaagaccaggtgaccaacaacgctgaatcccgcatttttccaggcagacataaagcgatcgacgcggttccagccatagaagctcaccatcagcgcgtcttttttgagtacgcggtacatttcattacaggccggttgcagccattcatcagttttatcaccagcaatggtacgcccctgacggtcacgaaaaccgacgagatatggcggatcggtgaggatgaaatcaatggcgttatcaggaatacgggccataacatcgatgcagttaccgaggacaaaacgggacataacagatccttctcttacagagggcacccctgtggtgcccgttccccgctgcctgtgggctgttcatcgcttccggtaacgggtcaggccgaccgtggaataccgcagccgtcgtctttttga

SEQ ID NO: 476348 - DNA, 327 bp, Shigella flexneri; identical to SEQ ID NO: 474661

SEQ ID NO: 476349 - DNA, 267 bp, Shigella flexneri; identical to SEQ ID NO: 475819

SEQ ID NO: 476350 - DNA, 207 bp, Shigella flexneri; identical to SEQ ID NO: 24440

SEQ ID NO: 476351 - DNA, 273 bp, Shigella flexneri; identical to SEQ ID NO: 476080

SEQ ID NO: 476352 - DNA, 243 bp, Shigella flexneri; identical to SEQ ID NO: 464973

SEQ ID NO: 476353 - DNA, 225 bp, Shigella flexneri
atgtcgcgtaaaggtaactgttacgacaacgctccgatggaaagcttctggggaacgctgaaaaatgagagcctgagccactatcgttttaataaccgggatgaagccatctcagtaatacgggaatacattgagattttctacaatcgtcagcgtcgtcactctcgtctggggaatatctccccggcagccttcagggaaaaatatcatcagatgactgcttaa

SEQ ID NO: 476354 - DNA, 207 bp, Shigella flexneri; identical to SEQ ID NO: 476087

SEQ ID NO: 476355 - DNA, 219 bp, Shigella flexneri; identical to SEQ ID NO: 474644

SEQ ID NO: 476356 - DNA, 408 bp, Shigella flexneri
atgcgtttcagtacccagatgatgtaccagcaaaacatgcgcggcatcaccaattctcaggcagaatggatgaagtacggcgagcagatgtcgacgggtaagcgagtcgttaacccttcagacgatcccattgctgcatcacaagctgttgttctctcccaggcacaggcgcaaaacagccagtacacgctggcacgtactttcgccactcaaaaagtgtcactggaagagagtgtacttagccaggtcaccactgctatccagaatgctcaggaaaaaattgtctacgccagcaatggcaccttgagtgacgatgaccgggcctcgctggctacggatattcaggggcttcgtgaccagttgctgaatctggcgaacaccactgacggtaatgggcgctacatataa

SEQ ID NO: 476357 - DNA, 1833 bp, Shigella flexneri
gtgtatgttgaaacccctgccctgcatcgcttaccggagaaaaaacgtcgggcaattctcagcgccttacgtctggcgcaggagctgggcgcggagacggcaacactttctgatccagcggaagagaaagcggtagtgcgttatgcccgtgaacataatctcggcaagattattctcggtcgcccagcctcgcgccgctggtggcgtcgggaaacatttgctgaccgactggcgcgcatcgcccccgatctcgatcaggtgctggtcgcgcttgatgaaccacccgcccgcacgattaacaacgcgccggatagccgctcatttaaagacaagtggcgggtacagattcagggatgcgtggttgccgccgcgttatgcgccgttatcaccttaattgccatgcagtggctgatggcgtttgatgccgccaacctggtgatgctgtatctgcttggcgtggtggtggcgctattttatggacgctggccttcggtggttgccaccgtcattaatgtggtgagtttcgatctcttttttatcgccccacgcggcacgctcgccgtctctgatgtgcaatatctgctgaccttcgcggtgatgttaaccgtcgggctggtgatcgggaaccttactgctggtgtgcgttatcaggcgcgggtagcccgttaccgcgagcaacgcacacggcacttatatgaaatgtcgaaagctctggcggtgggccgcagtccgcaggacatcgccgccaccagcgaacaatttattgcctccacgtttcatgcccgcagtcaggtgttgttgcccgatgacaacggtaaattgcagccgttaacacatccgcaaggaattacgccatgggacgatgccatcgcgcagtggagttttgataaaggcctgcctgcgggcgcgggcaccgacacgttacccggtgtaccgtaccagattttgccgctaaaaagcggcgagaaaacctacgggctggtggtggtggagccggggaatctgcgccagttgatgatcccggaacagcagcgcctgctggagacttttacgctgttagtcgccaatgcccttgagcggctgacgctaaccgccagcgaagaacaggcgcggatggcaagcgaacgtgaacagatccgcaacgccctgctggcagcgctttcgcatgatttacgcacgccgcttacggtgctgtttggtcaggcagaaatcttaacgctcgatctggcaagcgaaggatcaccccacgcccgccaggccagcgagattcgtcagcatgtgctgaacactacccgactggtgaataatctactggatatggcgcgaattcagtccggcggctttaatttgaagaaagagtggttaacgctggaagaagtagtcggcagcgcgctgcaaatgccggaaccgggtttatcgtcgcccatcaatctttctctgccagaaccgctgaccttaatccacgttgacgggccactctttgaacgggtgctgattaatctgctggagaacgcggtgaaatatgcgggtgcgcaggccgaaattggtatcgatgcccacgttgagggcgaaaatctacaactggatgtctgggataacggccccggtcttccgccaggccaggagcagacgatatttgataagtttgctcgcgggaataaagagtcggcggtgccgggtgtcgggcttgggttggcaatttgtcgggcgattgtggatgtacacggcggcaccattaccgcgttcaaccgaccggaaggtggtgcctgttttcgtgttacacttccccagcaaaccgctcctgaacttgaagactttcatgaggatatgtga

SEQ ID NO: 476358 - DNA, 294 bp, Shigella flexneri
gtgaaattttccggtgttaccgtcgatttagccgcccgcgtgattcaccggggtgaggaagaggtgcatctcacaccaattgagttccgcctgctggcggtgctgctcaacaatgccggaaaagtactcacccagcgccagctccttaaccaggtgtgggggccaaacgcggtcgaacacagtcactatttgcgtatttatatgggacatctgcgacaaaaactggaacaggatccggcccggcctcgccacttcattactgaaaccggtattgggtatcggtttatgctttga

SEQ ID NO: 476359 - DNA, 756 bp, Shigella flexneri
atgcctgaccattctctttttcgattacggattcttccgtggtgcattgcgctggcaatgtcagggagttatagcagtgtctgggctgaagacgacattcagtttgattcccgttttctggaattaaaaggcgacacaaaaattgatatgaagcgtttttccagccagggatatgttgagcccggaaaatacaatttacaggttcaactaaataaacagccattggcggaagagtacgatatttactggtatgctggtgaagatgacgcgagcaaaagctatgcttgtctgacaccggaactggtagcgcagtttggtttaaaagaagacgtggcgaaaaatctgcaatggagccacgatgctaaatgcctgaaatccggtcaactggaaggcatggaaattaaggctgatttaagccagtccgcattagtcatttcactgccacaggcttacctcgaatatacttatcccgacagggatccgccttcacgttgggatgacggcatctccgggatcgtcgcggactacagcatcaacgcacaaacccggcacgaagaaaatggcggtgatgatagtaacgagatcagcggcaacgggacggttggggttaacctagggccgtggcgtatgcgtgctgactggcagactaactatcaacatactcgcagtaatgatgacgatgaattcagcggcgatgaaactcaaaaaaatgggagtggagtcgctactatgccaggcgggcgttaccatcattaa

SEQ ID NO: 476360 - DNA, 189 bp, Shigella flexneri; identical to SEQ ID NO: 463227

SEQ ID NO: 476361 - DNA, 201 bp, Shigella flexneri; identical to SEQ ID NO: 471022

SEQ ID NO: 476362 - DNA, 225 bp, Shigella flexneri
atgaaagcttcactggcgctgctcagcctgctaacggcatttaccagccactccttaaaatctcccgccgttccaccaaccgtggtacaaatccaggccaataccaaccttgccatcgcagacggtgccagacagcaaattggcagcacgctattttacgatcgcagcttacctatcctggcggtgatgttccgcaagaacgcggtgtatgttccgatgtggtga

SEQ ID NO: 476363 - DNA, 450 bp, Shigella flexneri
atggaaactcagtggacaaggatgaccgccgatgaagcggcagaaattatccagcataacgacatggtggcatttagcggctttaccccagcgggttcgccgaaagccctacccgccgcgattgcccgcagagctaacgaacagcatgaggccaaaaagccgtatcaaattcgcctgctgacgggggcgtcaatcagcgccgccgctgacgatgtactttctgacgccgatgctgtttcctggcgtgcgccatatcaaacatcgtccagtttacgtaaaaagatcaatcagggcgcggtgagtttcgttgacctgcatttgagcgaagtggcgcaaatggtcaattacggtttcttcggcgacattgatgttgccgtcattgaagcatcggcactggcaccggatggtcgagtctggttaaccagcgggatcggtaatgcgccgacctag

SEQ ID NO: 476364 - DNA, 1089 bp, Shigella flexneri
atgtcggcagaagggctaatggggccgtttgctctgaacgatccggccgcaggtacgaccggtccgtggtacaccaacggaacttttggcttaacggcgggctggcatctcgatatctggggaaagaatcgggcggaggttactgcccgcctgggtacggttaaagcacgggcggcggaacgcgagcaaacccgccaattgctggctggcagcgtagcccgcctgtactgggagtggcaaacccaggcggcgttaaacacggtcttgcagcaaatagaaaaagagcagaacaccattatcgcgaccgatcgccagctatatcagaacgggattacttcttcagttgacggtgtggaaaccgatattaatgccagcaaaacccggcagcagctcaacgatgtcgcggggaaaatgaaaattattgaggcacggttaaatgcactcacaaatcaccagactaagtcattgaagcttaaaccggtcgcgttgccgaaagtggcaagccagcttcctgatgaactggggtactccttactggcccggcgggcagatttgcaggcggcgcactggtacgttgagtcatcgttaagcactattgatgcggcaaaagcggcattttatcctgacatcaacctgatggccttcctgcaacaggatgcgttgcacttaagcgatctgttccgtcattccgcgcagcaaatgggcgttacggcaggcctgacgctacctattttcgatagtggtcgtcttaacgccaatctcgatatcgcaaaagccgaaagcaacttgtctatcgccagctacaacaaagcggtggttgaagcagtgaatgacgtggcgcgggcagccagtcaggttcagacactggcggagaaaaaccagcatcaggcgcaaattgagcgcgatgccttgcgtgtggtaggtcttgcgcaggcccgctttaacgcgggcatcattgctggttcccgcgtcagcgaagccagaatcccggcgctgcgtgagcgggccaatggcctgttattgcaagggcagtggctggatgcctccattcgactcaccggtgcgctgggcgggggttacaaacgctga

SEQ ID NO: 476365 - DNA, 267 bp, Shigella flexneri
atgaatcgtgattccttttatccagccatcgcctgttttccgctgttactgatgctggccgggtgtgcgcctatgcatgaaacccgccaggcgttaagccagcaaacgcccgctgcacaagttgacaccgcattacccacggcgctgaaaaatggttggccagacagccaatggtggctggagtatcacgataatcagctcacttcattaattaacaatgcactacagaacgcaccggatatgcaggtggctgaacagcgcatttag

SEQ ID NO: 476366 - DNA, 948 bp, Shigella flexneri; identical to SEQ ID NO: 471282

SEQ ID NO: 476367 - DNA, 255 bp, Shigella flexneri; identical to SEQ ID NO: 471299

SEQ ID NO: 476368 - DNA, 729 bp, Shigella flexneri
atgtttaggttgaaccctttcgtacgggtcgggctgtgtttgtccgctatttcttgtgcatggcctgtgttagcggtcgatgatgatggcgaaacgatggttgtcactgcatcttccgtggaacaaaatcttaaagatgcacccgccagtatcagcgtcattacccaggaagacctgcagcgaaaaccggtacagaatctgaaggatgtcctcaaagaagtgcctggcgtacaactgacgaacgaaggggataaccgtaagggcgttagtattcgtggtctggacagcagctacaccctgattcttgtcgacggtaaacgcgttaactcccgcaatgccgtcttccgccacaatgatttcgatctgaactggatcccggtcgattccatcgaacgtattgaagtggttcgtggcccgatgtcgtcgctatacggctccgatgcgctcggcggtgtagtgaatatcatcaccaaaaaaatcggtcagaaatggtcgggtaccgttaccgtcgataccaccattcaggaacatcgcgatcgcggtgatacctataacggtcagttctttaccagtggaccattaattgatggtgtgctgggaatgaaagcttacggcagcctggcaaaacgtgaaaaggatgacccgcaaaactcaacgaccaccgataccggagaaacgccgcgtattgaaggattctccagccgcgacggcaatgtcgaatttgcctag

SEQ ID NO: 476369 - DNA, 1362 bp, Shigella flexneri
atgaccacaccctcagatttgaacatttaccaactgattgacacccaaaacggtcgggtcactccgcgtatttataccgacccggacatttaccaactggagcttgagcgtattttcggtcgttgctggctatttctcgcccacgaaagccagatcccaaaacccggtgatttctttaacacctacatgggagaagatgcagttgtcgtggtgcgccagaaagacggcagcatcaaggcgtttctcaaccaatgccgccaccgggccatgcgtgtgagttatgcagattgtggcaacagtcgcgcctttacctgcccgtatcacggctggtcttatggcattaacggcgagttgatcgatgtaccgctggaacctcgcgcctacccacaagggttgtgtaaatcccactgggggctaaacgaagttccttgtgtggagagttataaaggactgatttttggcaactgggataccagcgcaccgggcctgcatgattacctgggtgacattgcctggtatctggatggcatgctggatcgtcgcgaaggcggcaccgaaattgtcggcggcgtacaaaagtgggtgatcaactgtaactggaaattcccggcagagcagttcgccagtgaccagtatcatgctctgttcagccatgcttctgccgttcaggtattaggggcgaaagatgatggcagcgataagcgcctcggtgatggacaaaccgcccgcccggtgtgggaaaccgccaaagatgcgctgcaatttggtcaggacggtcacggtagcggtttcttctttactgaaaaaccggatgctaatgtctgggtcgatggcgcagtttcaagctattaccgcgaaacctatgccgaagcagaacaacgtttaggtgaagttcgcgccctgcgcctggcgggtcataacaatatattccccacgctttcatggctaaacggcactgccacactccgcgtctggcatccgcgcggccctgatcaagttgaagtgtgggcgttctgtattactgacaaagccgcctccgatgaagttaaagccgcttttgaaaacagcgccactcgtgcttttggtcctgctggttttctcgagcaggatgactcggagaactggtgtgaaatccagaaattgcttaaaggccaccgcgcccgcaacagcaaactgtgtctggaaatggggcttggtcaggaaaagcgccgcgacgacggcattcctggcattactaactatatcttttcagaaactgccgctcgtggaatgtaccaacgctgggccgatcttctgagtagcgaaagctggcaggaagtgctcgataaaaccgccgcttaccagcaggaggtgatgaaatga

SEQ ID NO: 476370 - DNA, 558 bp, Shigella flexneri
atgcctaaaaaaatgagaacaacccgtaatctattattaatggctacgctattaggtagcgcactatttgccagggctgcggataaagaaatgaccattggtgcaatataccttgatacccagggatattacgctggagtgcgtcagggcgttcaggatgcggcaaaagattcttcagtacaggtacagttaattgaaactaacgcccagggggatatttcgaaagaaagtacctttgttgataccctcgtggcgcgtaatgtcgatgccattattttatcggcagtgtctgaaaatggcagtagccgtaccgttcgtcgcgccagtgaagcgggtattccggtgatttgctacaacacctgtattaatcaaaagggtgtcgataaatatgtctcggcgtatctggtcggcgatccactggaatttggtaaaaactgggtaacgctgccgccgattattttattgccaataaaattgaccagccgaaaattgccgtcatcaattgcgaagcctttgaagtttgtgtgcagcgacgtaaaggatttgaagaagtattaa

SEQ ID NO: 476371 - DNA, 141 bp, Shigella flexneri
atgggttaccgcacggtggctgaactggaatctgaaattctgcaactgcgtaaggcgttaaatgaagctcgccttgagcgagatatattaaaaaaagcaacagcgtattttgcacaggagtcgctgaaaaatacgcgttaa

SEQ ID NO: 476372 - DNA, 354 bp, Shigella flexneri
atgccactgctggataagctgcgtgagcagtacgggggcggaccgctatgcagcgaactgcatattgccccgtcaacgtattaccactgtcagcaacagcgacatcatccggataaacgcagtgcccgtgcgcagcgcgatgactggctgaagaaagagatacagcgcgtatacgatgaaaatcacaaggtatacggtgtaaagtctggcgtcagttgttacgggaaggtatcagagtggccagatgcactgtggcacgtctcatggcggttatgggacttgccggtgttctccggggtaaaaaggtccgtacgaccatcagccggaaagccgttgccgcaggcgaccgcgtaa

SEQ ID NO: 476373 - DNA, 327 bp, Shigella flexneri
atgactaaaaatactcgtttttcccccgaagtccgtcaacgggcagtccgtatggttctggaaagtcagggcgaatatgactcacaatgggcgacaatttgttccattgccccaaagattggctgtacgccggagactctgcgtgtctgggttcgccagcatgagcgggataccgggggcggtgatggagggctcaccaccgctgaacgtcagcgtctgaaagagccggagcgtgaaaatcgtgaactgcgccgcagtaacaatatccttcgcctggcttccgcttattttgcaaaggcggagttcgaccgcctctggaaaaaatga

SEQ ID NO: 476374 - DNA, 426 bp, Shigella flexneri
atgaaagaaaatggcctgaaggcgaacagcctctgtgttgagatcactgaaaccgtgatcgagcgaattaatgaacatttttatctcaatattgaacaactgcgtaaacaaggggtacggatatcgattgatgactttggcaccggtttgtcaaacctgaaacgtttttatgaaattaatccagacagcataaaggtggactcgcaatttaccggcgatattttcggtactgcgggaaaaattgtgcgcattattttcgatctggcacgctataaccggatcccggtgattgcggaaggcgtagagagcgaagacgttgcgcgcgaattaattaaattaggatgtgttcaggctcaggggtatctgtaccagaaacccatgccattctccgcttgggataaaagtggaaaattagtaaaagagtag

SEQ ID NO: 476375 - DNA, 1806 bp, Shigella flexneri
atgctgagtttatacgaaaagataaggctgataattttatttttattggcagcactgtcatttattggtctttttttcatgattaactatcaactggtatcggaacgcgcggtaaaacgtgccgatagccgctttgaacttattcagaaaaacgttggctatttctttaaagatattgaacgttcggccctgacattaaaggactcactgtatttattaaaaaatacagaggagattcaacgcgccgtgattctgaaaatggaaatgatgccatttttagactcggtgggactggtacttgatgataataaatattatctcttttcgcggagggcgaatgataaaatcgttgtttatcatcaggaacaagtaaatggaccgcttgtcgacgagtcagggcgggttatttttgccgattttaacccatcgaaacgaccgtggtcggtggcttcagatgactctaacaacagctggaatccggcatacaattgctttgatcgtccgggtaaaaaatgtatctcttttacgctacgtatcaacggcaaagatcacgatttgttagcggtagataaaattcatgtcgatttaaactggcggtatctgaacgagtatcttgatcaaatcagcgctaatgatgaagttctatttttgaaacaaggtcatgagatcattgccaagaatcaactcgctcgtgaaaaactgattatttataatagcgaaggtaattataatattattgattctgtcgatacggagtatattgcaaagacatcagcagtgccaaataatgcattgttcgaaatctatttttattatcctggcggtaatttattgaacgcatcagataaacttttttatctaccgtttgcgttcattattatcgtgttgctggtggtatatttcatgaccactcgtgtgttccgtcggcaattttctgaaatgaccgagctggttaatacgctggcgtttttgcccgactcaacggatcagatcgaggctctgaaaattcgcgaaggcgatgcgaaagagattatcagcatcaaaaattcgatcgcggaaatgaaagatgccgaaattgaacggtcaaataaattgctctcactgatctcttacgatcaggaaagcggttttattaaaaatatggcgattattgagtccaacaataatcagtatctggctgtggggatcatcaaactgtgtggtctggaagccgtggaggcggtgtttggtgttgatgaacgcaataaaatcgtcaggaaattgtgtcagcgaattgccgagaaatatgcgcaatgctgcgatatcgtgacattcaatgccgatctctatttacttctgtgtcgggaaaatgtacagacatttacccgtaaaatagcgatggtaaacgattttgacagcagctttggctaccgcaatctgcgcatccataagtctgccatttgtgaacctttgcagggggaaaacgcctggagttacgcagaaaaactgaaactggcgatttccagtatccgtgaccatatgttctccgagtttattttctgtgatgacgcgaaactcaacgaaatagaagagaatatctggattgcgcgtaatattcgccatgcaatggaaattggcgaactattcctcgtctatcaaccgatcgttgatattaacacccgcgccattctgagcgcggaggcgttgtgccgttgggtttctgcggagcgggggatcatttcaccgctgaagttcattaccattgctgaagatatcgggtttatcaatgagctgggttatcagattattaaaacggcaatgggttaa

SEQ ID NO: 476376 - DNA, 1872 bp, Shigella flexneri; identical to SEQ ID NO: 471627

SEQ ID NO: 476377 - DNA, 2064 bp, Shigella flexneri
gtgctggataacgacacctcgcgtaaagagttgatcgaccagttgcgtactgtcgccgcgacgccccctgcggaaccggtcccgaagatcgtgccgccgacgctggttgaagagcaaaccgtgctgcaaaaggtcaccgaagtcagccgccattatggtgaagccctttccgcccgcttcgggcaactttatcgcaatatcaccggctccccgcataagccatttaatccacaaaccttcagcaatgcgctgagccatttttcaatgttagcggtattagtgtttggtttttactggctgattcgcctgtgcgcactgccgctatatcgcaaaatgggtcagtgggcgaggcaaaaaaatcgtgagcgcagcaactggttgcagcttccggcgatgattattggggcgtttattatcgacctgctgttactggccctgacattatttgtcggccaggtattaagcgacaacctgaatgcaggcagtcgcaccatcgctttccaacaaagtttgtttctcaacgcctttgccctgattgaatttttcaaagccgtactacgcctgattttttgcccaaacgtggcggagctgcgcccgttcacgattcaggacgagagcgcccgttactggggtcgtcgcctgagctggttaagcagcctgattggctatggcctgattgtggccgtgccgattatctctaatcaggtgaatgtacagataggtgcgctggcgaacgtcatcattatgctgtgcatgaccgtctgggcgttgtacctgatcttccgaaataaaaaagagattacccagcatatgctcaactttgcggagcattcgctggcttttttcagcctgtttatccgcgcctttgcgctggtgtggcactggctggcaagcgcctattttatcatgctgtttttcttttcgttgttcgatccgggcaacagtctgaaatttatgatgggtgcaacggtgcgcagcctggcgattattggtatcgcagcgtttgtttccggtatgttttcccgctggctggcgaaaaccatcaccctctcgccacatactcagcgtaactatccggagctacaaaaacggctgaatggctggctttcggcggcgctgaaaacggcgcgtattctgaccgtctgcgtggcagtaatgttgctgttgagcgcatggggattgttcgatttctggaactggctgcaaaacggcgcggggcagaaaaccgtagatatcctgatccgcatcgcactcattcttttcttctcggcggttggctggacggtgctcgccagtttgatcgaaaaccggctggcttcggatattcatggccgcccgctacccagcgcccgtacgcgtaccctgctgacgctgttccgtaacgcgctggcggtgattatcagtaccatcaccatcatgattgtgttgtcggaaatcggcgtcaatatcgcgccattgctggcaggtgccggggcattaggtctggctatctcgtttggttcgcaaacgctggtaaaagatattatcaccggggtatttattcagtttgaaaacggcatgaacactggagatttggtgactatcgggccgttgaccggcacagtggaacggatgtcgattcgctccgtgggcgtgcgccaggataccggggcgtatcacatcattccgtggtcttcgataaccacctttgctaacttcgtccgcggtattggttcggtagtggcaaactacgatgttgatcgccatgaagatgctgataaagccaatcaggcactgaaagatgcggtaacggaattgatggaaaacgaagaaattcgcgggctgattattggtgaaccgaactttgccgggattgtcggcttaagcaataccgcgtttacactgcgtgtttcgttcaccacgctgccactcaaacagtggacggtacgctttgccctcgacagccaggtgaaaaaacatttcgacctggcgggcgttcgcgcgccagtgcagacttatcaggtgctgcctgctccgggcgcgaccccggctgaaccgctgccgccgggggagccaacgctttaa

SEQ ID NO: 476378 - DNA, 789 bp, Shigella flexneri
atgcgtcagagagagcttgcagccaccgctaaggccttcatgttggataggcctgaagtctcactacaggagcttacagagcatctccggtctatggctgagcagttcctgacagacgctagtgacgattactggaatggacttgaggtcgctactctggtcgacgagaagtccaacctgaaggagctagccgctacgcaagccttgagtctggaccagcagaagggcataaggttagcgctggaagtcctgaccgcagcacagcagagagtcgacactggtgatacctctggtctgattaagctgattgatgataataaccttactgatgactcaactataggcgactctacgtcaattctgaataatgagcagggggatagaccggcagttttcacacaggagcgccagtcatctgtagttttttcaagcctagtgtcctcgctgctggctgagaaggtccagaccctgaagacatccagctacaaggacctctcgtcctcactcaatactgtctcccggttcctgcctgaagacatggacctgatgtcccgctctgggtggctggctgtcagggactctatgctggcttctgaggtgagaccatcgacaatcaacaagctgctgaccaaagcgaagatgtgtctcgattatggcctgatgaatgggcaacttgagggccgcaaccctattgaacggatgaagctgaccaaggatatcgactccaagcgcagagcgttcacagacgaggagctggagagacttctggtccgtgttgagtctgagtga

SEQ ID NO: 476379 - DNA, 330 bp, Shigella flexneri
gtgccgggagaaagcagcgccaccgttaaacaacgcgtaatggccgccagagagcgccaatttaagcggcagaataaactgaatgcctggctggatagtccggaaatacgccaattctgcaaacttgagagcgaagatgcgatgtggttggaagaaacgctgatccatctggggttatcgattcgtgcctggcagcggttactgaaagttgcacgaaccattgctgatattgatcagtctgacattatcacacgtcagcatttgcaggaggcagttagctatcgtgcgattgaccgtttgctcatccatctgcaaaaactactgacataa

SEQ ID NO: 476380 - DNA, 258 bp, Shigella flexneri
atgcgcgatgacacactactgaaagcggaagggcgagtaaagttgcaattaaaaggaaatgttatgcatcagagggggattggatttgcccctatatttccagacatctgttatcacttaacccattacaagcccgctgccgcagatattcccgtggcgagcgataacccagcgcactatgcggatgccattcgttataatgctcgaacgcctctgcaaggttctttgctgccgttaacccgtctggtttgggcatga

SEQ ID NO: 476381 - DNA, 2295 bp, Shigella flexneri
atgaaggtagatattgataccagcgataagctgtacgctgacgcatggcttggctttaaaggtacggactggaaaagcgaaattaatgtccgcgattttattcaacataactatacaccgtatgaaggcgatgaatcttttctcgccgaagcgacgcctgccaccacggaattgtgggaaaaggtaatggaaggcatccgtatcgaaaacgcaacccacgcgccggttgatttcgataccaatattgccaccacaattaccgctcatgatgcgggatatattaaccagccgctggaaaaaattgttggcctgcaaacggatgcgccgttgaaacgtgcgctacacccgttcggtggcattaatatgattaaaagttcattccacgcctatggccgtgaaatggacagtgaatttgaatatctgtttaccgatctgcgtaaaacccataaccagggcgtatttgatgtttactcaccggatatgctgcgctgccgtaaatctggcgtgctgaccggtttaccagatggctatggtcgtgggcgcattatcggtgactatcgccgcgtagcgctgtatggcatcagttatctggtgcgtgaacgcgaactgcaatttgccgatctccagtctcgtctggaaaaaggcgaggatctggaagccaccatccgtctgcgtgaggagctggcagagcatcgtcatgcgctgttgcagattcaggaaatggcggcgaaatatggctttgatatctctcgcccggcgcagaatgcacaggaagcggtgcagtggctctacttcgcttatctggcggcagtgaaatcgcaaaatggcggcgcgatgtcgctggggcgcacggcatcgttcctggatatctacattgagcgcgactttaaagctggcgtcctcaatgagcagcaggcacaggaactgatcgatcacttcatcatgaagatccgtatggtacgcttcctgcgtacaccggaatttgattcgctgttctccggcgacccaatctgggcgacggaagtgatcggcgggatggggctggacggtcgtacgctggtgaccaaaaactccttccgctatttgcacaccctgcacactatggggccggcaccggaacctaacctgaccattctttggtcggaagaattaccgattgccttcaaaaaatatgccgcgcaggtgtcgatcgtcacctcttccttgcagtatgaaaatgacgatctgatgcgtactgacttcaacagcgacgattacgcgattgcctgctgcgtcagcccaatggtgattggtaagcaaatgcagttctttggtgcacgcgctaacctggcgaaaacgctgctctacgcaattaacggcggggtggacgagaagctgaagattcaggtcgggccgaaaacagcaccgctgatggacgacgtgctggattacgacaaagtgatggacagcctcgatcacttcatggactggctggcggtgcagtacatcagcgcgctgaatatcattcactacatgcacgacaagtacagctacgaagcttcgctgatggcgctgcacgatcgtgatgtctatcgcactatggcatgcggcatcgcgggcctgtcggtggcgacggactccctgtctgccatcaaatatgcccgcgtgaaaccaatccgtgacgaaaacggcctggcggtggactttgaaatcgacggtgaatatccgcagtacggcaacaacgacgagcgcgtagacagcattgcctgcgacctggttgaacgctttatgaagaaaattaaagcgctgccaacctatcgcaacgccgtccctacccagtcgattctgactatcacttctaacgtggtgtacggccagaaaaccggtaatacgccggacggtcgtcgcgccggaacaccgttcgcgccgggcgctaacccgatgcatggtcgtgaccgcaaaggtgccgtggcctcattgacgtcggtggcgaaactgccgttcacctacgccaaagatgggatctcgtacaccttctcaatcgttcctgcggcgctgggcaaagaagatccagtacgtaaaaccaaccttgtcggcctgctggatgggtatttccaccacgaagcggatgtcgaaggcggtcaacacctcaacgtcaacgtaatgaatcgggaaatgctgctggatgccatcgagcacccggaaaaatatcctaacctgacaatccgtgtctctggctacgccgtgcgcttcaacgcactgacccgtgaacagcaacaggatgttatttcacgtacttttacccaggcgctctga

SEQ ID NO: 476382 - DNA, 651 bp, Shigella flexneri
atggctaatactattctaaatcattttaaattggattcaacaaattttactaatgccaacatgtttcaggttaattttgttagttcaacacaaaacgccacaatctcctgggattatttactaaaaataacgcctgttttaataagcattagcgatatgtattctgaagaaaaaatcaagtttgtcgaaagttgtttaaatgagcttggagacattaccgaagaacaattaaaaattatgagatttgcaattataaaatctataccaagggcaactcttacagataaattagaaaatgaattaacaaaagaaatatataaaagctcatcgaaaatcaacaattgcttgaacagaattaaattaccagagatgaaagaattctcatcaaaaaaaacatatgattacatcgatacaatcattgaagattatgaaaatatcaaagaaaatgcttatctggtcgtcccccaaattaattatactatggatttaaacatagaagactctagctcagaagagttaataccctcgagaaagacgaaaattctccggacaatggctttgaggtcggggaatataacacatatgaagcatataactcagagaatcaatattttaccagagaggactatacgtataattacgaccttttaa

SEQ ID NO: 476383 - DNA, 1146 bp, Shigella flexneri
atgaaaatcgtaatcgccccagactcttataaagaaagtttatctgccagcgaggttgcgcaggcgatagaaaaaggatttcgggaaatttttcctgatgcacagtacgtttctattccggttgccgacggtggcgaaggaacggtggaagcgatgattgcagccacccagggttctgaacgtcacgcctgggttacagggccgctgggcgagaaagtgaatgccagttgggggatctccggcgatggcaaaaccgcgtttattgaaatggcggcggccagtgggctggagctggtacctgcggaaaaacgcgatccactcgtgaccacttcacgcggcacaggcgagttaatcctgcaggcgctggagagcggcgcgacaaacattattatcggcattggcggtagcgctacaaatgatggcggcgcaggcatggtacaggcgctgggggcgaaattatgcgacgccaacggcaatgaaattggttttggcggcggtagtcttaatactctgaatgatattgatatttccggcctcgatccgcgcttaaaagattgcgtcattcgcgtcgcttgtgatgtcaccaatccgctggtgggcgataacggcgcatcgcgcatctttggcccacaaaagggagccagtgaagcgatgattgttgagctggacaataacctctctcactatgccgatgtcattaaaaaagcgctgcatgttgatgtaaaagatgtccccggcgcaggagctgcgggcggtatgggtgcggcgctgatggcgtttcttggtgcggaactgaaaagtggtattgaaatcgtcactacggcgctgaatctggaggaacatattcacgattgtacgctggtgatcaccggtgaagggcgtattgacagccagagtattcacggcaaggtaccgattggcgtcgcaaacgtggcgaagaagtaccataaaccggtgattggcattgcgggtagcctgaccgatgatgttggcgttgtacatcagcatggcattgatgcggtcttcagcgtattgaccagcataggtacgttggacgaagcattccgcggggcttatgacaatatctgccgtgcttcacgtaatattgccgcgacactggcgattggaatgcgcaacacggggtga

SEQ ID NO: 476384 - DNA, 504 bp, Shigella flexneri; identical to SEQ ID NO: 12974

SEQ ID NO: 476385 - DNA, 1230 bp, Shigella flexneri; identical to SEQ ID NO: 12973

SEQ ID NO: 476386 - DNA, 294 bp, Shigella flexneri; identical to SEQ ID NO: 82469

SEQ ID NO: 476387 - DNA, 216 bp, Shigella flexneri; identical to SEQ ID NO: 12971

SEQ ID NO: 476388 - DNA, 177 bp, Shigella flexneri; identical to SEQ ID NO: 12970

SEQ ID NO: 476389 - DNA, 621 bp, Shigella flexneri; identical to SEQ ID NO: 12969

SEQ ID NO: 476390 - DNA, 327 bp, Shigella flexneri; identical to SEQ ID NO: 12968

SEQ ID NO: 476391 - DNA, 2748 bp, Shigella flexneri
atgtctacactttataaagcgatgacacgccctgctatgtatgtgggtgttcctgtcgtccctcttactgtggttgcaggggcgttatttctggcgggggtttatatcagcaagctgatctggctggctattcctgtcgcagtttttattctcagaatgataactaagcaggacgaccacatttttaatctttactttcttaagctgaaaatgctcggaaactcagtgtgtaatcgtttttttggcgcacgagcgttcctctccggacaatatgaagctgttgaaattgatgagtttgttaatgccatgaaactgaatgagcgaatcactactggtaaatatataccctattcaagccatgttgataaaaatattgtcaaaacaaagaacggtgattatgtagcgacatggcaactgatggggattaactttgagtcaatctctgcggagatgttagaaactattgactcacaggttgccactcttgttcgttcattttccggactgcccgtttcattttataaccattcatgcagggcgagtttttatgatgcctttaccacaaaatcaggtaataaatatgctgatataatatcagattgttattatggttcgatgaagaaaaataaattcaaggggaacactctttactttacgctgatctacagaccagacgggcgtgtagaaaaactggaaaaacgcaaaaaaagtattaaagaaaagaaagatgatattcacattcatgtgaagagaatgaatgaaatgattaatacattctctggcgctcttgataaatttacctgtaaacttcttggtatgtatgaggagaacggaaaggtattttcttctcaactgtcattctataattatcttctgacagggaagttgcaaaaaatcagagtcactgattctccggtgtataacgttcttggtggagtggatgtattttttaatcatgataccggacagatatgccgcattgatggaaataaattctttcgttctattgaaattaaagatttctgtagtgagactgcatccggtgtttttgatgtgctccagtattctgatgctgactatattattacgcattcatatacatccatgagcaaatcagaagcattgagtaccattaaacgtgcggaaaaacagttaaagagtacagaagatgatgcggtcactcaattgcaggaactggaaaaggcaaaaaatgatattgtgtccggtgatatatcctttggttactaccatttcacgataatggtaatggcggacagtatcagggagcttgacgaatctgtaagtaaaattacggcagactttactgacctgggcattattccggcattgtcaaccatgtcattgccagcggcatattttgcccaacttccggcggtttttcatttaaggccgcgtttatctccggtatcgaatgtaaattttgtcgaactggcatcattccataatttctaccaggggaaacgcgataaaaactgctggacagaagcggttgctattctcaaaacaccaagcaaacaggcgtattatctgaatttacataactcagtactgtttaaagatgaaacaggtgaaaagaatcttgctaatactaaagttataggaacggcgggttcaggtaagacaatgtttctgtcatatcttgcctgttcattacagaaatacaataaccccgaaacttttgctgattctgcaaaaaataagaagttaacgtgtgtctttcttgataaggacagaggggctgaattatgtatccgaatgcttggtggggaatattacaccgtaaaaagcggtgagccgacaggatggaatccttttgctctggaggcaacaaaacgtaaccgtatttttgtgaagcaactgatggagattctgtgtaccagaaatggtgaaagattatcgacaagagaaagattgcttattagcgaaagtgttgatgctgtgatggattttcctcctggcgaaatgcgggaatatggcattaccagaatgcttgagcatcttatgcagagagatgatcgggatgagcaggagaacgggattatccttcgtttgtcccaatgggctaatagtcaggctcatggctgggtttttgataatgctaaagacacattcaatattcagcatgtcaataattttggcattgatggcaccgagtttcttgatgatccgatggtatgtgcaccaattactttctatctgctgtatcgcattacgcagcttctggacggtcggcgtcttgttattttcctggatgagttctggaaatggctacaggatgaagcattcagcgattttgtctataacaagctgaaaacaattcgtaagctgaacgggctggttattccggcaactcagtctccggatgaaatactgaagaataagatttcacgggctgtggttgaagtatgcagcaccagtatttatctggctaaccctgatgccgattacaatgattatgtggaagggcttaagctgacaccagaagaatttaatattattaaaaatcttgatccaatgtcgagacagttcctgattaaaaaaagcagtcttaaaaagggggatggtaaatcattttcagcacttgcgacactcgatttatcgggacttggtggatatctgaaaatattgtctgccagtgcagataatctggaaatttttgaaagtatttatcatgaaggaatggagcctgatgactgggttcctgaatatctcgaacgggcaatctga

SEQ ID NO: 476392 - DNA, 717 bp, Shigella flexneri; identical to SEQ ID NO: 12966

SEQ ID NO: 476393 - DNA, 1095 bp, Shigella flexneri; identical to SEQ ID NO: 12965

SEQ ID NO: 476394 - DNA, 180 bp, Shigella flexneri; identical to SEQ ID NO: 12964

SEQ ID NO: 476395 - DNA, 204 bp, Shigella flexneri; identical to SEQ ID NO: 12963

SEQ ID NO: 476396 - DNA, 687 bp, Shigella flexneri; identical to SEQ ID NO: 12962

SEQ ID NO: 476397 - DNA, 909 bp, Shigella flexneri
atgatgaagaaattatttattgctacatgtttattgcttcctgggcttgtgtattcagcagcgactccgttaccttctggatttgatgcaaggatgcagactgtgagttataacggtgcgaatacgaccgttatccggtcaaagacaggatttctcacatcagttgttttcgatgaaggtgaggctgttatcagtgcaaaggctggttttcctgccggatgggaaatcacaactgatgataatgttgtttacatcaatccgcgtcccgttgttcaggaacaggaaggcgatgaaggcgaaaaactgaaaaaggttttccagccaacagaaaaggaatgggatacgaatctttttgtcagaacaacaaagcggatttacagtctggatctaatccttctgtcagaagaaaaacaagcgcaacctgcttatgttgtacaattccgctatccatcagaaatagcgaaaaagaatgcagaagaagtaaggctggcaaaagaaaaacaggaaaaactcagacagaagaaactgatttctgaaagttttgaaaaagccgatgcgcctaaaaactggaattatttcatgcgagtcaatgaaaaatatgacagccgtcgtatcgcccctgattttgcttatgataatggtatatttacctttttaggttttaactcagggaaagcattcccagctccatttgctgtaagagatggtcaggaacagacacttgcttttaatgtggaaacaaaaggcaagtataaaattatggttatccacaacgttaatgataaatttgttttacgctatggaaacagcgttgttggtgttgtgaataaatctttcggaaaagtattaaccgaccagaggaatacatcttctcctgcggtagaacgtgttgaggtgaataatgactga

SEQ ID NO: 476398 - DNA, 1110 bp, Shigella flexneri
atgactgatatgaaaaaaacagatgatttagttgatgatgcgaatcagtcaaagctggaaagtaaacccgttcatgatatcggtgatatcaggaacaaaaataatcgtatgcgttctggctttctgtttggtctgatggctgtattagttattggtatttttgcgctgaaaacatataaaaattattttgcagatgaccagcagaaagcatcagaatcaacaggcgataccagcatttctcaggtaagtaaaatccgtactggtcttggtcagaattttgaccctgttgagaacaaagcaattatcaatccaggcgctactggttctggtaatactgtttctgacggtcataaagaagtgccacaggaggggttcaggaaatatttgtcaatacctgttgctggtcagggagggagtcagactggcgcgagtggcagcagcaggacatcagagccacaggaagaaaggaaagaatcaaaagaaaatgtgcctggtaaatcaggaatgaaagtgactgcgattaatctcgatcctgatctctatattgaggaaaacaggcttataccgtgtgctttaaccacacgctttgtttctgatgttgcaggtcgtatcagttgtgtttttacagaagatgtatggagtgctaatcaccacacaaaattactggaacagggaactaaggcttttggtcgttaccagaccggaacgctgaatcatggacagggcagaatgttcgttatgtgggagcagttgcggacgcctgataataaacgaatcgatatggtaaatacagcagcggctggccccctgggagaagcgggcattgatggatggatcgattctcacttctgggagcgttttggtggttctcttatgctcagtatggttcaggatgtagcggctgcggcggcggataatgcacctggtaaagatcgtaatgtggattataccgaaaactcacgacaggcaatggctgaaatggctaaagtcgcacttgagaattcgataaatattcctccaacaatgtataaaaaccagggtgacataatcactattatggtcggggaagacattgatttttctgatatctatgagttaaaggtaaaatag

SEQ ID NO: 476399 - DNA, 1029 bp, Shigella flexneri; identical to SEQ ID NO: 12959

SEQ ID NO: 476400 - DNA, 1818 bp, Shigella flexneri
atgcttgttgcggcatggtttgcaggttcatttattttctttgtgctttacttcagccagataaagaatctgaaaccattgaaggctgtgttcagatccattgatgcgtacaggatggatatttttacagacagccttactttatctgttgtgactacggatatcagagttttagcctttgttgcacttggagcaggatttgtcgtgtctcttatcatccctgttgcggcgttgataaaactgaacgagaagaaagaaaatattttcggtgatgcgcgatttgcaacaattaatgatattcgtgagtctaacagtttcacgcttgacggtgacgaaaaagacgggattatcgttggtataaaagacaagaaaataatacgctatgtgggagcagcattcagtgctatgggagccggaacaagggctggtaaaggtgctggtatagtcatcactaatcttatgaagtactggtggagtgttattattctcgatccaaaaagggagtgttttaatatcaccagtcttatcaggaaggtgattttaggtcatgaggtttataaatttgatccctttagtccggtaacgcaccgctttaaccctttgtattatgtcagcatgggaacgagtgaaggttttaaccagcttgaaaatctttcgttgattatttacccctataagacagatggtgcggatgctggtagctatcttaataagacggcgggtggtgtttttaaatcttatgctgtcgctttatggtttatgattaagaatgataaggctggactaaaaacgcttgatattgagcctgtcttctcaatgtctaaaattaatcagctttttgagcgtgcagaacccgaacatcttctttcattcatgaatgatattcgttcagaattaagggggaaagacaaaacgcttgctgatattggtgtcgctggccttaaggcattcattgagatggaggataaaacaaaagcacaactcaaaagcaactttcttaatggattatcaccgtttgctaaccccaatgtggcgaatgctactgatggaaatgattttgatttgcggcaggtgcggaaaaaacggatgacaatttatttctgtatttctggtgataatgccaggttggctgaaaaaataacaaatattttctttcagcttggtatacaggtgaatcttgaaaagatgccaacggatgatccggaaataaagcatgactgcctttttctactggatgaattcccgtcaattggtgctgtagattacatcaagagtaaatctggtcttattgctggttacaagctgaaattgttgattgtttaccaggtcggctctcagcttgaggaaatctacagttatgcaggcagtaaaacattactggcaagtgcaccctgcaaaatcgtttattctgcttctgatgttaaagatgcacgggagttatcagaggcgatgggaacacgaacagtaactatcggttcgaaaagcaaaagtcgtagtcgtggaggaacatcgagatctgaatcagaaaaccttattgagcgtccactggtaacaacaaatgaactactgacactgaaatttagtgaagaaatcctggcaatgaagggagaaaacccgattcgttgtgaaaaggcattctactatctccatgagtatttctttggtgattttgtgaaggttgctccggaacttgcaaatattttccccaggaagaaaggaaagctggttatgcctccacagaaagtatttgaaaatgaaatcgtcgcaaaagggtatctggcagtaaaagatgttcctgatctcgataaagcggcataa

SEQ ID NO: 476401 - DNA, 420 bp, Shigella flexneri; identical to SEQ ID NO: 12957

SEQ ID NO: 476402 - DNA, 306 bp, Shigella flexneri; identical to SEQ ID NO: 12956

SEQ ID NO: 476403 - DNA, 204 bp, Shigella flexneri
atgagcgaaattaaagaagtttattctgatgatgagttaaaacgtttgctggaagctgttaatcagaattgcccagccagaattgtgttgggtagtgtggagaaggggaaagaagtaccactcaagtggtgttttaggacaataccagagcgtatttcagttgaagaaatcaatgaggttaaaatttatccagagttattctga

SEQ ID NO: 476404 - DNA, 309 bp, Shigella flexneri
atgaaagcaagaagtgtgagagtagccggaattgaaattatcgatagtgttaaaacggtcgcttttgtttttactgaaaccttactgtttatggtctggttttcggcaattgtctatgggctttatcgtgttgttatcgttttatgggatgatcctttaaagccgcaatcgctcatggaatttcttaatttcatagttgagttgtatagctatgtacttccttcgttggctgttatcgcagtggctttaatcgccgttttatccatttgtaaaatactctcagcaatatgggagggaagaaagcaatga

SEQ ID NO: 476405 - DNA, 495 bp, Shigella flexneri; identical to SEQ ID NO: 12953

SEQ ID NO: 476406 - DNA, 405 bp, Shigella flexneri; identical to SEQ ID NO: 82542

SEQ ID NO: 476407 - DNA, 321 bp, Shigella flexneri; identical to SEQ ID NO: 12394

SEQ ID NO: 476408 - DNA, 588 bp, Shigella flexneri
atgtatatacatattgttcctaaactttatcatctcatggctaataaatgtagccttaaatctatttccatacctgagcttgattttataattgatagtgaatcattgtctgtaggcagaccgtggcctaataaatgtttatgggttggaatgcgaaaaggaaggaagtcagttaatggcctcgttttgcaaacagataaaaaattaagatggtttactactatatacacctgggatattgaagatatggggttaatttaccatcaagtcaatacctatatagaagatgatgattttgatatggtttcacaggaaattcttttaaatgattcttttgataagtggagtaacagggttcattcagcttatgaaaataagcctccagccagaatccagcccaaaatggagtccttattaaataaacctggtgaaaacagtcatgatgtgtgggaagagttcgaatggggtgacttccttctgtccagagaagaaagccttttacttcacactattcagtctgaacgattgagtacagattgctctttattcaaaagacaaccgtctattgaaagtgcattagttatttaa

SEQ ID NO: 476409 - DNA, 2154 bp, Shigella flexneri
atgagactttttatcgcagaaaaacccgcagtagcaaatgatattgttaaggcacttggtggcaattttacccgccatgatggctggtttgaaagtgataacgccattgtgactaactgttttggtcatattatcgaatcacaaccgccggaaaactataatcctgaatacaaagcctggaaggttgaaacgcttcctttacgtctttatcccgtgaagtatcagcctgttgaaagtgccgcaaaacaggttaaaacgattctcgaacttatcagacgtggagacgtgactgaaattgttcacgctggcgatcctgatgatgagggacagttacttgttgatgaagtcctagaatatgcaggcaacacaaaacccgtaaagcgcgttctgattaacgacaacacgcttccggcagtgaaaaaggcactggcaaatcttaaagataatcgtgatttcaaagggctttaccttaaggcgctggcgcgttcagttgctgatgccgtctatggcttctccatgacgcgtgcttacaccattcctgcaaaagccagaggatatcagggcgttctgtctgtcgggcgcgtccagactcccgttcttggcctgattgtgaatcgtacccgtgctaaccagaaccataaatccagtttttattacaccatgaccggagtctttcagcgtggtgctgatgttatcagggcgaactggaagccaggggaatttgctccgctgacagaccgtaaattacttgataaagcgtgggcagacggaacggcagcctcccttgcaggaaaaccggctacagttgaagcggcagcaactgatgataaaaaaacggctgcaccgttgccctttaacctggtacgactccagcaatacatgaacaaaaagttcaaaatgacggcacaaaaaacgctggatattacgcaacaattacgtgaaaaatataaagcgattacttataaccgctctgattgctcatatttatctgatgaacaattcagcgaagcgccgcaggttatcgatgccctgaaatcagtctttcctcagtcgctggatattgattcttcacgtaaaagcaaagcgtttaacagtgcaaaggtgactgcgcatactgctataatcccgaccgccagtgtgcctgatgttaacgcactcagcaccgacgagcgcaatgtttacttggcgatcgcacaacactatcttgttcagttcatgcctgaaaaagcataccaggaagtatcggttgccattcagtgtggtgatgagtcgttctatgcccgtgccagaaaaacaactgacagcggatttgaggcgtttcttggcgcggaaaccacagacgaaggtgaatcagaagataatgatgattccgcttttgaactgctctgtaaaattcgcacaggagaaacactgacgacaaaagaagttattgttaatgagaagaaaacaacaccgccgccgttattcaccgaagcctccttgcttgctgcgcttgttcgtgtcgcggattttgtcactgacccaacgattaaaaaattgttgaaggataaggataaagacaaaaaagatgaacatggtggcattggtacgccagctacccgcgcagccattctggaaacgctgaagaaaagaaactatatcacgctggaaaaagggaaacttattcctactgataccggatatgcgcttattgatgccctgcctggtatagcggttaatcctgatatgacagcattatggtctgaaaagcaggctgccatagaaaatggcgatctgacggttgaacagtttattaatgatctgtacggtgaactgacaggcatgatttctgatgttgacctgggcgagatgaagattgaacccgctgcgccagcagggcagtttcaacgcctggactctccctgcccttcctgtggtaaacatattgttatcaggccgaaaggttatttctgtaccggatgtgaatttaaaatctggagtgagttttatggtaagaaaatcacccaagcacaggccgaaaaactggttaaatcagggaaaaccgatttgattaagggatttaaaaagaaaagtggtggaacgtatgatacagttcttgtccttgaggataagaaaacagggaaactgggttttccggcaagggctaagaagtga

SEQ ID NO: 476410 - DNA, 465 bp, Shigella flexneri; identical to SEQ ID NO: 102249

SEQ ID NO: 476411 - DNA, 654 bp, Shigella flexneri; identical to SEQ ID NO: 102250

SEQ ID NO: 476412 - DNA, 195 bp, Shigella flexneri
atgaacgtcaagaacatgttttacggtgccattctggtaagtgctgtatgggcggttattttgctctcatggtttgaatccagccttaccttaagcgattacctccggtacgaatcggtaatcctgatcccatgcctgctgtgggttgctgtttatggattaggtaaactttacctccaaagaacatcaaactag

SEQ ID NO: 476413 - DNA, 816 bp, Shigella flexneri
ttgagtcacttacccgccaaaattttccagatttcacgtagcgacgcctggaatttaaccatctctcccgatgcagcccgtaatatgcgggatctggcggcacagattggtgcaggaatgccaaaatatctgatagcaccggaagtctcactgcttctctcctacattgatgatctgagcatccgcatgtactttgagacactctggaataccggagcacgactgaatgaagctctggcgctgaaacctgctgattttatgctgactccgacgcgccagtacccgcaacccgtggtgatcctgaaaacactcaagcaacgtataaaagaagcagaaagaagacctggacgcccgaccaccaggcatccaccattacaccctgatccgcgatacagaaaaccaccggagcctgctgtaaggctggttcctgttctggatgccggatacgcattgcgtatgcgggaatacctggcgacctggaaaaagcggatcaaacatcagccagtgtgggacataacatcgagacagacaccgctgaactggataaacaccgcagtggcacgggcagggcgtgacggcgtaacattttcggttccggtcacgcctcacacgtttcgccacagttacgccatgcacctgacaatgagtggcgttcctccgcgcgtcctgcaatccctgctgggacaccgttatgcaagaagcaccgagatttactcccgcgttttttcgctggacgtccttacaggaagtggcctgtcctttacctgcgatccacagcttgcaaaacagcttcttggataccctgaggcgccttaa

SEQ ID NO: 476414 - DNA, 660 bp, Shigella flexneri; identical to SEQ ID NO: 102251

SEQ ID NO: 476415 - DNA, 303 bp, Shigella flexneri; identical to SEQ ID NO: 102252

SEQ ID NO: 476416 - DNA, 252 bp, Shigella flexneri; identical to SEQ ID NO: 102253

SEQ ID NO: 476417 - DNA, 216 bp, Shigella flexneri; identical to SEQ ID NO: 102254

SEQ ID NO: 476418 - DNA, 528 bp, Shigella flexneri
atgatatttaaccgtaataaaaaacgagatgaacaacataattctgctgttgttttgccatcagctgaaaatgtattctctgattttattaagaacaatccagctttgacaaccaatgcttttacagccattggggaggttgattgttttactaaagtacccttactctcaaataatgaatcagagtttttaggcattctgtcacgtaatattatacctgattattccgtttttcccaaaatacggctcattgaatttgttcgtcctcatggtagcgaggaagctgtaaaagatttaatccgtgaagtgcagaatataacctgtgattttgtcctgaaatcatatgatgaaacagtcctggctgttatccagtttggtgaaaccgcaaccgtcagacagcaaaagaaaaaactgattatccagcgcgtgtgtgctatgacaggaatttcttttttcgaatttaaaaacactgtcgatatgatggggagcgaagatttttgtcagttcctgcgggatgatgaagagtaa

SEQ ID NO: 476419 - DNA, 405 bp, Shigella flexneri; identical to SEQ ID NO: 12977

SEQ ID NO: 476420 - DNA, 873 bp, Shigella flexneri; identical to SEQ ID NO: 12976

SEQ ID NO: 476421 - DNA, 336 bp, Shigella flexneri; identical to SEQ ID NO: 82465

SEQ ID NO: 476422 - DNA, 351 bp, Shigella flexneri
atgacagccaccaaaaatgtgaagtcgcagaaaaatgattatccggcatccgttgatcacaatgccgccatgattgaagaattgcgcgcagatcctgattatgcaaacgcttatcttgctaatgccctggaagaaataaacgagcctggtggtttaggtggttttcttgttgcgctacgtcaggtaatcgaggcgcgaggggggatttccgaagctgccaggaaatcaggccttgcccgtcagagtatttaccgcgcattatcccccaacggtaacccgaccatcacaacgcttgcacaacttacatcggtagccggattacagttcactctcagtaaatccagccactaa

SEQ ID NO: 476423 - DNA, 516 bp, Shigella flexneri; identical to SEQ ID NO: 12409

SEQ ID NO: 476424 - DNA, 543 bp, Shigella flexneri; identical to SEQ ID NO: 12410

SEQ ID NO: 476425 - DNA, 252 bp, Shigella flexneri; identical to SEQ ID NO: 12411

SEQ ID NO: 476426 - DNA, 228 bp, Shigella flexneri; identical to SEQ ID NO: 12412

SEQ ID NO: 476427 - DNA, 300 bp, Shigella flexneri; identical to SEQ ID NO: 12413

SEQ ID NO: 476428 - DNA, 375 bp, Shigella flexneri; identical to SEQ ID NO: 82466

SEQ ID NO: 476429 - DNA, 294 bp, Shigella flexneri
atgcttactgaagctaaaaaaatggcagtagagatgatgttctggcctgcttgtcctgtagatgatgattattgtttcgacgctataatgtatacatcagttattgacaggaagtttgaagatgaacatggggtatatcttcatcaggtttacaaagaactatgctcaacacctgaattaaaaaaacttctaaaaaagaaagcaataaaattgattgcttttaagtacgatattgatcttgattcagctaacaagattttaatgaaaaatatgctaaggaggattgaaaactga

SEQ ID NO: 476430 - DNA, 138 bp, Shigella flexneri; identical to SEQ ID NO: 12975

SEQ ID NO: 476431 - DNA, 330 bp, Shigella flexneri
ttgttcgataccgaactgaaagcagcacaggattacgacatattcctgcggatggtggtggagtacggcgaaccgtggaaagtggaagaggcgacgcagatcctgcatatcaatcacggcgaaatgcagatcacctcgtcaccgaaaaaattctccggatacttccacttttaccgcaagcacaaagacaaattcgaccgcgccagtaaaaaatatcagctgtttaccctctaccagatccgcaataaacgtatgacctggcgcaccttgttgacgctgctgtcggtgcgtaacggcaaacgtctggctgatggtattcgggggcgctaa

SEQ ID NO: 476432 - DNA, 318 bp, Shigella flexneri; identical to SEQ ID NO: 475568

SEQ ID NO: 476433 - DNA, 771 bp, Shigella flexneri
atgtctgatgacccgacattgcaatggggtgtgtatgatacggtgatgaaaacctttttctcgttaagcaaagaggcctcggcagcaacgttttctccgctgattcatttgaaggatttaaccgtacaaagaaatggctatttatatgcgacaatttattcgacaaaacgcccaattgcagccattgttgcgacttcatatcaacgtcttataacccatttttataatcatcttatttttgcgttgcccgccggtattttggggagtcttgttctgctattactctggctacgtattcgacaaaactatttatctcccaaacgtaaattgcaacgcgccctcgaaaaacatcaactttgtctttattaccagccaataatcgatatcaaaacagaaaaatgtatcggcgctgaagcgttgttacgttggcctggtgagcaggggcaaataatgaatccggcagagtttattccgctggcagaaaaggaggggatgatagaacagataactgattatgttattgataatgtcttccgcgatctgggcgcgtacctggcaacacatgccgatcgctatgtttctattaacctgtcggcctccgattttcatacgtcacggttgatagcgcgaatcaatcagaaaacagagcaatacgcggtgcgtccgcagcaaattaaatttgaagtgactgagcatgcatttcttgatgtcgaaaaaatgacgccgattaattctggctttccgccaggctggttacgaagtggcaattga

SEQ ID NO: 476434 - DNA, 219 bp, Shigella flexneri
gtgaattcactctataccgctgaaggtgtaatggataaacactcgctgtggcagcgttatgtcccgctggtgcgtcacgaagcattgcgcctgcaggttcgactgcccgcgagcgtggaacttgacgatctgctacaggcgggcggcattgggttacttaatgctgtcgaacgctatgacgccctacaaggaacggcatttacaacttacgcagtgtag

SEQ ID NO: 476435 - DNA, 2289 bp, Shigella flexneri
gtgattgaggacggctcccccaatgtctttctcggcggcggtacgcagacggtactggaaatcagcccggaaatccctgactggctgcgtcaggtggtggatgtgctgtatgtggtcgccggaatgcttggcgggctggctggcgcctggcgtcaggcggcaaagatggggtcgaaatttggtacaaaatgtgcggcaaaatttattggtggcgaaatggtcgggatggccatctctgacacagtcatgggattgttcagcaatccggtagatgtcaccactgggcaaaaaattttgctgccggagacggattttaccctgccaggacgcctgcctgtcacctgttcgcgcttttacgccagccacctggaaactgaaggattgctgggcagaggatggcggctgaactgggagataaacctgcgtgaggatgaaacatatatcaccttcatcggtgtacagggtcgggaactgagttatccgaaagagatgctgataccgggccaccagatattcgacccggaagagcagttttacctgagccgtctgcatgacggatgctatgtgctgcattacaccgactgcagctattacgtgtttgatgaatttgatgaccacggcgtcgcgccgttactttttatggagacgccgtaccggcagcgtattgctttcgggcgtgagaacggcaggctggtgcgggtggcctccagcagcggacaccatctgttattgcaccgcacgatgacgcaagcaggggaacgcctgtcgcatattgaacttttgaagggcgggcgtcccggtaacctggtggaatatcgttacgacgataacgggcaactgactggcgtggtgaaccgggctggtgtgacggtgcgccagtttgcctatgaaaatggcctgatgacagagcatcgcaacgcgacgggctttacctgtacctaccactgggaagagattgaaggtttcccgcgcgtggtggaacacacgaccagcgacggcgaggattaccggttccactatgattttgctggcgggcagacggtggtaaccggcaggccggagcagaagtggcagtggtggtttgatgaagagacgtatgtgactgcgcaccggacgccgggcggcggaatgtaccgcttcacgtacaacgaaaaccattttccggtagcggtggaactccccggcgaacgcagggtaacgctggaatacgacaccctgagccgggtggtgaaagagacggacccggcaggccgggtgacacagacgcagtggaacggcagttttgctgaaatcacgcgccgggcgctggatgacgaccacgtatggaaggcggattacaacgaacacggccaggtgatacgggagacggacccggaagggcgcgtcacgcggtacgggtatgatgatcaggggctgccggagacggtctgccaccccggtaaacagcaggaccgttacacctggaacgcgctggggttactgagcagccaccgtcgcatcacgggcagtgtgcagtcctggcagtatacgcagcgcgggatgctggcgcgccatacggatgaagagaaacgggagacgcgctggcagtacaccccggaagggctggttgccagtctgagcaacggcaacggggctcagtaccggttcagctacgacggcgacggacggctgacgggagaacagcgcccggacggcctgataaggatgtttgcgctgaatgcggacgggtttccggtcatcatcccgacgcagggcacagagggcggggtgcgcaatgaacagcaggagcgtgatgcgctgggccgcctgctgcgcagtgacacgcagcacagtacacggaccttcagctacaaccgtcttgaccagataacggaagtgacgctcacccccacggaagaaggggaacggctgcaccacatgcaggcggacacggtgcgttttgcgtatgaccgcagcgggtggctgacggcagagcacagcgtgcacggcagtatcaaataccggcgcgatgcgctgggcaatcccaccgatatcacgttgccggacgggcagcatctcagtcatctttactacggcagcgggcatctgctccagacggcactggacggtatcacggtcagtgaatatgagcgtgacagcctgcaccgtcaggtgatacgcacgcaggggaaactggcgacgttcagcggctacaacgccgacaaccggttaagctggcagcgcagcctgccaggtggcagccagaatccacagcaggcggtactcccccggcgcagaacgacagcgtga

SEQ ID NO: 476436 - DNA, 210 bp, Shigella flexneri; identical to SEQ ID NO: 475253

SEQ ID NO: 476437 - DNA, 885 bp, Shigella flexneri; identical to SEQ ID NO: 472428

SEQ ID NO: 476438 - DNA, 657 bp, Shigella flexneri
gtgcgtatcgaccggattaaagtaacgttcggcgagcgtgaggtgttcagcgacgtaacatacaatcggctggtggaagtgctggacgagtggatcgccactcgctcgaacaataacgccctggagttgtttgccgagctccgtcggttctggaagttctgcgcacctactctttgcaacggccgcaatgttgccgccagtctgccagatgattatgtttcctcccgcgtacagaaacctacccccacacggctttttaccgatattgaatcaatcgcccgactctggctcaatgttgctgcctgcacctctgtacaccagaagaatgctgttcgcttcatgatcatcactggtgttcgtccgattaatgtccataacctgcgctgggactacgtttacgaggaggctggtgaaattgtttatccggaaggggttatcggcatgcgaggggctatgaaaacacaaaaggctttccgcctgccgataacgcctgagatccggcggattatcgacgagcagaaagcctggcgtgattcagttcctgagtgcaacagggattatgtatttttgcagccacgtgatccaatgcagccattttcaaaacgatcactggataagctggtgaaaacatacagcccggacggggctgtaaaatga

SEQ ID NO: 476439 - DNA, 189 bp, Shigella flexneri; identical to SEQ ID NO: 463227

SEQ ID NO: 476440 - DNA, 255 bp, Shigella flexneri
atgcgtcgtttgttttctgtcgcaccggtccttctctggctgattacgcccctcgccttcgcgcaactgccgggtatcaccagccagccgctacctggcgggtatcaccagccagccgctacctggcggtggacaaagctggtcgctcccggtgcagacgctggtgttcatcacctcgttgacgttcattccagcgattttactgatgatgaccagtttcacccgcatcattattgtttttggtttattgcgtaa

SEQ ID NO: 476441 - DNA, 144 bp, Shigella flexneri
atgattttttttgcatccggcgtttgggctatgtggagctcaagagtgggaaatttacaagaggttgaggggataattaaagggatgcttatgacattagatatcaggttaggtacggatatcgttgttattaaatctaattga

SEQ ID NO: 476442 - DNA, 408 bp, Shigella flexneri
atgagcgacaacatccgtgttgggttgattgggtatggttatgcgagcaaaaccttccatgcgcccctgattgcgggcacgcccgggctggaactggcggtaatctccagcagtgatgaaacaaaagtaaaagccgactggccaacggttacggttgtctctgagccgaagcatctgtttaacgatcccaacatagacctgattgtcattcctacacccaacgatacccatttcccgttagccaaagcggcgcttgaggcgggtaaacatgtggtcgttgataaaccctttaccgtgacactgtcacaagcgcgagagctggatgcgctggcaaaaagcctggggcgtgtgctgtctgtattccataaccgccgttgggatagcgatttcttgacgctaaaaggttag

SEQ ID NO: 476443 - DNA, 267 bp, Shigella flexneri; identical to SEQ ID NO: 462029

SEQ ID NO: 476444 - DNA, 3516 bp, Shigella flexneri
atggatgaaaatgctttagggtttgcctcatactggcgcaactcgcttgcggatgctgagtcaggaaagggcagttttaaacggaaagacgcccaaaatttcactcactggcatgggatagcggcgggacgtcttgacgaagcgattgtcagtaaattttttgagggagaaaaagacgatgtcgaaacggtcgatgtcatcttgcgcccaaaagtttatttccggttactgcagcatggtaaggaccgttccgcaggcgcgcctgatattgttaccccgatagtgacgccagccttgctaagccgtgagggttttttatatccgacgccagcgacctccattcccagagacctgcttgaacctttgccaaaaggagcattttcgattggtgagattgggcagtatgacaaatacaagacgacccataccacgttctctatcaactttgatgacagcgttgataagactgccgaaacggatgaagaacgggaagcacgatatgccgccttgcagcaggagtggcgtcaatatctgtatgactcagagaggctactgaagagcgttgccggcgactggattgaaaaacctgagcaatatgaactcgctgagcacggttatattgttaaaacggctcaatctggcggtgccagttcccatatcctttctctttatgatcacctgcttgtttgcaataaggatgtgccgctcttcaatcgcttcgcctcgcgagaggttcatgctgcagagtctttgctggccccaggagcaaaattcagcgacaggcttggacactccggagataagtttccgctggcaaaggctcagcgcgatgccttaagccattttctggatgcaagacatggcgatatccttgctgttaatggccctccgggaaccggaaaaaccacgctggtgctttctatcatcgccacgcagtgggccagagcggctctcgaaaaatctgagcctccggttattatcgcgacttcaacgaataaccaggctgtaacgaacattattgaggcattcgggaaagacttttcgcaaggttcaggtgcgatggccgggcgatggttgccagagctgaaaagcttcggtgcttattttccctcaagcagtcgtaaagctgaggcagccaaaaaatatcaaactgaagatttcttcaaccaggttgagtcaaaagagtatgtagaggatgcactgctgttttatctggaaaaggctaaggcagcctttcctggaaaagagtgttcatcccctgaaaaggtcattgaactcttgcatggtcagttggcagcaaaatctgagcaactgataagactgaacgcaacatggcaaacgttaagccagattcgggctgcgcgtgagcttattgctaatgatattgagcaatatctcgataatttaaataaattactttccggacaagaacaaaaagtcactctactgaagagtgctaaaacggaatggaaaaaatatcgcgccggtgaatcactgatctattcattattttcctggctcccggcggttcgcaataagcgacagtaccaaatacagctgtttctcgaagataaattaggcgcgctgattgcaggaaatcagtggtctgatcctgaaactatcgaacgtaatattgatgggctgctcaattccgctgagcgcgagcaaacaacataccggcagcagattgactccgcccatgaaatcgttcttaaagaacagcaggcggttcaggagtggcagaggctggcatttgatttagggtatgagggcgacgaggaactgagcttctcacaggccgatgaactggctgatacgcagattcgcttccctgcatttttactgacgactcactactgggaaggtcgttggctgatggatatggccagcattgatgatctgcaggatgagaagaagaaaaaaggtgctaaaggggtaaccgcccgttggcaacgtcgaatgaaactcacgccatgtgtggtgatgacatgctatatgctgcccggtaatatgcagataagtgagcacaaaggacaacgtaaattcgagaaaagttatttgtatgattttgccgatttactcattgtcgatgaagccgggcaggtgcttcctgaagtggctgctgcctcgtttgcattagctaagaaggcattagtgattggcgatacggagcagatcccgccaatatggagtattgctcctgcgattgatgtcggtaacatgctggcggaaaaaattctgtctggcagtacgcaagaagagattaccgagaaatatacggcaatcgcagaccttggtaaaagtgccgcatctggcagcgttatgaaaatagcgcagtttgcttcgcgctatcaatatgatcccgaactggctcgtggtatgtacctatatgaacaccgccggtgctacgacaatattattggatactgtaatacgctctgctatcacggtaagttgttgcctaaaagagggcgtgaagagagcaatttaatgcccgcaatggggtatctccatattgatggtaaaggagagctggcaagtagtggaagtcgatataatttgcttgaggctgaaacgatagcggtctggttggcagagaaccagcaaaatattgaagcgcattacggtaaatcgcttcatgaagttgtcggtattgtgacgccttttagcgctcaggtatccactatcaaacaggtgctgggcaaacaagatatcagtacaggcacgaatgaaaagtcgctcacagtgggcaccgtgcactctcttcagggagcggaaagagcgattgtgatattctcgccagtctattcaaaacatgaagacggcgggtttattgatagcgataacagcatgctgaatgttgcagtctcccgtgcgaaggacagttttctggtcttcggcgatatggacctgtttgaggtccagccagcctcatcgccacggggattactggcaaaatacctctttgagtcagagaagaatgcgctctcttttgattataaagagcgtaaggatttaaaaaccgccgggaccaaaatctacacacttcatggtgtggagcaacatgataatttcctgaatcagacatttgaaaataccagtaaacacatcacgataatttctccatggctgacctggcaaaggctggagcaaaccggttttcttgattccatgattgcggcgtgttcacgtggaattaacgtcacgatagtcactgacagaagctacaacactgaacataatgattttgagaagcgaaaagagaagcagcagaactttaaagcggcgctggagaaactgaatgcgctgggtattgctacaaagctggtaaaccgtgttcatagcaaaattgttattggtgatgatggtttgctgtgtgtgggatcgttcaactggtttagtgcgacacgggaagcgcgatatgaacgatacgatacatcaatggtttattgcggtgataacctgaagggtgagattgaggctatttataatagtcttgagaggcgtcaggtttag

SEQ ID NO: 476445 - DNA, 1263 bp, Shigella flexneri; identical to SEQ ID NO: 471668

SEQ ID NO: 476446 - DNA, 210 bp, Shigella flexneri
atgacggatggctggccgctgtatgaatcacgcctgaaggaaaagctgcacgttatcagcaagcgttacactcagcgcattgagcgacataatctgaatctgagacaacatctggcaaggctgggacggatgtcactgtcgttctcaaaatcggtggagctgcatgacaaggtcatcgggcattatctgaacataaaacactatcagtaa

SEQ ID NO: 476447 - DNA, 153 bp, Shigella flexneri
atgattgaattgccgttgtatttgtatgttgtgtattgttttgcttttggaatgacattttttgtcattggtaatattgtattgtcatctttttttaaggagggggtggcaggacttaacaaattttctttattttttattgcctatgcatag

SEQ ID NO: 476448 - DNA, 210 bp, Shigella flexneri
atgaaccttgacgacaaatcgctgtttcttgacgccatggaagatgtccagccgctgaaacgtgctacagatgtccactggcatccaacgcgtaaccaacgtgcgccgcagcgtatcgacacgctgcagcttgataatttcctcactaccggatttctcgacatcatcccgctaagtcagccgctggagtttcggcaggaagggttgtag

SEQ ID NO: 476449 - DNA, 210 bp, Shigella flexneri
atgacggatggctggccgctgtatgagtcacgcctgaagggaaagctgcacgttatcagcaagcgttacactcagcgcattgagcgacataatctgaatctgagacaacatctggcaaggctgggacggaagtcactgtcgttctcaaaatcggtggagctgcatgacaaggtcatcgggcattatctgaacataaaacactatcagtaa

SEQ ID NO: 476450 - DNA, 210 bp, Shigella flexneri; identical to SEQ ID NO: 475253

SEQ ID NO: 476451 - DNA, 762 bp, Shigella flexneri
atggttaaatcacacggcaccgtcagtgtcgacggtaaagtctctgatgctgacctcacttacctggaagaggtggcaaacagcaccgggcaggaggtggacaaaagccgcctgacatcacaggcctgtgcccgcacggcactgatcactgatgtgggtattgctctggctacggaactggaaacggccgggcagaaatggtctctgggcttcccccccaaattccagcgcgtcgacctgttcaactacaacgtgctggtcagaaattatgacagcagcgccttcaaaggcgaccgctaccacaacacgaaaaatggcatcaacgccgacatcggtgccagtacggacctggatgacaactggacgctgggactggtcgcacagaacctgatctcccgtagtattgagacaaaagaagtgaacggtatcacggaaaccttcaggatccgcccgcaggtgacggccggtgtctcctggcacaacgcgatgttcaccactgcatttgatgtggatctgaccccggccagcggtttcacctccgacagcaaccgtcagtttgccgccattggcacagaatttaatgcctggaaatgggcacagctgcgcgccggttaccgtcagaatctggccggtaacgacggcagtgcattcacggccggggtggggatctcaccgtttgatgtggttcaccttgatgttgcaggcctgatcggcacggacaacacttacggtgcggtcgcacagttccagttcaccttctga

SEQ ID NO: 476452 - DNA, 3858 bp, Shigella flexneri
atgaataaaatttattcactgaaatatagtcatattacaggtggattagttgctgtttctgaactgacccggaaagttagtgtcggtacatcaagaaagaaagttatcctcggtattattttatcctcaatatatggaagttatggcgaaacagcatttgcagcaatgctggatataaataatatatggacccgcgattatcttgaccttgctcaaaacagaggagagttcagaccgggtgcaacaaatgttcaattaatgatgaaagatggaaagatatttcattttccagaactacctgtacctgatttttctgctgtttccaacaaaggtgcaacaacatcaattggaggtgcgtacagtgttactgcgactcataacggtacacagcatcatgcaataacaacacagtcatgggatcagacagcatataaagcaagtaacagagtatcatctggcgacttttcggttcatcgtctgaataaattcgtcgtggaaacaacaggggttacggagagtgccgacttctcactttctcccgaagatgcgatgaaaagatatggcgtaaactacaacggtaaggaacaaataattggcttcagagcaggtgccggaacaacctcaacgatattaaacggcaaacaatatctgtttggacaaaactataatcccgacttgttaagcgcaagtctttttaatctggactggaaaaacaagagttacatttataccaacagaaccccttttaaaaactcaccaatttttggcgatagtggttctggttcttatctatatgataaagaacaacaaaaatgggttttccatggtgttaccagtacagttggttttatcagtagtaccaatatagcctggacaaactactcgttatttaataatattctggtaaacaatttaaaaaagaatttcacaaacactatgcagctggatggtaaaaaacaagagttatcatcgattataaaagataaggacctgtctgtctcaggaggaggggtattaacgctcaagcaggataccgatcttggcattggcgggcttatattcgataagaaccagacatataaagtgtacggaaaagataagtcttataaaggtgccgggatagatattgataataataccaccgttgaatggaatgttaagggcgttgccggagataatctgcataaaataggtagtggtactctggatgtaaaaatagcacagggaaataaccttaaaataggtaatgggactgtcatccttagtgctgaaaaagccttcaataaaatttacatggccggaggtaaaggtacggtaaaaataaatgccaaagacgctttaagcgaaagcggtaatggcgaaatctattttaccagaaatggcggaacactggatctaaacggctatgaccagtcatttcagaaaatcgcagcaacagatgcgggaacaaccgtaacgaactcaaacgtgaagcaatcaacattatcacttactaatactgatgcatatatgtaccatgggaatgtatcaggtaatataagcataaatcatattatcaatactacccagcaacataacaataatgccaatctgatctttgatggctcagtcgatatcaaaaacgatatctctgtccggaatgcacagttaacattacaaggacatgcgacagaacatgccatatttaaagaaggcaataacaactgtccaattccttttttatgtcaaaaagactattctgctgccataaaggaccaggaaagcactgtaaataaacgttacaatacggaatataagtccaacaatcagatagcctctttttcccagcccgactgggaaagtcgtaaatttaatttccggaaattaaatttagaaaacgcaaccctgagtataggccgggatgctaatgtaaaaggacacatagaggctaaaaactctcaaattgttctgggaaataaaactgcatacattgacatgttctcaggaagaaacattactggcgaaggttttggattcagacaacagcttcgctccggggattcagcaggcgaaagtagtttcaacggcagtctgagtgctcaaaacagcaaaataactgttggtgataaatcaactgttactatgactggtgcattatccttaattaatacagacctgattatcaacaaaggagctactgttaccgcccagggaaaaatgtatgtagataaagctattgaactggccggaaccctgacattaacaggcacccctacagaaaataataaatacagcccggcaatctatatgtcagatggatataatatgacagaagatggtgccacgttaaaggctcaaaattatgcctgggtcaatggtaatataaaatcagacaaaaaagcatctattctgtttggtgttgaccagtataaagaagataacctggacaaaaccacacacacaccgctggctacaggtttgctgggtggctttgatacttcttataccggaggtattgatgctcctgcagcctcagccagcatgtataacaccttatggagagtaaacggacagtcagccctgcaatcattaaaaacccgcgacagtcttttgttgtttagtaacatagagaattcgggtttccatactgtgacagtaaacacactggatgccactaatactgctgtgattatgcgggctgatctgagccagtctgtaaatcaatcggataaactcattgttaaaaatcagttaaccggaagcaataacagtctgtcggtcgatatacagaaagtgggaaataataactcaggattaaacgttgacctgataacagccccaaaaggaagcaataaagagatatttaaagccagtactcaggccataggtttcagcaacatatctcctgtgatcagcacgaaagaggatcaggaacataccacgtggaccctgaccggatataaggtggctgaaaatacagcatcttccggtgcagcaaaatcgtatatgtccggtaattacaaagccttcctgacagaagtcaacaacctgaataaacgaatgggggatctgcgtgacaccaatggcgaggccggtgcatgggcccgcatcatgagcggagcaggttcagcttctggtggatacagtgacaactacacccatgtgcagattggtgtggataaaaaacatgagctggatggacttgaccttttcactggtctgactatgacgtataccgacagtcatgccagcagtaatgcattcagtggcaagacgaagtccgtcggggcaggtctgtatgcttccgctatatttgactctggtgcctatatcgacctgattagtaagtatgttcaccatgataatgagtactcggcgacctttgctggactcggaacaaaagactacagttctcattccttgtatgtgggtgctgaagcaggctaccgctatcatgtaacagaagactcctggattgagccgcaggcagaactggtttatggggccgtatcaggtaaacggttcgactggcaggatcgcggaatgagcgtgaccatgaaggataaggactttaatccgctgattgggcgtaccggtgttgatgtgggtaaatccttctccggtaaggactggaaagtcacagcccgcgccggccttggctaccagtttgacctgtttgccaacggtgaaaccgtactgcgtgatgcgtccggtgagaaacgtatcaaaggtgaaaaagacggtcgtattctcatgaatgttggtctcaacgccgaaattcgcgataatcttcgcttcggtcttgagtttgagaaatcggcatttggtaaatacaacgtggataacgcgatcaacgccaacttccgttactctttctga

SEQ ID NO: 476453 - DNA, 582 bp, Shigella flexneri; identical to SEQ ID NO: 462522

SEQ ID NO: 476454 - DNA, 408 bp, Shigella flexneri
atggtgtcagcgaaaaacgaaaccgctgttgaaatccctggaaagctggttgcggaaaagatgaagacccagtcgcgacactcagagttggcgaaggcgttcgcgtacgcacttaaccagtggccggcactgacgtactatgcgaacgatggctgggtggaaatcgacaacaacatcgctgaaaatgccttgcgggcggtcagtctgggtcgtaaaaacttcctgttcttcggctctgaccatggtggtgagcggggagcgctactgtacagcctgatcgggacgtgcaaactgaatgacgtggatccagaaagctaccttcgccatgtgcttggcgtcatagcagactggccggtcaaccgggtcagcgaactgcttccgtggcgcatagcactgccagctgaataa

SEQ ID NO: 476455 - DNA, 507 bp, Shigella flexneri; identical to SEQ ID NO: 31196

SEQ ID NO: 476456 - DNA, 219 bp, Shigella flexneri; identical to SEQ ID NO: 13129

SEQ ID NO: 476457 - DNA, 4119 bp, Shigella flexneri
gtgaataaagtttattctcttaaatattgccccgtcaccggggggcttattgctgtctctgaacttgcccgcagggtaataaaaaagacatgccgaagattaacgcatattcttctggctggcattccagcaatctgtctgtgttactctcagatatcccaggcgggtattgtccgttccgatattgcctatcagatttatcgtgatttcgccgaaaacaaagggctttttgtacctggtgccaatgatattccggtatatgataaggacggaaaacttgtgggaagactgggtaaagccccaatggccgatttcagcagtgtgagctcaaatggcgttgctacgcttgtatcgcctcagtatatcgtcagcgtaaagcataacggaggatatcggagtgtgagctttggtaatgggaaaaatacatattcccttgttgaccgtaataaccacccttctattgacttccatgctccacgtctgaataaactggttacagaagttattccctcagcggtaacatcagaaggaaccaaagccaatgcttataaatacactgaacgttacaccgctttttatcgggtgggtagtggtacgcagtacactaaggacaaggacggaaatttagttaaggttgccggtggatatgcttttaaaacaggaggaaccacaggagttcctctgatatctgatgcaacaatagtctctaatcccgggcaaacttataatcctgtaaacggccctttacctgactatggagcccctggggatagtggttctcctttgtttgcttatgataaacaacaaaaaaaatgggttattgttgctgtattaagagcatatgcaggtattaatggtgctacgaactggtggaatgtcataccaacagattatctgaaccaggttatgcaggacgatttcgatgcccccgtagactttgtttccggactgggccccctgaactggacatacgacaaaacatcaggcacaggtaccctgagccagggcagtaaaaactggaccatgcacgggcagaaagacaatgacctcaatgccggtaaaaatctggtattcagcgggcagaatggtgcaattatcctgaaagacagtgtgactcagggtgccggttatctcgaatttaaagacagttacaccgtatctgctgaatccggaaaaacatggacgggtgccggcattattactgacaaggggacgaatgtaacctggaaggtcaacggcgttgccggtgacaacttgcataagctgggggaaggaaccctgaccataaacggaacaggtgtaaacccgggaggactgaaaacgggagacggtatcgttgtacttaaccagcaggcagacactgcaggtaatatccaggccttcagttcagtgaacctcgccagcggacgtccgaccgtggtgctcggggatgcccgtcaggtcaatccggataacatttcatggggataccggggaggtaagcttgaccttaatggtaatgccgttaccttcacccgactgcaggctgctgattacggggcggtgattacaaataatgcacagcaaaaatcccagcttttactggatcttaaggctcaggatacaaatgtcagtgaaccgacgattggaaatatatccccctttggtggtaccggcactccaggaaacctgtacagcatgatactcaacagccagacccgcttctatattctgaaatctgccagctatggtaacactctgtgggggaacagcctgaatgatccggctcagtgggagtttgttggcatgaacaaaaacaaagcagttcagacagtaaaagataggatcctggccgggcgggcaaaacaacccgttatctttcatggtcagctgaccgggaatatggatgtcgccattccacaggtgccggggggaagaaaggtaatctttgatggtagcgtgaacctgccggaaggtaccctgagtcaggacagtggcaccctgatattccagggacatccggttatccatgcctccatcagtggcagtgcaccggtcagcctgaaccagaaagactgggaaaaccgtcagtttacaatgaaaacactgtcgctgaaagacgctgacttccatctttcacgtaacgcctcgctgaacagtgacattaagtcggataacagccatatcacactgggaagtgacagggcatttgtggataaaaatgacggaacaggaaattatgtcattccggaggaaggtacctctgtcccggacaccgtgaatgacaggagccagtatgaagggaatattacgctgaaccataactcagccctggatatcggcagcaggttcaccggggggattgacgcttatgacagtgccgtcagcatcacctctccggacgtcctgttgacagccccgggtgcttttgccggcagttcactgacagtgcatgatggcggtcatcttacagcactgaacggtcttttcagcgacgggcatattcaggccggtaagaacggcaaaatcaccctgagcggtacaccggttaaagatacggctaatcagtatgcccctgctgtatatctgacggacggatatgacctgaccggcgataacgcagcactggaaattacccgtggagcacatgcttccggtgatattcatgcctctgcggcatcaacagttaccatcgggtctgacacgccggcagaactggcttctgcggaaacggctgcatcggcgtttgccggcagtcttcttgagggctataacgcagcattcaatggtgccataaccggtggcagggctgatgtcagtatgcataatgcactgtggactctgggtggggactctgccatccacagtcttaccgtcagaaacagccgtattagttctgaaggagaccgtacattccgtaccctgacggtgaataaactggatgcaacaggcagtgattttgttttgcgtacggacctgaaaaatgccgataaaattaatgtgactgaaaaagccactggttcagataacagcctgaacgtcagctttatgaataatcctgctcagggacaggccctgaatattcctctggtcacggcaccggcgggaacttcagcagagatgtttaaggccggcacccgggtgacaggtttcagtcgggtgaccccaaccctgcatgttgataccagtggtggcaatacgaagtggatactggatggttttaaagcggaggctgataaagccgctgccgcgaaggctgacagtttcatgaatgccgggtataaaaacttcatgacggaagttaacaatctgaacaaacgtatgggtgacctgcgtgacacaaacggtgatgccggtgcctgggcgcgcatcatgagtggtgccggttctgcagacggtggttacagtgataattacacccatgttcaggtcggctttgacaaaaaacatgaactggacggtgtggacctgtttaccggtgtcacgatgacctataccgacagcagtgcagacagccatgcattcagcggaaagacgaaatcggtggggggcggtctgtatgcttcagcattgtttgagtccggtgcctatatcgatttgattggtaaatatattcaccatgacaatgattacacaggtaactttgctagcctgggaacgaaacactacaacacccattcctggtatgccggtgctgaaacgggttaccgctatcacctgacagaggacacgttcattgagccgcaggctgaactggtttacggcgccgtgtccgggaaaacattccgctggaaagacggtgatatggacctgagcatgaagaacagggacttcagtccgctggttggaagaacaggggttgaactgggcaagaccttcagtggtaaggactggagtgtgacggcccgtgccggaaccagctggcagtttgacctgctgaataatggagagaccgtactgcgtgatgcgtccggggagaaacggataaaaggagagaaggacagccggatgctgtttaatgttggtatgaatgcgcagataaaggacaatatgcgctttggtctggagtttgagaagtcagcctttggtaaatataacgtggataatgcggtaaacgcgaatttccggtatatgttctga

SEQ ID NO: 476458 - DNA, 387 bp, Shigella flexneri
atggaaacgacattcgtgctggatgcactggagcaggcgttgtgggcccgtcgtccgtctggcaccatccatcacagcgataaaggctctcagtatgtgtcactggcctataaggcgcgactaaaagaagcaaaactgctggcatcaacagggagtactggtgactcgtatgacaacgcgatggcagagatcatcaagggcctttacaaagcggaggtaatacaccgtaagagctggaaaaaccggacagaagtggagctggccacactcacgtgggtggactggtataacaatcgacgattgctggaaaggctgggccatatcccaccggcagaagcagaaaaagcttattatgcttccatcggaaatgatgatctggcagcctga

SEQ ID NO: 476459 - DNA, 267 bp, Shigella flexneri; identical to SEQ ID NO: 462029

SEQ ID NO: 476460 - DNA, 522 bp, Shigella flexneri
gtgaccgaaccaaatcaggtgtggtgcggtgatgtgacctatatctggacgggtaagcgctgggcgtacctcgccgttgttctcgacctgttcgcaagaaaaccagtgggctgggccatgtcgttctcgccggacagcaggctcaccatgaaagcgctggaaatggcatgggaaacccgtggtaagcccggcggggtgatgttccacagcgatcagggcagtcattatacgagcaggcagttccggcagttattgtggcgataccagatcagacagagtatgagccggcgcggaaactgctgggataacagcccaatggaacgcttcttcaggagtctgaagaacgaatggatgccggtggtgggttacgtaagcttcagcgaggcagctcacgccataacggactatatcgttggatattacagtgcactaagaccgcacgaatataacggtgggttacccccaaacgaatcggaaaatcgatactggaaaaactctaactcggtggccagtttttgttga

SEQ ID NO: 476461 - DNA, 327 bp, Shigella flexneri
atgactaaaaatactcgtttttcccccgaagtccgtcaacgggcagtccgtatggttctggaaagtcagggcgaatatgactcacaatgggcgacaatttgttccattgccccaaagattggctgtacgccggagactctgcgtgtctggggtcgccagcatgagcgggataccgggggcggtgatggagggctcaccaccgctgaacgtcagcgtctgaaagagctggagcgtgaaaatcgtgaactgcgccgcagtaacgatatccttcgccaggcttccgcttattttgcgaaggcggagttcgaccgcctctggaaaaaatga

SEQ ID NO: 476462 - DNA, 1047 bp, Shigella flexneri; identical to SEQ ID NO: 473496

SEQ ID NO: 476463 - DNA, 747 bp, Shigella flexneri
atgtcccaacaagaaatcagcatcattaacctcgaccagcttgtgtccatgacctcagttgaaattgctgagctgacaggaaaagaacataaacacgttttacgagatattcgtaatatggtcgaagagcttaacggggccaaaactgagcactgctcaactttgagcagcgagcttaacgggtccaaatttgggctcgttggcgaggaagtatacaaggacgcgaaaggtgagagccgaacaatgtatcgtctcgaccgtaagcatactttcattctggtcgctggctattccgttcacctccgcgccaagtgttacgaccatattcagacgttagagcgtcgagtccttcaactggaagaccagaagaagcgagcagccattcagtccgctaaccgccgaggcgtgacttggggcgactactgcaaaacctatggtctgcccgctcagaagctaatgaccgcacttctccagcatcgtggcctctttcgtaagaacccaatcagtaacgagtggtctgtaaatccgaagtattccgactgctttcgtatcattaagccgtcagaccagaagttctcagcaggtgggtataacttccggttcaacgctaaggggctggaggtcttcggtaagcctgagatggttgacaagatgcgaggcatccttattgcattcactggcaccgaccagcagaagcaagagcacctcctgaagctggcacaatccggtaaggtggagggaatctaa

SEQ ID NO: 476464 - DNA, 420 bp, Shigella flexneri
atggtcaaagaatttttagttagcaaagaaaataagccttcatatgaatgtatgaatactgctgaaacttgtttggggctggctggaatggcttcggaagattggcaacgtgagcatcattgccgcacaggtataatatttactgcttttgctattgaggcaatgttcatcttctatagaaaacaggttgaccccggctacgataagacgcagaaagagtgcagaaagacaatgcacaagaatacgttaaaattgtgcggtataaacaattatatggggacaaaaccttaccaaattatcaaagagtgtcttgaggtaagagacgctattgctcacggcgattcgtatacttcgagctttaatttctcggcggatcatttggataaccaagacgatattgcaaaagtgtcctggcggtaa

SEQ ID NO: 476465 - DNA, 2298 bp, Shigella flexneri; identical to SEQ ID NO: 474202

SEQ ID NO: 476466 - DNA, 507 bp, Shigella flexneri; identical to SEQ ID NO: 473550

SEQ ID NO: 476467 - DNA, 1071 bp, Shigella flexneri
atgctggtgttttccagtacggatatgttgtttaaagatgatcagcaggataccgaagccacggcgatcgcaagtgatttgttgagcggtaaaaaacgctggcaagccagctttggcctggaagagcgtacagccgaaaaaacgccagtacgcctgcgcatcgtggtcagcgccaggttgctgggttttggctaccagcggttaatgccttcttttgctggcgtacgcttcgaaatgggtaacgacggctggcacagttttgtggcgttaaatgatgaatccgccagcgtagatgccagtttcgattttacgccggtctggaacagtatgcctgccggagccagcttctgtgtggcggtgccgtattcacacggtattgccgaagagatgctttcgcacatcagccaggaaaacgacaagctgaatggggcgttagacggtgccgcggggctgtgctggtatgaagactcaaaattgcaaaccccgctgtttgtcggtcagtttgatggcactgccgaacaggcgcaattgccagggaaactgtttacgcaaaatattggtgcgcacgaaagcaaagcgccagaaggtgttttgccggtaagccagactcagcagggcgaagcgcaaatctggtgtcgcgaagtgagttcccgatacggtcagtatccgaaagcgcaggcggcgcaacccgatcaattaatgtcggattattttttccgtgtgtcgctggcgatgcaaaacaaaacgctgcttttctccctcgatgacacgctggttaataacgccctgcaaacactgaataaaacccgcccggcaatggtggatgtaatacccactgatggcatcgttccgctctatatcaatccacaaggcgtggcgaaactgctgcgtaacgaaacgttgaccagtctgccgaagaatctcgaaccggttttttataacgccgcacaaactttattaatgccgaagctggacgctttatctcaacaaccgcgttatgtcatgaagctggcccagatggaacccggtgtcgcctggcagtggctacccataacctggcagccgctatga

SEQ ID NO: 476468 - DNA, 564 bp, Shigella flexneri
ttgttgaccacttcagagtatcagttcacacgacacacggctcacacgacctctgaggcccgtagatgggcgtctctggtgtctgtggtcactggcgctcggtctgctgaggtctgccacctgactaaacgtgacattgtaaccttggacaatggactggtctgtatcgacatcaatgaagatggggacgggaagtctgtgaagaacaaacattcagtccgacttgtgccgttaaccgatggcgcttatgggtttgacctgacgtccttcctgtcgtgggtagacatgcagcctgatgagggtcctctcttcgggatgactccgagcgcctactctagctggtttaactcaagggtcctgactgaggccctaggagactctcaggatgtctctctccacagtctgagacattggctggcgacccgaatgaaagagcgtggagtcaatctggtggacgctcaaggcatcttaggtcacagcagtcagtcaattacgtatgacctgtacgggaaaggacacgctgtgggtaggctggctgatgtgcttaagacagctttactttaa

SEQ ID NO: 476469 - DNA, 369 bp, Shigella flexneri
atggcacgaccaatcgcaactcacgacaacacgttcaccaaagcctacttgcagcagcactgcggggacctgctgtcattcgatggtcagggcgacctgagtggttggctggatgatgtccttactggtgctggtcgcctgaacgaatcaatggcaagcaataccaagcctgtcagcccatacttgattctgacccaactactaacgcacgacacattaactgtaagcgctgtgcaggagtccctgagccgtaagcgtgttgccttgggtgaacctatggtttcaactcgctacgctcgctacgtctatgctaccgtcgtcagcgccagtaaatccgtccagtaccacgccagtaaagctggttcatga

SEQ ID NO: 476470 - DNA, 516 bp, Shigella flexneri; identical to SEQ ID NO: 31844

SEQ ID NO: 476471 - DNA, 501 bp, Shigella flexneri
atgacttctgacaataagcaggaatacaccattcatatcttcggtcaggacatcaccagtcaggacggattgtttcgactggatgagatacgccgggtaggcattcagattggtaaggtagaagataaccgtagtaccgaggttgctcgcttcatgaggaccaaggctggtagaagtctaaccaacccagaaaacggggttgttaaaaagattaacatgggtcacttagggacctcgtggctggctgacccagtagccgctatagagttcggtcggtggttggaccttgggtacggactggcagtaacccgagccttcgtgtctatgacctccagcgccaccgtgcagtctgctgtagcgtctgctgaggacatcaagccggagaccaaggaattcatccagcgtcatggcacaggcctctacatcgccggacgtgaagtctcacaggctgagtattcagactatcaagctgtgaccgctggtcgctgtgagtggaggtaa

SEQ ID NO: 476472 - DNA, 204 bp, Shigella flexneri; identical to SEQ ID NO: 31842

SEQ ID NO: 476473 - DNA, 489 bp, Shigella flexneri
atgatgttcaacaacaactggaagctgtcagtcaccgacatcaacctttatgaaaacactgtgagtctggacggtcagccctatccgctgtcgctcgctatcaagaccctcattccgggctacctgtcaggcctgccgtctaccagccgcgaggcaatggagttactggaagctctggctgaagctggcgtgaccattggcaacttcttcagtaatgacttgatgaccgcctatggtcaccgccagatgaacaaacgagctgaagctgagcgtatcgctaaagagcaacgacttcaggctgagcgtatgcgtgaagagaacatgaccgatgcagagtggcagaaagagctacagcgccgcgaacaggtcaaagctgaacgccggacctatggtgagagcctccgcagtgctacccattccgctggtcgctcccgtgccgctattgtcgctgaccttgagtcaggcggtaactggatggacagcttgtaa

SEQ ID NO: 476474 - DNA, 282 bp, Shigella flexneri
atgttacctattttgacgggcaatgtcggcatcagcggcggaaatagtggcgcgcgtgaatcgacctataccattacgatagaacgcctaccggtgctggataatccggtcaaaacgtcaatctcctgcttcagctggacggatgctatcgatcatggcccgcaaatgacggcactccgcgacggtgtccggggcaaagataaactggatgtgcccattaagttcatctggaactacaaggacttgaagcggacccttagtaggcctgaggtcctgcattga

SEQ ID NO: 476475 - DNA, 321 bp, Shigella flexneri
atgtccaaaaatgaccgaatggtgggcatcagccgcagaacactcgttaaatcaaccgcgacaggttctctggcgctggctgcaggcggtttttctttaccgttcaccctgcgcagtgcagcggcagcggtacaacaggccagcgaaaaagtgatctggggttcctgttccgtcaactgtggtagccgctgtgcacttcgtctacatgttaaagataatgaagtgacctgggtggaaactgacaataccggcagcgatgagtacggcaaccatcagggtacgcgcctgtttgcgcggtcgctccatccgccggcgtattaa

SEQ ID NO: 476476 - DNA, 225 bp, Shigella flexneri; identical to SEQ ID NO: 476353

SEQ ID NO: 476477 - DNA, 789 bp, Shigella flexneri
atgggctggctgaaacgcatctggcaggaaggtgtacaacaaggcaaaggacgcggcgttcatctgccagcgtttgatgacttctggaataacaaagagtacgtcgagtttgaccatccgcagatgtttgttcgccaccaggcattccgcgaagatccggatctcgaaccgctgggcacgccgagtggcctgattgagatctactcgaaaaccatcgccgatatgaactacgacgattgtcaggggcatccgatgtggtttgagaaaatcgaacgctcccacggtgggcccggctcgcagaagtatccgttgcatctgcaatctgtgcatccggatttccgacttcactcgcagctatgtgagtcggaaacgctgcgtcagcaatatacggtagcgggtaaagagccagtgttcattaacccgcaggatgccagcgcgcgcggtattcgtaacggtgatgtggtacgcgtctttaacgctcgcggtcaggtgttggcaggagcagtagtttctgaccgctatgcacccggcgtggcgcgaattcacgaaggggcatggtacgatccagataaaggcggcgagcctggtgcgctgtgcaaatacggtaaccccaacgtgctgaccatcgacatcgggacttcgcagctggcgcaggcgaccagtgcgcacactacgctggtggaaattgagaagtacaatggaacagtggagcaggtgacggcgtttaacggccccgtggagatggtggcgcagtgcgaatatgttcccgcgtcgcaggtgaaatcatga

SEQ ID NO: 476478 - DNA, 219 bp, Shigella flexneri
atggcgctgttaaccctgaccagtaccctggtgggatggtacaacctgcgctttatcagccaggtggaaaaagacaatactcaggcattgattcctaccatgaatatggcgcgccagttgagcgaagccagcgcctgggaacttttcgccgcgcagaacctgaccagtgccgataacgaaaagatgtggcaggcgcaggggcgaatgctcaccgcataa

SEQ ID NO: 476479 - DNA, 2430 bp, Shigella flexneri
ttgctgcaagcgttacgggaacaaggttttgataccaccgctattgaacaacaggagcaggagatctcccgttcattacgtcagcaaggggaactggtggggcggcgtctgcaactacgccagcaacaacggcaactcagtcagcagatagctgccgccgatgagatcgcacgcctggagcaaggtcaggcgaataatgcgacaacttccgctggagcgacccaggccgggatttacgatttgatcgaacaagatcagcgtcaggctgctgaaagtgcactcgatcggctgattgatatcgatcttgagtatgttaaccagatgaatgaactgcgccttagcgctctgcgggtgcagcaaatggtgatgaatctggggctggagcagatccagaaaaatgcaccaacgctggaaaagcagctcaataatgcggtgaaaattctgcaacgtcggcaaatacgcattgaagatccgggagttcgtgcgcaggtcgcaacaacgttaactaccgttagccaatatagcgatctgttggcgctgttccagcaggacagtgaaatcagcaatcacctgcaaactctcgcccaaaataatatcgcccagttcgcgcagtttagtagcgaagtcagtcagctggtcgacaccattgagctgcacaatcagcatggactggcacatctggaaaaagccagtgcacgcgggcaatacagcctgttattgctggggatggtttcactttgcgcactgattatgatcctctggcgcgtggtttatcgctcattcacgcgtccacttgccgaacaaacgcaggcgctgcaacggctgctggacggtgatattgactcccctttcccggaaaccgctggcgtacgggagctggataccatcgggcggctgatggatgcgtttcgcagcagtgttcatgcactgaatcgccaccgcgaacagctggcggcgcaggtcaaagcgcgtacagctgaattgcaggaactggtgatagaacaccgacaggcacgggcggaagcagaaaaagccagccaggcaaaatcggcgtttctgacggcgatgagccatgagatccgcacaccgctgtacggtattctcggcactgctcaactgctggcagataaccccgcacttaacgcccagcgtgatgatttgcaggcgattaccgactctggcgaatcgttgctgaccatcctcaacgatattctcgattattcggctatcgaagcaggtggcaaaaatgtttcagtcagcgatgagccctttgaaccgcgcccgctgctggaaagtaccctgcaattaatgagcggacgggtgaaaggtcgcccgattcgcctggcaacggcaattgccgatgatgtaccgagcgcgttaatgggcgatccacgacgtattcgtcaggtcattaccaacctattgagcaatgccctgcgttttactgacgaagggcacattatcctgcgtagtcgcactgatggcgagcaatggctggtcgaagtggaagacagcggctgcggtattgatcccgcgaaactggcagaaatcttccagccatttgtgcaggtaagcggcaaacgcggcggcaccgggctggggctgactatcagtagccgtctggcccaggcgatgggcggcgaactgagcgccaccagcacgccggaggttggaagctgtttttgtttacgcttgccgttacgtgttgccactgcacccgtgccaaaaacagccaatcaggcggtgcgtcttgacggtttacgtttgctgttaattgaagataacccgctaacccagcgaattaccgttgagatgctgaacaccagtggtgcgcaggttgttgctattggcaatgccgcgcaggctttagagacactgcaaaatagcgaaccgtttgctgccgcactggtggattttgatctgccggatatcgacggcattacccttgcccggcaactggcacagcaatatccgtcgctggttttgattggctttagcgcccatgtcattgacgaaacgctgcgccagcgtaccagttcactatttcgcgggattatccctaaaccggtgccgcgtgaagtgctcggtcagttactggcgcactatctccaactgcaagccaataacgatctaccactggatgtctcgcaactcaatgaagacgctcagttaatggggacggagaagatccacgaatggctggcattatttaaacaacatgccctgccgcttctcgatgaaatcgacattgcccgcgccagccaggacagcgagaaaataaagcgtgccgcgcatcagctaaaaagcagttgctcgagtctgggaatgcgtagcgccagtcagctatgcgcacaactggagcagcagccattatctgccccccttccacacgaagaaattacacgcagtgttgccgctctggaagcatga

SEQ ID NO: 476480 - DNA, 1074 bp, Shigella flexneri
atggcagagaaaaaaagaacccgctggcagcggcggccaggcacgacgggcggcaaattaccgtggaatgactggcgcaatgccacgacctggcgtaaagcgacgcaattcttactattggcaatgaatatttatattgccatcacgttctggtattgggtgcgctattacgaaacggcaggtagtacgacatttgtcgccagaccgggaggtatcgaaggctggctaccgattgccggtctgatgaatctgaaatatagccttgcaacaggtcagttaccgtccgtccacgccgccgcgatgctgttattggtcgcttttatcgtcatcagtctattactcaaaaaggccttttgctcatggttatgcccggttggtacgctttctgaattaatcggcgatctcggtaacaaactgtttggtcggcaatgtgtccttccccgctggctggatattcctctgcgcggcgtgaagtatttgctgttgagtttatttctctatatcgcgttattgatgcccgctcaggcgattcactattttatgttgtcgccctatagcgtggtgatggacgttaaaatgctcgatttctttcgtcatatggggaccgcgacattaatcagcgtgaccgttttgctgattgccagcctgtttattcgccatgcctggtgtcgttatctttgcccatatggcgcgctgatgggcgtggtttcgctattgtcgccgtttaagattcgtcgcaatgccgaaagttgtatcgattgtggcaaatgcgcaaaaaagtgcccatcacggatcccggtagataaattaattcaggtacgaacagtggaatgtaccggctgtatgacttgcgtagagtcatgtccggtagcctcaacattgaccttttcactgcaaaaacctgcagcaaataaaaaagcctttgcgttgtctggctggttaatgacgctactggttctggggattatgtttgcggtgattggttacgcaatgtatgcgggagtatggcaaagcccggtgccggaggaattgtaccgacgcttaattccacaagcgccaatgattggtcactaa

SEQ ID NO: 476481 - DNA, 174 bp, Shigella flexneri
gtgaatattgaagagttaaaaaaacaagccgaaacggaaatcgccgactttatcgcgcaaaaaatcgccgagctgaacaagaatacagggaaagaagtctctgaaattcgcttcatcgcacgagaaaaaatgaccgggcttgaaagttatgatgtcaaaatcaaaataatgtga

SEQ ID NO: 476482 - DNA, 201 bp, Shigella flexneri
atgactggtttagtaaaatggtttaacgcagataaaggttttggctttatcactcctgatgatggcagcaaagacgttttcgtccatttcaccgccatccagagcaatgaattccgcacgctgaacgaaaatcagaaagttgaattttctattgagcaggggcaacgtggccccgcggcagcgaacgttgttacgctctaa

SEQ ID NO: 476483 - DNA, 1050 bp, Shigella flexneri
atgaaagcatttccagaaacatttctttggggtggcgcaacagctgccaatcaggtggaaggtgcctggctggaagatggcaaagggatcacgacctcagatttacagcctcatggcgtaatgggaaaaatggaaccgtgcatcctggggaaagagaatatcaaagatgtcgccatcgatttttattaccgttacccggaagatatcgcgttatttgccgagatgggcttcacctgtctgcgtatttccattgcctgggcgcgaattttccctcagggcgacgaagccgaaccgaatgaagcggggttagcgttttacgatcggctgtttgatgaaatggcgcaggcggggatcaagccgctggtaacgttatcccattacgaaatgctatatgggctggtgaaaaactacggcggttgggctaatcgggcggtcatcgatcacttcgagcattacgcccgcacggtctttacccgctaccaacataaagtagcgttatggctgacgtttaatgaaatcaatatgtcgttacacgcgccattcacgggcgtggggctggcagaagagagtggcgaggcggaagtttatcaggcgatccatcatcaactggttgccagtgcgcgggcagttaaagcctatcatagcctgatccccgaagcgaaaatcggcaatatgcttctcggtgggctggtttaccccctcacctgccagccacaggatatgttgcaggccatggaagagaaccggcgctggatgttctttggtgatgttcaggcgcgtggccaatatcccggctatatgcagcgtttcttccgcgaccacaatatcaccattgagatgactgaaagtgacgcagaagatttaaaacatactgtagatttcatctcttttagttattacatgactggttgtgtttcccacgacgaaagcattaataaaaatgcgcagggcaacatactgaatatgatccccaatccgcatctgaaaagttcagagtgggggtggcaaattgatccggttggattacgggtaatgctgccaacttactga

SEQ ID NO: 476484 - DNA, 225 bp, Shigella flexneri; identical to SEQ ID NO: 476353

SEQ ID NO: 476485 - DNA, 618 bp, Shigella flexneri
atgtcatatctgaatttaagactttaccagcgaaacacacaatgcttgcatattcgtaagcatcgtttggctggtttttttgtccgactcgttgtcgcctgtgcttttgccgcacaggcacctttgtcatctgccgacctctattttaatctgcgctttttagcggatgatccccaggctgtggccgatttatcgcgttttgaaaatgggcaagaattaccgccagggacgtatcgcgtcgatatctatttgaataatggttatatggcaacgcgtgatgtcacatttaatacgggcgacagtgaacaagggattgttccctgcctgacacgcgcgcaactcgccagtatggggctgaatacggcttctgtcgccggtatgaatctgctggcggatgatgcctgtgtgccattaaccacaatggtccaggacgctactgcgcatctggatgttggtcagcagcgactgaacctgacgatccctcaggcatttatgagtaatcgcgcgcgtggttatattcctcctgagttatgggatcccggtattaatgccggattgctcaattataatttcagcggaaatagtgtacagaatcgggtaatgctgccaacttactga

SEQ ID NO: 476486 - DNA, 402 bp, Shigella flexneri
atgaaccgacacacacaaatccgtcagagcgtgctggcacgccttcgggaacagtgtggagacagcgccacgttttttgacgggcttccggcatttattgatgcgcaggaactgcccgccgtggcggtgtggctgagtgatgcgcagtacaccggaaaaatgacggatgaggacgactggcaggctgttctgcatattgccgttttcgtccgtgcacaggcgccggattctgagctggatacgtggatggagaacaccatatttccggccatgaaggatattccggtgctttccggactcatcgacaccatgatcccactcggttttaactatcaacgtgataatgagatggccacctgggcgatggcggaaatcacgtaccagatcacgtacacgaattaa

SEQ ID NO: 476487 - DNA, 312 bp, Shigella flexneri
atgggagttgagcagaataatttcagggacatgttctccgtttatctctccggcccgccgcagacgcagcatgtgttttgtgtatccccggcggcccgggtcgcgcacacgggtctggcaggcgaaaaagggctggaagccttcccgctgcagactttccagtacggtgatggtggggatgtacgcatatcgtttactgcgggaagtatgccggtcttcaccgaaaatactgggcacatggtgcatcagctcttcatgtgtcagcggacggtcacggcgtatctggttcgcataaccaaaacgactgactaa

SEQ ID NO: 476488 - DNA, 3123 bp, Shigella flexneri
atgaaacgacatctgaatacctgctacaggctggtatggaatcacattacgggcgctttcgtggttgcctccgaactggcccgcgcacagggtaaacgtggcggtgtggcggttgcactgtctcttgccgcggtcacgtcactcccggtgctggctgctgacatcgttgtgcacccgggtgaaacagtgaatggcggaacactggtaaaccatgacaaccagtttgtatccggaacagctgatggcgtgactgtcagtaccgggcttgagctggggccggacagtgacgaaaacaccggcgggcaatggataaaagcgggtggcacaggcagaaacaccactgtcaccgcaaatggtcgtcagattgtgcaggcaggaggaactgccagtgatacggttattcgtgatggcggagggcagagccttaacggactggcggtgaacaccacgctggataacagaggtgagcagtgggtacacgggggagggaaagctgccggtacaattattaaccaggatggttaccagaccataaaacatggcggactggcaaccggaaccatcgtcaacaccggtgcagaaggtggtccggagtctgaaaatgtgtccagcggtcagatggtcggagggacggctgaatccaccaccatcaataaaaatggccggcaggttatctggtcttcggggatggcacgggacaccctcatttacgccggtggtgaccagacggtacacggagaggcacataacacccgactggaggggggtaaccagtatgtacacaacggtggcacggcaacagagacgctgataaaccgtgatggctggcaggtgattaaggaaggaggaactgccgcgcataccaccatcaaccagaaaggaaagctgcaggtgaatgccggcggtaaagcgtctgatgtcacccagaacacgggcggtgcactggttaccagtacagctgcaaccgtcaccggcacaaaccgcctgggagcattctctgttgtggagggtaaagctgataatgtcgtactggaaaatggcggacgcctggatgtgctgaccggacacacagccactaatacccgcgtggatgatggcggaacgctggatgtccgcaacggtggcaccgccaccaccgtatccatgggaaatggcggtgtactgctggccgattccggtgccgctgtcagtggtacccggagcgacggaaaggcattcagtatcggaggcggtcaggcggatgccctgatgctggaaaaaggcagttcattcacgctgaacgccggtgatacggccacggataccacggtaaatggcggactgttcaccgccaggggcggcacactggcgggcaccaccacgctgaataacggcgccatacttaccctttccgggaagacggtgaacaacgataccctgaccatccgtgaaggcgatgcactcctgcagggaggcgctctcaccggtaacggcagcgtggaaaaatcaggaagtggcacactcactgtcagcaacaccacactcacccagaaagccgtcaacctgaatgaaggcacgctgacgctgaacgacagtaccgtcaccacggatgtcattgctcagcgcggtacagccctgaagctgaccggcagcactgtgctgaacggtgccattgaccccacgaatgtcactctcgcctctggtgccacctggaatattcccgataacgccacggtgcagtcggtggtggatgacctcagccatgccggacagattcatttcacctccacccgcacagggaagttcgtaccggcaaccctgaaagtgaaaaacctgaacggacagaatggcaccatcagcctgcgtgtacgcccggatatggcacagaacaatgctgacagactggtcattgacggtggcagggcaaccggaaaaaccatcctgaacctggtgaacgccggcaacagtgcgtcggggctggcgaccagcggtaagggtattcaggtggtggaagccattaacggtgccaccacggaggaaggggcctttatccaggggaataagctgcaggccggtgcctttaactactccctcaaccgggacagtgatgagagctggtatctgcgcagtgaaaatgcttatcgtgcagaagtccccctgtatgcctccatgctgacacaggcaatggactatgaccggattctggcaggctcccgcagccatcagaccggtgtaagcggtgaaaataacagcgtccgtctcagcattcagggcggtcatctcggtcacgataacaacggcggtattgcccgtggagccacgccggaaagcagcggcagctatggcttcgtccgtctggagggtgacctgctcagaacagaggttgccggtatgtctgtgaccgcgggggtatatggtgctgctggccattcttccgttgatgttaaggatgatgacggctcccgtgccggcacggtccgggatgatgccggcagcctgggcggatacctgaatctgatacacaacgcctccggcctgtgggctgacattgtggcccagggaacccgccacagcatgaaagcctcatcggacaataacgacttccgcgtccggggctggggctggctgggttcgctggaaaccggtctgcccttcagtatcactgacaatctgatgctggagccgcaactgcagtacacctggcagggactctccctggatgacggccaggataacgccagttatgtgaagttcgggcatggcagtgcacaacatgtgcgtgccggcttccgtctgggcagccaccacgatatgaactttggtaaaggcacctcatcccgtgacaccctgcgcggcagtgccaaacacagtgtgcgtgaactgccggtgaactggtgggtacagccttctgttatccgcaccttcagctcccggggggacatgagcatgggtacagccgcagccggcagtaacatgacgttctcaccgtcacagaatggtacgtcactggacctgcaggccggactggaagcccgtgtccgggaaaatatcaccctgggcgttcaggccagttatgcccacagcatcaacggcagcagcgctgaaggttataacagtcaggccacactgaatgtaaccttctga

SEQ ID NO: 476489 - DNA, 267 bp, Shigella flexneri; identical to SEQ ID NO: 462029

SEQ ID NO: 476490 - DNA, 225 bp, Shigella flexneri; identical to SEQ ID NO: 476353

SEQ ID NO: 476491 - DNA, 1209 bp, Shigella flexneri
atggtagtgtccgctattgccagtacacctcaattattccagaatcatggttattacactgcagcagtaggtaaatggcacttgtcaaaaatcagtaatgtgccggtaccggaagataaacaaacgcgtgactatcatgacaacttcaccacattttctgcggaagaatggcaacctcaaaaccgtggctttgattactttatgggattccacgctgcaggaacggcatattacaactccccttcactgttcaaaaatcgtgaacgtgtccccgcaaaaggttatatcagcgatcagttaaccgatgaggcaattggcgttgttgatcgtgccaaaacacttgaccagccttttatgctttacctggcttataatgctccgcacctaccaaatgataatcctgcaccggatcaatatcagaagcaatttaataccggtagtcaaacagcagataactactacgcttccgtttattctgttgatcagggtgtaaaacgcattctcgaacaactgaagaaaaacggacagtatgacaatacaattattctctttacctccgataatggtgcggttatcgatggtcctctgccgctgaacggggcgcaaaaaggctataagagtcagacctatcctggcggtactcacaccccaatgtttatgtggtggaaaggaaaacttcaacccggtaattatgacaagctgatttccgcaatggatttctacccaacagctcttgatgcagccgatatcagcattccaaaagaccttaagctggatggtgttcccttgctgccctggttgcaagataagaaacaaggcgagccacataaaaatctgacctggataacctcttattctcactggtttgatgaggaaaatattccattctgggataattaccacaaatttgttcgccatcagtcagacgattacccgcataaccccaacactgaggacttaagccaattctcttatacggtgagaaataacgattattcgcttgtctatacagtagaaaacaatcagttaggtctctacaaactgacggatctacagcaaaaagataaccttgccgccgccaatccgcaggtcgttaaagagatgcaaggcgtggtaagagagtttatcgacagcagccagccaccgcttagcgaggtaaatcaggagaagtttaacaatatcaagaaagcactaagcgaagcgaaataa

SEQ ID NO: 476492 - DNA, 1158 bp, Shigella flexneri
atgcacgttacagccaagccctccagttttcaatgtaatctcaaatgtgattactgtttttaccttgaaaaagagtcgcagtttactcatgaaaaatggatggatgacagcactctgaaagagttcatcaaacaatatatcgaagcgtctggcaatcaggtctattttacctggcaaggcggtgaacccactctggctggcctggattttttccgtaaagttattcactatcaacaacgctatgcaggccaaaaacgtatttttaatacattacaaacgaatggcattttattgaataatgaatggtgtgcctttctcaaagaacatgaatttctggttggtatctcgatcgatggcccccaggagttacatgaccgttacagacgcagtaattcaggtaacggtacttttgcaaaagtgatagcagccatcgagcgtctgaaatcatatcaagtagagtttaatacgttaaccgtcattaataacgttaatgtccattatcctcttgaggtttatcattttttaaaatctatcggcagtaaacatatgcaatttatcgaattgctagaaaccgggacgccgaatattgatttcagtggtcatagtgagaacacattccgtatcattgatttttctgtgcctcccacggcttatggcaagtttatgtcaaccatttttatgcaatgggttaaaaacgatgtgggtgaaattttcattcgtcagtttgaaagctttgtcagccgttttttggggaatgggcatacaagttgtattttccaggagtcctgcaaggataatctggttgttgaaagtaatggagacatttacgaatgcgaccattttgtctatccacagtacaaaattggaaacattaataaatctgaactcaaaacgatgaacagtgtacaactgacagcgcaaaaaaaacggatttcagcgaaatgtcagcaatgtgcatataaacctatctgcaatggcggttgtcctaagcatcgtattactaaagtaaacaatgagactgtttcttatttttgcgaaggttataaaatacttttttcaaccatggtaccttatatgaacgccatggttgagttagctaagaacagagtaccgctttaccacattatggatgttgcaaaacaaatggagaataattaa

SEQ ID NO: 476493 - DNA, 378 bp, Shigella flexneri
atggacgaacagtggggatacgtcggggctaaatcgcgccagcgctggctgttttacgcgtatgacaggctccggaagacggttgtggcgcacgtcttcggtgaacgcactctggccacactggagcgtcttctgagcctgctgtcggcctttgaggtcgtggtatggatgacggatggctggccgctgtatgaatcccgcctgaagggaaagctgcacgtaatcagcaagcgttacactcagcgaattgagcggcataacctgaatctgagacaacatctggcaaggctgggacggaagtcactgtcgttctcaaaatcggtggagctgcatgacaaggtcatcgggcattatctgaacataaaacactatcagtaa

SEQ ID NO: 476494 - DNA, 303 bp, Shigella flexneri
atgaaaaaaattatatacatcctgccgggagcatttttgctgcgattcaaaaaaaatgagagtctcctaaagtttccttcgataatatcaatgcttaatatcaatcttctttttaatccactaaatcttccgggaatgggaagtggtgtgcttgaagatattatgagtattccagatagttcacttagaaaacgtctcgggtatgaggttttaagcttctcactacaggcacattcattgagccaggaatgtattgataagttggacatttttttcgctgacgatctgtttaaatatgggtaa

SEQ ID NO: 476495 - DNA, 672 bp, Shigella flexneri
gtgctgtttggtgaaacaggcgttgcacaacatctgaaacccggtacggcagtaatggtttcttccactatcgctagtgctgatgcgcaagaaattgctaccgctctggctggattcgatctggaaatgctggatgcgccagtttctggtggtgcagtaaaagccgctaacggtgaaatgactgtcatggcctccggtagcgatattgcctttgaacgactggtacccgtgctggaagccgttgccggaaaagtttatcgcataggtgcagaaccgggactaggttcgaccgtaaaaattattcaccagttgttagcgggcgtacatattgctgccggagccgaagcgatggcacttgcagcccgtgcggggatcccgctggatgtgatgtatgacgtcgtgaccaatgccgccggaaattcctggatgttcgaaaaccggatgcgtcatgtggtggatggcgattacaccccgcattcagccgtcgatatttttgttaaggatcttggtctggttgccgatacagccaaagccctgcacttcccgctgccattggcctcaacagcattgaatatgttcaccagcgccagtaacgcgggttacgggaaagaagacgatagcgcagttatcaagattttctctggcatcactctaccgggagcgaaatcatga

SEQ ID NO: 476496 - DNA, 138 bp, Shigella flexneri
atgaggaaaagattttttgtgggaatattcgcgataaacctccttgttggatgtcaggctaactatatacgtgatgttcagggagggaccatcgcaccatcctcctcttctaaactgacggggatcgcggttcagtag

SEQ ID NO: 476497 - DNA, 342 bp, Shigella flexneri
atgagcttaagatactacataaaaaatattttatttggcctgtactgcacacttatatatatataccttataacaaaaaacagcgaagggtattatttccttgtgtcagataagatgctatatgcaatagtgataagcactattctatgtccatattcaaaatatgctattgaatacatagcttttaacttcataaagaaagattttttcgaaagaagaaaaaacctaaataacgcccccgtagcaaaattaaacctatttatgctatataatctactttgtttggtcctagcaatcccatttggattgctaggactttttatatcaataaagaataattaa

SEQ ID NO: 476498 - DNA, 1569 bp, Shigella flexneri; identical to SEQ ID NO: 265571

SEQ ID NO: 476499 - DNA, 438 bp, Shigella flexneri
atgggacactgtcactttatggcatggcacacactccgggacgcactaaaaatgacaggcagatcgcgttcacagttttaccgtgatatgcgcgcaggccttgtcagttaccgtaccggcagggacggacgacgggagtttgaaaccagtgaactgatccgggcatacggcgaattaaagcagaatgagacaccagaaaggcacagtaagggacatgcagaaaatccacatgatcagcagacagaacgcattctccgggagctgaatgagctgaaacaatgcctgacgctgatgcttgaggataaacaggcacaggatatggatcgcagacgccaggaagcagaacgggaacagctacaaaatgagatagcccagctcaggcaggcactggaactggaaaagaaacggggattctggtccaggttgttcggtcgctga

SEQ ID NO: 476500 - DNA, 420 bp, Shigella flexneri
atgagacgtaccggaaacaaactttgtcttatcgccatgataacagcaacagtagctctcacagcctgtaccccaaagggcagcgtggaacaacatacccggcattacgtatatgcttctgatgacggttttgatcccaacttttccacccaaaaagccgacacaacacgaatgatggtgcctttttttcggcagttctgggatatgggagctaaagataaagcgacaggaaaatcacggagtgatgtgcaacaacgcattcagcagtttcacagccaggaatttttaaactcactccggggcacaactcaatttgcgggtactgattaccgcagcaaagaccttaccccgaaaaaatccaggctgctggctgacacgatttctgcggtttatctcgatggctacgagggcagacagtaa

SEQ ID NO: 476501 - DNA, 1554 bp, Shigella flexneri; identical to SEQ ID NO: 20196

SEQ ID NO: 476502 - DNA, 339 bp, Shigella flexneri
atgaaacgcgagaggatgctcacaatacgggttactgatgatgaacatgcccggttacttgaacgctgtgagggtaaacaactggcggtatggatgcggcgggtctgcctgggggagccggttgcccgttccggaaaactgccgacactggcaccgccgttactgcgtcagctggccgccatcggaaataacctgaatcagacagcccgtaaggtgaacagcgggcagtggtcttccggtgaccgggttcaggtggtggccgcactgatggccatcggggatgagctgcgccggctgcgtctggctgtcagggaacagggggcgcgggatgatagttaa

SEQ ID NO: 476503 - DNA, 357 bp, Shigella flexneri; identical to SEQ ID NO: 474506

SEQ ID NO: 476504 - DNA, 294 bp, Shigella flexneri
atggtggctgaccgtttcagaaatacgtttaacgccattaacaacggagaacagtatcctgtggatgagctgatcagcatagattctcgttgtccgttgcttgaaaagctgaaactggaactgacaacacctcatcgtgatttcgaccgtaacggacgtgtgatggtcgaaagtaaaaaagacctcgcaaaacgcgagataccgtcaccaaacgttgctgatgcattcattatggccttcgcgccaatcgatacatcgctggatatctgggaacagctggggagacaggcctga

SEQ ID NO: 476505 - DNA, 285 bp, Shigella flexneri; identical to SEQ ID NO: 27657

SEQ ID NO: 476506 - DNA, 372 bp, Shigella flexneri; identical to SEQ ID NO: 468280

SEQ ID NO: 476507 - DNA, 354 bp, Shigella flexneri; identical to SEQ ID NO: 474642

SEQ ID NO: 476508 - DNA, 375 bp, Shigella flexneri; identical to SEQ ID NO: 13405

SEQ ID NO: 476509 - DNA, 1617 bp, Shigella flexneri
atgtttagacaaaatcttattacctctgccatcttattaatggcaccgttagccttttctgcacaatcattggctgaatcattaacggtggaacaacgccttgagttattagaaaaagcgttaagagaaacgcaaagcgaactcaaaaagtataaagatgaagagaagaaaaaatatacgccagcgacggtgaatcgtagcgtaagtacgaatgatcaagggtatgccgccaatccgttcccgaccagtagtgccgcaaaacctgatgctgtactggtcaaaaatgaagagaaaaatgccagtgagacaggctcgatttattcttccatgactctgaaagatttcagtaagtttgtgaaagatgaaattggctttagttacaacggctattaccgttctggttgggggaccgcctctcatggttcacctaaatcatgggcgattggttctctgggccgctttggtaacgaatactccggctggtttgatttgcagttaaaacaacgtgtctacaacgaaaacggcaaacgggttgatgccgttgtgatgatagatggtaacgttggtcagcagtactctaccggctggtttggcgataatgccggtggcgagaactttatgcagttctccgatatgtacgttaccaccaaaggtttcctgccctttgcgccagaggctgatttctgggtgggtaaacacggtgcgccgaaaattgaaatccagatgctggactggaaaacgcagcgtactgatgctgcagcgggtgtaggtctggaaaactggaaagtcggtccgggtaaaattgatatcgcgctggttcgcgaagatgtcgatgattacgatcgcagcctgcaaaacaaacagcagattaatacccatactattgatttacgctataaagatatcccgttatgggataaagcgaccttaatggtgagtggtcgttatgtcacggcaaacgaaagcgcatcggaaaaagataatcaggataataacgggtattatgactggaaagatacctggatgttcggcacatctttaacgcagaaatttgataaaggtggcttcaacgaattctccttcctggttgcgaataactctatcgccaggaactttggccgttatgctggcgcaagtccatttaccacctttaatggtcgttattatggtgatcacaccggcggaacagcagttcgtctgacctcgcagggcgaagcctatatcggcgatcattttattgtggctaacgcgattgtttactccttcggtaacaatatttatagctacgaaacaggcgcacactctgatttcgaatctattcgtgcggttgttcgcccggcctatatttgggaccaatataaccagacaggtgttgaactgggctatttcacccagcaaaacaaagatgcgaatagtaataaatttaatgagtctggttataaaaccacgctcttccatacctttaaagtcaataccagtatgttgacctcgcgtctggaaattcgtttctacgccacgtatatcaaagccctggaaaacgaactggatggcttcaccttcgaagacaataaagacgcccagtttgctgtcggtgcccaggctgaaatctggtggtaa

SEQ ID NO: 476510 - DNA, 141 bp, Shigella flexneri; identical to SEQ ID NO: 476371

SEQ ID NO: 476511 - DNA, 189 bp, Shigella flexneri; identical to SEQ ID NO: 470416

SEQ ID NO: 476512 - DNA, 474 bp, Shigella flexneri
atgaaaacattgtctcagaacaccacctcttcggcctgtgcaccggagactgacctgcaacaactggttgccaccctcgtccctgatgaacagcgcatcagcttctggccgcagcactttggcctcattccacagtgggtgaccctggagccccgtgtcttcggctggatggaccgtctgtgcgaagactactgcggtggtatctggaatctgtacaccctgaacaacggcggggcatttatggcacccgaaccggatgacgatgatgacgaaacatgggtactgttcaatgccatgaacggtaaccgcgctgaaatgagtccggaagctgccggcattgctgcctgtctgatgacgtacagtcatcatgcctgtcgtacggagtgttatgccatgacggtccattattaccggctgcgggattacgccctgcagcatccggaatgcagcgccattatgcgcatcatcgactga

SEQ ID NO: 476513 - DNA, 477 bp, Shigella flexneri
atgcagcagctttcctttctgcccggagaaatgacaaccagagagcgcagcctcattctgcgggccctgaaaaccctggaccgccatcttcatgaacccggcgtggccttcacctccacgcatgcggcacgggaatggctgattctgaacatggcgggactggagcgtgaagagttccgggtgctgtatctgaacaaccagaatcagctgattgccggtgaaaccctcttcaccggcaccatcaaccgtacggaagtccatccccgggaagtgattaaacgcgccctgtaccacaatgccgctgccgtggtgctggcgcacaatcacccgtccggtgaagtcccccccagcaaggcagaccgccttatcactgagcgtctggtacaggcactggccctggttgatatccgggtaccggaccatctgatagtcggtggcagccaggttttctcctttgcggaacacggtctgctttaa

SEQ ID NO: 476514 - DNA, 222 bp, Shigella flexneri; identical to SEQ ID NO: 13320

SEQ ID NO: 476515 - DNA, 489 bp, Shigella flexneri
atgaaactggccctgacgctggaagccgacagcgttaacgtgcaggcactgaacatggggcgcattgtcgttgacgtcgatggtgttaatctcagtgaactgattaacaaggtctctgaaaacggttattcactccgcgtggtcgataaatccgaccaacacgcaaccagtacaccaccaccgttaacaacccttacctgcatacgttgcagcaccgcacatatcacggaaacggacaacgcctggctgtactcgctgtcacaccagactaatgacgacggcgaaacagaatggattcattttacaggcagcggctatctgttacgtaccgatgcatggtcgtacccggttctgcggcttaaacgcctgggcctgtccagaacgttccgtcgtctggtcgtcactctcacccggcgttatggcgtcagtctcattcatctggacgccggcgcagaatgtctgccggggttccccactttcgactggtaa

SEQ ID NO: 476516 - DNA, 189 bp, Shigella flexneri; identical to SEQ ID NO: 471691

SEQ ID NO: 476517 - DNA, 708 bp, Shigella flexneri; identical to SEQ ID NO: 474065

SEQ ID NO: 476518 - DNA, 303 bp, Shigella flexneri; identical to SEQ ID NO: 473532

SEQ ID NO: 476519 - DNA, 225 bp, Shigella flexneri; identical to SEQ ID NO: 476353

SEQ ID NO: 476520 - DNA, 312 bp, Shigella flexneri
atgagagttgagcagaataatttcagggacatgttctccgtttatctctccggcccgccgcagacgcagcatgtgttttgtgtatccccggcggcccgggtcgcgcacgcgggtctggcaggcgaagaatggctgaaaaccttcctgctgcaggctttccagtacggtgatggtgggaatgtacgcatatcgtttactgcgggaagtatgccggtcttcaccgaaaatactgggaacatagtgcatcagttcttcgtgtgtcagcggacggtcacggcgtatctggttcgcataaccaaaacgactggctag

SEQ ID NO: 476521 - DNA, 159 bp, Shigella flexneri; identical to SEQ ID NO: 6188

SEQ ID NO: 476522 - DNA, 2847 bp, Shigella flexneri; identical to SEQ ID NO: 463437

SEQ ID NO: 476523 - DNA, 198 bp, Shigella flexneri
atgacccgcctgcaggacgagctgcgcacggaatctgtccggggtcaggcccgtgaacagtttaccggtgcggtggaccggatatttgacacggcggagagcgtctgtgttgcctctgttgcccgtacggttctgcgtgccgtccgtgacacggtggtctctgttgcccgcgctgtatggaactggattttcttctga

SEQ ID NO: 476524 - DNA, 198 bp, Shigella flexneri
atgcgttattcctggaacgggaacgccagccggaaatacaggaacggacactggatggcccttcgctgggatggtaatcagagacaggctaaaatgttgtcagcgcgtttccggtgcattttttgggataatggttggctcgggggcaccgggaacgcgcttcagtcagaccttgctgaaaacacaggaacgagttaa

SEQ ID NO: 476525 - DNA, 234 bp, Shigella flexneri
atgacggagctggaaagccatttgctgaacgcattagagcagctgcaacaggactatatgcagcggctgaacgaatgggagagcgccttcgtggaattgcagaaaatgttttcgcttacgcaacgggacaacgcgatgctgaacgagcgggtcatgcagttgagtcagcaggtgctgcacttgagcgagcagacagaacgcttgagccagttatacagcgagaactggagataa

SEQ ID NO: 476526 - DNA, 357 bp, Shigella flexneri
atgggggtaatgataccgatgaaacgcgagaggatgctcacgatacgggttactgatgatgaacatgcccggttactggaacgctgtgagggtaaacagctggcggtatggatgcggcgggtctgcctgggtgagccggttgcccgttccgggaggctgccgacactggcaccgccgttactgcgtcagctggccgccatcgggaataacctgaatcaggcagcgaggaaggtgaacagcgggcagtggtcttccggtgaccgggttcaggtggtggccgcactgatggccatcggggatgagctgcgccggctgcgtctggccgtcagggaacaggggacgcgggatgatagttaa

SEQ ID NO: 476527 - DNA, 474 bp, Shigella flexneri
atgaaaacattgtctcagaacaccaccgcttcggcctgtgcaccggagactggcctgcaacaactggttgccactcccgtccctgatgaacagcgcatcagcttctggccgcagcattttggcctcattccacagtgggtcaccctggaaccccgtgtcttcggctggatggaccgtctgtgtgaagactactgcggtggtatctggaatctgtacaccctgaacaacggcggggcatttatggcacccgaaccggatgacgatgatgacgaaacatgggtactgttcaatgccatgaacggtaaccgcgctgaaatgagcccggaagccgccggcattgctgcctgtctgatgacgtacagtcatcatgcctgtcgtacggagtgttatgccatgacggtccattattaccggctgcgggattacgccctgcagcatccggaatgcagcgccattatgcgcatcatcgactga

SEQ ID NO: 476528 - DNA, 675 bp, Shigella flexneri; identical to SEQ ID NO: 475417

SEQ ID NO: 476529 - DNA, 1050 bp, Shigella flexneri
atgtataataacaaaatcgacagcaacagaaaaataagacatgattgggttgatgctttaaaatttctcggtatttttgctatatatttaggtcaccttgggttgggggctggcaaattgtatccttttgtttttagttatcacgtcccactattctttttcgctgctggtttttttactatcaaaaaaaatgacttatctgttttcgattatatcaagtcaaagttttacagattaatgattccatatttcacttttgcattttctatattaataataaacacaattaactcaggtgagacgattgattatatatacaaccacatttatgatataatatatggtgttagaaataaccaattcgtaggaacaatatggtttataaactgcctttttgttataatagcaattgatgcaatctttagagaaatagtcaagaacaatatagtgattttaatcatatcactgttatcgttcatgttgtcacaaacagtgctcaatcataacccattactagatcctcaatggttttggaacatagactccgctatggcatactggtggttattgcctctcggtagatgtatgtttttagaattaacacgtgacaggttttttggaaaatctaaaattggtttcattgtcttctcaattaccgctataatgagtgcgtatcaactacttaaccagaaacctttactttttaagattatctcaatattcaatgcagacataatatcaagtagttatattcaagctattaatactattatcaccacggtaggcttgataatctttaatattttcatagcaaaaataatttgtggaaatgactttattgtaagagctggaagaaatactcttaacatatgtggaatggagtatatcaccaaattatttatccctatggctttagcaattataggcttcagcgtgactattccaaatcctatctgcgcaatcatatatacctgtatttgtgtatatgtatcagataaaattggccattggctatcgaggacagtcggtgggccatttttgataaaatga

SEQ ID NO: 476530 - DNA, 930 bp, Shigella flexneri
atgaaaatatctcttgtcgttcctgtcttcaatgaagaagaagcgatacctgttttctataaaacggtacgtgaattccaagagttgaagccatatgaagtagaaattgtattcataaatgacggaagtaaagatgccacagagtcaattattaacgcgctggctgtttcagacccgctagttgttccgctgtcatttacacgcaactttggtaaagaaccagccttatttgcagggttagaccatgcaagcggcgatgctgtaattcctattgatgtcgacctgcaagacccaattgaggttatccctcatcttattgaaaagtggcaggcaggtgctgacatggtgcttgctaaacgttcagaccgctcaactgatggacgactgaaacgtaagacagctgagtggttctataaattacacaacaaaataagcaccccaaagatcgaggaaaatgtcggagattttcgactcatgtctcgtgaggttgtggagaacattaaactgttgcctgagcgcaatcttttcatgaaaggcatactgagctgggtgggtggtccgacggatgtcgttgaatatgtacgcgcagagcgtgttgctggcatctcaaaatttaatggctggaaattatggaatctggcactggaaggtatcacaagtttttcaacctttcctcttcgcgtatggacttatataggcttgtttgttgcaagcatttcatttttatatggtgcatggatgattatagacacccttgtctttggtaacccagtacgcgggtatccctccctgcttgtatcaatacttttcttgggtggagtgcaactgatcgggattggtgttctcggagaatatataggtagaatctatattgaagtaaaaaatagacccaaatacatcataaaaaaatctcatcgaggtaacccatga

SEQ ID NO: 476531 - DNA, 363 bp, Shigella flexneri
atgttaaagttatttgtaaagtacacatctataggtgtgctgaacacacttatacactgggtggtttttggtgtatgtatctatgccgcacataccagtcaggctctggcaaacttcacaggtttcgtagtggctgtgagctttagcttcttcgcgaatgcaagattcacattcaaagcattgactacagcgatgcgctacatgttatacgtgggatttatgggaatattgagtgtgattgttggttgggcagctgataaatgctcacttcctccaatagtcactcttatcaccttctccgccatcagtctggtgtgcggtttcgtctattcaaagttcattgtctttagggatgcgaaatga

SEQ ID NO: 476532 - DNA, 189 bp, Shigella flexneri; identical to SEQ ID NO: 463227

SEQ ID NO: 476533 - DNA, 642 bp, Shigella flexneri
atgaaagcgaaatccactttgttattaatgattttatctgttttttattctcatcaggttttatccagcgaacccactcagccggatgtttattctgtcgtcgagaaaaaactaaactctgctttacctctggaagaaaataccaccttcagatcgcaggctgaatggtttaatttgcaatatgaattattagtatctggctaccctgaacgtgcttacaatttactgagcaaacttgagacagaatcgaaaaacgctaaatattatctggatttaactgcctccagagtcgctgaagaagaagcaccagagacagccttaacttttttatcaaaaattgggttaaataaaccggctactcttacatcctttgagagctatatcaatagctggataaaaagcaaacaacccgaaaaggctatgcagcttctcagcctcgatgagaatgccctgaattattatttaccgactgtgttagtcgcatatcagatcgttcctgataaggcaataagtatttataattctgtatatggagataatgttgttataccctatcagcaagtcaccatgttacttacagttgcggagggttatcaaacaaaaggcgatataaaaaacgccattcattatgccgataggtaa

SEQ ID NO: 476534 - DNA, 678 bp, Shigella flexneri; identical to SEQ ID NO: 475421

SEQ ID NO: 476535 - DNA, 519 bp, Shigella flexneri
atgttgtcattgtttttcaataaaatagtgattgcccggttaacattttcagtcattctgactcaaaatggacacaccgcttttattggcggattacagggagcccccaaaaataccggacctgatattattcggtgcgcaacccgggcctgttatgggcttttcccaaaacggattatttttgaagcattttgtgcgttgatgaaagcttgtaatgtctctgagtgtctggcagtcagtgagcacagtcatgttttccggcaattgagatactggtatcagaaacgcaaaacctttgttgctgtctacagtgatttctgggagtctgtagcagggaaaacctgtggtgactggtacaaattaccaacacaggtggttcgaaagccgctaagcaatatagctagtaaaaaacgctctgagtatcgaaaacgatacgctttgctggattatatccatgaaactgctatccgctctttggatgcatatcctgtaaactcagaacatcaggacttaaattaa

SEQ ID NO: 476536 - DNA, 945 bp, Shigella flexneri
atgaaaaaatacaaatccgagtttattcctgaatttaagaaaaattatctttcccctgtttactggtttacatggttcgttttgggaatgattgcaggtatttcaatgtttcccccttcattcagagatcctgtcttggccaaaatagggcgttgggtgggcagattgagcagaaaagctcgtcgcagggcgacgattaatttatcgctttgtttcccggaaaagagtgatacagaacgggaaataattgtcgacaatatgtttgccacagcattgcaatccatagtgatgatggcagaactggcaattcgtggtccggaaaagttccagaaacgagtgttctggaaaggcctcgaaattcttgaggaaattcggcacaataacagaaatgtgatttttctggttccccatggctggagcgtggatattcctgcaatgttgctggcagctcagggggaaaaaatggccgccatgtttcatcagcaacgaaatccagtgattgattatgtctggaattctgtacggcgtaaattcggggggcgcttacattcccgggaggatgggataaaaccatttattcagtcagtacgccagggatactgggggtattaccttccagatcaggatcatggtcctgaatacagtgaatttgctgatttttttgcgacctataaagcgacattaccaattattggacgtctgatgaacatcagtcaggctatgattataccgcttttcccggtttatgatgaaaaaaaacatttcctgactattgaagttcggccaccaatggatgcatgcattgccagcgcggacaataaaatgattgcccgacaaatgaacaaaacagtggaaattttggtggggtcacatccggaacagtatatctgggttttaaaattgttaaaaacgcgcaaatcaaacgaagcggacccgtacccttga

SEQ ID NO: 476537 - DNA, 417 bp, Shigella flexneri
gtgctggatgcactggagcaggcgttatgggcccgtcgaccgtccggcacggtccatcacagtgataaaggttctcagtatgtatcgctggcctacacacagcggcttaaggaagccggattactggcatcaacaggaagtacaggcgactcgtatgacaacgcgatggcggagagcatcaatggtctttacaaagcggaggtaatacaccgtaagagctggaaaaaccgtgcagaagtggaactggccacactcacgtgggtggactggtataacaatcgacgattgctggaaaggctgggccatactcctccggcagaagcagaaaagcttattatgcttccatcggaaacgatgatctggcagcctgagttcacagataaaacactctccaggaaacccggggcggttcagtga

SEQ ID NO: 476538 - DNA, 957 bp, Shigella flexneri
ttgaaagaaacagagagttcatataataaaaagttcaattctgattacaaaagtaataatcagcagacctcatttgatcagcctgactggaaaaccggggtgtttaaatttgatacattacacctgaacaatgctgacttttcaatatcacgcaatgccaatgttgaaggaaatatatcagcaaataaatcagctatcacaatcggcgataaaaatgcttacattgataatcttgcagggaaaaatattactaataatggttttgacttcaaacaaactatcagtactaatctatccataggagaaactaaatttacaggtggcatcactgcacataacagccaaatagccataggtgatcaagctgtagttacacttaatggtgcaacctttctgaataatactcctataagtatagataaaggagcaaaagttatagcacaaaattccatgttcacaacaaaaggtattgatatctccggtgaactgactatgatgggaatccctgaacagaatagtaaaactgtaacgccgggtctccactacgctgctgatggattcaggctgagtggtggaaatgcaaatttcattgccagaaatatggcatctgtcaccggaaatatttatgctgatgatgcagcaaccattactctgggacagcctgaaactgaaacaccgactatatcgtctgcttatcaggcatgggcagagactcttttgtatggctttgataccgcctatcgaggcgcaataacagcccccaaagctacagttagcatgaataatgcgatctggcatctaaatagccagtcatcaattaatcgtctagaaacaaaagacagtatggtgcgttttactggtgacaatgggaagtttacaacccttacagtggacaaccttactatagatgacagtgcatttgtgctgcgtgcaaatctggcccaagcagatcagtga

SEQ ID NO: 476539 - DNA, 1215 bp, Shigella flexneri
atgaaaattattgctgcagatgtttttgttacttgcccagggcgtaatttcgttacgcttaaaataaccactgaaagcggactttgtggattaggagatgccacgttaaatggtcgcgaattgtcggtcgcttcttatctgaaagatcatctttgtccacaactaattggccgcgatgccagccgtatcgaagatatctggcaattcttttataaaggtgcttactggcgacgtggccccgtcacgatgtcagccatttctgccattgatatggcgttgtgggatatcaaagctaaagcggcaaatatgccattgtatcaactgcttggtggtgcttctcgtgaaggcgtgatggtttattgccacaccaccgggcgtacgattgatgaagtccttgaagactatgcaaagcaccagcagatgggctttaaggcgattcgtgtgcagtgcggtgtaccgggtatgcaaaccacttatggcctggcgaagggcaaaggactggcgtatgaaccggcaaccaaaggcctgtggccagaagagcagttgtggtcttcagaaaagtatctcgattttacgccgaagttattcgaagcggtgcgtaataagttcggttttaacgaacatctgttgcatgacatgcaccatcgcctgacccccatcgaagcggcgcgctttgggaagagcattgaggattaccgcctgttctggatggaagatccgacgcctgccgagaaccaggaatgttttcgtctgattcgccagcataccgtgacgccgattgcggtcggtgaagtgtttaacagtatctgggactgcaagcagttaatcgaagagcagctgattggctatattcgcacgacgatcacccatgcaggcggcattaccgggatgcggcggattgccgattttgcatcgctttatcaggtacgtaccggttcgcatggcccttcagatttatcgcctgtttgtcatgcggcggcgctgcattttgacctatgggtaccaaattttggcgttcaggagtacatgggctattccgaacaaatgcttgaagttttcccgtacagctggcgcttcgaggaaggttatatgcacccaggcgatgaaccggggctgggtatttctttcgatgagaaactggcggcgaaatatccgtatgacccggagtatctccccgtcgcacgactggaagatggcacattgttgaactggtaa

SEQ ID NO: 476540 - DNA, 1002 bp, Shigella flexneri
atgattcagctatccagtagtcacaaacttccagcagtctactatctctaccagcgtaacggcgtctactacttccgtcttagggtcagacaatcaaacaatgatagaatgacctcaatatcattacggaccaaggatagacgcaccgctatggcttactcaaggcacataaaggcagcactcaaggcaatacacgcagacagacccaacgctacctatgaggaaatgagggaacaccttaaggacatcgctgagtgtgaactgtctatgggccgttcagatctctttgagcctgacatgagggatatctaccgggaccaatacggagaacttggtgagagccttaccgatgctctggctagtgagccgctaagcattgaccagcatcgttacatcaatgaggccctgaaggtgctaaaagcctgtatgaggcgtatcgaagcgggagacagtcagcctctgatagattacgtcgatctttttaatgatattgataggcaagataaccaagcagactctgtgtccctatctgttaatgctccagaagtaaaaccagaagttacgcctagcattaccatagcgagcctctttgaacaatacgaagcggagaactatcagaactggaagcctgcaaccttaagggaaaacaaggcgtcacacgctgcgttaatcgaaatattcgaccatctgggtctcaatgcagacgctaacagggctgacatgcttagggtccgtgatgtgctccagcagttacctaggaaccgtaagcagcgcttcaaggatgtcccacttgctgacctgttgagccgtgaagataagacagattgtctggatgtcgttaccatcaacaacaagtatcttattaagatggctgctgtctttaggtgggctgtgcgcaatgacttgattaaaaagaacatgactgagggtctggagcttaaagtccctcagcgtaaagcctcaggggcccgtaacgccttctctacggagcaggtggggtaa

SEQ ID NO: 476541 - DNA, 534 bp, Shigella flexneri
ttggctgctatcactggggcgagactcaatgaaatagcccaactacaggtcaaagacgtcaggaccactgaggcgggaaccgtttatattcatatcaatgaagacgatagtagtctacccggtaagagcatcaagaacgctcatagtgaccgctgtgtgcctctggtcgatggggcctatggttttatattggctgactttatggcgcttgtagagacccgtagaggcgctgacggtgatgacgctatggtgttcgatggtctgcgtctcatgaagaacggttacggtgagcaggtgagtaaatggtttaatcggacgttgttgcctaaagtcctcgtagaccgtagcggcttagcgtttcactcgtttagacatacagttgcggcccagttaaaacaacatggggtcgagttggcgtatgcacaggcgatcatggggcatagttcagggtctattacgtacgaccgttatgctaaagaggtcgaggttgataggctggtcaatgtgatggctgatgtttataaggagacctag

SEQ ID NO: 476542 - DNA, 291 bp, Shigella flexneri; identical to SEQ ID NO: 474546

SEQ ID NO: 476543 - DNA, 273 bp, Shigella flexneri
atgactaccgttactgttcattgtccgcgctgtaattccgatgaagtttatcgacatggccgtagttgttcccggcatgagcgtttccgttgtcgctcatgtaaacgtgttttccagctcacttactcttatgaagccagaaaactcggcgttaaggagcagatcgttgaaatggcacataacggcgcagggggccgtgataccgccaggacactgaaaatcggcatcaataccgtcatacggacattaaaaagctctcgccccggcggataa

SEQ ID NO: 476544 - DNA, 201 bp, Shigella flexneri
atgttgaatgtagctattgaaaaccagaacgggtggaattatagtgcacctgcacctcataaaacgggtgccgggattgctaccccgacgatgactactgcgcataaccgcgctcaggcggttttttatgcgtcaagcacagccacattcagattatggtggggcgtgcagggcagccgcaaggctggccggtttcggtag

SEQ ID NO: 476545 - DNA, 354 bp, Shigella flexneri
atgccactgctggataagctgcgtgagcagtacagggtcggaccgctatgcagcgaactgcatattgccccgtcaacgtattaccactgtcagcaacagcgacatcatccggataaacgcagtgcccgtgcgcagcgcgatgactggctgaagaaagagatacagcgcgtatacgatgaaaatcacaaggtatacggtgtaaagtctggcgtcagttgttacgggaaggtatcagagtggccagatgcactgtggcacgtctcatggcggttatgggacttgccggtgttctccggggtaaaaaggtccgtacgaccatcagccggaaagccgttgccgcaggcgaccgcgtaa

SEQ ID NO: 476546 - DNA, 1116 bp, Shigella flexneri
atggctgacgttgccgacaggcgggaacttcgccagttcaggcagacaccggaacagcgcttcacgcaggaacaggagcatctgcagccgctgctgggtacggacttcgatatccgtcatgtctcctgggatggctatatcgaggttggcgggaaccgttacagtgtgccggaaagcctgtgtggtcagctggtatcaatacggatctcgctggatgatgaactgcggatctacagtaatgagcaacaggtagcatcgcaccgtctctgttcggctgcatacggctggcagaccgtgccggagcatcacgctccactctggcagcaggcttcggagcgcatggccgaatggctgggggagatacagaaacgggtaatcactgtctgtgaccgggaagcggatatctggcattacctgtattataaagtcagccacggacagcgtggtgcgtgctgcacagaatcgccggctggaagaggcacccggcaagctcttcgaactgccggaagtcctggcaaccgcaggaagccacacgctgaatgtgatgcaaaaaggcgggcgggcagcccgtcaggcccggatgttcatcagttacagcgaagtcagcataaaaaatcccgacaacagcggccaggcgctcccgctcacgtatgtctgttgccgggagcaggcagaggacggtgcctgctggcatctgctgacgtcaggaaaagcggcgagtgccgccgatgcacgacgtattgtcagccattacgagcgacgctggctgacagaggaataccacaaggcgtggaaaagtggtggtacatggaatcgctgcgaatgcagacccgggataaccttgagcgcatggtggttatcctggcgtttatagcggtacgggtgctgggcctgcggcagggaggtgtcagtgaagaaacacaaaatgacagctgtgagaaaatactgacgccgacagagtggaaactactgtgggttaagctggaaggaaagccgcttccggtgcaggcaccgaccctgaaatgggcctggggcgatggcatgacagcaaacgcacaggtcgtcccggttggggcgtcatgtgggatggctggtcagacttcaggatatggttga

SEQ ID NO: 476547 - DNA, 1455 bp, Shigella flexneri
atgaaaatacctgaagcagtaaatcatattaatgttcagaacaatattgatcttgttgatggaaaaataaatccgaacaaagatacaaaagcattacaaaaaaacatatcatgcgtaacaaactcatcctcttctggcataagtgaaaaacatttagatcactgtgctgatactgtgaaaagctttttaaggaagtctatagcagcgcaaagttatagtaaaatgttctctcaagggaccagtttcaaatcattaaatctttctattgaagcgccatctggagcacggtcatcatttcggtcacttgagcacctcgataaggtgtccagacactatctttctgaaataatacaaaaaactcatcctctttcttcggatgaacgtcacttgctctctattattattaattctgattttaacttcagacatcaaagtaacgctaacctgtcaaataatactcttaatattaagtcctttgataaaattaagtctgagaatatacaaacatataaaaacacattctctgaggatattgaagaaatagctaaccacgattttgttttttttggggttgaaatttccaatcatcaagaaacactcccactaaataaaacacatcatactgtggattttggtgctaatgcgtatatcattgatcatgactctccatatggatatatgacattaaccgaccactttgataatgctattccacctgttttttaccatgagcaccaatcatttttcttagataactttaaagaggttgtggatgaagttagcaggtatgtgcatggtaatcagggaaaaactgatgtgccaatatttaatactaaagatatgaggcttggaattgggttgcatcttattgattttataagaaagagtaaagatcaaagattccgagagttttgttataataaaaacattgatcctgttagtctggatagaattataaactttgtgtttcagcttgagtatcatataccaagaatgctaagcacagataacttcaaaaagataagactcagagatatatctttggaggatgccattaaagcatccaattatgaagaaattaacaataaggtgactgataaaaaaatggctcatcaagctcttgcttattctctaggcaatgcaaaatctgatatggcactttatttactatctaaatttaattttacaaaacaagatatcgcagagatggagaaaatgaacaacaatatgtattgtgagctgtatgatgttgagtatttacttagtgaagatagtgccaactataaagtgctagaatattttattagtaatggattggttgatgtaaacaaaagatttcaaaaagcaaatagtggggacactatgcttgacaatgcaatgaaaagcaaagattcaaaaacaattgattttttattaaaaaatggagcggtatcaggcaaacgatttgggaggtga

SEQ ID NO: 476548 - DNA, 357 bp, Shigella flexneri; identical to SEQ ID NO: 476526

SEQ ID NO: 476549 - DNA, 531 bp, Shigella flexneri
atgagcaatcttttacagacgggcgcggagttcgagaaaaagctgaaagagagagccgaatctacagagaaaatgctgagcgacgagttcaggaagctcgaagaatctgtaagcaaggctgtgacatcaaacgagacgaaaatcaaagacgctatagccctgttcacagcttcgacagaggaatcactgaaaaaacatcgggaaggggtgaaagaggcgatgatgcagcacaggaaggacgtgttaaagctggcagggaatacgggcatgatgttactggggatggtcattttcctgtttaccgtgagtggcgggacgctctggtatcttggcgggatgatacaggcgaacctggaagaaatcaggaagcagaacgagagtctggagaagctgaacgcgaagacatggggcgtgcgttatcacgaggggagcaacggacgttttctggtgttgcccgaggggatgaaagccgaaacgaactggacgatggaaaacgggaaacagaatgccgtaaggctggtacaggagtga

SEQ ID NO: 476550 - DNA, 234 bp, Shigella flexneri; identical to SEQ ID NO: 476525

SEQ ID NO: 476551 - DNA, 1062 bp, Shigella flexneri
atgtctgtagtgatatcaggtgcgctgactgatggcgcaggtatccccatgtccggataccatattattctgaaatcccgggtaaacaccccggaagtggtgatgaacactgttgctgatgtgatggcaggaaacgatggtgaatactgtttccatgcgcggactggaaaatatggtgtgtatctgaaacaggactggcgcaacgagtacaacgttggcgacattgctgtatatgaggactcaaagcccggcacgctgaatgactttctgattgctcctgatgagggcgacctgaaaccggatgtcgtcaaacgctttgaggaaatggtggcgcaggcgcagcagagcgccggggccgcagccggaaacgcacagcagacggcgcaggatgtggcggcagccgcaacggcccgtgatgatgcacaacgttttgcggagaaagcccgacaggatgcaaccgtcacagctgaggacagaaaggccactgcggaagatgtgacaagcacaggagcaaatgcagccgcagccggacagagcgcacaggatgccgcaggttatgcccgcgcagcagaacaggccaaaaatgacattgatgctgcgctgaccggcactctgaaaatggctaaccatctgtcagaaatcgcagcagcaggcgaaaaggcacaacagaagtcccgggataatctggggctgaaaagtgcggccacgatggaagcacagagcgacatttacgaccggacaaaaggccgtctggcgatacccggcgcattcggctttgggtgtgcttttctgcctgaagatgttatccgttttgacactaagagtgatttcctggcctgggtaaggaatgcgctgccaggtgaatattccgttgctggcccctacggcatcatcatacccgacacacggtttgaaggggtgctcagcatccggtggactgatgcacgccctgagacaacagaaccgcggtacagagccaaatcccttactttttacggcattaacggccccatttatcacacccgctaccgctactggcccatatccagactgactgggtga

SEQ ID NO: 476552 - DNA, 639 bp, Shigella flexneri
atgggggactctgtgacaccggagatacttggcaacatgattcgtcagtatttcagtcaggtacgaactgaaaaagagagcatacaggctctgaatcatctgcgcagagtgcttcatgaggtcagtccttttgcacaggagcctgtggactgtgtgttgtgggtgaaagcggatgaggtggtggccaacgattacaaccctaatgtcatggcactaggtgagaaaaaactactgaaacagtctctggagaaagatggtttcacacaaccggtggtggtgtcagaggagaagaatcattatctggtggtggatggttttcatcgtcagttactggggcgggaagcagatgcaggaaaacgcctgaggggctggttgcctgtagcctgcattaatccggagagaaagggacaggccgcacgtattgccgcgaccattcgacataaccgggccagggggaaacaccagatcactttaatgtctgatattgtcagggatctttcacgtctgggctggacgaatgaacgtattggtacagagctgggaatggaccaggatgaagtgctgaggctgaaacagattagcgggctgacagagttgtttcaggaagaggatttcagctcggcttggacggttcgttga

SEQ ID NO: 476553 - DNA, 441 bp, Shigella flexneri
atgaaaaaacagatatttattaataataaacctcctgtagtcccttactcagggacgcacgcgaaaatatttaaatacattgaaatccctctgccgtttttctactttatctatacatcaggcgaaccattccacatatctgtccaaaatactgttatttatgtatcaaaatacaatggtatatttattaataaattagttcctttttctcttttatttgacagggatatatctgttcttcaaagaagagatatttgtgttgtgcgatttacgtcagaggaaataagtgaacataacgttttatttgatcatgacattgaacgattaaaaaaaatttccaaagctcagcttatatctcccgattatgttttgattgatttttctagtgggggggtgcccctattaagttgtcaagcatgttatgacccctgcggggtataa

SEQ ID NO: 476554 - DNA, 354 bp, Shigella flexneri
atgccactgctggataagctgcgtgagcagtacgggggcggaccgctatgcagcgaactgcatattgccccgtcaacgtattaccactgtcagcaacagcgacatcatccggataaatgcagtgcccgtgcgcagcgcgatgactggctgaagaaagagatacagcgcgtatacgatgaaaatcacaaggtatacggtgtaaagtctggcgtcagttgttacgggaaggtatcagagtggccagatgcactgtggcacgtctcatggcggttatgggacttgccggtgttctccggggtaaaaaggtccgtacgaccatcagccggaaagccgttgccgcaggagaccgcgtaa

SEQ ID NO: 476555 - DNA, 267 bp, Shigella flexneri; identical to SEQ ID NO: 462029

SEQ ID NO: 476556 - DNA, 372 bp, Shigella flexneri
gtggtgtgggtcggtaaggatgtgacaggcattgaaccccgtaacgccagtgttattgaagttcctgatattaccgccaaccgccgcattaccgcgccgggttactggttttaccgcaatgatgaatttgtctttgactacagactcaaagcggaagatgagcgtgatgcccttctggctcaggtcagtgcccggacaggggaatgggaagaagacctgctgctggggttaatcagcgacgaagataaagaaaagctgaaagcctgtcgtatttacgcgaaatcgctgcaggcgatggatttcagcaccatcactgataaatcctcatacaacgccattgaatggcccgcctctccggaaggttcttcctga

SEQ ID NO: 476557 - DNA, 195 bp, Shigella flexneri; identical to SEQ ID NO: 475224

SEQ ID NO: 476558 - DNA, 327 bp, Shigella flexneri
atgactaaaaatactcgtttttcccccgaagtccgtcaacgggcagtccgtatggttctggaaagtcagagcgaatatgactcacaatgggcgacaatttgttctattgctccaaagattggctgtacgccggagactctgcgtgtctgggttcgccagcatgagcgggataccgggggcggtgatggagggctcaccaccgctgaacgtcagcgtctgaaagagctggaacgtgaaaatcgtgaactgcgccgcagtaacgatatccttcgccaggcttccgcttattttgcgaaggcggagttcgaccgcctctggaaaaaatga

SEQ ID NO: 476559 - DNA, 426 bp, Shigella flexneri
atgaacggtataaaaacggggctggggatcacgccgggtgagcacattatcagtgccgactctgcgctcagcagaaatatccggcagtgtttctgcctttcctgccatggccggttgattctgcagacagatgctcagggggcgtggtttgagcatgatttacatgccctgagtgagcaacagaaggcggactgtgtggtgctgaatccggagaagtcccacccttacattgaggatatggcgatgtttttatcgccattaccggtcgtgctggagtggcattgtgtgatgtgtgagcagttttttcatgggaagaagttctgtgaggcctgtggtacggggatttattgcagagcggtatgtacgaagtctgtttacagctaccagccagacttgtttgaggactgcggaggtgcgagtacttaa

SEQ ID NO: 476560 - DNA, 384 bp, Shigella flexneri
atgtacgcaaaatcttttctcgcacttgatggcaacggacgtctgaccggtgcccgtaccgcacagactgcaccttacgatagctacacctgccacctttgcggcagtgcactcagataccacccgcaatacgacactgaacggccctggtttgaacacgctgacgaagggctgacggagcacggtcatgagtgcccttatgtcaggccggaacgcagagaaatacggttgattaaacgtctgcagcaattcgtcccggataccttacccgtagtacgtaaagccagctggcactgcaggcaatgtcaccacgattattatggggagcagtactgcacacactgccagaccgggcgcttcagtgaggaggggggagcagaatga

SEQ ID NO: 476561 - DNA, 522 bp, Shigella flexneri; identical to SEQ ID NO: 476460

SEQ ID NO: 476562 - DNA, 1191 bp, Shigella flexneri
atgcctgcccgtaaagtatgccagacttttttccgtaatgctttagcttccacgcatcagtatcgacaaaatgccattattgattctgctgctgctttagtcggtggcgcatctctttctcttaccagcattggccggcatttacccggtcctgctcgcgtgaaagataaaataaaacgcgttgactgtctgttgggtaataaacgacttcataatgatatccctctgatattcaaaaatattacatccatgatgacaaataaactgtcgtggtgtgttatcgctgttgactggagcggttacccttttcaggaatatcatgtccttcgtgccagcctcctctgcgacggtcgctctatccccctgatgagtcaggtcttcccgtcaaaaaaaaataacgaggcggtggaaatcgcttttctggatgcgctttccggggccatttctccccggactcgtgttgttattgttactgatgctggttttcaaagtgcatggttccgtcatatcaaatcacagggatgggattttattggtcgtatcaggggggtagtgaagttcaggctggatagtgacaaagataagtggctggacataaaaatgtgcagggggagttcagaggcaaaatacctggggacgggaaccctggcccggaaaaaacgctcgcagtgtgaaggacatttttatctttataaacattcacctaaaggcagaaaaagcaggcgtgccagagggaggccgggcttaccaacaacggaaaaagaacaaaaagccgcaggcagagaaccatggttaatattcagcaatacagctgagtttaatgccaaaaaaatcatgaaactgtacagtcgaagaatgcagatagagcaaaactttcgggatgaaaaaagtgaacgctttggttttggccttcgggcgagcagaagtcggaggggagagcgttttctggtattaagtctactggttacactggccagtatcgtactctggctacttggttatcattttgaaaataaaggatttcatttaaagtatcaggctaatagtctcaaaaaacgaagagtattgtcttttctgacgctggctgaaaacgtcctgagatttaaccctgaacttctacgacgagcacaacctgaaaagatattgtgccggttggccagcacttaccgaagtatggtgctggcttactga

SEQ ID NO: 476563 - DNA, 675 bp, Shigella flexneri; identical to SEQ ID NO: 472105

SEQ ID NO: 476564 - DNA, 321 bp, Shigella flexneri
gtgtccgttaaactcaggctacctcagagcgcttatccgatttttgatcgtattgaagaaatggcatgggctcgtcactaccagcagatcgttcgtgaagaaaaagaaacggaactggcggacgacctggaaaaaggtctgcctcagcacctgtttgaatcgctctgcatcgaccatttgcaatgccacggtgccaataaacaggcaatcagccacgcatttgatgatgatgttgagtttcaggagcgcatggcagaacacatccggtacatggctgaaaccattgcccaccaccaggttgatattgatttggaggactaa

SEQ ID NO: 476565 - DNA, 1188 bp, Shigella flexneri
atgctcccccgttttgccgatatttttcagcagggaaaccgctggcttaactggctggagaaacaaccggaaggggcagtccgtccggtggtaattgaatcagtgacaaaaatcatggcctgcgggaccacactgatgggctacacgcagtggtgttgttcatcaccggactgttgccatacaaaaaaggtctgcttccggtgtaaaagccgctcctgcccgcactgcggggtgaaggctggcgcacagtggatacagtatctgctgagcctggtcccctactgcccgtggcagcatattgtgttcacacttccctgccagtactggtccctggtgttccacaaccggtggttactggcagagatgagccgcattgcagcggatgtgatactggaaatctgccatcaggcagatgtggagccggggatattcacggtgatccacacatgggggcgtgaccagcagtggcatccgcatatccatttatcgacaactgccggtggtgtgacgtcgggccacacctggaaaaatcttcatttttacgcccgtaaggtgatgagcatgtggcgctaccggataacacggttgctgtcacggaaataccctgacctggtgatgccggatgcgctggcagcagaaggaagcagtaaacgggaatggaatcgcttcctggacacgcattaccgccgtggctggaatgtcaacgtatcccgggtaatggataataccacccatgtggcggtgtactttggctcttacctgaaaaagccaccggtgccgatgagtcgtctggagcattatgccggtcaggatgaaatcggtctgcgttacaacagtcaccgaacaaaacgggaagaatacctgttgatgagtggagatgagttcatggaaaggttctcctggcatgtggcggataaggggttccgtatggtgaggtactacggttttttgagtccggcgaaacggcggttactggaagaagtggtgtacatcataacggagacagtgagaaaaacggcgatgcaaatcacctggagagggatgtatcagaggttactgaaggttgacccgctgaagtgcgtgctgtgcgggagtcagatgcgttttacggggctgaagcggggctaccgtctggcagagcaggtcctgatgcatgagccgctggcccggatgcggtggtgcggctga

SEQ ID NO: 476566 - DNA, 522 bp, Shigella flexneri; identical to SEQ ID NO: 476460

SEQ ID NO: 476567 - DNA, 435 bp, Shigella flexneri
gtggagaacttcatcgacactcttgaaaactggcgtgaccagaagcagattatttcagttatctgtaaagatggtattaagattgacgactccattattacaagctttaaagcctctaaagatgttggaatttcaaacggactgagaatccagctaacttttcaggaaattaacttcaaagctattgtagggcaaactgatgtttcagcagccactggacggacttctaccacgaatgatggcggtgctaccagtaaaaagaacactggcaacactacgacaagtcttggaagccctatgctgacctgtaaagagctttttagctattcggcaagtgagttatcagatgaagcgttaaaagcccgtgtaacgtgctctaagagcgttagcgttaaaaatggtgagagcaccttcacagcctcagctaatgagtga

SEQ ID NO: 476568 - DNA, 141 bp, Shigella flexneri; identical to SEQ ID NO: 474597

SEQ ID NO: 476569 - DNA, 564 bp, Shigella flexneri
gtgaaggaagccgggtgcctggcccacgcccgccgaaaaatccatgacgaggatgtgcgccgtccgacagaaatgactcaggaagcgctcagacggatagcagagttatacgacatagaagcggagatacgtggcagtccggcagaggaacggcttgcagtcagaaaagccagaagcgtccagttgatgcagtcgttgtacgactggatacagttgcagaggaaaacgctgtcgaaacatgcggagatggcgaaggcgttcgactatatcctgaatcactggaatgcgctgaacgagttctgtcgtgacggccgggtggaaatagacaacaacatcggtgaaaacgcgttacgatcggtggcggttggaagaaaaaattatctctttttcggctcagacaagggaggagaaagtgcggcgatcatctacagtctgctggtcacctgcaaacagaacgaagtggagccggaggactggttgcgcgaagtgatcgagaagctcaatgactggccgtcgaaccaagtgcatgaactgctgccctggaacttctcgtctgtaaaataa

SEQ ID NO: 476570 - DNA, 267 bp, Shigella flexneri; identical to SEQ ID NO: 474742

SEQ ID NO: 476571 - DNA, 300 bp, Shigella flexneri; identical to SEQ ID NO: 84330

SEQ ID NO: 476572 - DNA, 360 bp, Shigella flexneri
atgatctgtcagcctgagttcacagataaaacactctccaggaaacccggggcggttcagaaagtaaatgaaacagatgctgaatacctggtgcgtaaattcgatgagcttgaagctaaatgtgcagcacaggaaaacaaagtaataccagtgtcaactgaactgccaccagcaaatgaaagtgttttgttattcgatgctaacggagaaggctggctaattggctggcgttctctctggtacacctggggacaaaaagaaaccggagaatggcagtggacatttcaggtcggggaccttgaaaacgtcaatatcactcactgggcagtaatgccaaaagcaccggatgctggagcataa

SEQ ID NO: 476573 - DNA, 225 bp, Shigella flexneri; identical to SEQ ID NO: 476353

SEQ ID NO: 476574 - DNA, 633 bp, Shigella flexneri
atgttgacatttgatgatggataccttgacaactggtttcaggtatatcctttattaaacgagtttaatctcaaggcacatatttttttaattaccagttttattggaaatggtccggttcgtcactctcctggaaaggaatattctcatcgcgattgcgaacatcaaatagcgacagggaatgctgataatgttatgcttcgctggtctgaagtgaacgaaatgttgcaatctggtctggtcgaatttcatgttcatacacatactcatacacgttgggataaaaagttcacttcacgagaagaacagtgtaaacatcttcggcaggacttgttgagcgggagggaatatttgaaagaaatgacaggaaaatgcagtaaacatttgtgttggccggaaggttattataacaaggattatattcagatcgctgaagaacttggattccattatttatatacaacagaaagaagaatgaatgctcctgctaaaggaactacacggataggaagaataagcaccaaagaacgggaaagttgcgcatggctgaaaagacgacttttttattatacaaccccgtttttttcatcgttgctggcctttcataaggggccaagattaccggatgattaa

SEQ ID NO: 476575 - DNA, 357 bp, Shigella flexneri; identical to SEQ ID NO: 474530

SEQ ID NO: 476576 - DNA, 618 bp, Shigella flexneri
gtggggattgtgtggcgaagggctgcgccaactctgcgtatccgtgacccgcataaagatgaaaagatggcagcaatccataaagcactggacgaatgcagcgcagagcatccggtcttttatgaagatgaagtggatatccatcttcatcccaaaatcggtgcggactggcaactgcgcggacagcaaaaacgggtggtcacgccgggacagaatgaaaaatattatctggccggagcgctgcacagcgggacaggtaaagtcagctatgtgggcggcaacagcaaaagttcggcgctgttcatcagcctgctgaagcggcttaaagcgacataccgtcgtgcgaaaaccatcacgctgatcgtggacaactacattatccacaaaagccgggaaacacagagctggctgaaggagaacccgaagttcaggggcatttatcagccggtttactcgccatgggtgaatcatgttgaacggctatggcaggcacttcacgacacaataacgcgtaatcatcagtgccgctcaatgtggcaactgttgaaaaaagttcgccattttatggaaaccgtcagcccattccccggaggcaaacatgggctggcaaaagtgtag

SEQ ID NO: 476577 - DNA, 180 bp, Shigella flexneri
atgaataagccgcaactggcggaatcacagaagaccgctttgcttaccgaggcggagtctgtcatccggccgccggggtgtgcggtcaggctgaacagagaaacggatgaatccggggaggcccgggggcgggcctctgtttttccggagtcagtccggtctgtggtttatgcgatgtga

SEQ ID NO: 476578 - DNA, 147 bp, Shigella flexneri
atgtatcagcagtgtctgaaggttgacccgctgaagtgcgagctgcgcggaggtcagatgcggtttacggggctgaagaggggttaccgtctggcagagcaggttatgatgcatgagccgctggctcgaatacggtggtgcggctga

SEQ ID NO: 476579 - DNA, 801 bp, Shigella flexneri
atgttgatcataccattacctacataccttgttgattttttaatagggcttaatattgtacttgctattctcgtttttatgggatcattttatattgaaagaatattgagtttttctacattcccttcggttttgttgataacgacattatttcgtctcgctttatcaataagtactagtcgactaattttagttgatgcggatgcgggtaaaattattactacatttggccagtttgtcattggtgatagtctggctgtaggttttgttattttttcaatagtaactgttgtgcagttcattgttataacaaaaggatctgaaagggttgcggaggtagctgctcgcttttctcttgacggtatgccggggaaacaaatgagcattgatgcggatttaaaggctggaattattgatgccgcaggagctaaagaaagacgcagtattctggaacgtgagagtcaattgtatggttcatttgatggagcaatgaagttcattaaaggtgatgcaattgctggcatcattattatttttgtcaatttaataggaggtatttctgttggtatgagtcaacatggaatgtccctatctggtgcattatctacttataccatactaactattggtgacggattggtctctcagattcctgctctgttaatttctataagtgcaggatttatcgttacaagagttaatggtgatagcgataatatgggacgtaacataatgtcccagatatttgggaatccttttgttctcattgttacatcagctcttgccttggcgatagggtag

SEQ ID NO: 476580 - DNA, 267 bp, Shigella flexneri
ttgcagcgtaaaatctcaaaaatggcagaacttgctattgaactcgatgatatgacaattatcacagagaaattacgcgacatgaagaatgcgctttcaaaactcaatcatgatatcgaagaggatacaaagcggataaaggccatcacaactggaagcctcaaagatattgacaggacaacaaaggaagggatggtagagacacagctacttatcaagggcgtactcaaagaaatagttatagatgccgctaaacgtcgatgttga

SEQ ID NO: 476581 - DNA, 303 bp, Shigella flexneri; identical to SEQ ID NO: 474682

SEQ ID NO: 476582 - DNA, 267 bp, Shigella flexneri
atgttgggacttgaaccgaagaacacggcggtgcgtagtccggagagtaacggaatagcagagagcttcgtgaaaacgataaagcgtgactacatcagtatcatgcccaaaccagacgggttaacggcagcaaagaaccttgcagaggcgttcgagcattataacgaatggcatccgcatagtgcgctgggttatcgctcgccacgggaatatctgcggcagcgggcttgtaatgggttaagtgataacagatgtctggaaatatag

SEQ ID NO: 476583 - DNA, 474 bp, Shigella flexneri; identical to SEQ ID NO: 474721

SEQ ID NO: 476584 - DNA, 351 bp, Shigella flexneri
gtgaccgaaccaaatcaggtgtggtgcggtgatgtgacctatatctggacgggtaagcgctgggcgtacctcgccgttgttctcgacctgttcgcaagaaaaccagtgggctgggccatgtcgttctcgccggacagcaggctcaccatgaaagcgctggaaatggcatgggaaacccgtggtaagcccggcggggtgatgttccacagcgatcagggcagtcattatacgagcaggcagttccggcagttattgtggcgataccagatcagacagagtatgagccggcgcggaaactgctgggataacagcccaatggaacgcttcttcaggagtagactggccccctga

SEQ ID NO: 476585 - DNA, 216 bp, Shigella flexneri; identical to SEQ ID NO: 5123

SEQ ID NO: 476586 - DNA, 474 bp, Shigella flexneri
gtgcgcaatggcatggaggagtccgcggaatttgaacaacagcaacataatcaagcggccgcgaaaaaacgcatcccggttatcgaagctctgttacgacatcccggtgctttcctgaagattattgcactacgactgtgcgagttgctgacgatgtacattgttactgcctttgcacttaattattcaacccagaatatggggttaccgcgcgaacttttccttaatattggtttgctggtaggtggattaagctgcctgacaattccctgttttgcctggcttgccgatcgttttggtcggcgcagggtttatatcacaggcgcgttgatcggaacgttgagcgcatttcctttctttatggcgcttgaagcacaatctattttctggatagttttcttctccataatgctggcaaacattgcgcatgacatggtggtgtgtgtgcaacaaccgatgtttaccgaaatgtga

SEQ ID NO: 476587 - DNA, 423 bp, Shigella flexneri
atgtttaacctgatgttgacctctaaaaagctgacaaaaacggcaattaacgaggcgctccggaggatgaaaaaagcaggtctgaacaagtctgaacttgaggcttttttgcgggatatgattaacggtaagcaaaagagctggctggcgcattgtactgatgcagaggcgttatgtattgatcgggtcataagtgaggtgctggcagagcatccaggattgattagcgtccttcggcaacggtatgaggggcgggggatgaccaaatgcaaaatggctgaactgctgaatgatgcacacccgaaatggagtttaagaacctgtgaaagacgcattgagcattggctaaaggtggcagaatttattttgtacaaaccaatggttatggcttttggtatagagaaaaaagttattgctttttga

SEQ ID NO: 476588 - DNA, 267 bp, Shigella flexneri; identical to SEQ ID NO: 462029

SEQ ID NO: 476589 - DNA, 429 bp, Shigella flexneri
atgtacgggccggaacagacggaataccgcctccgttttttcgcgaatattctgtgcctgtgcgggagaaggctgaataccggccatatcccattcatggcagggctccgttttgtcggcctgcgtcaccacaaacagcacctgctgatgtccgcactgcaggatgtgtcgccagaaatactcatccacagacagggcacggtcatcggctttaatcagccacagtaccaggtcaagttcaggcagaatgtcacggtacagggcttcatactctgcatccctgtcccggctctcgcccaccccgggcaggtcagtgataaccatgctgtgaccatggccactcagacggaaacgctgcacttcccgggtgccggcgtgaacatcactgaccggggtgacctccccctgaaacagtgcattacagagtga

SEQ ID NO: 476590 - DNA, 333 bp, Shigella flexneri; identical to SEQ ID NO: 475379

SEQ ID NO: 476591 - DNA, 312 bp, Shigella flexneri; identical to SEQ ID NO: 475318

SEQ ID NO: 476592 - DNA, 330 bp, Shigella flexneri
atggatgatcttggttatggacaacttccttttgataagggatcttttgacccaaaaacaatggaaaatcgtgaagttgtcgatacctacaaaatagggatagataaagccattgaagctgcacaaaaatcaacgccgacgctcctttcattaatggatgaaggcgtacgttttactaacggctatgtggcacacggtgtttccggcccctcccgtgccgcaataatgaccggtcgagctcccgcccgctttggtgtctattccaataccgatgctcaggatggtattccgctaacagaaactttcttgcctgaatttgaggtagcctga

SEQ ID NO: 476593 - DNA, 522 bp, Shigella flexneri
gtgaccgagccaaatcaggtgtggtgcggtgatgtgacctatatctggacgggtaagcgctgggcgtacctcgccgttgttctcgacctgttcgcaagaaaaccagtgggctgggccatgtcgttctcgccggacagcaggctcaccatgaaagcgctggaaatggcatgggaaacccgtggtaagcccggcggggtgatgttccacagcgatcagggcagtcattatacgagcaggcagttccggcagttattgtggcgataccagatcagacagagtatgagccggcgcggaaactgctgggataacagcccaatggaacgcttcttcaggagtctgaagaacgaatggatgccggtggtgggttacgtaagcttcagcgaggcagctcacgccataacggactatatcgttggatattacagcgcactaagaccgcacgaatataacggtgggttacccccaaacgaatcggaaaatcgatactggaaaaactctaactcggtggccagtttttgttga

SEQ ID NO: 476594 - DNA, 288 bp, Shigella flexneri; identical to SEQ ID NO: 474636

SEQ ID NO: 476595 - DNA, 300 bp, Shigella flexneri; identical to SEQ ID NO: 461638

SEQ ID NO: 476596 - DNA, 240 bp, Shigella flexneri
ttgttgaccacttcagatgccgccaaagctatggatgttggcctttccacaatgacaagatgggtcaaacaactgcgtgatgagcgtcagggcaaaacaccaaaagcctcccccattaccccggaacaaattgaaatccgtgagctcaggaaaaagctacaacgcattgaaatggagaatgaaatattaaaaaaggctaccgcgctcttgatgtcagactccctgaacagttctcgataa

SEQ ID NO: 476597 - DNA, 597 bp, Shigella flexneri
atgggcatcaacctgttccgcgtgctgatgacttacctgaaaccggtactgccgaaactgacagaacgtgcggaagcattcctgaatacggaactgacctgggatggcatccagcaaccgctgctgggccataaagtgaatccgttcaaagcactgtataaccgtatcgacatgaaacaggtggaagcattggtggaagcgtctaaagaagaagtgaaagctactaccgcgccagttactggcccgctggcagacgacccgattcaggaaaccatcacctttgacgactttgccaaagttgacctgcgcgtggcactgatcgaaaacgcagagtttgttgaaggttctgacaaactgctgcgcctgacgctggatctcggcggtgaaaaacgcaatgtcttctcaggcatccgttctgcttatccagacccacaggcactgattggtcgtcacaccattatggtggctaacctggctccgcgtaagatgcgcttcggcatctccgaaggtatggtgatggctgctggccccggcgggaaagatatcttcctgttaagcccggatgctggtgctaaacctggccaccaggttaagtaa

SEQ ID NO: 476598 - DNA, 300 bp, Shigella flexneri
atgttgaacattacccaagcctaccaggtggcattgatcagttcatctcatacatcagaggaagatgctcgccgattcatgatcgcaagcaatgagctggattgggtttcacaaattgatggcggttgtattgtccacgccgggttacaggatgatgtctggaaagacgacttgcgtcgatatggtatatccgaaggcgcgattgctaacattcagaaagtacttgatgtaggctttgactctgtacattttgattgtggtgcgccgatcgttgaagggcttgagtgctggtgttggtag

SEQ ID NO: 476599 - DNA, 1191 bp, Shigella flexneri; identical to SEQ ID NO: 36488

SEQ ID NO: 476600 - DNA, 330 bp, Shigella flexneri; identical to SEQ ID NO: 12070

SEQ ID NO: 476601 - DNA, 312 bp, Shigella flexneri; identical to SEQ ID NO: 12071

SEQ ID NO: 476602 - DNA, 396 bp, Shigella flexneri; identical to SEQ ID NO: 12072

SEQ ID NO: 476603 - DNA, 375 bp, Shigella flexneri
atgggacttgatatctatatcgagacacagcctaaaaacgatctgaataacgaggcatccagaaagcgggttgcttacttccgtaagttcaatgcgctcgttgggtggatggagcgcaacgtaggtgaagtcgaaaattgtgagcttttagaattaacgatgaatgacatttgttttctgaaggctcatttgatgcacataaacgaaagtaattgcgaagagtacttgcctacccgggaaggttttttcttcggcagtcaggagtacgatgaaggttactggcatgatgtgggggagttgaaagagcttgtggaagatctgattaagaaccacgactttcacaataacagactgaccttctgcgcctggtggtaa

SEQ ID NO: 476604 - DNA, 282 bp, Shigella flexneri
atgactgatttcaccattacccctaaagcacaaaatgtattccttgaatcatggctggacttgccggaaacagaacagcaagaaatggatcatgtggattatgacgagcaggtaagcacgcgattcttccactttgagggatgcgtttacgacattgccgacttcatgcgagatgaccgcttccctgaatggcacgcaagctatccactaaacgcctttgccatgctgatgatccgtgtggatgattcaggggataccatcgacatcggtctgctccactaa

SEQ ID NO: 476605 - DNA, 141 bp, Shigella flexneri
atgctggtggccttaaatgaccatcctgtttcccgcaggctaaaaacaccaacctcttacctccaggcaaccgacaaacccacctgttcccgtccggctaccgcaactttccactttgacgccttattcgtacaacgataa

SEQ ID NO: 476606 - DNA, 483 bp, Shigella flexneri
atgaattttatcgctactgtaaacgcacccgcacatggcaatatcgctgtaacgttctctgacattgaaaaacgagtacttggtgcatggcgcgacaatgagacggtagaactgtcagcacaagaaaaatgcattattgcacgcgacatcattggcaatcgtcgttactcgcgggtatttgagaaagcatatgtggtaaattctggattcggaacgttcgtctttccggtgcgctccgggcgattctgccagtccaagctgattgagttcgctacgcagatttctgtctggattaaaactcaatcgtcgttcaaattttccgacgatgaagcagtatcgcaggggatgcggatcgccaacaatgcgattaaatgcaaaaacattacgtataccgctggcgttgatacatggaaactgttttgcgctaactttatgctgaatgtatacgcaagcaaccgcatccacatccttgatggcgtgtaa

SEQ ID NO: 476607 - DNA, 231 bp, Shigella flexneri
atgtttgttcttatcgctggcgttaacgtccataacgaatattatgttaatcgcatcgctgggatcgctggttacgctgggcgcgcagtcgagcttatagatgaaacgacgcgcaaaattgacttattgagcgaccaggagcgaaaaaaagcagacgtgaatgacgctgatatatttttaatgttaaaagcgtttgtagaaatgggatttgaaatcagtttacataaataa

SEQ ID NO: 476608 - DNA, 204 bp, Shigella flexneri
atggtcagctatgacaagatccgcgcggaatatcgcgcaaagtatcgcgcttataaactggaattaatcgatgatttaatcgcgcaacgcgaccaattaaattttacgttttctgatttgcttaacagcaagcgagattgcaagcgcaaacgtgaatacttacgtttaagcgcattaatcggaaaacttcaaaattctatttaa

SEQ ID NO: 476609 - DNA, 651 bp, Shigella flexneri
atggctaacattatcatttctaaaaagtccatcattgaagctgcatctattgtatccgacgagctgcgcgaaaaagcagatctggcaactcaaacatataacgaacattataaaaatggtacgcacactaaagcagacaaagcaaatatgcaagctgcgaccactaaacttgcttacttcatcaacaacgtcgtaaacgcagtagaagacgaaaaattatgctctgttttctactatgcgattaaagcaagcaaacaagcgccagaagtatttttccgtgatgcaatgactaatagttattctctggaaaaactggtttatctggttaaatcaattaaatctggtaaatgcgtttattccatcgctgatatgtcaggatctcgtgtattcgctttaatcgatatgattaacgacgagatcgacacgttcaccaatggcgctgttttcgatttaatgaatgaagctaaaaaagcgtgtgaaattaaattggacgctggctatactcaagccaaccagttgatcaatctttgcgaacgtcttggacttgttgaaaaagtcaaaggagctgggagtgcgaaagctggtactcagcaatatcgcttcattaaaaatgatttctacaattatttagctgatgctttcaaagcgtaa

SEQ ID NO: 476610 - DNA, 252 bp, Shigella flexneri; identical to SEQ ID NO: 469691

SEQ ID NO: 476611 - DNA, 525 bp, Shigella flexneri
atgacaaccaaagatattacctacggtatccaagctgaactcttgccgcgagattacactaacgttgaaaaactactgatgttctggcgcagagaacaaattcctgtaagggtcactctcgaagatggtcaggcgttttgcatgtacgtttatggcctcatgccatctcgcaacaaagttgacctttgcccagccccttttgacaaagaaaatcgtataaggctcccacttgaacgcattagtacaattgaatcaggtgtggttgacagtatcgctcacgatttcaaaggtcgattaacagttcaccctgattatgtcgataatcggccatcacgccgcgatttttttgcaatttgcaaccaagcctacaaagcaaacaaatctataagggtgtacatggcggatggccgtgaaattgagggggtgtcagcaggcgcagatgcttgtcaggttacactacgtgtcgagaacggtagaaaaatagttgttttgttcgattgggttgaacgaattttgcctttttga

SEQ ID NO: 476612 - DNA, 465 bp, Shigella flexneri
atgaagtctcccatactgttcactttctgttctaaaactaacatgaaatactcgcttctccctctactaacgttaccagtgttgatgcttaccgcgtgccaatcacgtccaatatcaatccatgacgccaaaccagcaccgcaggccaaagtgttcaagtatcaaagcgcagcgccagctacgttggtggtaatgagagacacaggttttgtaggagctggatgtgatgcttccattttcatcaatggcgaaactgtcgcaaaactggctacaggcgaaaaagcgactttccatttaaatgccggagaattaattgtgggtgcatctcttgaaggtgcaggtttatgtgctctaaaccccgctcgtcaagagcgagaaacgactctgaagaatggagacacaaaagcgttcagggtgttcaccagcaattctggtaacatcgacattctgccaacaactctgtga

SEQ ID NO: 476613 - DNA, 279 bp, Shigella flexneri; identical to SEQ ID NO: 12081

SEQ ID NO: 476614 - DNA, 1560 bp, Shigella flexneri
atgactgttcggattgtatctaacgcagtaaatgcgcttatttctggcgcagatgacaaggtaaagcaactggtgcagcaaatgttgagctacgaagtcgagactggcgactggaagggcacaagcacgatgttcaactggagtaaaaactcgttccctgctggctttgccaagcctgtagcggcgaacttgaacaaggcgggcatcaaatgtgttcatatccgcaaagacaaagccccggcgcttggtaaaccaaatccggcggttaacccattcccatacaatcctgattatgcgtatcaggatcagactgtggaaacactggttcgagagggaatgatgattgcgcagatcgctactggtggcgggaaatctaatgttgcctgcaaagcagctgcacgtatcggtcgaatgacattatttttaacaacccgctctgttctgatgtttcaaatggccgaaaacttccagagatccatcgactaccgcgccaaaaatggcgaaccgtggttaaaagaccaaaaggttggagtcattggctcgggtgagttccaggtatcacgacatatcaacgtcgctacagttcaaactcttgcaagtttcctcgaagaaccaccacgcgatgcaacaccagataagaaaagctaccacctcaaacgtcgggagttggtgaaacgcttcctttcaagtgtctctcttcttattctggaagaggcgcatgagtcttcaggctcaaatttctatgacatcgccagattatgtgtgaacgcagactatcgtctggcgcttacagccacgccgttcatgaaggattcgacggaagccaacatgcgcctgatggcggtggccgggcgaattgaaattaaagtcacagaaaagtacctgattgatcgaggcattctggcaaagccgtacttcctttatcataaagttgcctacaagccagacgaggccagaatcaaggccgaacttgccaacaaacatctcaattttagagttggtatgagcaccgcctaccaaaaggcttatcagttggggatcgtgtataatttgggacgtaacgaggccatagtgcgcgaggcattgctttataagcaacattcactcaactgcatgactctggttcgtcttaaacgccacgggcaaatcctgatggagatgatgaaggagtcaggtcttagagttgatttcatctatggggaatctaaccagacgacaaggcaagcaaagctgaacagtttagcgtctggtgaaatagatgttttaataggctcgactattctggatgttggtgttgatgtgccaagcgttggtgcggtcattcttgctggtggtgggaaagcagaagttgaaatgagacaacgtgtcggtcgtggcttacgagccaaaaaaaatcaggcaaacgtgtgttttatcactgatttcattgacattagcaacaaatacctgttgtctcactcttatgagcgaaaacacatcatcgacaccacacctggctttgcagaaggtgtattgcctattgatggagcattcgattttggagttctgaaacgagattag

SEQ ID NO: 476615 - DNA, 681 bp, Shigella flexneri
atggatgtaaaaatcacgattttgcaggttgatgttgccaaccttcgcccgaatacctggaacaccaattcggttggtgcgcagaattttgaaaaactgaaaggttctatcgaaaaattgggcttttttaagccaattttggctcgtgaacttgaagatggattttttgaaatcctcggcggcgaacatcgctggcgtgctgctattgagcaaggaatttcaacggttccggtgctttctgtgggcaaaattagcgatgtcgtagctaaacagatgtcactggtggacaacgagcgatacggtgaagacgaccaaatcgcattgcaacgcttcattgaagaaattcagtcagaacttgactatcaactgtctgaaatcgccccgtatgacgacgaaatctcgatggttttagcaaaagaggcggcaatcgaccttgaagcactggaggcgttgtctcgtggtagtgatgagcctgtcgataccgacaaacgagagaaaaccgaacgtgtgggtgcggaacatcagaccatgcgcttcaaagtaactttcgatgcgtcagatcgtgttgcagaaaccataaaaaacatcatcaaagagcaggctattaacaccggtaatgaaatggagaacgctggtgaggctctggtgtggctggtcgactactacaaggagcgtatgtaa

SEQ ID NO: 476616 - DNA, 669 bp, Shigella flexneri
atgaccaaaaagtttgaaatcgtatatcgcgacccggcagatcttattccctatgagatgaatgccaaaaagcatgatgaacagcagatccgagatctggccgcagccattaaaaagcgcggatttgaccagccaattacggtcgataagaacgacgtaattattactggccacggccgccgtgaggctgcaatttttgctggacttgagcgcgtaccggttattgttcgcgatgatctcagtgatgacgaggttcgtgcgaagcgccttgaagataaccgacttgccagcattgattacgatgcaattaagctacagaaagagcttgagtcgcttgttctggacgatatcgaggttttcggctttgaagagcgtgagttgaatgttctcgttggcagcatgacagaagaaatggacaccgactcgctagttatcgatcttggcgaagaaactaaacgacagaaggatgaacacaccgagatcagtcgtgaagttgcagcggaagaagtacgtgttgtcgacgtattgggctttaaaacgcttcctgctggctctgccattgttgttggtgatttgcttgcccacatggaagaaatgacgggagaaagcggggtagacgcatttgtggcatatgcggagaagatctcttccggggagatggctgcatga

SEQ ID NO: 476617 - DNA, 666 bp, Shigella flexneri
atgagcaaatacatcatcaacgtatcgtttcagactcgcgtaaataaaaccacgcgcacgttggaaatcgctgagtcgttcgggcttggcctggacgaaaaagagtggacgctttacgacaatctggagctggaagtgaagcagggcgatgtggtgtacatcaccggccaatccggttccggcaaatccgttgtgctgcgcgagttgcaacgacagatgaaggatgaagggctgtctgtagcctccatcgatgattttaccttcgataatgaggttaacgtcatcgatcagttgggcaaaacgaccagcgatgcgcttgggttgttatctatggctggtctgaacgatgcatatctgtttgttcgcaagccttctgaaatgtcagacggtcagaaatatcgtctcaagattgccaaattgattgagtcaggcgctaaagtgtgggctgctgacgagttcggtgctgttctagaccgtgtaaccgctcaggttgtggcatctaacctccagcgtgccgctcgaaaggttggtgcgacggtaatggtggcgacgactcacgaagacctgaagaacgcgctgcgcccggatatgcagatcaccaagcactacaaagaacgcgtgaaggtggaatatcacaatggtagtcatgatgaggttcatttatga

SEQ ID NO: 476618 - DNA, 891 bp, Shigella flexneri; identical to SEQ ID NO: 12086

SEQ ID NO: 476619 - DNA, 267 bp, Shigella flexneri
atgacgttaaccgataaacaaaaggacatcatcaaaacgctcaatctcggttatgagcgaggtcatctacttgacctggacgaattgcttgaagttttgccgtacaagacaactaagcaaagtatccagttctcaattcgcgctctgataaaaaaggggctggtggagaaagggcatacgcgccaacgcagtgacaatcgctatcaccgccgaactcttgggttaaccactttaggtcgagccaaagcgaagttactggtgatgtaa

SEQ ID NO: 476620 - DNA, 633 bp, Shigella flexneri; identical to SEQ ID NO: 469701

SEQ ID NO: 476621 - DNA, 1257 bp, Shigella flexneri
atggcaatcccgtcctcgctcagtcttgtgcaactgcattctggacagatgaaagtcttccagtctccgcatcgatttaaagttgtttgtgctggtcgacgctggggaaaatcccggttgtcgatctccactattattcgtgcggcggcaaaggaaaaaaagcaaagggtctggtatgtcgctcctacttaccagatggctcgccagattttgtgggacgatctacaggaagttctgcctcgtaagtgggttaggaaaaagaacgacaccacgatgacaatcgtgttgaagaacggttcggagatcgccctcaaaggtgctgataagcctgacactctgcgcggcgtagcgttgcattttgtagtgcttgatgaatttcaggatatgaaggctgacacttggtacaaggtgttacgacctactctttcatcgacacgcggcggtgcactgatcattggtacgccaaaaggcttctcggaatttcacaaactgtggactataggccagaacgtagagctgcaaagaaagggacagtggaagagctggcagtttgtaactgccgattctccgtttgtacctacggcggaaattgaagctgctaagaacgatatggaccccaaatcgttcgctcaggagtacctggccagctttgagaacatgtccgggcgcgtttactacccgttcgatcgtaacgtgcatgtaaaaccgcttcagttcaaccctcggttacctatatgggtagggcaggacttcaacattgacccgatgtcttccgtaattttgcaacctcagccaaatggtgagctatgggcaattgatgaattggtgctcttttcctctaacacggcagaggtttgtgatgagcttgagagacgcttctggcgctggaaatcacagataacgatatttccagatccggcaggtgcttatcgccaacatgctcgcggggagtctgacgtcgacatattcaaagagaagggattcttacgtgtcgattattcgaaaaagcacccgccaattgcggatcgtgttaatgctgttaaccgaatgctgatgaccgcatctggagatatccggctgtatatcgatccgaagtgcaagcatttgattgattcactggaaaaagtcatctacaagcctggaacacgagatatggataagacaggtggcattgagcatagtgcagacgcattgggctatccagtacatcgtaggtatccagtcaaaaaccgtgttattcttggtggttctcgatag

SEQ ID NO: 476622 - DNA, 1575 bp, Shigella flexneri
atggaattgaacgacaaacaaattaaggatctggtggcgcgacgccacccggaatacgaaaagaaaaaagaacattgggacttcctcgccagcacttacgctggcgggcgtggttggtttacagacaatatctttcgttactttaaagagggagatcaggagtttaaggagcgagttgaacgtgcttatcgcttcaaccacactcgtgaggtggtaaacctcatcaacaaatatctctttaaagaagacattcatagaaatatcgaagaggcaccagagcagatccgcaatttctggaaacgtgcgactcgccagaatgcctctattgactcatttatggccgctattgatttgcagtcgtctatttacggtcgcatatgggttgttgtcgatagcacgatgagtggtgatgttgagtcagtagctgacgagaaaaagaaagatgctcgcgcctacgcctactggatttcacctcagcaaatgctggatgtggcatgggacgacgacgggaatatgttgtgggcgttaattgtggaagtcgctcgtgatgacgcagatccttttacttctacaggtcaggaataccaacgttatcgtctgtggacacaaaacgagtggtatctgttccgtgaggaagtgaagaagggcgctggtggagcaggtcgccgtcaggcaaaagttattttagaggatagcggtgagcataatctcggcgtagttcctgtgtttcctgttgattgtattggagaaagtgaatcaccgtatttcagcccatcgttgatcgatgatatcgcttatcttgatcgtgcggttgcaaactatctgtcaaaccttgatgccattattcaggatcagacatttagccagttggctataccggtacagtcgcttttacctggtgatgaaaaccacactaaagtgcttgaaatgggcacaaagcgagtcttcacctacgattctgaaggcggaaaccagccgttttatctgtcaccagacccgaaacaagctcagatgatcatcactacgattaagacggtgattaacgaaatctaccattcagttggtgtagctggtgagcgaacgaagcaggacaacgcacagggaatcgataattcatctggtgccgcaaaaatgtatgacttccagcgtgtaaatagcttgcttgtcacaaaagcagagcgtctggaaagggctgaacgccaaatcatgctactggttgcgaaatggatgggggtagatctggacgaagaccactctttaattgcgtatccagaaagtttcgatattcgtggccttactgatgaattttctgttgccgagaaactgtcattacttcaggcaccggactctgtacgtcgtcaccagatggaaatgcttattgagaagattttcccgaacattactgaggcgatgaaaaaggaatttgataaagatctcttgaattttcctccaaaaaatgatctaaatacccttgaaaataagtcagtacttacttatgatcgtggtgcagcccaagaaagcgggcaagatcaaccccgagggaatggggactcatctactcaagagaacgagtga

SEQ ID NO: 476623 - DNA, 888 bp, Shigella flexneri
atgaatctgtggcaaatgcttttggcccgtcgtggtctgatggatgtcgctgaagcgcatgagcgtggaggcgctggcggtgtagctgctgataatgagcagagtacacaagatcctgataaacagggtgaacaaaaagagcagccgaagggcgatgacgaatacgctggcatgactcaggaagagttactggccgaacttcgtaaaaccaagaaagctggtgctgaactgctgaaggagaacatgaagcgcaaagagaaagagcgcacattggccgatcagcttgctcagtacggtgatatcgatccggctcgtgctcgccagcttttagaagctgaacaggccgcagaaaacgcacgtcgtgaggcggagcaagctgaactggagcgtcgtggtgagttcgatgctgttaaaaaacagatgatcgaagcacaccaggcagagctggcacagcgtgacgaatgttatgcagcactggaaagtgaaaacgcatcactgaaatctcaattagtcgagatgaccgtgggcgcttccttcagtaactctctcttcctacgtgacaaagttctgatgaccccggcaaaagcccgcgtgatctacggttctcattttgaagtgggtgaagacggtagcgtagtgggttatgacaaaccggcaggtcacaaagaacgagctgttctggttgacggtgaaggtaagccgttgccgtttgaatccgcgattgaacgcattgtgcgggcagatccggaagctgacgcattgatgcgtagcgaagccaagcagggtgtaggctcacattccaaatcgacctacacaatatcccaaccgaagaacaagtcgactatggataagttggcctccggtctggggaaaattggacttaagtaa

SEQ ID NO: 476624 - DNA, 876 bp, Shigella flexneri
atgccattactgcgtgaagaagctgaaaagctgtctaacaacgaacttgaacagggtgtgatcgaaactatcatcgatcgcgatgacctgtttgccatcctgccttttatgaaaattaattcaaaggcatatctgtacaaccgtgaaaaaacgctgagtgaagctaccttcatcgacgttaacgacaccatccctgaaggtgcagcaaccttcgaagaatgcgttgcgaaactgcgtattctggctggtgacgtagacgttgataaattcctggcgaccactatggccgacaccaacaaccagttggctattcaggttcgtcagaaagttaaaggtctggctcgtgcgttccgtcgcaacctgattttgggtgactccagctccaacaacaaggcgtttgacggcattccacgcctgatgcacgcagatcagaagatcgatatcgccggtgcatctatgactttctctatgttcgacgaactggtcgatgcggtgaaagatcttggtgctgactgcatcatgatgcgttcagagcacctgcgtgcttaccgtgcgctgctgcgtacagtaaacgtaggtccgtctgaaatcatgatggagaacttcggtcgtccgatgctgtgtcataatggcgttccgttcatcatcaacgacttcatcccgaccgatgctggcaaagcaagcatctactgcctgcatctgtcagaagagaacggcgttactggtctgtatggcggcgataacgcaggtatcgttgttgaaaacattggtactgtacagaacaaagacgcagtacgtacccgtgtgaagtggtactgctctctggcgaataagcacgataaggctatcgctgcactgaccaatgtaaaaatttaa

SEQ ID NO: 476625 - DNA, 921 bp, Shigella flexneri
atgccagaacaaaagatgaagattacggaagaggcattttcggattttacggggcatatgtgccgcgccggatttaccaattctatctccgatgaacctttaaccgagcggcaacaaagtcagctatctgcttgtttgcaggcggttcccctctcccaatccgtaaacataaccccggcttcaccgtcagttttggttgggaaaactgttcaacttagtgcaggtattagtatgggtaagagtgccagttcattcacctggaagtcagcgaatgatcaaattgcaaccgttaacggcactggattagtaactggtgtagcaccaggcaaagtaaaaattactgcaactgatcaggaaacccagctttccgcgtcagtggaagtcaccgtaaatccggtagccgttcaatccgtaacggtaacgccagactcaacctctgttgagaaagggaaatcagtcagtctgaaagcgaatgttcagccgtcaaatgcgacgaataaggctgttacctggtcttcaaaaaatgaagataaggcaacggtagaccagagcgggaacgttactggtgtagaagttggcactgcgacgattgagatcgtttcccaagatggcagcaaaaaggcaactgcaacggtggaagtaactgcgcctgttgtggctgttaccggcgtcgaaatcgacccaaatagcacaaccgttgaggcaaacaaaactgttcagctgaccgcaaatgtcgagccggcaggagccacaaataaaaccgttacttgggaatccaaaaataccgagtttgcaacggttgacagcgaaaccggtgttgtaactggtgttgcggctggtactgccacaatcgaggttactacccaagatggtagccacaaagcgacagcaactgtagaagttactgccgcacaggaataa

SEQ ID NO: 476626 - DNA, 435 bp, Shigella flexneri
atgaaaccagcaaaaattgttttattagaaccgcaattttccggttattcgggaatgctgtgtggcgttcagttcgagaacggggtatccgtagcggagttgccttttatcgatcagcagaggatttgtgcttcaatgcgagcgtcaacagtagagggcaaaaatgtttctccgtctgccgcatacagtgatcgtggtgaattgacagcagacctgattaccgagccagcagcgcctgacattgtgccaatgaaacgtgggacaccagatgaaccggccaaacagatccagactttcacacgagaagaactggagtcaattgcagacaacgaaggtattgccggtctacgagttattggtaatcaggttggtgtcaaagcgaaaggaattgtcgaaatgattgacggcatcctgaaagcacaaggtggtgagtaa

SEQ ID NO: 476627 - DNA, 834 bp, Shigella flexneri
atggcgcagatcgactcgtatcgtagcggtgaagctgtttctctttcatttgccttcaacgtgctggatatcgaatctgccacctacacagtaaaggacagcaccggggctattctcgttgatggcgagccgctagaaattaccaacggtcaaatgtcgattccggttgtcgtgtcggctgaatataaccagctctctgagaaagagcgagatctgcggtacgtcattgtgaaggctgttgcatcgggtctgacgcatgaagagcggcaaatgtatgttctgctgaatagttttgaactgtcgataccagaacagtcgtttgcaactgtcgctgatgctcaaatgcaggcgatcgatatgctgaatggggacactttgctgtcggatggtgaaggcttaatgcgcaagcgtctcattgaggctaccagacgaattaaaactttaccgttctcaatccgcaaaattctacgtatcgactttgaccgatacgatcgccctcaaaatatgctgaatgtgtatgatattccgtggggagcagatggagcgtaccggcatgatttagtcgattgggaaaagatgacgcaggagaagtttgaagagttccctgactacttcaaagaagcgttgatgcttgccgttgtcaacgaagcgtgtgagatcgcaaatggcaatgatgtagccgcagcacgagaggatggcattttgtcagagtccatcggtgaaacaaccaacatgtaccgtaccggtaaagctgcaaacgtgcatgtggctcgtagtacctggcgcttgctggtcagttacatcaacaaccgtatgattgttcgccgtgcgtaa

SEQ ID NO: 476628 - DNA, 345 bp, Shigella flexneri
atgaatatttcatggcaaacagaaattgcgctctaccgctttggcgcaaagaacgtttacggtgaggcgcaattacaattcgtcaggaagacgaatgtcggcgtggttaagttcgaacagagtaatgagaaatcgtcagttcgtgctgatagctctggtagtcgtggtaaggcgagtctggagctgtttgatgctgtgttagttgtccctttagaagcggctgtacaacttgatgatgtactgatccttgaaggtcaaaaattaaaggtgtccagtgttcatcgccgctgggggctacgaggaagacctgggcatcttgaagtaggggcgaatatatgggtctga

SEQ ID NO: 476629 - DNA, 474 bp, Shigella flexneri
atgggtctgaaatacgatgcgcatcagttcaaacgtgcggggaatagactcaacaacagccagaaagcatttaagcgatatcttattcgggacatggaaaagctggcgcgtttggttgagcgcctcagccgtgcaatggccccgctggaaaccggatctctggagacagccatctttgccagggtgattaaagaaggttattcagggctgcgcattgagctttctgtgtctggagcaaaaccacgtcaggggcatccgggcgtagaagtcggtgactatgctaagtacatggagctgggtaaataccgactcggttatctttctcgaatgaagaacgtgacaaacccaccaattgccggtgttaaacctcgtgttgggccgcactttctggaaagagcggtggaaattagcgagaagcagttctcagaagcgattcttgaggctgccagaaaagccggttttacgagaggttaa

SEQ ID NO: 476630 - DNA, 384 bp, Shigella flexneri
gtgtttatcgaagcgtttgcaagtttgatgcagaaggcaaagattggcacggtcggggctgacattttctgtcactacttgcctgccaatgtgaaatctggcgtcctgcttattaacccaaataccggcatcagcatcgatcatgagctacagggcttttatcacgaatcattcacaatcattgtgcgtggttcgtcaattactacgacggttgagaaagccaataaaatcattgagatgtttccagtagaggaaacggaatctggtggtgtgtattttcgacttgtacgaccgatggcgatgccaatcatttatcccaaaaatgatggggcattaatagaagcaggcattcctgttgaatttgctggctatttattgaattaa

SEQ ID NO: 476631 - DNA, 747 bp, Shigella flexneri
atgtctaatacccatgtaaaaaacatcaaacttggtgcctgtaaggtgtcgtttggtggtgtggatttgggttacaccaaaggtggtgttcaggttgaagtagccactgaaacgctgaaagtcaccgtcgatcagttggggcagaccgtaatttccgaattagttcaggggcgcaacattaccatcaccgcgcctctggctgagtctgtactccaaaacatggttgacctgatgcctggttctactctgagcgaagatgacaactctgtcacgatcacatctgcacagggcgttaacctgattgatgtggcgaaggagctggttctgactccgcaggacaccaccgactatgtgttgaccatcccgaaagcggcaaccgcgggcaacttcactatgacctaccagtctgatgatgttcgtgtgttctctgttcagttcagtgcgtaccctgatgacgaaggcgttcttggaagaatgagcggccctaaaccggtaaaaactgtgtcgatagcaccggaatctccaaccgtaaaagctggagaaactgtgcaactgacagccgaaatcactccagctgatgccgcagacaaaaccggtgtttgggaatccgaagaccaggaaaaggccacggtagatcaaacgggtctggtacgtggtgtggcgcagggttctacaaatatctccttcaccagcaatagcggtggtaagaaggcaactaaatcagtaacgattaaccccgcagattaa

SEQ ID NO: 476632 - DNA, 318 bp, Shigella flexneri; identical to SEQ ID NO: 469713

SEQ ID NO: 476633 - DNA, 234 bp, Shigella flexneri
atgttctggatgctcagtcgcaatatagaccgtctgcgtgcggaagaggatgtccgcaacttacaagtcgctcgtgcgtcccaggcggatggcgaggctgtgaaggcgttcatggagggtttgcaactcaggattggaagaccagtcgtaacagataaagtctacgatccaagccaggataaggcagaccctgacgccaaagagcaactgatgcaaatatttggcagaggatga

SEQ ID NO: 476634 - DNA, 4554 bp, Shigella flexneri
atgtcacaaaacgtagagtttatcctgtcgctggaagacaaacagtttacagcgtcaatcgatcgtgcggggaaactgcttactcgatttggtgagcaggtaacaaagcctgctcaaaaaatccaaacctttgaacgctctttgggttcggtcgcccgtatcattggcgttctggaaagcaagctcgattctacggcagataaactacaggatgtagctgccggttttgagcttgcttcagatgctacgcgtaaaatgcgtggcaacatcaccagcctcaattctggtcttaaagccctgattgagcgcgtcgatacgacaacttcttcagtagataaactcaccgcgtcattacgtaaagtgcaatcagagctaaatgatttctctgattgggcgacctatgcaagcaaaagcgcaagccgctttggtacggaggtcaaagaagcctctgcgtccgtgagtggcatgaatacgcgccttaataccacgacgaagcgactcagtaattggggtgtcacaacgagtcaggctgccgagggactgaaaaaggttcgtgagcagatggacgaagttatcggacgtcagcaactgattagcaagccggtacgcgttcgtacatctggaagtggcgatggtggtagcgggcggcgtagcggcgcttctggccatagcggtaaaagtaacgaaggaggtatgttctctggccttcgtggcaacattttcctgcttggcgagatcggagatgcagccagaacggttactgacatcatgtttgggtggcagaagcctattgttgaagctgcggccgaaatggaacgtatgcgggtgatgcttcgagggttgaataaggagaagtccaacccgggccaggctgccgctgatgatatgaagtacatcgtagacatggctcaaaatgcgccgttcgcgatgcaggcgttaacagactccttcgtgaagtttcgttctgctggcttagatccaaccgatggttctctgaaggcgctggtggactccgttgctcgttttggtggtgatagtgagctgttgaaacgagcggctgtggccgttcagcagatgtccggtaagggcgttgtgtcaatggaagagctacgtcagcaattaggtgaagccgttcctaacgcgatgcaggcaatggcagacgccgcaggcatcactatgggggaactgactaaagccgttgccagcggtacggttgaggcaaaacaggcgttgtctctgatgtttgttggtctgcgtgcggagaatgagaacgcagcgaaagacatgatgcaaacctacacaggtgcgctggcgcaacttcagacgtcattcacgttatttgctgatcgggttggtcaggccggatatctggattctctatcgaaggggatgaaagaactggcttcaatcatgaatagcgccgaagggatttcgtttgccaattctttaggctcggggttaacgacggcaatcgatgggttgcgtcagcttgctcaatggttagcaaagaaccaagagctggtaattaatctcggtaaggtcgtggccgcgatggttgcgttcaaactgatgcgagcagggatcatgggggtagttggcgcaggcagccagatggttagcacctttgccacgatggcgacagccatacagactccatttaacctcggcgctacagcagtaacccgattcaatcgtgcggcacgtatggggctggctccgatcccctctcttattttcgccatccgtggggcgattacggggcttaaaggcgcttttgctggattaacggcgttcattgcagcaaaccctataggggcagcatttacagttgccactgtagctgttgctggcctaatcacgtacatgaccatgctccgcagcgaaacttcaaaggtcgttgacgagattaggaaaataccagaggcgatgacggcggccaaacgtgcacaaatggccgaccgcgcagaaaagctcgaaaagcagattcttgctgatcaacgagcattaaaaactggtgagggtgttaattacgtatctaactctgccggtgttattactcacaaagagtcgaaggctgacatcgaagcacgcctgaaaaaaaatcaggaagagtatcaaaagataaccggcacgatagctcttggtgacggcgctgtagcaaagcgtttggctaaagaggctgccgaatctcagattgagaaaattcgagcggaaaaccagatttttgcggcaacattcgtgaaagcccggcaggaggctctggacaagatccagaaaatcaatgatgacggttcactttcagatgacgaaaagaacaagctattggcaccgttacgtgaaacggtaaacaaaagctatctggagcctgcgcaaaaactggttgattcactttcttctcgtaagaatgccaccgagaagcaaatagcgactcttaatgatcagcttgaaaaagccaaaaaggatggaaataccgagcaaatccagaaactgcaaggcagtatccgtggttatcaggagcatttggaagccgttgctcaggagctgactcaggcagagttcgagagagataacgcggccaaaactggtaagggcgtaatgtcaaaccaggggactgttcttgggttaggtacaactgataaagccgctcagaaggcgctggcgcaatatatgcgaaaccagatggattctgcgacttatcaacgtactttgcctgacggcactccgatgatggacttcgaaggtaagccgattattgggcctaaacaactcaagacgcagcttaatttgcagaaagcatccagcgccagctctctggagaaaatgagcgatgaagagcgtgccgcagccattgctgcactaactaaagctcgtgaacaggatgcagcagctgccgagaaagcagcccaacgatcagctaacgcctcgcagcgtgcggccaagaaggaacaggcagcgcaacagaaactggcagccggataccagaaggctctggacaaagccgatcagcttatggggcaaatgggtgaaagctctaaggctacggtatcgtttgatcagtctcttcgcgatacaacgaaatcgctgacagatttggctaatgcggttcctaacgagttcatcactcaagagatgatcgacaaggcgaaaaaacgtcttgaagacctcaaaaatgcgacacctgaatatcgcgagatgtttaatcgccgcaatgttgagcagatgatctccacttgggcaccggaggcggattccattattagtgctggctatacgccgtctcgcgaagagaaagttgctgatttcgaagacacctacaaccgcaatctcaaagcgttgatagaacttcgtgataaggcgtctgatcctaaagttgtggcgctttatacaaagaaaatcaatcaactgattgctgctggcaataccgcgcttattaaagagacggggactgcgacgcagaagttggcactggaatacgaaaacctggcagagcagatcgaaagcacctggactgatttgtttagtggcttaactgatgtcctgactgatttcgttattaacgggaagatgagcttctccagcctatctcagtccattttgaaagatatcaccaatatggtcgtgaagtcgcagatcacgctgcctctaatgaacatgttggggatgggaaccaccgcagctggtagttcacagagtggtaatttgctgaccggggttgcttccgccgttgccaatcaaggggtacgaatgggcaacactgttaacggcgacaagtcggtaggagaagccacgaaggagacgtccagttcggtaactggattggggcaaacaacacagcagaccaccagcgcaattggcactgcaacaaatgcgattggtagctgggtatcagggctatttgatagcactgaagccaaagatgccgagacaaaagccgtgaaggactccatcttctcgatgcagaacctcagctctgttaccggcgcgctgtctgccgcgtttgcaatgcttggagctaatgcttccggctctggtaataagtggttgagttttggagcaacggttgcatctggtcttgtttcagcttgggctggcggtggtttcgacagcgtgacatcaagctctgctaaaaccgcaaccagcagtgtggctgacggaactaaaggcattcctgcaatcccgaagtttgcaaatggaggaatattcggaaaagacggcgtgatcccgctccgggcataccagaaaggcggtattgctaactcgcctcaattagcgttgtttggggaaggttctatgaatgaggcgtatgttccattgcctgatggccgaacaatccctgtaacgctcagtaccgatggtatgagtggaggcggaaatgttctttctcctgtatcaattgagatcaacgtccatagtgacggtagcacgacagaatccggcgatacagaaagcatatggaacaatgccgctcaacggatgaaagcaatcgcgcttgagactatcgctcaagagaaacgccctggcggatcactcaacccaaacactcaacgtaactaa

SEQ ID NO: 476635 - DNA, 336 bp, Shigella flexneri
atggaaagacaaacgtttaattggtatccagattacgaatctgaaaaaagcgtaaaaccgaatgtaacggtacttaattttggtgatgactacgagcagcgacaggctcaaggtcttaatcgtattaaagaagaatggtcgttaacctttaccagatcatacaacgaaattaatgcaatcgatgacttcctgactgagcgatcaggcgttgaatcgttctattgggttaatccaagaggcaagcagattgtagttgtatgtgacagtcatacggtcaagcgatatcaggggtactgtgtcttaactgctacattcagacaagtatttgaggcttaa

SEQ ID NO: 476636 - DNA, 699 bp, Shigella flexneri
atgggaattaaagctgatattcagagcttatctccctctgcactcattgagttgttcgtattggatatgtcgaacacaacttcaggggggaagctattcttccacgccggaacaaacgaactgatgcaaccggtcgtctggcaaggagtgacatacgagccgtggccaatcaaagcatcaggctttgacaaaactggccagggaacgttgccacgtccaaaaattcaggtatcgaactttgccggaaccgtctctgcggaagttcaggcgaacgacgatcttgttggctgccgcattattcgcaagatgacgctggctcgcttcctcgatgccgttaattttaaagacggcaacccaacagcagatccaaaccaacatttcccggatgaaatgtggtttatcgaacagaaaactctcgaaactcgtcaggttgtcgagtttgaattgtccagtgtgttcgatttgatgggggtgcaactgccgtatcgtcagatcattaaaaacacctgcccgtggaaataccgagggccagaatgcggctataccggtccatatttcgacaaaaataaccagcagacgtctatgtctggtgcggattactgcacaaaacgttatgacgcctgtaatgcgcgtcggaattattttgccgacggtgtgatccattttggcggatttattggagctacgcggtatgggtaa

SEQ ID NO: 476637 - DNA, 798 bp, Shigella flexneri
atgggtaataaagcaatccctgagcttggctctgacgttatgcagcaaatctatctctgcgccataaatcgctaccctaatgaagcgtgtggctttctggttagaactaatggcgacaaatatcgctttatggaagcgcggaatgtttcggagaacccgcagaacacttttgtaatgcacgttgacgacattatggcggcagaggatgcgggtgatgttatcgcaatctggcattcacatactgatgaatcagcagaagcatctgatgccgatcgtgcaggctgcgaagcgacggaagttccgtggatgattctggctattcgcaagaatgttgagggagatgcccctttccattttagcgagatgaatgtgatcacacctgatggtttcgaaatgccatacctgggcagaccgtatgtatttggcgtattcgattgctggatgttgtgtcgggactatttgaagcgtgagtttaacgtcgaactaaacccgaacgcacacctgcatattccatcgtggtacaccggcgataacgacattctcgatcagaactaccgtaacgagggattggtgcgtcttgcgcccggaacagagcctcaacgtggggacatcttctttatccaatacgggaaaatgcctgaccactgcgcggtttatatcggcgatggaatgattcttcatcaccagatcgaccgcctaagttgtcgtgcttattacggcgggatgtatcagaaacatacgacgcatcacttgcgtcacagagacttgctcaagggagatgagacgtgtctgagttag

SEQ ID NO: 476638 - DNA, 591 bp, Shigella flexneri
gtgtctgagttagttcatgtgcagcttggcggccctatggccaaacattttggccgccactggcatctaaaggtgcgtaatacaaaacaggctctggatttaattgaggccaacaagcctgggtttaaagcatggatgaagcgcaatatcaaaacctatgacagataccacatccagatcaccaataaacagggccacaagtggtctgtggacgagagtgaatatcagatgatggggcagtctgacaatattgcaaaaatccgcattacccctgttccgcgaggaagtggtggatctgcttttggatggtttcagacggttgttggagcagtattaatggttgcctcgatatgggtgcccgctcttgcgcctctcggtttgtcactgatgatgggcggtatagcacaaatcatatctccgcaagccactaacgaaagtgtgaggcaggcggataactcgaactcttattactttgatggacctcaaaacacaacaaaccaggggaaccctgtacagcttatctatggcgaggaaattttagttggctcacaggtcgtgagttcttctatcaccatcgaccagcttatgtaa

SEQ ID NO: 476639 - DNA, 4725 bp, Shigella flexneri
atggaacagttcaagaagaaaaaattaccgcttcttattgccggtgctggtggcaagaaaagtaaaagctccagccgtaccccggttgaagctgatgatactgtcaattctcgtgctatggcagccatcctcgaccttcttggcgagggggttatcggtggcctggtaaatggcgcaaagtcgatcttcatcgacgatttaccgatcttgaatgaagatggctcttccaacttcagcggtattacatgggattttcgtgacggctcacaagatcagacgccaatggctggttttgattttgtcgaaacgcctaagtccgtaaatattcagcttaaaaaaacacacgacgttacggtttcaatcgataacgatgaagctgatcgcgttcgtgtcatcatgaaattcccctctttacgtagcgttgataaaagctctggcgatacaaatggcactacggtgaagtacaaattccagatcgccaacgcagacgcaacattttctgatgtagtggcagaaggtgagaaaagcgttgatatcacgctaacggcaaagaaaaccggcgtgtattaccgtagctatgagctgaaactgcctaagcctggtcgtgcatacaaggttagggtgattcgtcttacagatgataatagtagccagtacctctacaacgacacatgggttgattccatcggtgagattgtcgacacgccaatgaactaccctaactctgctcttgttggcttgaaggtcaattcagagcagtttggtagcacaatgccttcccgttcgtatttggtgcgcggtatcaaaatccgagtaccgtcaaactacaacgaatacaccaatacttatgtcggcgtatgggacggtacttttaagctgttgtcttcttcaaaccctgcgtggattctctacgatttgcttaccaatactcggtatggtcttgggcaatttgtgtcggaatccatgattgacctcggccagctctaccagattggtcgatattgtgacgaagaggtcgatgatggctttgggggtaaagagaaacgctttgcaatcaatacgcagatcaccagtcgacaagacgcataccgattaattcaggatattgccggtgcattccgcggcatggtgttttgggctggtggcatggttaacatcatgcaggatagcccatcagatccggtaatgatgtttaccaactccaacgtcaaagatggactgtttacctataaaggttctgcgcgtaaagatcgcccatccgttgcgctcgtaacctacaacaacaaggaggacggttataagcaaaacatcgaatacgttgaagatcaggacgcaatgcgccgttatggtgagcgtaaaacagaagtcgtagcatttggatgtacaagccgaggccaggctcaccgagttggtttgtggcttttgtataccgccagaatggagtcggatgtaattacatttactgccggcttagacgcctcatttctgatgcctggtgaaaccgttctgattcagaacaaatatcgtgcaggtaaacgtaactccggtcgaattgtggagtttaccaaaaacagcatcactctcgatgcgcctgtgtcgttagctaaaagtggcagctttattcggatattgaatcaggaaggcaaaatcgttgaacgcgatgttcttgaaactggcgaaaacataacaaaggttacgttttcaaaagccctgtcgtcagcggaaacgcctgttttgaacggtgtctggacaattacagaaccagatctcgaacctatgcgcgttcgcatcgttaacatcgcgcagggggaaacgccgggtagctttgacatcaccgctgttgagaacaatccgtctaaatatgaggcaatcgacaatggcgcaacgctgatcccgcagaatacgacggtattggacccaacttactccaagccatctaatctgcaaatcactgaagggacttatctctcaagcccgggcaacctgtcagtaaaactgactgcaacatgggaaggaaaatctccagagtattggatcagttggcgacgttctgatgaaaacaatgtatcgaactggcaatcggcgcgtgtaaccgaagagcaatacgaaatcgttaatgtcgcggagaatggacactacgacttccaactgtatgcggtttcattcaacggtaaaaaaacagagattatcagtaccgtttatcaggtgttgggcacaatgacaccgccggatgccccaacgtcattaacggccgttggagactatcgtaatgtgatactgaattgggttaatccagattcggtagaccttgatcacattaatgtttacgcatcccagaccaacaatctggatacggcgaaactgatcgcagagtctgcaagcaccacctttacacatgctggtcttggggatagcgaaacgtggtattactgggttcgagcatcgaacaagcgaggtatgttaagccctccgaactcaaacttgggtacagaggcgacaactcgcgatgtactgtcgttcctggctggcaaaattacatcttccgagcttggtcaggctctgcttgaggacatcaacagcaaagcctctcaagaagcagttgacgagttaaatgagcatatcaaccagagcgtcgaatctttggagggggcggtaaacgacgttaaggaagatatagctgaattagataagcagttcagcgataacctcgcggattttgaaataaaattcaacgagcgtagcgatgctttggagagcgcgcaaaccgagcttaaaggtgaggtttcggcaacgatcgacaaggtcaatgaagcgtttgaaaaaattgatgctactgatgctgcaattgttgaaatcgaaaacaccgtatctgaacacgataaagctctcgctaatacagtcgaggcaataaaggctgcaagagatgaagcggcggctcttattgctaaggaaagcgaggctcgtgttgaaggcgatgctgcaaacgctaaacaactggaagtgttgcagtcaacggtagaggaaagctccgctgccgttgaagaaatgaaaaagacggttgcagaggtcgatcgtgccagtgcagaactgactacgaacattgaggcgttagccaaaacaaatattgacctggctcttcgtcaagatgaagaccagcacaagcagatggtcaataacgcgaagatcgcaacaacacagaaaacctttgctgatgatatgtctgcaatggccacgaaggttgaggaaattcgcgtagaaattggcgaagacattaaggccagtattctggaagagtccaccgctcgtgccgatggcgatgaagcgttggcaaagcgtgtcactcagctgcaatctaagtttgaaggagatatcagcgcggcgattagtacagagcaggaggctcgcacatctgccgatgaagctctgacgacacagatcactcagcttgagtcgaaagtaagcaacgatatcgtcgcagctattaaggaagagcaagaagcccgagcaacggaagattcggctctggcaagccagatcacccaacttcaggcaaaggttgatgatgatatttctgctgcaatacgtagtgagcaggaggcccgagcaagcggggactctgcgttagccaaacaaataaaccagcttcagtcaaaggttgacggtgatatatccgcggccatcactcaggagcaggaggccagagcaagtgctgaccaggcgctctcacgagaaattaacagcctgcgagcacaaaccggaactgatattgccgcagcggttgctgtagagacaaaagcaaggactgatgccgatagtgcattgtctacccagattacgtctcttacagcaaaagctaatgatctcgaggcgtctcttgccagagaaacaacggctcgtgcagatggtgataccgctttaacaaaagaggtttcaagtttaaaagcacagacagcgaaagatattagtgcggccgttgcagttgaaacgcaggctcgaactgatgctgactcggcgttgtcgtctcagatcaccaagctgacctctcaatacaaagaggatattaaagcggctgtagcaaccgaaacgaaaacgcgtacagagcaagatgctgcattggcgactcaaatcacaaacttagagtctcaaacggcagccaacatttccgcggcggtaacaactgaaacgacagcgagaacgcaggcagataatgctctgagtgggcgaatcgatactctgaaagcagaggtggatggaaataccgcgacaattcaacagcaggcaacagctattgctgataccaacaaaaaagtgtcaaccgcgtggacgttgaaaatggaaacttcaacgagcggagggcagaagtatgttgccggtattgcgcttggtattgacaccactgggctatctcagtttttggttcaggcggacaggtttggtttggtcaactctgttaacgggaagatcacaacgccatttgttatcgaaaacagtatcgcctatatgaatggagcgtatatcaaggatggcacaatcaccaatgcaaaagtaggcgatctgcaatctaccaattttgttagcggtagatctggatggcggttcggcaaaaatggaacgcttgagatcaacggtaatagcgggggtaatgggcgactggtcataaatggtcagcggattgacgtttatgacgataacaacgtcctacgagtaagaattggccttctgtaa

SEQ ID NO: 476640 - DNA, 4158 bp, Shigella flexneri
atgtggtacagggaaggtactatcacatttacacagggcagcaatactctggttggggcagggacagcctggaacgtaacagctaatggtgtgttgccggggatgatcgtcattggccccgacaataagctgtatgagatcaagcgcgtaaccagtgatacgaacattgttctctcagaaccttataccggcgaaactcagtctgaagttccgtgccgaatcattacgacctatgaaggcgacttaacacagtttagcgcgcgctttacagcactaatgtcgcgtatgtcggctgattccaagtccatgcgcagttggttgactgctctggatgaggtgacaatcgagcgtgaagacggtacagaagtgaccgttaagccgctaatgcagatcgtcaacgagcacaacgaaaacgttgagtggtataaaaataacactgacgcgattgatgctgctggcgacaaagctcgtgaggcggcggccagtgctgccgcagcagcagaaagcgccaatatcgctggagaaaaagcctctcaagcgtctcaaagtgcatccgctgcagagtcctcaaaaagcgcggcggccacaagtgccggtgccgcgaaaacgtctgaaacgaatgctgcagcgtcacaaaaatctgcagccacttctgcatccaccgcgaccacgaaggcgtcagaagctgccacctcagcccgggatgcggcggcctcaaaagaggcagcgaaatcatcagaaacgagcgcagcctcgagcgccagtaatgccgcttcctcggcaacggcggcaggaaattccgcgaaggcggcaaaaacgtccgagacgaacgccaggtcttctgaaacggcagcgggacagagcgcctcggctgcggcaggctcaaaaacagcggctgcgtcgtctgccagtgccgcgtcaacaagtgccgggcaggcctcagccagtgccaccgccgccggaaaatcggcagaaagtgccgcatcgtctgcttcaacagccacaacgaaggctggcgaagccactgaacaggccagcgcagcagcgaggtctgcttccgcagcgaagacatccgaaacgaacgcgaaagcgtcggaaacccgtgcagaatcctcaaaaacggcagccgcatcgtccgccagttcggcagcgtcatcggcatcatctgcgtctgcttcaaaagatgaggcgaccagacaggcgtcagcagcgaagggcagcgccacgacggcatccacgaaagcaacagaggcggcaggcagtgcgacggcagcatctcagagcaaaactgctgctgaatccgctgcgacccgtgcggaagctgctgctgatcgtgctgaagagattgccggtgcagttgcgatggaagacgcaagccttacaactaaaggtgttgtgaaacttagcagtgctgtcgacagcaccagtgaatcgctggccgcaacgccaaaagcagttaaagtagtcaatgacaatgcgaacagcagggtgccatctaaccgaaaaattaacgggaaagcactgactgcggatatcacattaacgccgaaagatattggtactttaaattcaataacgatgtctttctctggcggggccgggtggttcaaactggctactgttacaatgccacaagcgagttccatcgtttacatcgcattgattggtggcgctggttacaacgtcggctccccacatcaggcaggcatttcagaactggttctacgagcaggcaatggaaaccccaaagggattacaggtgctttgtggaagcgtacagctgtcggattaacgaatttcgcctggatcaacacatccggcgatacatatgatatttacgttgagattggcaattatgcgactcgtgtaaatatccattgggattgtactgcaaatgcgacagtttctatttatacatcgccaacatattcagctagtaagccttccagcgttaccgatggtgttgtttatacgatgtatagcacacatcagaaaccgacgccgttagatattggagcactgccaacaaccggaggaacagtttcaggtccgttgtctgttactggtgggatcaccggaacattaaatggtaatgcaagtacagcaacgaaattgcagacggcaagatctatcggtggagttggtttcgacggttctgcaaatatcaaccttccaggtgtaaatactacgggtaatcagaacaccactggtaatgctgcaactgctacaaaacttcagacggcaagaactatcggcggcgtgagctttgatggtactgcgaatattaatttgccaggtgttaatacgactggtaatcagaatacaacgggcaacgcggctactgctacgaagttgcagactgcgcgtactatcaatggggtgtcgtttgacggctcggcaaatatttccttgtcgccagcaaatataggttgcccggcatctcctactggttggttaactacaggaagtaatggcggagcaataacaacagcacagttagtgacgttattgcaaaataatggagcatttaacacaaagtcatggattgctcgatgtgcttgggcctatgccaatagtgcaaccataccaaatagtgaaactggttgtggcgttattccattggcaggagctgttatagaggtatttaataacggtagtagctcaaacaattatacgatccgtataacaacggccacaacgacgagtgtctctggtgctctcactaatgcggagtttatctatgtatttaatggcacagattattctccgggatggcgaagagtatataacacgaaaaacaaaccaacagcctctgatgtcggtgcattacctcttaccggtggtacattatctggaggtttgacatcttctggcgagatcatttcaaaatatgcaaatggtttccgcattgcttacggtagctttgggttctttatccgtaatgatggatcgaacacatatttcatgctaacagcatcaggagacacattaggttcatggaacggtttgcgaccaattacaattaataataccagcggtgctgtatcaattggtaatggactaaatgtgactggtggcgtaaatggtagtttgaacggtaatgcttcaacagctacgaagttgcaaacagcgagaaacatcaatggtgttaagtttgatggctcaggcgatatcaacattaatacattggtatctcgtggccgagttacggcgttaagcggctctactcaaggcactgctggcattcaaatgtacgaggcgtacaacaatagctacccgaccacgtatggcaacgtattgcacatgaaaggtgcgagtgctgctggtgagggcgagttgcttattggctggagtggtacgagcggtgcacatgcgccagttttcattcgctcacgaagagataccacagatgcggcatggtcagcgtgggcgcaggtatatactgctaaggattcaatccctggtgtgaatacaaccggtaatcagaatactactggtaatgccgcaacagccacaaaattgcagacagcaaggaaaattgctggtgtggcgtttgatggctctgccgatattactttgactgcggctaaccttaatgcttatacgaaaacagaggtaacaaaccttctaagttcctatgcaagcagatcatcactgacaggctatagtggcaacctggatattattgctgaaacactggttgtcaaatcaggcggtagtggagggtttgctatatgggatattggcacaactactagcggtgccaatatgtacattgatccaaaccctggtatcaatacagtttggcgttcaacatcttcaaggcgctataaaaaggatattgaaacattacaagatcgatatgctgatgaacttttgtcattaagacctgtttggtatcgttcaatttgtcgaggtgaccgaaaggattgggggtattacggccttattgctgaagaggttggtgagattgccccgcaatatgtccattggcgtgaaccaacaaataatgattctccagaagatatttcctcaaatggtatggtcgctgaaggggtgatgtatgagcgtttggttgtaccactcattcatcatattcagcaattgaccaaaagggttgaggagcttgaaacgaagttaaattcacctaaagaataa

SEQ ID NO: 476641 - DNA, 255 bp, Shigella flexneri
atgagctatggtgcacaggtatggtcgccatcaagacaggagatggtcgatgcgttggcccctgtttattacctcgattattttactccctctggttctggaagtagaacatatgaggttgaggcgggattgggaatcgactattacataatggacgtaaccaatgggaaatacacaagtcttacggtttctggaaataccatttcatggtctggagctagtggcaatttaaacatattggtttttcaaaaataa

SEQ ID NO: 476642 - DNA, 609 bp, Shigella flexneri
atgtacggaagcaagatatatcgatctgacgggaaggtctggatgtctccttctttgtctcctatcgtctttcagagaaagcaggttgtttctttgtctggcgggacagagtttaacacccaaatatctccagatcgttcaccgatgatttttgttgcctattcgaaagctgtttcattaatagccaacagaatagtgcgtaacaaccaggtgatttacagtttcggaggtcagggtagcgactctagtgccacgatatacgtattttcgaaaggtatagccaaaaaagaaacttggggcatgagttttttcaatgcacaaggggaggaaatctataatacggcaaatatcccactttcatttacctttcttaataatacggagtggaacagctctggagggcatgtttttgattacccaccagcgataatcccaacatatgcgaatgtgttcgctgttccagtaccgggcggagccatgacaatggtttatggatatgcggcatatggaaatactgttagctcgatattcgtaaaccaacttaatggcggccatagttttagcgtaaatggcagagtaccggtaataaatagaaatctgtataactga

SEQ ID NO: 476643 - DNA, 231 bp, Shigella flexneri
atgaaaagattatttctaacaatagctgttgttctctctcttactggctgccagaaattgccgacacctatatgttacggtgaggctatcattggtggacaggagacagtcatacccatatatgctgttaaaaaagtgaacgactataccttatacaaagcgggtagcatctataactggcgatgggtaggagtaggtgctttctcatcagtccgttgcaatgttgaatga

SEQ ID NO: 476644 - DNA, 324 bp, Shigella flexneri
atgtcgaacgagatggcgggcgttacaacagagcaagttgagcgtattgccgcgatcgttgctcgggaggttgttggcaaattaggtaaagagctacgtgaagaaattggccaggaggtcaatgatcagctgaaaacctactttggtgatatgaccccggcgcaacatagtattcaacactccaacctggacaaactccttaaccggttagattccatctccagtgggttctttggcggcattgtttctaaaataacgtcgttcattattactgcactgcttttggggttagccgcgtatggcgtaaaaaatggactgcaataa

SEQ ID NO: 476645 - DNA, 693 bp, Shigella flexneri
atgaagactccgagaggcattcgtaataataaccccggtaatcttgataaaggatcaccgtggcaaggtctggttgcgaatccagacgaaccgcgcttttgcacgtttaaagaccctgtttgggggattcgtgcgctggcggtgactctaattacctaccacgacaaacgtcgcgcaaaagacggctcaagtatcgataccattcgtgaagttattgaacgttgggcaccgccgaatgaaaacaacactgacgcctacattaatgaggtgtctaaagccgttggtgtaaccgcagacatgatcatcgatctgcatgattacgacatccttcgacctttggttgaggcaatcattcgccacgagaatggtcgaggtccactaaaaacgctgaacacctggtatgcggcagaagttattgaagaaggtctgcgtcgagctggcgtcgttaagccggtgaaaaccgtgaaggctgttcctgtaactaaagaaaccgcaggcgcaactgtcacagcaggtattggtctggcgcagcttgccgatgttatgccgcaggtttccgctgctatggataaagcacaaggtcatatctctagcggggatacagtacgcatcatcttcggtattgccactatttttgtggccggattcattgcctggtcgcaggtaagaagacaccagaaagggatggtctaa

SEQ ID NO: 476646 - DNA, 252 bp, Shigella flexneri; identical to SEQ ID NO: 12111

SEQ ID NO: 476647 - DNA, 522 bp, Shigella flexneri; identical to SEQ ID NO: 12112

SEQ ID NO: 476648 - DNA, 306 bp, Shigella flexneri; identical to SEQ ID NO: 12113

SEQ ID NO: 476649 - DNA, 669 bp, Shigella flexneri
atgaccaagatctttgtggttggcggcacaaagggcgggcctggcaaatccacccttgcccagcaaattgccgtttgccttaaagtcaaaaagaagaagaaggtttatatcactgatatagatattcagcgcacgacaacaagctggtgtgaagaccgtcgacagaacgaagaccttgagctgattccttttgcatacgttcaggatgacatcattaagcacctaaaatcgcttcagggtagagctgagtatgtagtggtagatgctggtggcttcgactccgaaattcagcgacaagcgatgctgatggctgacgttatcattatcccgctgcgtcctaagcgtcgtgatttgaaatctttacgtgacatcgatcctattatcgacaatgttcgcaatgtaaacgataaagtgaaggtccgcgcggtcatgaaccagtgcccggctttgccatcacaagtgtctcgcattctggcggctaaagagattgttgagacgtttggaatcgagtctgcgccagtcaatctgtataaccgcaacgtctatgatgatgcggaagagtctggtcgttctatctttgaaatgaccggtagcgagcgcgacaaaaaggcggaagccgagtttgaagaatttgtagattatctgttgagtctggaggaagaagaataa

SEQ ID NO: 476650 - DNA, 360 bp, Shigella flexneri; identical to SEQ ID NO: 12115

SEQ ID NO: 476651 - DNA, 768 bp, Shigella flexneri
atggacgatttatcggtatacgcgagatcattggataaggctaaatactatgtttactgtctctatgatacagaagacaagatgaaaagaccgttttacataggaaaaggcaaatcgactcgttgtctcgatcacatcaagtatcccgatgactctcccaaatccatgcggatcaaagaacttttggctaataaaaaattaggcatagatatacttcgtcatggtatggatgaaaccacagccaaacttgttgaggcgacatgcatcgaccttatgggggtcggagagcttacgaataaggtacgaggaagtggttccatgatgggcagaatatcactggacgcctaccatcacttagtgctgcaagaggaaactgaaattgctcctgagcacgccggtcttgccttcctgctaaacagcacctacaagtcaggaatgtccgctctggcattatatgaagctacgcgtggcgtatgggcaaaggttccaagagacgagaatctcaaatatgcctacgctacatatggtgggctgataatggaagtttatcagattgaatgctgggtcaaagccggttctcagcagtactttacaagggatatagctcttggccccgacacaaaacgttatgaatttgttggcagaatagccgatgagcatattagaaaactgtatgtaggcaaattaatcaagaagccaccaagctacggtagcccttttgtgaaggttggggtggttaggactgaacatagtgttagcgcggcataa

SEQ ID NO: 476652 - DNA, 741 bp, Shigella flexneri
atgagccaaatctttttcgataccatcgacaacgaccagtacgacttcatgacagagtggaataccgctgttatggacaagtgggtcgctgaaaacattggtttgtcgcgctgtaaagacgaggctgaactcttcgagacgaagtggtttgattaccgcgacatgcatcctctcatggccacctgtctttttacggaggcatacaaacgtcagtactcaaatatcatgctgacgcacggtcgcgaacactttgaaacagctccgttcaccaccgggttaaaacgcctgccttatcaggagttgtcgactgccaataaaacgtcgctatggaaagcacgccagtttgcggatcgctattgctgctcatacgactactttatctccaccgttctttccgcagctgcacgacggctgtgggacaagctgccgcgcccacagcatttgtggcagccagagctgattgagatattcgaagagaaattagccagacgcgcaacaacccgtctggatgactctctcgttagctttaagcatatgggagacatgcagttcaacccgattcaggaaagctattttgagtggattctggagcgtttacgcaccatcccccgcagcaagcgcatacgcgcaattttctccgctatctggctaatggaaatcgttccagagcgccttatttccgcccactttccagaagaactggaagaagcacggcggtttattgatcccctatctaattaa

SEQ ID NO: 476653 - DNA, 1341 bp, Shigella flexneri
atgaccgaactttgccatacaggacgcgggctgtccgaagagtttgatgaagattttcagaacagattgacggcctatttttgtcgtgatcacgagtttcttactcgtgctggagatctggttgtacctagccaatttgccaatgcggccaatgccatattggttaatatggtttcgggctattaccgtatgtacaagagcgcgccctcttcatctgcgattctggatatgcttaagcgtgcgaaacgcgataagactatccgtgaggaactattcgccgatgttgttgctgcgtttaagcgcatccttgcagaaaaattgtctgatacctcgtacatggttgaccaggtatcaaccttcgcaaaaagcgtagcgtttgatgatgctctgattaaggctgctgaactgaaagagaagggcgactttcagggggcgatggcaatcatggccaaggttcagcagattggatcgaacgaagcgaccggaatctatgactactacacctccgcaagtgagcgattgaaagcgcgtgaatatgaggcttcagaggagtatgtgccaaacagcattacaactggactccctctgctcgataggttgctgtaccaaaaaggctgggcgaagcgtgaaatggtgctcttcatggggttcgctaaatccggtaaatcgaccgcaatgggtgagttttccataaacgcaacgcttgctggctacaatgttctgtatctctcgctggaggttcacaccaccattttatccgaccgttttgatgcaagattgtcggagacagaaatgtccaagctggtggaacggcgcgatgaggttcatcgtaagttggcagagttgggagccacgaaggggattggtagtttgtgggttgttgagcgtccgtcaggaagtatgtcaccggcagatctggaccgtatgcttaacagcatgaaagccaatggcatggtgcctgacatggttgttgtcgactacgcagatttgatgcgtgccagttatgaccttcgtgatgatcgcgccaacattcgtagtatctacaccgatttacgtgctctttatgacaagcataacgttgctgggatcacggcatcgcagacaaaccgtgaaggtggcgcgtcagaagttgccacaatgatgcacgctgccgacaatatcgaaaaagtacgtattgctgacctggtaataacgatcaacaaaaccgaagaagaagaagcgaaaggagaggctcgtctctactttgctggttcacgtaaccagcagggagggatcagcattcgcgttaaacaaaacctcgaacaaatgcgcttcattgagcgaatcttagacgttacctaa

SEQ ID NO: 476654 - DNA, 1116 bp, Shigella flexneri
gtgagcgagctgaaagagctaattaccgaattagattttgaacaatggttggatactgaaggtatcgtttatcgacgtggaggcgtgagtactcgcggtcgtgaagtgaatatcaaggagtgtccggtatgtggcagctccaactggaaggtatatttcaatctgaccagtggcgtcggtaaatgcttcgctggtgatcatcccgaagagattcagttcaataagctggtcttcctcaagcactacagcggcaaatcacgacgacagttcgaggaatatgtgcagaacgcccttctttcccaggggtgggcaccaaagaaagaagagatagtgcttgcaagcacagtcgagttagagggaccacttgcactccctcgtcattacgaacttcctatagatggccgtcttccagactatctggttgaacgaaacatatcgcctgaaatggcaaagtattttgacctacgatactgcgtcgaaggcaagcacgcttatgtagatccgtatacagatcaggttaaaggacagatattcgatatgcgaatactgataccggtttacgatctggatggggtaatgaagacatttcaggggcgagacattaccggtacagctgaacgtcgctacctctttcctatgcagcttccagcttcaggtaagtttctctacaacggccataatgcggtcggcaaacagactgtagttgtctgtgagggggcgttcgatgttatgggagttaaacgagctatttttgatgaagaaacattacgtgattacgtggaaccgataggaacgttcgggatgcatctatctggtaacaccactcaggatgcagaagatcagttgggcgcgttcctgacgctcaaggcgcgtggattacgtaatgtgatcatgatgtgggatagtgaaaagcaagctatacgcaacactatggccgcagccaggcgactgaccagtattggtcttaatgtcaaagtagcatgtttgggcgaggaaggactcgacccaggcgatgcaacgccagaacaaattatcaaagcctattatcgggcaaaaccgtataccaaacagttggagttgcaaagcaaggttttgggcattaaggcgctatcgtaa

SEQ ID NO: 476655 - DNA, 783 bp, Shigella flexneri
atgaaagacgaaattcagaaattagcctgcgacatcattgataaaactggtttagaaatcagcgagtgcaatcggctagacatcattgaaaaagccgtaaaaacagcaatggatcatatcgccactcgtttggtcgagatcccgctaccggggctaccttatctgaaggttaagttacacgtatggggtgaaccttcttgtgcacggcgttatgcattagttgtttttattagcaaagaaaacccgatcagtcttaaagtgcaggttggggcatggatggatggcaaagtgatctacacaaataccgttttttgtgcgtcaaatgacagtattattgaagaggctattcaagaatcacttctaactatgcatagcttagttttgctggaagacaagcaaaactacgaagagtacttacggtcgataaaaggtgagagaacattgtcacttaaagccgatttcgttaccccgacaaacctgttggaagtcttgcttaataaaggggctaatgatgccgtaaatgtaatcagggagagcgaatattcgactctttgggacatgtgcaaaagccagttggatctggtgcatatcgttattgatgctgggaaggcatgtgatggcgtaatggcggaatttgctgggaaggtggtcaggattgctaacgaattaccgatgatagagcaagaggccaaatcatacgccaccaatcatgtcacagagcttcttgtcccctatcgcttagaaagcaatcagcgcaagatggttagctggggaagttggtaa

SEQ ID NO: 476656 - DNA, 258 bp, Shigella flexneri
atgatggttgaagagattcgtaaaggagaatctctgtatttcgaagatatgaccgcgctcattaaggaggttgaagaacggaataaacaagccagaactataaaacgaaaacgtgacagtgtaacgattaatagcatggttaagaagagcaccacatcacaaacagcgatcactgacgtgtatgcggcgttgcttgaagaaacaacaaaagaaacacatgagcaaatcgatcaacatatggaggcaaaacaacaatga

SEQ ID NO: 476657 - DNA, 1323 bp, Shigella flexneri
atgaaaaagttgatcgcacttaagcataagctggacgaaatgaaagctatgggaaccaatgcaaaaaaagaggcattggccaacatggatgacttcgagcaaagcatggtttcattgatgctcaaccctttcatccgttttggggtaaagaaatacaaagtggcagagccgcttagtgagtccgtcccaagtgacgaaaaagccattgatatactgaataagctggcctctcgcgagctgacggggaacgcagcaatagcagctgttgagtctatcgtggcgtcaatgtgcgccgatgggcaggacgtgttccgtcgtttcctcttaaaagacccgaaagcaggtgttgggattagcctatgcaacaaggtttttgaaaatcccattccgaaattcgaggtgcagctggcgtcaccgtataaagaaaaaggcgacaaataccccttcaagccaaatcctaaagccaaatggccgatgattggcagccttaagctcgatggtttgcgagtaatttgcgaggttattgttgacgaggaagaggttaacttcctttctcgtactggtaatccaatcacgtctctcgatcacctaaagccagccatgctcgaattaggcaaactttcaggccacaaacacatcttcttcgatggtgaaggaacagccggttcatttaaccagtccgtatctgcattgcgcaaaaagaacgtgcaggcaattggcgctatttatcatgttttcgacttcttcctaccggaatggcgggcacaggctaaatccaaagagtatgcaaagacaggtatgaagctgaaagagcgcctggctattctcgtggcgttgttcaaaaacgatcgcagtgaagactacgcgcaagacattcacctacatccgttctacatcatccatagccacgaagacttcatcgaacgcttcatgaaacgcctggacgataacgaagaaggggagatgggcaaagatccgaactctgtttacgagtttaaacgtacccgcagctggtggaagttaaaagacgaagattcagaagatggtgaaattatcgactttgagccgggcgacccggactctggttttgccaacacacttggaaaaattgttattcgtcttgaaaacggcgtcatcgttcgtgcgagcggcattaagcataaatatctggacgagatctggaacaacaaagagaagtaccgtggtcgtattgtcgaggttcattgtcacgagaaaacaccggacggcagcttacgccacccacgactgaaatggccgcgttgcttacgcgatacagaagatcgaatcggagataaagaatga

SEQ ID NO: 476658 - DNA, 180 bp, Shigella flexneri
atgatgctcggctggatgattgcatttttagcggttggttttttaatcggtattgtggtgatgtccagttgcatcaatgactacattaaaagcggtgttatagaacgacgcggtcgtatttatcgcattgtagaaataacccgcacagtgaaggagattaaggatgatcgtattaagtaa

SEQ ID NO: 476659 - DNA, 216 bp, Shigella flexneri
atgatcgtattaagtaagcgggagaaggaaacgcttcatgaaatcagtaagtggccggagttccctgagtactggaagcctaaaacgcgggctaagttagagcggttagggttggttgcaaacgtttctgaaacgtggtgttcggccaactaccagttaactgataaagggaaagtattgctacagcaattagtagaatcaggagcgttaaaatga

SEQ ID NO: 476660 - DNA, 153 bp, Shigella flexneri; identical to SEQ ID NO: 12125

SEQ ID NO: 476661 - DNA, 291 bp, Shigella flexneri
atgagcaatttaacttcttgggactggtggttggccacctatttcttagcggccggagtcgcattcgccttttacgtaggtcagttagtcgtaaaactgctgctgattaaatttgccagtcataaacgtatcgatgatggtctgtggcgtcttggcaccctggtggaaactcgctacgggcaacttaaggagaacgaaaccattactatccaagcgaaacgattcactgccaccatcacaagaacacctagtcgtagagtggccttgatcaaaaaagtcacaaccgaataa

SEQ ID NO: 476662 - DNA, 351 bp, Shigella flexneri
atgaccagcaaagataacacaccactaaaagtcacccctgaacacattgaacaactcattcaaagtgaacattatttcactgcatatgatgccagccacggggataacttcatctccgtttacaattcaaaaacagatatcgacaaatgtcatgagtcgttaaaactcttaacgttctgcgttatggttctcaaaaatggatataccgtaacgggaaaatctgcgtgcgtaagaccagaaatcttcaactttgatgttggtcgcgagtacgctcgaaaagatgctatcgatcaaatctggcccctggaaggctatctcctgaagcaaaagtggcatgaggcaaagcaatga

SEQ ID NO: 476663 - DNA, 246 bp, Shigella flexneri
atgacgatcactatctacggacgagataactgctcattctgcaaacgtgcggtcgagctggcgaagcaactaaagggacatggctacggtgattatgagtacatcgacatcaccactgccggtatcgacaaggaaaaactaagtgaaattgttggtaaaccggtagagactatcccccaagtgctgatcgatggccaaccgattggcggatacacagaactggctgcatacgtcagcaccctctga

SEQ ID NO: 476664 - DNA, 1104 bp, Shigella flexneri
atgaaaaatagctttgacagagcacgcgctgcggagaacacctcaaaagaggcgattgagtatctcgaaagagcatctcaaatgcaggccgttatgatctcccaggtcagcaatgacatgagattctcggacgcattcatgttattcactcgcttatctctgctgataacaagacgtcggccagagatcgctgttcattgtattttgatacatgttttgccgcacattgccgatgtaaaagtaagtgatattaataggttcatggtgaaccaactggtcaacccactaatactggatggcaaaattgttatgggtcgccgcgttttctctctgatgaagcagttcctcagctggtgcgccttccaggggatgatcgacgtgtcaccgttaaacgatatgtcacttaacaaagttgccggtggcgcaaagcccacacctcgcgagcggaagctgaccgacgcagaggtatgggtgttctggaatatatgggactacttcaatgtgtgtgctggtacaaaatgggcggccaggctatgtcttgtatccgcaagacgacctgacgaagtactgcgggctaaaaaaagtgagttcaatcttaagcgtggggtttggaatcaaggcaagaggaacaaatctgcccgtgagcattctctgcctttaagctcattaatgcgcacttgtattgaagagttgttcgaatatggtaaagacagccagtggctcgtgccttcgaataaaaaaatcgggaaagaccttcctatgtctaaagtggcaatagcccaggcattacgtcgtattctggaacgaccagaactgatggagcttgagccatttacaccccgagatttgcgccgtactgcgcgtagttacttcccagcattaggcataagccaggaggtatcacgtaaaatcatgaaccacagtcttgaggggatagatcgggtctacgaccggcacgattatatggacgagatgcgagacgccttagaaagtttctcgacgtacatcgcatcaatcgtagagcaaccggatttagacgaaattgaccacaaatttaagggagatcgtctatcaacagagcttattcgtgtaaatttttcatag

SEQ ID NO: 476665 - DNA, 387 bp, Shigella flexneri; identical to SEQ ID NO: 12130

SEQ ID NO: 476666 - DNA, 213 bp, Shigella flexneri; identical to SEQ ID NO: 12131

SEQ ID NO: 476667 - DNA, 2109 bp, Shigella flexneri
atgtctaaaaaacgttccatcaaagaggttcaggacttccgtgacagtgtaaaacgagtagtcgctctcctttcaggtaaaaacatccctgttgcagaacgaggggacgacgcttatgtacgctataacgatgatggagagccaattctcgtaaacatcccatcaatcccggataacgcaacaccggcattgatgaatgctgtgcgcggatttctcgatcatgaggttgctcacattttgtttaccgatattcgtgtgtccaacaaaatgagagaaaaaggacgcgttccttcctggtcgctatggaatgccttagaagacgtgttcatcgagcgaaaaatgggtcaggtctttaacggaacaagacgtaatctgatggcaactcagcgccttataatcgaaaaagtctttaaaccaaaggcttcagaggctattgcttattgtggcaaagatcagcgcgcgctttttctaaacttctttctctgtccggttgtaagagcctgggatggccaagcaccgttcgtagatttcatggatgaatattggcctgtcattgagaaaccaatttcattattaaaagaacatggtatcgatgtggccgtgcgtaacatgtcttgcaccgaggattgtgtaaaggtggctgcgaccatagctaagatcctcaaagacactgaaagtgaaagcaaaggtaaggagtcagctccgggaaaaacttccgatccttcagacgctgaccagacggatgcctctggagaaaacaatgaagacaacgaagatcatgagacaccctcagcgttagataatcacaaatctatcaaatcagaatcacacagtaagcacaaacatgataataacgacggtgatgattcagataattctgaatcatcagaaacaatattcgatgatacagaaaatgataaagaggtatcagattctgatgcttctgataacgcggtgtcagaatcatttaccgctgaccacgaaaaaagaaaaacgacagaagacggctcttcagatatcccaactccgtcaaaaatgagtctggaagaggctttagaggagctggatagcatagaagatgaagtcggaggcatgacagaagatgctctatccgaaacgattaaaagcgagttaacagaaacctcgaaaagcgaatacaggccatacaatcgctcatacgacttcatcggctcgattgatcaggcagaagcccatatcaaacggcttattaaaacattctccgatattgatttaggaggatatccaatcagccgctatcgcatcgttcctgaaggcaaccagctcttcgacaaatatattgaaaagcatctttcgtcaggtgtttcgtcgacgctggcaaaagacctggagcgagcaatagcaagcagaaacagagttcagtttataccgggccagcgtcgggggcgcattcatggttctagtatctacagattagcaatgaatgatgatcgcgtgtttcgtaaaaaagaagaatctaaagccgttaacgcctgtgttcagcaagtgattgatttatcaggttcaatgagtggtataacgatacaattggctcttgcaagtgcatataccatcgccgatgcccttgatcgaataaatgttcccaacattatcaccggcttcactacatttggtagtcatatggcggcaggagaacttaaggctgtcaagtatgagttctctcgctttgaatctttaatgctacctatcatcaaaaattggaatgaaaaggtaaattctcgcgaagttcgctcacgtatggggtgcgtaggctacacattcccacttcttaataacgtggatggtgaaagcatagccagccttgcatcgttattttccggtcgcatggaggacaggaagatcatgcttgttctgagtgatggcgcgccgtgggctgttgggagaggttttgacgctcatttgcgttcggttgcgaagcaaattgaaacgcagactgacattgatttgatggcaattggcatcatgactgacgcaccggagagattatactcaaatcatgccctggtaacgagcgttgatagtcttggttcatctgtagttactgaactatctcgtatcattttaaagtga

SEQ ID NO: 476668 - DNA, 1236 bp, Shigella flexneri
atgactactactgcactgcaaaatgaaaacaatccttctgattaccttgtttgcaagtggtgcggaaaatcatttcactattttaagtcccatgttgccaatggtaattgcgagggcattcctgagtcagtaaaagatgccgatcctgacaccgtactgaaaatgtacacaacacagtttccagatgagccaacgctatcgaaaaaggcacttgatgcaattcaagctaaacgtgccgagcaaaaaagcgaaatggccaaatcatctggcgtgaccagtagcccaggctacacaggcacagttgagtacaagacagatctggtcgcagctcacgaactgctaaatgtaacggtgaaagaactcggaacaaaacgtgggacgccgctcatggttagcgtcaacgtcaatacgccgtttccagagttcgttccagaagtgaagaagggatacgtatatggcgacttcgaactgatcaaagacattttcatgatgcttgaacttggcatacctggctatttgtggggtcatgcaggaacaggcaaatcgtcattgcctacacaactatgtgctttgctcaatcgtccgttgatccgtgcccaacatacagcatcaatggaagaggcacatgttacggggcaaattctggcgcgtgatggctctacgtatttcgagcctggcttgcttgcgctcgcaatgaagcatggctgggtttacctcgcggatgaatacgactttgcgtttccacaaattcttggcgtgtatcagccagtgctggaaggtgaagcgttagtcatcaaagaggcgactccagaatggcgtcgcattactccgcatgaacggtttgctttcattggcactggcaacacgaacggatctggtgatgaaaccggcttgtaccagggtacaaacatccagaacgccgcgaacttttcgcgttttggcatcgtttcgaatgtgaaatacatgagcaaagaggcagagatcaacatgttgataaatgccggtatcgtggatgaatacgcagaaaagatggttaagtttgccggtatcgttcgcgatggatacgaagaacaccttatcagtcagccaattggccctcgtgaacttttgttgtcggccaagattggaatgatgcgaggcgactttgtgacaggtattgagcgttctttcattaacaaactcccttcagcttctgcacaagcggctcgtgaagttgttcaaaaaatatttggttga

SEQ ID NO: 476669 - DNA, 3519 bp, Shigella flexneri
atgaaggcactgatggttcgaactgacttctcacttggggagtcggctttaaaagcagaaaacgcggtgaagattgccagagaagctggctacaccgctgtaatttcagcagatagcatgaatattgcgagcgttattccactacaacgtgccgctggtgacgacatggcggttatttgtggtgtgaaactaaacatcgttgatgatcccacatacgagcaccgggctaaacttgctaaagagtctaagggatgtatggaatcattggagcgaggacgtaactactcgtttaccgctctaattaaaaatgagaaaggatatcgcgacatctgcgaactaatgacggcggccaacacacgagaacagttctactttgtaccgcgtctctcgctcgaacagttggtttctacatatgccaaaggcaacatcatcctgcttacttccgacatcggtagcgtgttccaacgcaacgattttgcaaaaatcataagcacactgattacagcgggtggaaaagacaacttctatagtgtggtttatccgcaccctaccccattctacgaccagattaacgtccgggcgatgaaagtcgccagcgcattgaaaatagagccagtggcgttctatcccgcttattacgaatcgatcgacgatgcagacattaaagacattgcgcacatggttacgaacaacataaaaatcgaccagccgcatcgtctgcgtatcccccaccagcgagataacgccatcaatggtcgtcgccatctccttgaggcgcttaaagccttctccgttcgcatggatgtgccggtaacagctgcaatggcctcaacaacgcaggactccattatcgatgcctgcacatggcgctggcatgaattgccaccagcactgcccaagatggcagacgacgaacctgcaacgctgatgaaactggctgttgcagggctgcgtaaacgtcttaccacaaaagagtttggatacacaccacctgcttctgagaacagggtttatgttgagcggctaaagtacgaaatggacacgctgactcgcctgggattctgtggttacttcctgatggtacgcgatctgatgaatcacagccgtgaaactggcattcctgtcgggcctggtcgtggttcctctgccggttctctggtggcgtggtgcataggcataaccaacgtcgacccaatccgtcacggtcttctgtttgagcgtttcatcaaccctgagcgtctcgacttgccggatgctgacttggacttcagccaggcacgtcgccatgaggtgatcgagtatctgaatgaacgctacggcgaagattacgttgcaggcattccgaacttcacctatctgggcgcggcatctgcgctgcgtgacactgcacgtatttacggtgtcgatgctgcggatatggcggtatccaaagagttcaagaatatggaggacgacagcctgtctctggaagagctgcgcgagcaactggccagcctggacaaatacgccacgaaaaacccggaagcgttcaaagcggcgtgtaagctgcaaagcctgatgcgtggttttggtcgtcacgctgcggggatgatcgtcgctggcgttccattagtagagcgcacgcccgtcgagctgcgtggcaatgctcgatgtattgcgttcgataaacgttactgcgaggcgatggggctgattaagttggacgttctcggtctggcaacactcgatcttctggatagcgcgaaacgctacatcaaagagagtaccggtgaagacatcaatctcgacgctatcccactggacgatcgcaaggttctggatgggttcgctgcagggtacacgcagggcgtattccagctggagtccggccccatgcgtaagctgcttaaagatctgggcggtggcatcgagccaatgagtttcaaaaccgttgtcgcaactaccgccctcttccgaccgggaccgattcaatccggcatgttggatgactatgtttccgttgcgaaaggatttatgacgcctacatcactacatcctgtcttggatgaactgacctctgaaacaaatggagtgattctctatcaggaacaaacgatgaacgcaacaaggcttcttgctggtttcacaatggccgaggcggatggtgtgcgttcagcaatcggtaagaagaacatggaaaagatgaggagcatgggtgagaaatttgtcattcaggctcaagctgggtggatcgacgtagagcttgaaaatggcgcaatacaacggattcatcgcgcagaacattttaaatgcgaggacggtactctgaggacagttgaagaggcgttggagcatggagtgaagctgccaatgccagttgtgcgcgttacaacgtcacatccaggtctgtctgagacgaaggcaaaagagatatggactgcatttgagaaaaacggagcctatcagttcaataaatcacactccgttgcttattctttaatcagttatcagtctatgtggctaaagacgcactaccctgctgagttcttcgcagctgcgctcaccattctgggcgaggataagcatcaggggctggtgaaggatgcgctgacctatggcattcgcgtattgccaccagacgttaatgtgtcatctaaccgaattgagatccgcacactcgaagacggcagtcaggcactgtatgcgccattctctgctgtgaaaggctgttctgaaaatggttgtcaggcaattatgcgtgcgcgtgagaaagttggtggcaaattcgagtcagtggcacaattcgatgaagcggtcgagaagcgtgcatgtaacagtcgtgtacgcgagtcgcttcataaagtaggggcttttgcgtcaattgagccaggcagtctgccagcaactgatcctgaacgactgcgcgaccaggctgagctgatgggcaatctcatcattgacgctgttaaagcatcacgtccgttcgaaatgaatcctaagcgttctgccgaaatcaacgtactcatgacacgtatggcggctgaaatgggcttgggtgaggagttgatacgcccgactattggtattaaacccaaaatcatgatcattctggacaatgcgaacggcaatgacgctcgtaccggctacttcatggagaacggatacgacgactttaaggcaaaactactgacagttggagatctgcgcatgggcgatctttatgtcacgggtgtttgtaagaaggttaaggacaaagagaaagactataccaaagacgagataggccagttcacagactttatgcgggaagaaattaatcttgtacgaccaacctacattttgacgtgtggtagtcgttcaaccgcactatttaacaataagagtaaaccatcagatctgattggtcgtaaggagtacttcccagagcttgatgcaaccgtcttctacggatttaacccgaatatcctgtacttccgaccggaagaaggagagcgactggaggccattctggctgatatcgcggagacaataaataagtaa

SEQ ID NO: 476670 - DNA, 216 bp, Shigella flexneri; identical to SEQ ID NO: 12135

SEQ ID NO: 476671 - DNA, 564 bp, Shigella flexneri; identical to SEQ ID NO: 12136

SEQ ID NO: 476672 - DNA, 225 bp, Shigella flexneri
atgaagcaacatccgaataagcatattcaagcagccattgactatgcattaagtaaaggctggatctgggtagctgctggtggtgctgcacattgtttttgcagactgcgatgcggtaatccagaaggtgaacacaaaactcaccaaatgagcgtatggtcgactccgggtaatcccgaaaaccatgccaaacagatcaaacgaatggttgatcgttgtaaatga

SEQ ID NO: 476673 - DNA, 432 bp, Shigella flexneri; identical to SEQ ID NO: 12138

SEQ ID NO: 476674 - DNA, 1029 bp, Shigella flexneri
atgtctaagacattacttgatttgcttaacaaaactcgtgaagacattgccgccaaacgtggcaacaacgttgatctgactcgcttaaaagacggcgtcaactatatccgcatcttcccgaataaagacgacccaaacggtaagttcttccagactttcggtatgcactacgttaagtatcagaacgaggaaggtaaagaagcaaccaacgcttatatttgtgagcaacatactcacggtcgcgcttgtcagctatgcgaaatggtgatggaaggtcgcgctcgtcacaagggtaacaaagcaatggaagaacgcatcggtcaaatgcgtgccactcctcgctacctggtcaacggcattctttctgctcgtgaggatttcgcagatgctgagaaatgccagttaatcgagctgccgtctactgtattcgatgatatctgcaaagcaatcaccgaagacatcgctgatgatatcggcaatccactgagcaaagaggaaggctacgcattcctgattaaacgtactggctctggtcgcgataccaaatatgacgtctcgcctaagcgtaaagtctacaaaggcgatatcgaagataaattctggaacacccagcatgatctgatcgcatacgcaaatcaggctgatgaaactcgtcttctgtcgacagttcgcactatgggtcgtctgattggcatcgctgcaccaactgccgcagcatctgcaccagcaatttcctcaaccgcgaaaacatcggctgcggcactacctggatttggctctgtcactggtcatacagaaggagcgacggctgtagcaaccgcgcacacaccggcttctgaaccaaccagtctggttgatgaagaaatcctccgtgccgttgaaactgaatttaaaccagaggcaagttccgctgccgttgccgtatcagtcaaagagtctgaagcagtcgcagcgacatctgtagcaaccgcatctgcgacggaagatgaaggtctggatgacctactgagagagctggactctctgtaa

SEQ ID NO: 476675 - DNA, 945 bp, Shigella flexneri
gtgaattatctcttcgtagatggcaatagcctgggttattaccaccaacaatctgacaaattgcacaacggcgaaatggaagtacaggctgctttcggctttgttaagaacgtccgtcgttatgcctccatcctccatgcccgacctatgattctttgggatggatttagtgacaagcgtcgcgacttttacccggactacaaagcaaatcgcgacgacgatcctgatatgaaaaagatgaaggaaggctttgctatccagaagccatacatcctcaaaatgatgaccgcgcttggagttacccaactcattgcaaaagatgcagaagcggatgatctggccgggctgctggtatcccgcatggcaccgcagccaaccgttgaacacatctatctgttaacaggcgatagcgactggcttcagttagttcgtgaaaacgtaagctgggtaagcctgcgtgaagacgccaaaaacaagcaggttaattttgagcaatttgcggagctgacaggattcgctactcctcgcgcatttttggaagcaaaagcattacaaggcgataaatcggacaacattagcggtgttggtggcattggtgctggcggtgcgaaagagctgctgcatgaatggggaagtgtcgcaacgatggtacgcggcatcaacgacggctcaatcgtggttgacaaaggacgccataagaccgccttcaacaaactagcgaagaatgccttcaacgagaaaacaggctgtcgaatgctcgaagcgttcaagagaaacatcacgctaatgaacctgattgagacgaagtttccgcctaccgaaatcgaaacaatcaaaggcaatcgtgacgtgaaagcattcgagcaactgtgctacgagctgaatttccgttcgttccttgaagaccttgaagtgtttgttcttccattcgaaaggtattgctaa

SEQ ID NO: 476676 - DNA, 267 bp, Shigella flexneri
atgcttaaatcgattattaatggcgctacaaccacccccacccaactggcaaaagagattgtcttttatcacggtgagtacgctgtcatcgcactgccgtcaattctaggcgctgccggaatgaaagcgacagatcgcgagtttggattagtcagcgagcaggtcgtaaaaatcctcgctcgtgtatccagactccttaaccacgatgcgattgtattcgacgaatccgccgctttaaaacgaatcaacgaaacaaaaggagcctga

SEQ ID NO: 476677 - DNA, 2340 bp, Shigella flexneri
atggcaaaaggaaaatccgcactggcacttgctctgaaaaagaaaatcggtagcaacgacgaaattcagaaagtaactcattggattgacacaggctttcctccgttaaacaaagctatttccggtcgttacgatggcggtttcccatgtggtcgtatcgtagaagtattcgggccaccaagcgcggggaaatgtgttaccgcagacaccatgctgctgacggagcgtggaatggtaacagtgaaagagttgtttgagattgaagggtacaaagcgacatgcactactcgcgatgtagagcataacgttggactcatcaatgaaaatggcgtgatagagaagacctcacacctgacatggaacaaccgtcgcaaattcaagcgtattaagctggcatcaggcggttatatcgaggctacgttccgtcacccaatccgtgtggttgacgacttaggtaatgtcgtctggcgacatgctgaaaaaatcagtgtaggcgacacgattccttcaatggttggcacacatcaattcggcgatcagcacctggatgccaatatcgcaaaactgatgggctatttaattgctgacggatacgtggcctctgaaaattcagtgaatttttctaacacagatcctttcatcaaggatgagtactaccgcctcatttcgctggtatcagacaagatgccagttacgagaaaacataacggctcggaagaccatgtgctgtttagcaaagaggtgcgttcgctgctttttaaagaatatggtctggagtatgagaaagctgctggcaagcaggttccgttgagtgtgcgtcgcgccaatagcgaggctcaaattgcattccttcgcggctactttgagctggaatgccacgtcaatgatggtcgctgcattgaggttgtgagcgcgagtgggctgctgctacagcaaattcgcctcatgctcctgaatctggggattacgtcaactatctctgaaaaacacgtcgcgggttatgaaaatacatattaccggctgtcattcagtggctctaattacgacctttttctgtcaacgattggtttcgaatctccggcacgtttatcagtggcaaccaaacgggacattggttttgaccgcacttactcaggctatgttccgcacatcagcggcttagtgaaatcactctacgagtcgctcaccaagaccacccgtgaagactacgctctggtagaccacgttattggccgcggcgatcgtgtcggaatagacaaactgcgagaaatctatgtctccttcattggcagaaagaatcgttttaacgagcatctgtttgcacaactggcagcggtaattggctctaacttgttctacgacgaagtcgtggctattgaggaaggtgaagcaccaacgttcgacgtagcgatgccggaaacacactctttctggtctaacgggattatcagccacaacacattccttgcaacagcagcgatgatctccgctcaaaaacaagatggtctggcggtattcctcgatcatgaaaacagttttgacgttggcctggctgtagccaatggcctgaacgcagatgaggatgacggtcagtgggtatacaagcagccagataccttcgaagactctgtagagttgatcggcacaatacttaaattggttcgtgatgaagagcttatccccgaatcagcacctatctgtatcgtggctgactctcttgcgtctatggttccgaactccaaagccgagaagttcgaaaagatggctgaaggcacagccaaagacaaagatcagctaaacatgaacgacaatacggcactggctcgtgcgacgagtgcgaacttccctactctggctttgtgggcacgcaaatacaacgcctgcatcatcttcttgaatcaggttcgcacaaaaatcggtgtaatgtttggcgaccctactacgtcgccaggtggagattcaccgaagttctacgcttctgtacgtatccgtcttggtgcatcggtgatgaaggatggtaaagagaagatcggccaggacgtaggcgcagaatgcatcaaaaacaaagttgcaccaccgtatggcaaatgcacctggaaattctacttcgatcctactcgtggcctcgacgttatcgagtcgctcgtcgagtacatgctggaagaaggatacctgccaaagaacgccagcggtcgagtagaaattggtgacaagaaatacaccaaatcacagatcgtcgagatgtatcgggagaagccactagctgaaatcattgcggctttacaggcaatcgacgaccggagatcaaaagacaatcccaccgagtcagtagaagagtaa

SEQ ID NO: 476678 - DNA, 201 bp, Shigella flexneri
atgatcaaaatctatctattggcagtagccacaggcctttcagtggctctcatctacggattactggttccgtcgctgatttctgcaaagagtgatttggccgtcatgcttggagttctcgttggttttggcgctccagtaatcggtcttattggtggtcgtaagtttattaactcattaatcaaagcaaaggggaaataa

SEQ ID NO: 476679 - DNA, 831 bp, Shigella flexneri
atgaagaaaggtttacttgcagttgctctggcggctatttgcacaatgggtcttactggctgtgatcgcgtggagcctggatacgttggcatcaaagtaaacaaattaggtgaagacaaagggattggtgaagtggttggcgttggtcgccaatggacaggtcttaacaccgaactttacgtattcccgaccttcaaacaaatgaagacctacgacgaaccgttcacattccagatgagtgacggtactgctattggtcacaaaattggcgttgcgtatctggttaatcgtgacaaggtaacgacggtgttccagacctatcgcaaaggcgtagacgatatcaccgaatcagatctgcgtcagaaaattgccgactctctaaaccgtttggccagccgtatgaccactgactcatttatcgacggtggtaaggcacaattgctggacaacgcactgaaagatattcagaaagagatgtctccggttggtattgaggtactgagcctgtcatgggttggaaagcctgattacccaaaaaccgtcattgaatctattaacgccaaagtaacggctaaccagcgtactctgcaacgtcagcaggaagttgaacagcgtaaagctgaggcgaatatgctacgtgaacaggctaatggtgaagctgatgctatccgtgctcgtgcgcaagcagaagcagacgccattcgtctgcgcggtgaagctctgcgtcaaaacccgaacgttatggaactggaagccatcaataaatggaatggccagttaccgcagtacatgactcaaggggctaacactcctttcattacagtgaaataa

SEQ ID NO: 476680 - DNA, 426 bp, Shigella flexneri
atgacagctattaagaaactctacgatgccgcaaacgtggctctggatgttattgatgatgaagtagcaaaaggctttcctgaacctgattgggcgcatcagctacgaaacgctatcgcagaaatgaccccaccagatccaacccccgacgagacagactggcagcgattcatccgtatgtacgctcaggaaataggtccaacgccaacggcagagcaagcaatgctgctgaaatacttcaaagaggcgggggaggatttaccaattgatgactcagcatattggttccactgcgcatggcgtaagtatgacgtgatattcacacaaggcatggggagcaaagatatggttgtgtggcatctactccatatagacacagccgttgacagagttattgaacagtttttccctaaacaagaagattga

SEQ ID NO: 476681 - DNA, 276 bp, Shigella flexneri
atgagagttttagttcgaatcgttaccagcactgtctatgacgcatttccgctttttatcgtcaaagccgatggccttaacgacgaagaaactgacgcgctgatccagcgtactcttgttgaatatacaggtcatgacgctgattcagtgatggttgatgatgatggtgtttgttggcataacggcaactgttggtacgtagaagagactcaacaaatcagtgatgaagatgccgcacatcttgagcgtattttaagcatcagcacttttgagtga

SEQ ID NO: 476682 - DNA, 180 bp, Shigella flexneri; identical to SEQ ID NO: 469634

SEQ ID NO: 476683 - DNA, 336 bp, Shigella flexneri
atgaaggccatcccattcactctgttgttcctttcctcgatcgttgtggccgacaccactgtttatcagtgtgaaatgtctgtagccgacgttaagaatggcgctcttaccgacgtcataaaagcaccatatggagcgatggtcgtagacagcggcgaccagttctatgttgtgcgtgacgatcgagtgttgtcatccccatatctcacaaaccgtaatggcaaattaaccggcgtcggagaagaccacttcgtatacaacaaatacaagggcttctatggcgttcacgcttctcagcaaagctaccttttcgatgactgcaaggaggttggataa

SEQ ID NO: 476684 - DNA, 213 bp, Shigella flexneri
atggcattaacactggcaggtctggaaatcgagaaaacaagcggctactggcgtgctaagggtttcaagcagcctggcattcttgagcgtctggaacgtgaagatgggtatatcgtccaccagcggcgtgaatggcgtatgtacgatccagaaacaggaaaactgactacaaaagccggaacactttggggcctgttgaagaaaatacactaa

SEQ ID NO: 476685 - DNA, 1056 bp, Shigella flexneri; identical to SEQ ID NO: 29705

SEQ ID NO: 476686 - DNA, 645 bp, Shigella flexneri
atggatctaaaacgcacgcgctgggttcgtcgtcttgaggacggctcctacactatcgaatcaaattccaacctgaataagcagaagttactttgtgatatctgcggtatagcggcgaagtgcccgatctacgaaaccagaattaaacttgataaggctggtgtgaactttcatttgaatagttgtatcaggtacgttccattgctcgcatttcgtaaaccgatcatcggattggatgcgccctacttcaacacactccgttcaggagtaacgtggcgagatcgtttatcaccagacaaactgatttgccttgtatccgcagatacaggaaaaatcattcgttttgggaaagtagacaaggtttactcaggcccagttgacgagatgttgcggaaacacagccggtttaatcacctctgcatgggtggtgagaaaatagagaaggttgaagaagtgatccgcaaatcctacggacacttcctgaccaaagatagcctgctcactgcaatctacatcagacatgtaaaacgtgagttcgaccttgaataccatagcgaagaagaactgaaccttgtcgatccacgtcctaaagctggcgtcataagcataaatgcagcgcgtaaaaagcccactgacgcgctgtaa

SEQ ID NO: 476687 - DNA, 1086 bp, Shigella flexneri
atgactttgccatacggcgtcatttctgactgccactaccacaaatgggatgcgttctccacgacgaacgctgaggggcttaactccagacttgaaatacagttggaagcaacgaaagaagcagccatcgccatgaagaaggccggttgtacgtacatgttggttgccggtgatacatttcacgtccgaggaactgtgtccccttctgttttgcattacgtaactgaaacgtacaagtggattatcaacgagcttgatctgacagtagtaatgctggccggtaatcacgatcttgaaaccaacgattcagtatatagcgccaacgcagcagcatcgctgagttctatcggcgtggtaatcgtatgtggcaagtgcccacactcaataaaaattggtgatgtgactgtccacctgattagctggcgtaacaatcatgcggagcttatcagcgatctgaaagcattacgtaagagcgtagaaggtgacaatcatgacgttgttatccatacatccattaacaaagccattccaacaatgcctgacgtcggtatcgatgcgcaggagttaaaggatatcggctttcgtctcgtgcttagtgggcattaccacaaccacaaagaggtcattcctggagttatcagtgtcggtgcactgactcatcaaaattggggagatgttggatctctggctggctacatgatcgtaaacccggacggcagtttcagtcactacgaaaccagtgcgcctaaattcattaacctggaagatgatgttgctgatgaccaaattcgcggcaactacgtgcgtttccgcgccgtaattgagaacgatgaagaaggcattaagtaccagaacatcctcaaaacaatgggtgcaaaaggtgtcgtgtgcaacttcatccgtaagtcatcaatgatggaagggacagccagcacaactgaaaccagcaaaatcgatagcctgggagagtcggtatctgcttattgcaagattgtccacgatactgacggcggatttgatctgagcaaattggatattttgtgtcaggaaatcctcaccgaagcggagagttcggaggctgtgtga

SEQ ID NO: 476688 - DNA, 1917 bp, Shigella flexneri
atgaagtttttaaagctccaggttgagaattttatggctatcgccagcgcggaggtcgagttagatcagcgtggtttagtgctcattcagggtgttaatagtgatgatagttccgcatcaagtaatggctctggaaagtcaactctaatgaatagcctgatgtggtgtctttatggcgaaacagctcatggtgtgaagggtgacgatgtgttgtctaccgaccatgaaaagaactgtcgtgttgcagtaaccatcgaggatgaaggcaagagatacgcaatcattcgtcaccgtaaacacaaagagttcaaaaatcgtcttatcgttcgtggtgaagatggcgatatgacgaaaggcaaagatgcgctgacgcaggagttcgtcgagcgtctgatcggtgcatctaaagaggttttcatggcttccatctatgcgagccaagaagctatgccagatttacctggaatgtccgacaaaaacctcaaaaccatcgtagaagaagccgctggcgttgacagactgacacgcgcctacgctattgctcgtgagcgagctaatgcagctgccgcacgtatggatgtggttaaaaccaaattggagtcgacaatctcgaccattgaggcaacacagtcagaaattgagtcagcgaaagcctcctctgaatcatgggagcaagagcgttctaaacgttatgacgatgccctggctgggctggccagtgccgaagttgagttaacggaagttgaacttgagatccgcactcttcccgaacagatacgtgataccgagaaggcaatcgaaagtgagcgcaaaaagttagcctcaaaagaagaacatgacgccaagttgctcaaagttcgtggtgcgataactgatattcgggcaagcatcaaagctacagaaaatagtcaggctgatgcaatgaaccgcgcgcgtaattttaagaccaaagcagaagaggttggtactaaagtgggatcaccatgccctacttgtggcaaagcctactgcgaagaagatctatcaacggtgaaggagaatttcattgaacaagcacgtcaggaaattggtcaggcgaagacacttgcagaggcaatggctaaacacaaaacgaatcttgagaaagcgttaagcattgagtctgcccttgttaaaacgacacctgatgtaacggctatcattgcccggattgaagagcttacgaaacaactctcatctttgcgtcatcgtgagaaggaggttgttgctattgagtctcttgtgactcgtgctcgtactgaggtcgatcgtatatcaaaagagattaatccgtttattgctcttatcgccagacacgaagataacctggtatccagtaagtctaccttcaagtccttaaaagatgagttgaaggctattcaggaacaaacgttgctattggaaaaagctcgtcaggtctactctcctgccggggtgcgttctcatattttgacgtctgttacgcctttcctgaatacacgcactgccgagtatctcaatacgttgtctgacgggaatattactgctgagtggtcgacgatggatgtcactaaaaaaggtgagtatcgcgacaaattcaacattagtgtgcagaagaaaggttcaagtaagtcgttccaaaccctctctggtggtgagaagcggaaggttcgcattgcgtgttctttggcattgcaggatctggttagtaaccgggcgagtaaaaacatcgatttgtttatcggcgacgaaattgacgatgcactcgatacagccggtcttgaacgcctcatgggtattctggagtccaaagctcgcgagcgaggtactgtgctgattatctcccataaagagatgaagtcgtggttccgggaaactattacgctggaagttaaagaggggcgcagctatgtcgtttaa

SEQ ID NO: 476689 - DNA, 744 bp, Shigella flexneri
atgtcgtttaaattaagccgctcgcagtttttgcaggtatttgcagtgatgcagtcgataaaactgatcaatgggcatacttccaatggtgcggctccacgtattctgtggggcagcaacaatattgacggagtacaattcgccgcgttgcttggtctaatatccgagacgccattgatgcaaagtttgaaatcactaccacctggatgtattgcgccgatcctgattaatccttttgttgaggggggatatcttcccaacgtcgggcctgggtttatcgcaacccatgaaactgaagatcttaacattgatagcgaagggttctttggggcaatggatgcgcatctctgtatggctttcacgaaccttattcgacttgccaataagcgggtggatagtttggcatcgccaggtgatgcttttactggtttccttatccaaaggagggataaaaagtacagtgcggacaaactacagtttgttggtaagtatggagaaatggtagaaatcgaacttcagctccctcatgttttagcaaacgatagtgcagacagtcggaggctgttgggcatcatgcgtcatttcatagcaagtggcgttaaacatgccgtagataaacgtgtcacgcaggaaaatgagtattcagactttgcaaactatccccaaccaacgttgcaaacggcaatagtagccaattcgttggaggcgagattattggaaaaccctctatggggaacatggtaa

SEQ ID NO: 476690 - DNA, 570 bp, Shigella flexneri
atgagtaaaaaaatcagcgtagttggtgttgatccctctatgagcaactttgggcttgctgtgggcactttagaccttgaaacggacgaacttgagattcacggccttactcttgttgagactaaagcggggagtaacaaaaagaccgttcgtgtgaacagtgacgatctgcgccgtgccagtgaaatatggcgtgttgcgaagccaatcattgataaggcgaatatggttttttgtgaactaccggttgggagccaaaactctcgttcgcagacgtcttacggtatttgtatcggtgtacttgcgtgtgtggataagccattgatccaggtcactccaaacgaaatcaagcattttgttggcaataaacttactacatcgaaagaagagattatccagtgggctacgaaaaaacaccctaaagcaccgtggctgcgtcgtaagcaatctggacaggatgttctcgtgaacaaaaacgaacatttggctgatgcggtggctgccatccataccggtatgcaaacagatcagtttcgccaggtgcgcgatgttctcaagtctctcatttga

SEQ ID NO: 476691 - DNA, 2316 bp, Shigella flexneri
atgataagcatcgtaaaacgtaacggccaaacagagccgttatccgaagaaaaatacaaccgcgtcgtaatgtatggcgtagaaggcattcgtggtgtaagcgcatccgctgtagcaatgggagctgcgaccagcatttttgatgggattaccaccagccagttgcatgaggctttggttaaatctgccgctgatttgatctcaccagatgcaccaaattactcgcaggtggctgcccgcctgaacatttttaaaatccgcaaagatgccttcggtcgttacgactatccgaacttctaccaacacattgtcaagaacgttaacaagggcgtttatgacaaggatttgctgacacattattcatttgaagagatcgaagaactcggcaattacattaagcctaaacgtgacgatctttttggctatgcagctacggtgcagttgcaaagcaaatacctcgttcaaaaccgtgttactggtgagattcacgaaggcccgcaacatatctatatgctggtgggcatgtgtctgttccagaattgggaagacgactgcgcgggcaaaacacgtatggagatggtcaaaggtttctatgacgttacaagtacgttcaagctgtctctgcccacaccaatcatggccggcgtccgtactccaacccgtcagttctccagttgtgtgctgattgagtctggcgatagtctgaaagggattagtgcagcttcagccgcaattatcgactacgtttcacgtcgtgctggaattggtattggttttggccgtatccgtgcgctgggcagcgagatccgcaatggtgaagccacccataccggagttattccattcctgaagcatttccagacggctgttaaatcttgttcgcaaggtggtgttcgtggtggcgcagcaacagcgttttacccgatctggcatcttgaagttgaaagtctgctggtggtgaaaaataaccgtggtattgatgaaaaccgcgttcgccatcttgattacggcgtcatgagtaaccgtctaatgtaccgtcgactcgtcagaagcgagaacatcactctgttcagcccgcatgatgtgcctgatatgtacgaagccttcttcacagaccaggatctgtttgaaaagctgtaccataaatacgaagccgatgattcaattcgcaagaagtcagtacctgccattgagctgttctcatctctgatgcaggaacgagcgtccacgggccgaatttatattgcgaacgtcgatcatattaacgagcatggcgctttcattcctgctcttgcacctgttcgccagtcaaacctgtgcatggagatcactctacccactcgtccactggcatttaccgacgacccgaacggtgagatcgcgctatgcactttatccgcttttaacctcggagccatccgttcactggagtcccttaaagaggtggcgttctatgccgttgctgcactggattcgttactggattatcaagactatccgatggaggcagccgaagtgcctgccaaagctcgtcgtagcttgggaattggtgtaaccaactttgcttattacctggcaaagaatggcgttcgttattctgataccgctggcaataaactggtgcatgaaacgttcgaagctatccagtattaccttcttgatgccagctgccgacttgctgaagcaaaaggtgagtgtgactggtttgagcagaccaagtacgcaattggtcagttgccgatcgaccattaccgttcttcattagacgaaagtggcgaaaccaactttgagttaaagatgccgtgggaagaactgcgtgaacgtattgcaaaatacggccttcgcaactccacactgacggcacaaatgccatgcgagacttccagccagatcactaattccaccaacggcatcgaaccgcctcgtggcccggtgtcggtgaaatcttctaaggacggcatcgttaagatggtcgtgcctgagtttgaaaaactgaaggaacagtatgaatacctgtgggatatgccggacaaccgcggctatctgacaaaggtggcgatcatccagaagttctttgaccaggctatttcagccaataccaactatgacccttctcgctttgaaggcgataaagtcccaatgatgacgctactgtcagatttgcttctcgcctacaagatgggagttaaaacgctttactaccacaacaccagagatggtgcaggaaagcgtgatgacgacgaagcgcagaatccacttacgcaagctgtagccgtcgagccagaagatgagtgcgacggagcctgcaaaatctga

SEQ ID NO: 476692 - DNA, 1143 bp, Shigella flexneri
atgtcatattcaacgttccgtttgggtgctaatgatgcaaccaaagagcctatgttcctcggacaatctgtcaacgtggcacgttacgatcagcaaaaataccgtgattttgaaaagttgattgaacgtcaattgtctttcttctggcggccggaagaagttgatatttcgagtgatcgtatcgacttcaacacgaagctgcgggaccacgaacgtcacatttttctgagcaatctccgttatcaaacgttactcgattcagttcagggacgtagcccaaatgcaacgcttctgccgcttatctctattcctgaactggaaacgtgggttgaaacatggtctttctctgagactatccatagccgcagctacacccacattattcgtggcatggtggacgatccgagtattgtttttgacggtattgttacggatgaagaaatcatcaaccgagcgatcagtatctctgctgaatatgacaggctttatgggatgacctgcgagcgccagtcgttaggtgagaaagagtttgaacgtctgtacgtaaatgaatatggctgggagccataccctttgcaccgtcagcttttccgcacgttggtgtccattaatgcgcttgaggcgatccgtttctatgtaagttttgcatgtacgtttgcctttggcgaacggaagttgcttgagggtaacaccaaaattatgcgctttattgcccgtgatgaagctctgcattgcgaaggaactgaacgcatgatccgcttcatgcgtaccggtcgcgaaggcttattgtggaaagagattgctgctgatgaagaaaacgtcatttacgacaccatgaaatcagtcgccgaacaagaaatgaactgggcagactatctcttcaaagacggttcgatgattggtttaaacgcggatattctgaagacctatgtaaaataccgcaccaatctggctatgaatcgtcttggcctgaaggctttatttccagaagttaccacagatccgctggtctggatgaacaagtggttgttaaccgacacactgcaaattgcaccacaagaggcagagcaaagcacatatctggtaggtcagatcgattctaccgtggataaggcttctctaagccagtttgcagacctgtaa

SEQ ID NO: 476693 - DNA, 870 bp, Shigella flexneri
atgaactttaccaaactgactgaccacctgaaacttgccaccgatcgtctcattggatttaagccagaaccatatgagttgcatgaaggtcatggtgtagctactgaaagtatttacaagatggtcgatcagtttcatgaactcttccagcatccgagacgcgttatgccgacaccagagctgcttcgtctccgtgcaagcctgattcatgaagaagctgtagtggaaggtattccagccgcaatgaatggggatattgagcaactgctggatgcaatggccgactttttatacgttggtgttggtacgatggtcgccatcaaaggtggtatttctaccggcatgacctattacacgcaggaacagagcattgatcgctttatgcagacaatttttgtgcccggtaacactgttttcgatgatatggcaatgccatttcaggaagctcgtgaggcgtcatgtatgctcgaagagctggcagataaacttgagaagaagactgttaaggattctgagctgattcaggaactgcgccgtgtaatgaacaaaatctatgtggcgtgcatgatgacttatcgactggctgatttcctcggtatcaatgtcgtcgagctggttggcgaaattcatcggtctaacatgacaaaattatggcctgctgatgttgaggaacgtcgccaggctgtggccaactgcaaatacgactcttcagatctgggattccgccatgctgatggcaccgataagatgatcggttttcgaatttccgatggaaagattatgaagtctccaacctatagtgatgtcgatttatcctcctttgttgagcaagctaaagcctcagcaatgtacggaatgatcaaaaaataa

SEQ ID NO: 476694 - DNA, 1104 bp, Shigella flexneri
gtgtcactccttttgaatcgagagcatacgaacggtcaggtaacaaacgcatcgtatgcaaaagttattgagacggtgcttaaaagcggcgtgcaggctgatgatcgcacaggcactggtactttaagcacctgctacgttccctcttactacatgcttactggtgggactgtgccgcttatttctggaaaggcggtaaatcttaagccactgcttgtcgaacttgagtggtatctgaaaggcacgggcaacatccaatttctcaaggataacggcgttaagatttgggatgcatgggccgatgagaatggcgatttggggccggtttacggtaagcagtggcgtcgatgggaagatacccgcatcgtgagccatagtgaatatctgagcaagatcgatactttccgtgaacgcgggtacaaagtcgagggatacctgggtatcagtgaagatcgcgtagtgctgtcccgtgaaatcgatcagctacagcgtattgtcgatacactgcgcacgaaccccaccgatcgtcgcatcatgcttaacgcatggaacgtaggcgagcttgaggatatgaaactgccaccttgccactttgtcttctctttgtggagtcgtgagcttgattttgaaacccgtttaacgatggcaactgacattggtcttcaacacagtcgcctcggttatgagtctatctacaccaagatgctatacgatctggagatggacggcagtgttactgaaactgaactggatgaacttggaatccccaaacgcatcctcaactcctgcctcgtacagcgtagcgtagacacttttgttggtatgccattcaatattgctggctatggcattctcactcattttctcgcgaagattacgggtcacatggccggtgcatttgtacattttggctttgacgtgcatttgtacaacaaccacatggaaggtgtgtgtgagctaatgaaacgacaggctccagagcattcagatccggtcgttattttccctcatgaatggtctgagctggatgatttcaaatgggacgatattctgattcttggctatgaccctctaccgtggatcaaggttccagtggcggtgtga

SEQ ID NO: 476695 - DNA, 414 bp, Shigella flexneri
atggcaataggtatgtatgtcttatgcgaaattgaaggtgtgctggcaaataccagccatcgtaaatctgtatctgacgcggatgcaggccagctcattgccggtgatgaactcattttccccaccagccgtatgttgcgtggttttgctcgctcaggggctgaagtggtgcttatcagtagccgctctgaaactcttgaagcgcccactaaacgatggttgaaagattttggtgttgattacgactggcttcatctcgtaccgaatggcgtcagttatgagaagcatattaagcgcacattagcggagcataaaggcgatctgcttatcgctgcgctggtgcacgatcctcgactccgtgccgctttagctgactctcatcatagaccggtcatctatgaggtgagcaaatga

SEQ ID NO: 476696 - DNA, 477 bp, Shigella flexneri
atgaagatgatagctgctgttggccgtaactatgagatcggcatagcgaacgaactgccctggcgttgttctaccgatctgaagctatttaagagactcaccaaaaacgccactgtcgttatggggcgtaaaacgatggaaagtctcaaacgccctcttccagagcgtcataacctcgttttgacgcgctctcatggctttgtaccaaatggattctaccctgctggtgtggatgatgtgttgcgattaccagagcctgtgtgggtgattggcggggaacaaatttactcgctattcatgccgcatgttgaagagatttggctctcccacatcggcgttgatgtgccaaacgccgatgcattcttcccggcaagcatgatgcgtaatttaggctttgtgcctgttgaaacagtttttacccaacgagccagcgaggaagagcttggcttttcgcagatcgtatacagaaggtcgtaa

SEQ ID NO: 476697 - DNA, 645 bp, Shigella flexneri
atggattaccggattgggatcactggtgctcagggcagtgggaaaacaaccctggcaaaatatatcgacaaacattacggaatcccttacgtggatgctggtgtcggaagtttgatgagccgactcggtgttcgagtaggtgagtctatgcctctatatgagcggcttcagattcaaatggaaatagcaaagcatatagagctacttacgcgtggtgttgaaggctttgttatcgatcgcacacctgctgatgttatggcctacacgttggatttggtcggccataccaatgaagatcgatgtattgagttagccctcgatatcgaaaagttttgccacaaaactgctatttcaaactttaacgccattgctggcttacgcccgggagtcgctctctcagagcgagattacttgcgatcacaacgagcatcattagaccgtctgtatgtcgctcgtattgatgcgttgatgtgcggggaactgacaaaaattcacctgcatccgcaaaggggggatctgcaaaccttcgtcgtttccaaccgatatcgcacggttgaagcaagagccagatcagtgatgagaatgctagataacgctgtagaaaagatagaaaaccggttctgtggccgagtgaccgttcattag

SEQ ID NO: 476698 - DNA, 420 bp, Shigella flexneri
atgtttagtgaaatgttgcttgaagatgaactggatcggaaaacaacagaggctttgattcgtgtagcggacgaacattcccggtctcttatgagcgatcgagaggctcgtctggctattcgtgccatattcgaaactgcgcaggggcttgttggcgcacaagtaggtgaagccattaacatcgccatgtctcagttcagtgaaggcagtaaaaagcctctgtttcctatgcatttgatgctggctggtggcacggtgctttacgtctctgtttgtctggatagcaaccaaatcaacattctcaacacggcgtcaggtaagtggaaagatccggttgtctgtgaaaccagtgaagaaactttgaaaaaagcggctcaatttgtacgtagcgcactacttaagggcgctaagaagttgtaa

SEQ ID NO: 476699 - DNA, 795 bp, Shigella flexneri
atgggacaaccggtagacataacaggtaaacgttttggaaagttggttgcacttaaatattccggtatttcaaacaaacaagggcgactttgggattgcatctgcgattgcggcaacacctgcctggttagttacgggaagctaaatcacggggcgacaatatcgtgtggctgtgtctacaacgcacatcgccgtagcgtaaagcctcatggtatgagtaaaacgccaatttatcgtatatggctgggtatgcgggaacgatgtgaaaaaccaatccatcacgcctataagtggtatggcggccgaggtatcaaagtctgcgagcggtggcaaatatttgaaaacttttatgctgacatgggagagcgaccagaggggatgtctcttgatcgcaaagatgtgaatggtgactacgaacctgaaaattgcagatgggcgacttttgaagaacaggccaataacacgcgttcaaacttaattttggagcataagggggaaaagctgactctctcacaatgggctaaaagagccgggattcagacatcaactcttcactatcgaatcaagaaagggtggccattagatcgcgcgcttaacgccagcgtcgacacgtatgccaaccgagatagtaagcgtctgatcgagtgtcgcggcagaactcagcgaattaccgaatgggctagagaggttggcttgactgcgaccattatctcgcagcgaattttgagggggtgggatgttgaagctgccatcttcacaccgtccaaacgaccagtaaaaggagataaaaagtga

SEQ ID NO: 476700 - DNA, 549 bp, Shigella flexneri
gtgattgctacaggggtggacatcgaatcaacaggtcttgatttcctctcaggccataaaatcattgaaatcgcaatggtgaagtacgaaattgagacacagacaatggttgatagttttgtaatgcggttcaacccgcgtcgcagtatcgatccgaaagcgcaagcggtacacggcatcagtcttgaagatttagccgccgagccgttactagccgatcacgcttcatctgtcgcttcgtatctctcttcttccgatatttggatagcccacaacggcgaagcgttcgatattccgtttattaggcatgagctgaaaagttacggtttttcgcttccagacatcccattgattgacactctattttccctgtgggccacagaagacggtaaacgtcctcgccttgaagaattggccttctctcttggctttatatacgatcatgccaaagcacatagtgccttatatgacacaaacttaatgatgcaatgcttctttaaggcacgtaataaatacggattttttaaattaccctctgaaattgtgtaa

SEQ ID NO: 476701 - DNA, 810 bp, Shigella flexneri
atgagttcggttgaaaatgtaatgacaaatgatgatctggacgagctgacagccatgttgcaatcacttgatgaaccagtaaaaaaagccgcacaggttgaaaatactgatgatattgacgatctgctgctcggcctcgatgctggcgtagccatgagttctgatgatgttgccgaagaactgttcaatgaagaaaaagcaggtgatttcagctctgctttaaatgagttggagttagcgcatgagcctataaacgtaattaacgctgaaagtgttgaagctgccgaaaacgagccagaacaattgggatttattgaggttgaagagtatgttgaggttaatgacgaattaaaagttcaacagtcaaatgatagcaacacaaataaaaaagcgcgtactgcaagaggtcctcgttttactttaagtgataaagatgattcgtttttcaataaagcaggcttagaaacagatattttcttagacgcttacgaaaacgcgcctgtcaaagcaaaggataagatattaaaccttcttaattggtttagcggaggtccagatattagtgtttacacggtaatttccatgagacaccttctcacagaaaagaaggctacaagtaatagtattaagattgctttaatgagcaatccagaaaaaccgtatccgcttaacactgcgtcaactcaggctgggcaaatgatggctgtatttccagcgacaggaattgccgttagagacggtggaaatctaacattgaacgaagaatcaccgatcgttaagaagtttgtagcggagtacactattggatga

SEQ ID NO: 476702 - DNA, 594 bp, Shigella flexneri
atgattgcagccgaaaaaatcaaacagcgaaagcgcgacaactctcttcgtgacctctggagaacacctgactggctgttttctgccattcaacgttatcttggagtgacatttgatgttgacgttgcctgcaacaaggacaatgcaaagctgcctaatttcataggcgttgagcgtgatgctttgaaatctgaatggggacagccaggtacaattgccttcctcaatccaccctactccaaaatctccccctggattgatgcggctatacgtgagcaggctcgcggagttacaacagtgatgctaattcctcaatccctcgatacaaagtggtatgagcgtgcaacagagtgtgcgaatgagacgattattctgtctggtggccgcgtagcgtttgtcgagcctgacgtcaatttgggtcaggtagaagtaaacatcaaccccggtggcagtatgctcgttgtttttcgaggattttgtcaggacgctgggcactctataagcaagatccctttggacgtcatgaaaagtctgggagggtatgatcctgcgaatgtgatcaggaaaaaaagaccatcaaagaaggctgcttag

SEQ ID NO: 476703 - DNA, 231 bp, Shigella flexneri
atgtcatacccgactaatgtcgttgcgctcgtagagagcgattttctggcccaggctcgtgaaatgatgaaagatcgtgagcaggctttcaacttgtacgagtgggcaattaagtgcttgcatcttggcgagcatcgcgaacttgttgaacagcttttaggtgagttgatcaatgaggtgtttgccttgaatgttcaactacatggtcgagaaaataatcaatcacaatga

SEQ ID NO: 476704 - DNA, 594 bp, Shigella flexneri
atgacgacgaagacaccagcccgatcgcaagcaaaaactcgcaaaaaagccaaaaacaaaaattctccccgcaccaatcccacaacgcctgtcgtagagttcaatccccagcttaaaaccgtgaaaatcttcagtgatggctcttgccttaaaaatccgggtggcccgggcggttacggtatagttctccagtatcgtggtgaggaacgcgagttctcagatggttttcatagcaccaccaataaccgcatggagatgatgggggcacttatcgggctggagcgtttgaaatatccatgcaacgttattttgcactctgatagccagtatctgaaaaacggcatgacacagtggatgaaatggtggaaacgcaatggatgggtgacttctgacaaaaaaccggtaaagaatgttgatctgtggaagcgtctggatgaggctgcaagtcgacataatgttcgctggaagtgggttaaaggtcacgccgggcatcgtgaaaatgaaatatgtgatcgactcgcgaagatcgcagctttttccgcagcagatatgcctcacaagaaagatattggttttgtttacaacaagcagtaa

SEQ ID NO: 476705 - DNA, 495 bp, Shigella flexneri; identical to SEQ ID NO: 12168

SEQ ID NO: 476706 - DNA, 198 bp, Shigella flexneri; identical to SEQ ID NO: 12169

SEQ ID NO: 476707 - DNA, 426 bp, Shigella flexneri; identical to SEQ ID NO: 12170

SEQ ID NO: 476708 - DNA, 159 bp, Shigella flexneri; identical to SEQ ID NO: 12171

SEQ ID NO: 476709 - DNA, 567 bp, Shigella flexneri
atgtgcaagaaatgcaaagcgatagctgatgaacaaaacgccttattcgaagaaatggatgctaatgaactggtcaaaatgttagccattcttcgaggaatagaagacgtttccatatttgagagagtggttacagcacttaattttgagtccacctttgaagagccaactcagattgtagctttagcacatcatttcggtgttcattatcttgctgaaaaagagagagctgataagttgcaagcgactttggatatggtgagcgagactcaaggatctcatgacggtaataaaagtgagacgattattgccagcaaagatcgtgaaattgccgggcttaaatcctctctaacgatgttgatgtctgcaattaaccttatgtcttctaaagcaggttataaaatgccatcactaaacagcgacgatccgatggccgttcgccagcttttaggtgcaatggccgaccagctcgacgacacaaagagtcgccttgaagacatgatgcgggagctcacgcatcgccatgacttgaataagcagccgcacaaaacgcaatacgcactctaa

SEQ ID NO: 476710 - DNA, 1686 bp, Shigella flexneri
atgaatacagccctttctatcatcgacgatgccagctcaaacacggctatcgactatcgtcaggaaatgaatgtcatccacgaaattgtggccgagtgcgagaaagagatcgccttcatgtatcaggtacacgacttcgtttatggcgacgaacgccacaacatgattaatcgcctgctgagactaaaccatcgaccagatgaagatcgctcgcgtttaaatcgaggttggttggataaagtcgatctggaatgggtgaaacagaatatttgggccgagtactggaggaaggtcacggacatgactaacgttttgctgatcatgccagcttcccgtcgagatgagtggcgcgagcagtttatagagggcaaacaggaagtcatcaaaactgacagaaccggctaccagatgaaggttaaagagttcgttggtgtaccggagttcaaagcagaaacggtcatacccacgatgcttaatttgctgaatgacaggcacaaatatctctctgagcgcgtgtatggcttgtttaaggcgctgagtcctgcgcacaagacaaataagacaaacggtttcagcgagcgtctgataatcgctgactgcatttctgatttctggcgggacagcgttagcgtgaactatcgcaaagaggactacatcgacgatctgcgtgtcttgcttcatttcttcgcgcacaaagaatttattaccatcaaccgcactgctgaggtgctatcagctgcgtatagggcaaacgactgccagaccggtgactggatgaacgtcgatggaaatctgatgcgcgtgaagatgttcaagaacggcaacgttcactttgaaatacatcctgacgtggcctggaagttgaatgaggtgctggcttacagtatgcctgctgcaatccccgcgccatgccgaactgcgccaaaaacacgggcaccaaagcagttcggtttaatccagaagacgatctccgtgccggttcgcactgcgcttcgtgacgggcgattgagcaaagacaaaggcgtatggtacttctctgattcagctctccagaagtcgcaggtggaagagcttgagcgcacactgagcttcattggcggcgtgcaggagaaaaagcactggcagttcccgtatgagatcggccatacgctaaatacgattgtggctaccggattaataccggatacaaaatcacaccagttctaccctaccccacgcttgattgctgagtacgttgccagagccactgaattgaagtctggtgagaagctgctggagcctcaagccggacgtggggatcttctggcctatatcaacgccgatctggaagatgttacctgcatagaaatcgcacctctcttcgctgatatcctgcgcggaaaagggtatacgaacacgatttgctgcgacttcataaagtggtctgaggacaacgtaggttatcagttcgacaaaatcgttatgaacccgccgtactcgcttggtcgtcatagagagcacacgctggctgcgctggggcatctgaaagtcggcgggcgtcttgtagcagtattgccgggcactgcgccaatactggactggatgacgatggataattacgtttatgccagagggaagtcgtttaccaacgagtttgaagacacagggatcacagtcagcgtatacgttttcaaacgcgttaaatga

SEQ ID NO: 476711 - DNA, 705 bp, Shigella flexneri; identical to SEQ ID NO: 12176

SEQ ID NO: 476712 - DNA, 381 bp, Shigella flexneri; identical to SEQ ID NO: 12177

SEQ ID NO: 476713 - DNA, 642 bp, Shigella flexneri; identical to SEQ ID NO: 12178

SEQ ID NO: 476714 - DNA, 543 bp, Shigella flexneri; identical to SEQ ID NO: 469667

SEQ ID NO: 476715 - DNA, 501 bp, Shigella flexneri; identical to SEQ ID NO: 469668

SEQ ID NO: 476716 - DNA, 402 bp, Shigella flexneri; identical to SEQ ID NO: 12179

SEQ ID NO: 476717 - DNA, 531 bp, Shigella flexneri; identical to SEQ ID NO: 12180

SEQ ID NO: 476718 - DNA, 186 bp, Shigella flexneri; identical to SEQ ID NO: 12181

SEQ ID NO: 476719 - DNA, 654 bp, Shigella flexneri; identical to SEQ ID NO: 12182

SEQ ID NO: 476720 - DNA, 384 bp, Shigella flexneri; identical to SEQ ID NO: 12183

SEQ ID NO: 476721 - DNA, 633 bp, Shigella flexneri
atgagcacggtagcgaaagatctcacagaagatattctcaatgaaattattgctggtgcaaatacctcgcttgagcaacttcttgcgttagcactgagagccgaacgtcgagacagaaatcgtttttatgaacgattaccagggaaacgaccagatagatcagatgaagaaggttgcgatatagactacatggagccttcagagatttatcaacttggtaaagatgacggctggaacgcttatcacgatgctgtgatgaagttggatgaaaaagttaaacctctttctcgaccggtagatcacggtttccgcgataactgcgaatgctctagttgccagaccacggcccgtatttgttccgaattgacagataagtccagcctaatctacgaagttaatgtaggcggtaatacatgggtcgaatgcacaagagctgcatacgtaagagcaaaagacaagggtgaattaaccagagttgttgcccatcacccaaataatgagcttaaagatcaccagattagagaactggtgaatgagttgcgggatattgcggttcagtaccacggaacgcagcaattgcgggagaaaattgccagagcagtgaacaactcaattagatcagaaagtatgtag

SEQ ID NO: 476722 - DNA, 390 bp, Shigella flexneri
atgggcttcccttctcctgcggcggattatgctgagagccgtatttctcttgatcagcagataattagacatccttcagcgacctacttcatgagggcggctgatagtcatcatcgtgagggaatattgcagggtgcattgctggtggtcgattcctcactgactcctgttgatggatctcttcttgtatgtgctctggatggggaatatcgcgtaaaaagataccggaagtatccacgtcagcatctggaggatttaagaactggtaagaaggaagcattgccaaaggatgatgatggatgcacgggcagcaatgccgtgtttggtgtgatcactcacattatcaacgacgcaagaagtggcgagtttgatgattgtcctgtgatgtag

SEQ ID NO: 476723 - DNA, 1101 bp, Shigella flexneri
atgagcgagtccaaatcgccggatgccctgagagcaatggtagccggtacgctggctaattttcagcacccaaccctgaaacacaacctgactacgcttaaagcgttacaccatgttgcgttgatggatgacacactgcatgtcgaactaatcatgcctttcgtgtggaataagccttttgaagacctgaaagagcaatgtagtggtgatctgctccgtatcactggcgcaaaggctattgactggaagctgtcgtacaacattgccacgcttaagcgcgtcaaaaaccaaccaggcattaatggtgttaagaatattatcgccgtaagctcaggcaagggcggtgtaggcaaatcgtccacagcagtaaacttggcactggctttggctgctgaaggtgcgaaagttggtattttggatgccgatatctatggtccatcaattccaaccatgctgggcgcggaaaaccaacgtccaacctcaccggacggtactcacatggcacctatcatgtctcatggcctggcaaccaactctattggttatctggtcaccgacgacaatgcaatggtgtggcgtggaccgatggccagcaaggcgctgatgcagatgttgcaggaaacactgtggcctgatctggactatctcgttctcgatatgccgccgggcactggtgatattcaattgacgctggcgcagaacattcctgtaactggtgcggttgtggtaactacgccgcaagacatcgcgctgatcgatgcgaagaaaggcattgtgatgttcgaaaaagtcgaagtgccggtactaggtatcgtcgaaaacatgagtgtgcatatttgcagtaactgcggtcatcacgagccaatttttggcaccggtggcgcacagaaactggccgagaaatacaacacgcagttgttaggccaaatgccacttcatatctctcttcgtgaagatctggataacggaacaccaaccgttattagtcgtccagatagcgaatttacggctatttatcgtgacctcgcagatcgcgttgctgcccaaatgtattggcaaggtgaagtaatacctggcgaaatcgcattccgcgcagtgtga

SEQ ID NO: 476724 - DNA, 246 bp, Shigella flexneri
atgtgttcaatttttggcgtattcgatatcaaaacagacgcagttgagctgcgtaagaaagcactcgagctgtcacgcctgatgcgtcatcgtggcccggactggtccggtatttatgccagcgataacgccattctcgctcacgaacgtctgtcaattgttgacgttaacgcgggggcgcaacctctctacaaccaacaaaaaaaccacgtactggcggtaaacggtgaaatctacaaccactag

SEQ ID NO: 476725 - DNA, 189 bp, Shigella flexneri
atggtgattaccgctattctgatggggctgatcctggcgttaacggacgatggcaacggtgtaccacgcggccctttggctcccttgctgattggtctactgattgcggtcattagcgcatctatgggcccattgacaggttttgccatgaacccagcgcgtgacttcggtccgaaagtctttgcctag

SEQ ID NO: 476726 - DNA, 192 bp, Shigella flexneri; identical to SEQ ID NO: 11809

SEQ ID NO: 476727 - DNA, 648 bp, Shigella flexneri
atgaaaatcgccgatctcgctgaagcaataggagtagatgcggcgaacatctcgcgcttagaaacgggtaagcaaaaacaatttaccgaacaaacactgagtaatattgccaagagcttaggtgttgatattgctgatctctttacctctgcccacaaaagtaatactgtatataaaaacagtaataatgaggatgttgcgcaggtgaaggatgtgttccgtattgaaatgctggatatcagtgcaagtgcgggaaatggccttatccagggcggtgatgtcattgatgtgattcatgccatcgaatacagaactgataatgctgtatcaatgttcggcggacgaccagccaatcacatcaaagttatcaacgttcgtggggacagtatgtgtccaaccattgagccaggagatctcatcttcgttgatgtcagcatcaatcagtttgatggtgatggtatatatgtctttggttttgatgacaaaatatatgttaaaagacttcaaatgattcctgacaaactgctggtgatttctgataaccagatttaccgtgaatggggaattactagcgaaaacgaacaccgattcatggtctttggaaaggtcttaatcagtcagtcgcaaacccttaagagacataattaa

SEQ ID NO: 476728 - DNA, 261 bp, Shigella flexneri
atgcaatcaccattacgaaatgtgcgtaaggcgcatggtttcactttgcagcatgttgctgcgggtgttcaagtcaatccagcgacgttgagtcgtattgagagactggagcagattccatctatcgagcttgcagaacgattagccaatttttttaagggtgaagtcagcgaaatgcagattctttatccggcacgttttcaatctagccaaaaccagaatgggtttaaaccacaggaacaggaggtgaaccgtgggtaa

SEQ ID NO: 476729 - DNA, 654 bp, Shigella flexneri
atgagtaataaatattgtcaggcactggtggaactgcggaacaaaccagcccatgaactgaaggaagtgggcgatcagtggcgcacgccagataacattttctggggaattaacaccctgtttggtccgtttgttctggatctgttcactgacggtgataacgccaaatgtgccgcgtattacacggcggaagacaacgcgctggcgcatgactggtcagaacgtcttgcggagcttaaaggtgctgcctttggtaatcccccatacagccgcgccagtcagcatgaggggcaatacatcaccggcatgcgttacatcatgaagcatgccagtgccatgcgtgataaaggcgggcgctatgttttcctgatcaaagctgccaccagcgaagtgtggtggccgaaagacgcagaccatattgcttttattcgcgggcgtattggttttgaactgcctgcctggtttatcccgaaggatgagaagcaggtgccgacaggcgctttcttcgctggtgctattgctgttttcgacaagacctggaagggaccggcaatcagctacatcgggcgcgatgaacttgaggcatgtggtgaagcctttctggtgcaggttcgccagcaggcggaaaaactggtcagggagatggcggcatga

SEQ ID NO: 476730 - DNA, 798 bp, Shigella flexneri
atgaataatctgatggtcattgatggtattgaagttcgtcgtgatgcttatgggcgttacagcctgaacgatctgcacagggctgctggttctctggataagcataagcctgcattctggctccgcaatgagcaaaccgaacgtttaataagcgagttgcagatttgcaactcggtcaatatagagccagttaacgttagtcgtggcggaaataaccaggggacgtatgtctgcaaagaactggtgtatgcctatgcaatgtggatcagcccgtcattccatctgaaggtgatccgtactttcgatatggtaaccagcgcaccggaaaaattatccgggcaggctgctgacaagatgcaggctggcgtgattctgctggactttatgcgccgggagttaaacctgtctaactcatctgtgcttggggcctgtcagaaactccaggaggctgttggcttaccgaatctggcaccgcgctatgccattgatgctcctgctgacgcgcctgatggctcaagccgccccacgctgtcgctgagtgcactgctgaaacagtatggtatccgcctgacggctaatcaggcatatcaccagatggcgaagctggggatcgttgaacaacgcgaacgatacagccgtaccgcgattaacaacatcaaaaaattctggtcgctgacaccgaaaggctgcatgttcggcaagaacatcaccagtcccgcaaatccgcgcgagacgcagccgcacttcttcgaatcccgattccctgagctgttaaagctgctcgataccgttcattga

SEQ ID NO: 476731 - DNA, 351 bp, Shigella flexneri; identical to SEQ ID NO: 38706

SEQ ID NO: 476732 - DNA, 585 bp, Shigella flexneri
atgccaatactttcagttttctctcatctaggcaagccgtttggatatctttttattaaaggtattagcggcaaagctgcatatgattgggtagcaccaattctacttacttctatcacagcagtacttttcattctattaaaaatccctgtcaaagatttatttgatgacaatggtttcattaaatcaatcgtttcatttatctctaacctaccagggttttatattgccgctctggccgccatagcaactttcaatagagctgagattgatttaccattgattagcaatgaaagaaatgcctctattgaaataaaagtaacaaaagaaaatggaaaagtagtaaattcagaggaggttctgaccagacgattatttctttgcatgctattctcttttttaacaacattaagcattgttataataatacttaatgctatattttcaccattaatcaatgtctatcaaaacagttttgttttaatggtttatactgttgtatttactttcctcgtttggcaactcttagtatcaactttctttggattatattatctcggaaacagaattcatatgaattattaa

SEQ ID NO: 476733 - DNA, 1023 bp, Shigella flexneri
atggcaaaattaaatgctagcgaaagactcgttactcatcatagtctgaccattgacacaaagtttagaaccaaggcaacacaagaggtaaaagcccagtgtatatgtcctgttccggaaatgtacatgcttgccccattgattgttaaacaaaagggactcgttcattcatatgattctgggaatattgtagttactctccaagatgtacaactttatcctttacttccagataactcacccacgcatattgtccttcttattaatagtgttgataaaaatggaagtactaccgttgtaaaaaatataaatactaatgaacgcgttgaaatccaaccaaaatatgaacaaggtgaaggctatgaagtttctacctatgttgtcatatcattaaatggaaataaaagaacctatgatatgatttgtacatctaccccaggtgtatctacggcccggttaaatagttttttagacaaaattctctttgaagtggcgaaagacaatgaagacttatttaccgcaaaacatccaactaacgttatttctgcaacatcaaaaaaagaagtaaaaatacgatacaaaccaatatttgaatttacaggaatgttagacaaggagctttttaataaaataagccaaaaaggattatcagatgtcatattagtcaaggatcaattcggaacaattaatgctcctgatgttaactcaccttacattccgactgaaagtacattaaaattacttccaaatcatggtgacaatgttattggatggattaaaaatgtagcatctcatttcaataaaaaaatgaatggtggttatgataaattaaaggttaaattccaagatcctgaaacaaataaaccaaggcaggttgatttcaaaacctcaaacatcaatcttaataatttagaaaaaacatttattaagaaaagcattatcgataactttaattcgcgcctgaaggattcatatgttaaaattgagctagagtttgttgtgaaaatgatagatttgatgtga

SEQ ID NO: 476734 - DNA, 393 bp, Shigella flexneri; identical to SEQ ID NO: 38703

SEQ ID NO: 476735 - DNA, 861 bp, Shigella flexneri
atgcaaaacgtacagccgctatctctggtaactactttagtaattttgaggtctaatggagagtcaaagtcgttaggtactgggttcttttatcaacatagcaatggtttcattttccttgcaactaactatcatgtaataactggaatcagcccatccgaaaggggtgtaaagccatttataggcgatagtattgatattcagctgagagataaaaccggaaaactattcaaacatacgatgcctctgtttaaagatggttcaccgctgtggttggagcaccccacagataaagaggcagacattatcttgatgcctttgcctcaagagttgtttgtaaacacaggagtaaaagtagtctcaaaaacaacgacactgcctaatgtccagataaacccctcatctcctgttgtaatgattggatatcctcatggttatcatgacacgactcactaccttccaatatggaaaacaggaagcttagcgagtgagccagatatcgatttcgatgggaagaaattaatagttgtcgatatttctgctttccctggaatgtcaggctctccggcattctatgtcacacacagtggttatcttacaaaagaagggaatatgatcatggatatgggaatgaaaattcatttccttggcgtttatgcaagtatgcaaatgctaaacagtgatcttttcttagaacaagtcgttagtgctgcagaatacaaagtgtcgcatagtgaatctttgcaactagggcatgtctggaaagctgagttacttgaagagatagctgcgacatctagtccgattgcaaccacaccatctcaatttcaaagtaatagcaaattcttatttaagtactga

SEQ ID NO: 476736 - DNA, 1734 bp, Shigella flexneri
atgagccggaaatcttaccccaacgtaaatgctgccaatcagtatgcccgtgatgtcgtgcgcggaaagattgtggcctgccagtttgtgattcaggcctgccagcgccatcttgatgacctgatggcggaaaaaagtaagtcgtttcgttaccgcttcgacaaagacctggctgaacgggccgcgaaatttattcagctgttgccacacaccaagggggagtgggcattcaaacggatgcccatcacgctggagccgtggcagctctttgtgatctgctgcgcgtttggctgggtcaataaaggctcccggctgcgccgcttccgtgaggtgtataccgaaatcccccgtaagaacggcaaatcggcaatctctgccggtgtcgccctgtattgttttgcctgtgataacgagtttggcgcggaagtgtattccggtgccacgacagagaaacaggcgtgggaagtctttcgcccggctcgactgatgtgtaaacgcacacccatgctgacggaagcgttcgggattgaggttaacgcctcaaacatgaaccgtccggaggatggcgcgcggtttgaaccgctgatcggtaaccccggtgatggttcatcaccccactgtgcggtggtggatgaatatcacgagcatgccaccgatgcgctttataccacaatgcttaccgggatgggggcgcgacgtcagccactgatgtgggccatcaccaccgccgggtacaacattgaggggccgtgctacgacaaacggcgggaagtcatcgagatgctcaacggctcggtgcctaacgatgaactgttcgggatcatctataccgttgatgaaggtgacgactggaccgacccgcaggtgctggaaaaagccaatccaaatattggcgtgtcggtttatcgcgaatttttgttaagtcagcagcagcgtgcgaaaaataacgcccgtctggcaaacgtctttaaaacaaaacacctcaatatctgggtgtcggcgcgttcggcgtatttcaacctggtgagctggcagagctgcgaggataaatcactgactcttgagcagttcgaggggcagccgtgcattctggcctttgacctggcgcgtaagctggatatgaacagcatggcgcgactttatacccgcgagattgacggtaaaacgcattactacagtgtggccccgcgtttctgggtaccgtatgacacggtgtatagcgtcgagaaaaatgaagatcgccggacagccgaacgctttcagaaatgggtggaaatgggcgttctgaccgttaccgatggtgcagaggtggattatcgctacatcctcgaagaggccaaagcggcgaacaaaatcagcccggtcagtgagtcacccatcgaccctttcggagcgaccgggctgtcacatgaccttgctgatgaagacctgaatcccgttactatcgtccagaacttcgccaatatgtccgacccgatgaaagagctggaggcagcgattgaatcgggacgctttcatcatgacggcaatcccatcatgacctggtgtatcggcaatgtggtcggcaaaaacatgccaggtaacgatgatttagtgaagcccgtcaaagagcaggcggaaaacaaaatcgatggtgcagttgcgctgattatggcggttggcagagccatgctgtacgagaaagaagacacgctgtctgaccacattgagtcctatgggatccgctcgctttaa

SEQ ID NO: 476737 - DNA, 483 bp, Shigella flexneri
gtgttcttttcgggattatttcaacgaaaaagtgacgcaccggtgaccacgccagcagagctggcggatgctatcgggttgtcctacgacacctataccggaaagcagatcagcagccagcgggccatgcgactgacggcggttttttcctgtgtcagggtgctggcggagtcggtcgggatgttgccctgcaacctgtatcacctgaacggcagtctgaagcagagagccgctggcgaacgtctgcataagctgatctccacgcatcccaatggctatatgacgccgcaggagttctgggagctggtggtcacctgtctgtgcctgcggggaaacttttacgcctacaaagtgaaagcatttggcgaagtggctgaactgctgcccgtcgatcccggctgtgtggtaccgaagcttaacagtagctgggagccggtctatcaggtcacattcccggatggctccacggatgtactgagctag

SEQ ID NO: 476738 - DNA, 411 bp, Shigella flexneri
atgaaaattcgtcaggcgcagaccagcgcaacctacattctgccggaccccggtgaactgaataaacgcgtcctgatccgccagcgggtggatatgcccgcggataactttggcgtggagcctcaatacccggttgcgttccggacatgggcgaaggttgtccagaccagtgccaccacctggcaggaaaccgcgcagaccggggacgccatcacccattacatcaccattcgttaccgccgggggatcaccgctgattatgaggtggtctgcggtgacagtgtgtaccgggtgaaacgtcagcgcgatctgaacggggcgcggcgctttctgctgctggagtgtacggagctgggcgaatgtaggcagagtcacggaggcaacaatgacgacttcctttttgcacgttga

SEQ ID NO: 476739 - DNA, 507 bp, Shigella flexneri
atgacgacttcctttttgcacgttgattttcagcagcctgcggagatgcgctttaaccgcgcccgtgtccggcgggcgtttgtcacgattggtcagcgtcatatgcgtgatgcccgtcggctggtgatgcgccgtgcgcggtcggcaccgggtgaaaaccccggttatcagaccggacgcctggctcgttcgattggttacatggtacccagagccagtaaacatcgccctggttttatggcacgtatagcccctaaccagcgtaatggagagggaaaccgccgtatcaccggtgatttttatccggcttttttgttctatggcgtgaggcgaggggcaaagcgtcgtcgcagccatcatcgtggtgcatccggtggcagcggctggcgactggctccacgtaataacttcatggtggaaactcttgaaaagaaccgcagctggacacgctattttctggcgcgggaattgcgtaaatcactgaagccggagcgacgacacagatga

SEQ ID NO: 476740 - DNA, 270 bp, Shigella flexneri; identical to SEQ ID NO: 384533

SEQ ID NO: 476741 - DNA, 1836 bp, Shigella flexneri
atggctgaatttgagcttaaggcgttgatcaccggtgtcgacaggctttctcccgcgctgtcgaaaatgcaaaagaaaatccggggatttaaacgccaggcggaagaagcgtcacagggtgggctggcgcttggtggcggactggcagctggtctgacgctttccctgaaatcttatgccgatcaggaaaacgccgccaccgggctgaaagtcgccatgatggatgcgaacggcgaggttggaaagagctttcaggacatcaataaactggctattggactgggtaaccagctacccggtacaacggctgatttccagaacatgatgcagatgctggtgcgtcaggggatcccggcagaaaacattctgggtggtgtgggtaaagcgacagcttatcttgcggtacaactgaaaaaaacaccggaagcggctgctgagtttgctgcaaagatgcaggatgctaccggaacggcgtcagaagacatgatggggctgttcgacactatccagaaggcgttttatctgggcgttgacgataccaacatgttgtccttcttcactaaaaccagttctgttctgaagatggtgaacaaggacggtcttcaggctgcacagagccttgcccccatcagcgtcatgatggatcagatggggatgaacggggagtcggcaggtaatgcactgcgaaaagttatccagtccggattaagtgttaagaaaatcagggacgttaataaagttatggcccgccagaaactcggggtacagctcgattttactgacggcaaaggaagttttggcggtcttgataacatgttcaggcaactggcaaagctgcgaaaactgaccgacgttaagcgaacaggtgtacttaaggcaatatttggtgatgatgccgaaacccttcaggtggtcaatgcactaatcgataaaggaaaggatggctacgatcagatccagcagaagatgaataaacaggccagcctgaataaacgtgttcaggcacagcttggtacgctgtccaacctgtgggaggcaatgacagggaccgcaactaacggccttgcggctattggcggcgcattttctggtgacgctaaaaatatcacgcaatggctgggggagttgggggagaaattcacgaagtttgcggatgaaaatccccgggttattcgcggcgtcgtcgggcttgctgccggtcttgcgattctgaaactgggattgatgggtgttggcggtgccatcagtattgtcagcaggatcatgtcgatgacgccgattggcatgattgcgacggcgatagccctggctgcgggattaattatcactaactgggatgttgtcggaccttattttaagaaactctgggaaaccattggtccttattttgaggctggctgggaactccttaagaaagtttttgcctggtcgccgctggggatggtgatcaataactgggggccggttgttaagtggtttcaggatatgtgggacaagctgaagccaattattgagtggtttaccgacagttccggtgacacggtcgatgccattaactctgcgcagtggggcgcgggtgcttatgatgcttatgggacgggaataccggcgcggggatacacaccttatccggcggtagatccggctcagtcaaacaacgcctccgatgtcacaggcccgaaccccttcatgattaacaaagcttctgcgccaaaagttgatggtgagatcaaggtctcttttgtgaattcgcctccgggtatgcgggttatggaaacgcgatccagcggttttgatgtcagccatgatgttggctatacgcgctttggcaggtaa

SEQ ID NO: 476742 - DNA, 258 bp, Shigella flexneri
atgtataataacaaaatcgacagcaacagaaaaataagacatgattgggttgatgctttaaaatttctcggtatttttgctatatatttaggtcaccttgggttgggggctggcaaattgtatccttttgtttttagttatcacgtcccactattctttttcgctgctggtttttttactatcaaaaaaaatgacttatctattttcgattatatcaagtcaaagttttacagattaatgattccatatctatattaa

SEQ ID NO: 476743 - DNA, 1191 bp, Shigella flexneri
atgcctgcccgtaaagtatgccagacttttttccgtaatgctttagcttccacgcatcagtatcgacaaaatgccattattgattctgctgctgctttagtcggtggcgcatctctttctcttaccagcattggccggcatttacccggtcctgctcgcgtgaaagataaaataaaacgcgttgaccgtctgttgggtaataaacgacttcataatgatatccctctgatattcaaaaatattacatccatgatgacaaataaactgtcgtggtgtgttatcgctgttgactggagcggttacccttttcaggaatatcatgtccttcgtgccagcctcctctgcgacggtcgctctatccccctgatgagtcaggtcttcccgtcaaaaaaaaataacgaggcggtggaaatcgcttttctggatgcgctttccggggccatttctccccggactcgtgttgttattgttactgatgctggttttcaaagtgcatggttccgtcatatcaaatcacagggatgggattttattggtcgtatcaggggggtagtgaagttcaggctggatagtgacaaagataagtggctggacataaaaatgtgcagggggagttcagaggcaaaatacctggagacgggaaccctggcccggaaaaaacgctcgcagtgtgaaggacatttttatctttataaacattcacctaaaggcagaaaaagcaggcgtgccagagggaggccgggcttaccaacaacggaaaaagaacaaaaagccgcaggcagagaaccatggttaatattcagcaatacagctgagtttaatgccaaaaaaatcatgaaactgtacagtcgaagaatgcagatagagcaaaactttcgggatgaaaaaagtgaacgctttggttttggccttcgggcgagcagaagtcggaggggagagcgttttctggtattaagtctactggttacactggccagtatcgtactctggctacttggttatcattttgaaaataaaggatttcatttaaagtatcaggctaatagtctcaaaaaacgaagagtattgtcttttctgacgctggctgaaaacgtcctgagatttaaccctgaacttctacgacgagcacaacctgaaaagatattgtgccggttggccagcacttaccgaagtatggtgctggcttactga

SEQ ID NO: 476744 - DNA, 525 bp, Shigella flexneri
gtgtccgttaaactcaggctacctcatgagtggtcacaggtcgatctggataagaaaatggcatggatgcaccccgatgaaacaaaagctggcaatgcgatcggagttcctcttaacgaaaccgcatgccagatattaagaaaacagcaggggctccataagagatgggtatttgtccacaccaaacctgcctaccgaagcgacggaacaaaaacagcagcggtaaggaagatgagaaccgacagcaacaaggcatggaagggagcgttaaagcgggcaggcattagcaacttccgcttccatgatctgaggcatacctgggcaagctggctggttcagtccggtgtctctcttcttgcacttaaagagatgggaggatgggaaactctcgaaatggttcaaagatacgcccacctttcagccgggcatctcaccgagcacgcaagcaaaatcgatgcgattataagtcgcaatggcacaaatacggcacaagaggagaacgtggtttacttaaatgcgaggtaa

SEQ ID NO: 476745 - DNA, 1251 bp, Shigella flexneri
atggatgtcatgagaagtgttctgggaatggtggtactgctggcaattgcgtttttactgtcagtaaacaagaagaagatcagcctgcgtaccgttggcgcggcgttagtgttacaggtcgtgattggcgggattatgctttggttaccgccagggcgttgggtcgcagaaaaagtcgcttttggcgtccacaaagtgatggcgtacagcgacgcaggtagcgcatttatcttcggttctctggtcggaccgaaaatggataccttatttgatggcgcaggatttatctttggtttcagggtattaccggcaattatcttcgtcactgcacaggtgagtattctctactacatcggtgtgatggggatcttaattcgcattctcggcggtatcttccagaaagctttaaatatcagcaagatcgagtcattcgtcgcggtcaccaccattttcctcgggcaaaacgaaattccggcgatcgtcaaaccctttatcgatcgtctgaatcgcaatgaattatttacagcgatttgtagtggcatggcctcgattgctggttcgacaatgattggttacgccgcactgggcgtacctgtggaatatttgctggcggcatcgttaatggcgatccctggcgggatcttgtttgcccgcctgttaagcccggctacggaatcttcgcaggtttcttttaataacctctctttcaccgaaacaccgccaaaaagcattattgaagccgatgcgacaggggcaatgaccgggctgaaaatcgccgccggtgtagcgacagttgttatggcatttgtcgccatcattgcgttaattaacggtattatcggcggcgttggcggctggtttggttttgaacatgcctcgctggagtccattttaggttacctgctggccccacttgcgtgggtaatgggtgttgactggagtgatgcaaatcttgccgggagtttgattggacagaaactggcaataaatgaatttgtcgcttatctcaatttctcaccctatctgcaaacggctggcactctggatgctaaaaccgtggcgattatttccttcgcgttgtgcggtttcgctaactttggttctatcggggtggtggtgggggcgttttctgcggttgcgccacaccgtgcgccggaaatcgcccggcttggtttacgcgcgctggcggcggcgacactttctaatctgatgagtgccaccattgccgggttctttattggtttagcgtag

SEQ ID NO: 476746 - DNA, 204 bp, Shigella flexneri
atgcgtttaatctccgtagtgctgggggcgaaaactgaccgtatccgttttaatgagtctgagaaattattgacctggggtttccgcttctttgaaactgtgacgccaattaaacctgatgccacctttgtgactcagcgcgtctggtttggtgataagatcgaagtgaatctcggggcaggcgaagcgggctccgtgaggtag

SEQ ID NO: 476747 - DNA, 1686 bp, Shigella flexneri; identical to SEQ ID NO: 471827

SEQ ID NO: 476748 - DNA, 570 bp, Shigella flexneri
atggcgtcctgggcaacccgtacgcctgctatccgcgatattctctctgtctcgatcgctgaaatgggcggtgttctctttggtctgtcgatcggttcgatgagcggtattctctgctcggcgtggttagtgaaacgctttgggacacgtaatgtcatcctggtcacgatgtcctgcgcattgatcgggatgatgatattaagtctggcactctggctgacatcgcccctgctctttgccgttggtctcggcgtctttggggcaagttttggttctgcggaagtggcgataaacgttgaaggtgccgccgttgagcgagaaatgaataaaacggttttgccgatgatgcacggtttttatagcctgggcacgctggcaggcgctggtgtcgggatggcactgacggcctttggcgttccggcaacggtgcacattttattggcggcgctggtaggtatcgcgcctatttatatcgccattcaggcaatccctgacggtacgggcaaaaatgctggcgatggcctttgccgaaggttctgccaacgactggttacccttattaatggttga

SEQ ID NO: 476749 - DNA, 834 bp, Shigella flexneri; identical to SEQ ID NO: 476088

SEQ ID NO: 476750 - DNA, 402 bp, Shigella flexneri; identical to SEQ ID NO: 471906

SEQ ID NO: 476751 - DNA, 1089 bp, Shigella flexneri; identical to SEQ ID NO: 471932

SEQ ID NO: 476752 - DNA, 963 bp, Shigella flexneri; identical to SEQ ID NO: 471895

SEQ ID NO: 476753 - DNA, 507 bp, Shigella flexneri; identical to SEQ ID NO: 475566

SEQ ID NO: 476754 - DNA, 297 bp, Shigella flexneri
atgtacaatcaattagccgcgccgatgcttgaagatttacgcagcgtgatgcaagaagaaacgcaaagctttcttgataagttaattcaggatgcggggtatcccgttgacaagacgtttattgcctacggtgagttaagcgaacatattctggaagtatgtcacaaacatcatttcaatttggtgatttgcggtaatcacaatcacagtttcttttcgcgagcatcctgctcggcgaaaagagtgattgcctcaagtgaggtcgatgtgctgttagttccacttacgggagattaa

SEQ ID NO: 476755 - DNA, 1140 bp, Shigella flexneri
gtgcaatttcagcgtcctgcctgggacggctatctacgcgtaaatgcgttgctggcagataaattactgccgctgttgcaagacgatgacattatctggatccacgattatcacctgttgccctttgcgcatgaattacgcaaacgtggggtgaataatcgcattggttttttcttgcatattcctttcccgacaccggaaattttcaacgcgctgccgacatatgacaccttgcttgaacagctttgtgattatgatttgctgggtttacagacagaaaacgatcgtctggcgttcctggattgcctttctaacctgacccgcgtcacgacacgtagcgcaaaaagccatacagcctggggaaaagcatttcgaacagaagtctacccgatcggcattgaaccgaaagaaatagccaaacaggctgccgggccactgccgccaaaactggcgcaacttaaagcggaattgaaaaacgtacaaaatatcttttctgtcgaacggctggattattccaaaggtttgccggagcgttttctcgcctatgaggcattgctggaaaaatatccgcagcatcatggtaaaattcgttatacccagattgcaccaacgtcgcgtggtgatgtgcaagcctaccaggatattcgtcatcagctcgaaaatgaagctggacgaattaatggtaaatacgggcaattaggctggacgccgctttattatttgaatcagcattttgaccgtaaattactgatgaaaatattccgctactctgacgtgggcttagtgacgccactgcgtgacgggatgaacctggtagcaaaagagtatgttgctgctcaggacccagccaacccgggcgttcttgttctttcgcaatttgcgggagcggcaaacgagttaacgtcggcgttaattgttaacccctacgatcgtgacgaagttgcagctgcgctggatcgtgcattgactatgtcgctggcggaacgtatttcccgtcatgcagaaatgctggacgttatcgtgaaaaacgatattaaccactggcaggagtgcttcattagcgacctaaagcagatagttccgcgaagcgcggaaagccagcagcgcgataaagttgctacctttccaaagcttgcgtag

SEQ ID NO: 476756 - DNA, 318 bp, Shigella flexneri; identical to SEQ ID NO: 472161

SEQ ID NO: 476757 - DNA, 615 bp, Shigella flexneri
atgacgacctctaccctgcaatataaagataataaaactgttgaaattgaacatcgtgtcattaataaattatttcgtcgcctaatcatttttctttttattctgtttgttttttcgtttcttgatcgcatcaatataggatttgccggactgacaatgggcaaggatcttggcctgacgtccacaatgtttggcctcgccgcaacactcttttatgtcacgtacgtcatgtgcgggatccccagtaatatgatgttagcgaaaattggcgctcgtcgatggatcgctgggatcatggtggtctggggaattgcttccacctgcacaatgtttgcaacaagccccgaaacactctatctactgcgtatgctggttggtattgctgaggcgggttttttacctggtattttggtttatctgacctggtggttcccggcatatcatcgggccagagccaatgccttatttatgatagcgatgccagtcactatgatgctgggattgatcctttcaggctacattctggccttggatggactgtggaatctaaaaggctggcaatggctctttttgctggaaggtctgccatcggtcattcttggtgtcgtcacctag

SEQ ID NO: 476758 - DNA, 153 bp, Shigella flexneri
atggctcgtctggtagcatttgatatggatggcactttattgatgcctgaccatcatttaggtgagaaaaccctctctactttggcgcgactgcgtgaacgcgacattaccctcacttttgccacggggcgctatcgctggatgcatatttga

SEQ ID NO: 476759 - DNA, 213 bp, Shigella flexneri; identical to SEQ ID NO: 472704

SEQ ID NO: 476760 - DNA, 267 bp, Shigella flexneri
atgttgggacttgaaccgaagaacacggcggtgcggagtccggagagtaacggaatagcagagagcttcgtgaaaacgataaagcgtgactacatcagtatcatgcccaaaccagacgggttaacggcagcaaagaaccttgcagaggcgttcgagcattataacgaatggcatccgcatagtgcgctgagttatcgctcgccacgggaatatctgcggcagcgggcttgtaatgggttaagtgataacagatgtctggaaatatag

SEQ ID NO: 476761 - DNA, 573 bp, Shigella flexneri
atggcgcagtcgaaactctatccagttgtgatggcaggtggctccggtagccgtttatggccgctttcccgcgtactttaccccaagcagtttttatgcctgaaaggcgatctcaccatgctgcaaaccaccatctgccgcctgaacggcgtggagtgcgaaagcccggtggtgatttgcaatgagcagcaccgctttattgtcgcggaacagctgcgtcaactgaacaaactcaccgagaacattattctcgaaccggcagggcgtaacactgcacctgccattgcactggcggcgctggcggcaaaacgtcatagcccggagagcgacccgttaatgctggtattggcggcggatcatgtgattgccgatgaagacgcgttccgtgccgccgtgcgtaatgccatgccttatgccgaagcgggcaagctggtgacctttggcattgtgccggatctaccagaaaccggttatggctatattcgtcgcggtgaagtgtctgtgggtgagcaggatacggtggcctttgaagtggcgcagtttgtcgaaaaaccgaatctggaaaccgcctag

SEQ ID NO: 476762 - DNA, 630 bp, Shigella flexneri
atggctacgtataatggcgaatgctggattgaggaacaattaaaaagtattattgaacaaaaagatgtagacatctcaatttttatatcagatgatttatcaactgataatacattaaatatttgtgaagaatttcaattatcatatccctcaattataaatatacttccaagcgtcaataagtttgggggggcaggtaaaaatttttatagattaattaaagatgtcgatcttgaaaactatgattatatctgttttagtgatcaggacgatatttggtataaagataaaataaaaaatgcaattgactgcttggtatttaataatgcgaattgttattccagtaatgtaattgcatattatccatcagggcgaaaaaatttagttgataaggctcagtcgcaaactcaattcgattatttttttgaagcagcaggtccggggtgtacatatgttataaaaaaagaaacgcttattgaatttaagaagttcatcataaataataaaaatgctgcacaagatatctgtctgcatgattggtttttatattcatttgcgcggacgagaaattattcgtggtatattgatagaaaaccaacttccctaatagagagtaaaagaggcacatga

SEQ ID NO: 476763 - DNA, 198 bp, Shigella flexneri
atggtctgccagatggaactgaccagccatctgctgacggctgcagccttcggcacgatgaagaacagcgaaaatgagcttgctgagcaacttatagaacaaaccggcgataacactctgacgttaatggataaaggttattactcgctgggactgttaaatgcctggagcctggcgggagaacaccgcactggatga

SEQ ID NO: 476764 - DNA, 426 bp, Shigella flexneri
atgagttctttaagtcaggctgcgagcagtgtggaaaaacgcacgaatgctcgttactggatagtggtgatgttgtttatcgtcacatccttcaactacggcgaccgcgctacgctttctattgccggttcggaaatggccaaagatatcggccttgatcccgtgggaatgggctatgtgttctctgccttctcatgggcttatgttatcgggcagatccctggtggttggttgctggatcgttttggttcaaaacgcgtctacttctggtcgatctttatctggtcgatgtttaccttgctgcaaggcttcgtcgatatctttagtggattcggcattatcgttgccctgtttactctgcgcttcctggtcgggcttgctgaagcgccatctttccccggcaacagtcgcattgttgcggcctag

SEQ ID NO: 476765 - DNA, 1056 bp, Shigella flexneri
atgaaacgaacgcctgtcctgattgatgtgaacggcgttccgcttcgtgagagtctcagctacaacggaggcggcgcaggatttggcgggcaaatggcagagtggttaccaccggcgcagagtgccgatgcggccctgttgcctgcattgcgtctggggaatgcccgggcagatgatctggtgcgcaataacggtatcgcggctaatgcggtggccctgcataaggatcatatcgtcgggcacatgtttcttatcagctaccgtctgaactggcgttggctggggatgcgggagaccacggcaaaaagttttgtcggggaggtggaagcagcctggtcggaatacgcagaaggaatgtttggcgagatcgacgtggaagggaaacgcacgtttacggaatttatccgtgaaggggtgggcgtgcatgcctttaacggcgaaatctttgtgcagccggtctgggatacggaaaccacgcagttattccgtacgcgttttaaagccgtgagtccgaaacgggtggacacgccaggacacggtatggggaaccactttctgcgggccggggttgaggtcgatcggtatgggcgggcgattgcgtaccatatctgtgaggatgattttccgttctctggtgccggacgctgggagcggatcccgcgtgagcttcccaccgggcgtccggccatgctgcatatttttgagccggtggaggacgggcagacccgtggggctaatcagttttacagcgtaatggagcggatgaagatgctggactccctgcaggccacgcagcttcagtcggccattgtgaaggcgatgtatgcagccacaatcgaaagtgaacttgataccgaaaaggcatttgaatatatcgcgggggcaccgcaaggtcagcaggataatccgcttattaatattctggagaagttcacccgctggtatgacacgaataacgtgacgctgggcggtgttaaaattccgcaccttttttcctggcgatgcgctgaacctgcagacagcgcaggattcagacaatggattttcggcgcttga

SEQ ID NO: 476766 - DNA, 285 bp, Shigella flexneri; identical to SEQ ID NO: 474730

SEQ ID NO: 476767 - DNA, 927 bp, Shigella flexneri; identical to SEQ ID NO: 473398

SEQ ID NO: 476768 - DNA, 210 bp, Shigella flexneri; identical to SEQ ID NO: 475253

SEQ ID NO: 476769 - DNA, 834 bp, Shigella flexneri; identical to SEQ ID NO: 473804

SEQ ID NO: 476770 - DNA, 489 bp, Shigella flexneri
atggcagcaccaaagggcaaccgattttgggaggcccgcagtagtcatgggcgaaatcctaaattcgaatcgcctgaggcgctgtgggctgcttgttgtgaatacttcgagtgggctgatgataacccgctatgggagggtaaggtattttcatatcagggagaaataattaaggctaatgtccctaagatgcgagccatgactatttcaggattgtgtaccttccttgatatcaccaggcaaacatggggaaccttccggtcaatggaaggtttttctgacgtcacatcacgagcggaagacatcatctacgaccagaaattctctggcgcagccgctgaccttctcaacgctaacatcatcgcccgtgatttgggcctcaaagagcagtcgcaagttgaagacgtgacacctgataagggagatcgcgataagcgacgctctcgtatcaaggagctattcaaccgtggaactggacgcgattcttga

SEQ ID NO: 476771 - DNA, 180 bp, Shigella flexneri
gtgagccgcgtaatcaatttgggtaaggagaagagattcccaattactcaagagctatacgagcggctggaaagcgtcatccatgattacgatggtgaaatcagtttatgcgaggcgattggtacactcgaattgctgaagcagtcactgattgaaggcgcgaaagagtccttaacctga

SEQ ID NO: 476772 - DNA, 243 bp, Shigella flexneri
atggcagagattattcccatgactgaagaacagaaattcaagttagaaatttaccgactgctatctaagaacaattcagcggcagaggaagcttttgcattcattggcgctgaccagctgaaactggaattgttcaagttgcactacaacgatggcggtgcaaatccagacttcacatctcgcactatcgaagcggtgcgtaaatcgaaggaagcgttagacctgttcaccaccggagcatga

SEQ ID NO: 476773 - DNA, 189 bp, Shigella flexneri
atgtcatctccaatcatgaagtatttcgcttatcaacacctccctgcgcatctgcaggaagtaagtaagccaatcggtgaacttgcgacactgatggatgaatcactgccggacagtgctgaaaagtcagcaggtctccgcaagctgctcgaagctaaagatgcgctggtgcgagcaaagctggggtaa

SEQ ID NO: 476774 - DNA, 468 bp, Shigella flexneri
atgagcagagtaaccgcgattatctccgctctggttatctgcatcatcgtctgcctgtcatgggctgttaatcattaccgtgataacgccattacctacaaagcccagcgcgacaaaaatgccagagaactgaagctggcgaacgcggcaattactgacatgcagatgcgtcagcgtgatgttgctgcgctcgatgcaaaatacacgaaggagttggctaatgcgaaagctgaaaatgatgctcttcggcgcaagcttgataatggtggcagggtgctcgtcaaaggaaaatgccctgtgccatcctcagccgaaacctccagcgcctccggcatgggcaatgatgccaccgtcgaactctctccagttgctggacgaaacgttctcagtatcagatctggaatcatcagcgaccaaacatcactgagaacgcttcaggaatacatcaacacgcagtgcctgaaatga

SEQ ID NO: 476775 - DNA, 477 bp, Shigella flexneri
atggtggaaatcaataatcaacgtaaggcgttcctcgatatgctggcgtggtcagaggggactgataacggacgtcagaaaaccagaaatcatggttatgacgtcattgtaggcggagagctattcactgattactcagatcaccctcgcaaacttgtcacgctaaaccccaaactcaaatcaacagctgcaggccgttaccagcttctttcccgttggtgggatgcctatcgtaagcagcttggcctgaaagatttctctccgaaaagccaggacgctgtggcactgcaacagattaaagagcgtggcgctttaccgatgattgatcgcggtgatatccgtcaggctatcgaccgttgcagcaatatctgggcttcactgccgggcgctggttatggtcagttcgagcataaggctgacaacctgattgcaaaattcaaagaagcaggcggaacggtcagagagattgaggtatga

SEQ ID NO: 476776 - DNA, 324 bp, Shigella flexneri; identical to SEQ ID NO: 30477

SEQ ID NO: 476777 - DNA, 624 bp, Shigella flexneri
atgagactcgaaagcgtagctaaatttcattcgccaaaaagcccgatgatgagcgactcaccacgggctacggcttctgactctctttccggtactgatgtgatggctgctatggggatggcgcaatcacaagccggattcggaatggctgcattctgcggtaagcatgaactcagccagaacgacaaacaaaaggctatcaactatctgatgcaatttgcacacaaggtatcggggaaataccgtggtgtggcaaagcttgaaggaaatactaaggcaaaggtactgcaagtgctcgcaacattcgcttatgcggattattgccgtagtgccgcgacgccgggggcaagatgcagagattgccacggtacaggccgcgcggttgatatagcaaaaacagagcagtgggggagagttgttgagaaagagtgcggaagatgcaaaggtgtcggctattcaaggatgccagcaagcgccgcatatcgcgctgtaacgatgctaatcccaaaccttactcaacccacctggtcacgcactgttaagccgctgtatgacgctctggtggtgcaatgccacaaggaagagtcaatcgcagacaatatcttgaatgcggtcacacgttag

SEQ ID NO: 476778 - DNA, 666 bp, Shigella flexneri
atgcgctattacgaaagaattgatggcagcaaataccgaaatatttgggtagttggcgatctgcacggatgctacacgaacctgatgaaaaaactggagacgataggattcgacaccaaaaaagacctgcttatctcggttggcgatttggtcgatcgcggtacagagaacgttgaatgcctggaattaatcacattccactggttcagagctgtacgtggaaaccatgagcaaatgatgattgatggcttatcagagcgcggaaacgtcaatcactggctgcttaatggcggtggctggttctttaatctcgattacgacaaagaaattctggctaaagctcttgcccataaagcagatgaacttccgttaatcatcgaactggtgagtaaagataaaaaatatgtcatctgccacgccgattatccttgtgacgaatacgagtttggaaagccagttgatcatcagcaggtaatctggaaccgcgaacgaatcagcaactcacaagacgggatcgtgaaagaaatcaaaggcgcggacacgttcatctttggtcatacgccagcagtgaaaccactcaagtttgccaaccagatgtatatcgataccggcgcagtgttctgcggaaacctcacattgattcaggtacagggagaaggcgcatga

SEQ ID NO: 476779 - DNA, 207 bp, Shigella flexneri
atgacgttctcagtaaaaaccattccagacatgctcgttgaagcatacggaaaccagacagaagtagcacgcagactgaaatgtagtcgcggtacggtcagaaaatacgttgatgataaagacgggaaaatgcacgccatcgtcaacgacgttctcatggttcatcgcggatggagtgaaagagatgcgctattacgaaagaattga

SEQ ID NO: 476780 - DNA, 612 bp, Shigella flexneri
atggctaaaccagcgcgaagacgatgtaaaaacgatgaatgtcgggaatggtttcaccctgcattcgctaatcagtggtggtgctctccagagtgtggaaccaagatagcactcgaacgacgaagcaaagaacgcaaaaaagcggaaaaagcagcagagaagaaacgacgacgagaggagcagaaacagaaagataaacttaagattcgaaaactcgccttaaagccccgcagttactggattaaacaagcacaacaagccgtaaacgccttcatcagagaaagagaccgcgacttaccatgtatctcgtgcggaacgctcacgtctgctcagtgggatgccggacattaccggacaactgctgcggcacctcaactccgatttgatgaacgcaatattcacaagcaatgcgtggtgtgcaaccagcacaaaagcggaaatctcgttccgtatcgcgtcgaactgattaatcgcatcgggaaggaagcagtagacgaaatcgaatcaaaccataaccgccatcgctggactgtcgaagagtgcaaggcgatcaaggcagagtaccaacagaaactcaaagacctgcgaaatagcagaagtgaggccgcatga

SEQ ID NO: 476781 - DNA, 177 bp, Shigella flexneri
atgcttagcccatcccaatcccttcaataccagaaagaaagcatcgagcgagctttaacgtgcgctaactgcggtcagaagctgcatgtgctggaagttcacatgtgtgagcactgctgcgcagaactgatgagcgatccgaatagctcaatgtacgaggaagaatacgatggctaa

SEQ ID NO: 476782 - DNA, 411 bp, Shigella flexneri
atggattattcacagttaagtgattttgaaattaacagacgagtatgtgaggctttagatatggaggagcatttcttcatacctgatgacgaagcagacttcgattctgagatccccactgacgaaagaggtcctatttggcagacgcaaaaaagggatattaatggcttccgttcttcaaacggaaattgcttcaatccttgcaataatcctgaatacgcgtggccaattatcactgaaagcaaaataagcataatgtttgatagtaccgatacgagatatgaaggcgaatatcacgagtggtgtgatgcgatttcatcttgtcaaaagttcggaattcagcatcagtctaatccactacgcgccgccatgattgtctttctcatgatgcaggacgccaataatgcttag

SEQ ID NO: 476783 - DNA, 528 bp, Shigella flexneri
atgactatcaaatcaaatacgccggcacacgacaaggactgctggcaaacgccgctttggctttttgattcactggatattgagtttggattctggctggattcagctgtgagcgacaaaaatgctctgtgcgctcactggctaactgaggccgacgacgcgctcaattctgagtgggtaagtcacggtgcaatctggaataacccaccgtacagcaatatcaggccgtgggtggaaaaagccgctgagcagtgcatacaacagcgacagacggtagtgatgcttgtgccagaggatatgtctgtcggatggttcagcaaggctctggagagtgttgacgaagttcgcatcatcactgatggacggattaattttatcgaaccatcgacagggctggagaagaagggaaacagcaaaggttccatgctgctgatttggcgaccgttcattagtcctcgacggatgtttactaccgtatccaaagcggcattgatggcgatcgggcagggcgtcaggagggcggaatga

SEQ ID NO: 476784 - DNA, 441 bp, Shigella flexneri
atgaaaaaactaacctttgaaattcgatctccagcacatcagcaaaacgctattcacgcagtacagcaaattcttccagacccaaccaaaccaatcgtagtaaccattcaggaacgcaaccgcagcttagaccaaaacaggaaactatgggcctgcttaggtgacgtctctcgtcaggttgaatggcatggtcgctggctggatgcagaaagctggaagtgtgtgtttaccgcagcattaaagcagcaggacgttgttcctaaccttgccgggaatggctttgtggtaataggccagtcaaccagcaggatgcgtgtaagcgaatttgcggagctattagagcttatacaggcattcggtacagagcgtggcgttaagtggtcagacgaagcgcgactggctctcgaatggaaagcgcgatggggagatcgggctgcatga

SEQ ID NO: 476785 - DNA, 1437 bp, Shigella flexneri
atgaccgataatttttatgcgccgccccatagcatcgaggcagagcaggcggtgattggtggattgcttctggatgatgacagcagtgagcgcgtccagaaggttctggcgatgctgaagcctgattcattttacagccggccacacaaaatcattttcgaagaaataaccagaatgcaccgtgagcaaaagccagtagatggcctgacgcttttcgatgaactggagcgtaaatcgttaacggcgtctgttggcggttttgcttatatcgctgagatcgcaaagaacacgccaagcgcagcaaacatcgttgcctatgcaatgcaggttcgcgaaaccgcaatggaacgctacgccatcaaccgcatgactgaagcgacggaattgctctattcccgcaacggaatgactgcaacgcagaagtacgaagctattcagtcgattttcacgcaactgacagaccatgcaaaaaccggatcgcgtcgcggccttcgctcatttggtgaggtcatggaagactgggttagcgaccttgagaagcgatttgacccgtcaggcgaacaacggggaatgagcacagggatcccatcgctggacaggatgctgtcaccgaaaggtctggtgaaaggctctctgtttgtcattggcgctcgccctaagatggggaaaacgacgctatacagccagatggcaatcaactgcgcagtgcatgagaaaaagcccgctctgatgttcagccttgaaatgcccggtgaccagatactggaaaaactggtaggacagaagtcaggtgttaacccgaatattttttaccttccggcgacaaatgacgctgatgacggctatcagggtgattacgatggtgacttcaacagggcgatcgaaacagccaatcgcttgagtgaaatcgacatgctttacatcgacgacacgccgggattatctctggctcaaatcgtcagcgaaagccgtcgaatcaagcgagaaaaaggatgtgttggcatgattctggtcgattacctgacactaatgaccgctgagaaggccgatcgcaacgaccttgcttacggcatgatcaccaaaggactgaagaaccttgccaaagagcttgattgcgttgttgtgcttctgacgcagcttaaccgcgcactggaaagccgaaccaataaacgcccactaccaagtgactcacgagatacagggcagattgaacaggattgcgattattgggtggggatccatcgtgaaggtgcttttgatgacagttttccacctggtgaaaccgaactaatccttcgtctcaatcgtcatggcaataccggcacggtgtattgcattcaggcaaatggcgctatttatgacacagaccaacagtctgctgaaatgcgccgccgtgaacgcgaggaaccgcagtccaagaagaaaggaggattctga

SEQ ID NO: 476786 - DNA, 450 bp, Shigella flexneri
atgacgattttcaggcaaaaaattgtccaacggttgtccataaacaataatataaataatatctctaatactgacgtattagagagtgccacagcagacaaaaagtctgacaagaaaaaaccttccgtcagctgtcaggatgttgtcgatgcttaccacgaaatccttcctgaagcgccaagaatccgcgcactgaatgacaagcgtaaaaaccagatccgaacgttctggcgcaaagccggagtgataacccgccagcttgacgggcatgggttcacgatgcaggactggagaaattatttgagctacgtaggcgaaaattgccgatggatgttcgaagaacgcccaaaccatcaacgcggaaccgtctggcacaaaaagggatttgatttcctgcttaacgataatacctacctgaaagttcgtgagggtgaacacgatgaccgataa

SEQ ID NO: 476787 - DNA, 414 bp, Shigella flexneri
atgggcgtcgttaagttagctgattacaggcataaccctgtacaacatcaggaggcatccagtatggggtatgtctctatacaccgccagtttatggacagcaggctctataaggactctcaggcagtacatctttggcttcacttaatcctcaaggctaatcacgaatctactgtcgtcaatacggatatcggtccgataactgttgatcgcggtcagatgataactggacgcccgtcgctggtcagagaaacattcatccccgacaacaaagttcggagcttattacggacttttgagtcgaaagggatgcttaatatttgctcgatggggaagaaatttagcctgtttacaatcgttaaatatgacgattttcaggcaaaaaattgtccaacggttgtccataaacaataa

SEQ ID NO: 476788 - DNA, 162 bp, Shigella flexneri; identical to SEQ ID NO: 13475

SEQ ID NO: 476789 - DNA, 279 bp, Shigella flexneri
atgcaacttacaagtactcgcaagaaagcgaatgcaattacaagcaacatcctaaatcgaattgctgtacgtggtcagcgaaaggttgctgatgcattagggatcaatgaatcgcaaatttcgcgatggaaagacagctttatcccaaagatggccatgcttctggctgtgctggagtggggtgttgaagacgaggaattagcggagctggcaaagaaagtagccatggtgctgacaaaagaaaagcctcaagactgcggcaacagttttgaggcctga

SEQ ID NO: 476790 - DNA, 195 bp, Shigella flexneri
atgattcgaatgacacttgccgattacgccaaaatccatggacaggctaaagcagccagtgactttggtgtaatccagtgcgctatcagcaaggccattctggcaggccgtaacattatggttacggtaaagcctgatggcagtgtgattggagaggaagttcgtcctttcccaagcaacaagaaaaacaaatag

SEQ ID NO: 476791 - DNA, 717 bp, Shigella flexneri
atggaaaataagaaatcactgacgacagaacagctcgaagacgctaagcggcttaaggctttgtatgagtcaaaaaagaaagagttgggaataacccaatactcaatcgctgatgaactgggtatcacccaaggagcggtagggcattatcttaatggcagaaacgcgctaaacgttgaggttgcatctggttttgcacgactgttgcaagtctcaattgctgattttagccagtcaattgctgccaaggttgcagaacaggcagaaagccttaagagcgatgccaacgtaaggtatgcaggggaatacagagcaggaaagaggtatccggtgttaagcagtatccaggctggctcgtggtgtgaagcatgcgaaccatacgccattaaagacatagatgtttggcttgagtctgacgcgcatattcaaggtaatgcgttctggcttaaagtggaaggtgattcaatgacggcaccggttgggttaagcattccagagggaacattcgttcttttcgataccggaagggaggcgatcaacggcagcttggtcatagcaaaactttctgactctaacgaagcaacattcaagaagctgataatcgacggcggaaataaatacctcaagggacttaatcctgcatggcctctcgtgccaatcaatggaaactgcaagattataggcgttgcaattgagacaaaactcagactggtttga

SEQ ID NO: 476792 - DNA, 369 bp, Shigella flexneri
atggttggaaccgctatagcaagctttttggggatgttggcaatctcaacaatttacggcttagcgcatgcttttattgcgaaatctctatcagaaaaaataagccaggcttgggcgcatagatcagctcgtttcatgattctagtgatcatagcaatacaagggatatctgcatttatcctctatggatcaagcttatacctattgtatcaaggcgcgacatttacgccttacaccagtgattacggaaccctatacgatggtagtgaagacatctctatggcttggatcgtctttggtttatctatggccgtgtctgttgtagcagacatcattaaggtaattctcgtcttaaccttcgctgactaa

SEQ ID NO: 476793 - DNA, 2784 bp, Shigella flexneri
atgagaaacctctgtttcttactgacgttagtggcaactctgttgctccccgggcggctgattgccgccgccttaccgcaggatgaaaagttaattaccgggcaactggacaatgacttgcgatatatgatttatccgcatgctcatccaaaggatcaggtaaatttatggctgcaaattcataccggttcattgcaggaagaagacaatgagcgcggcgtggctcattttgtagaacatatgatgtttaacggcacaaaaacatggccgggtaataaagtcatcgaaacatttgagtcaatgggcctgcgttttggtcgcgatgttaatgcctataccagctatgacgaaacggtgtatcaggtgagtttgccgactacgcagaaacaaaatctgcaacaagtgatggcaatcttcagtgaatggagtaatgccgcaacctttgaaaaactcgaagtagacgctgaacgtggcgtaattactgaggaatggcgtgcccatcaggatgcgaaatggcgcacctctcaggcgcgccgccctttcctgctggctaatacccgtaatttagaccgtgaacctatcggcctgatggatactgtcgccacggtcacgccggcacaattgcgccaattttatcaacgctggtatcaaccaaataatatgacctttatcgtggtcggcgatatcgacagtaaagaagcgctggcgctgataaaggataatttaagtaagcttccggctaacaaagcagctgaaaatcgcgtctggccgacaaaagccgaaaaccacctgcgctttaatatcattaatgataaagaaaaccgggtgaacggcatcgcactctattatcgcctgccaatggtacaagtgaacgatgagcaaagctttgtcgaacaagctgaatggagcatgttagttcagctgttcaatcaacgtctgcaggaacgcatacagtcgggcgagttgaagactatttctggcggcactgcgcgcagcgttaaaattgcacccgattatcagtcgctgtttttccgtgtaaatgcacgagacgataatatgcaggacgctgcgaatgcattaatggcagagttggcaaccattgatcagcatggtttttctgctgaagaactcgatgatgtcaaatctacccgcctcacctggctgaaaaatgcggttgatcagcaagctgaacgtgatttacgtatgctgaccagtcacctggcatccagctcattaaataatacgccgttcttgtcgccggaagagacatatcaactttcgaaacgtctgtggcagcaaattaccgtgcaaagtctggcggaaaaatggcagcagttaagaaagaaccaggacgcattttgggagcaaatggtaaacaatgagcttgccgccaaaaaagcattgtctcctgcggctatcctggcgctggaaaaagagtacgccaacaaaaagctggcggcttacatcttcccaggcagaaatttatcgttaacagtagacgctgacccacaggcggaaattagcagcaaagaaacgctggctgagaatctgacatcattaacactttccaatggtgccaaggttattctggcaaaatccgcgggtgaagagcaaaagctacaaattattgccgtatcgaataaaggcgatttaagtttccctgcgcagcaaaaatcacttatcgcgctggcaaataaagcagttagcggaagcggcgttggcgaactctcctcttccagcctgaaacgctggagtgcggaaaactcggtaaccatgagcagtaaagtcagtggcatgaatacgttgctctccgttagcgcgcggactaataaccctgaacctggtttccagttgattaaccagcgaatcacccacagcacgattaacgacaatatttgggcatcgctacaaaatgctcaaattcaggcgttgaaaacgctcgaccagcgtccagcggagaaattcgcccagctgatgtatgagacgcgctatgctgatgaccgcacgaaattactgcaagaaaatcagattgcacagtttactgccgcagatgcgctggctgccgatcgccagttgttttcatctccagcggatatcacgtttgtcattgtcggtaatgtcgcagaagacaaactcgtggcgttaattacgcgttacttaggctcaatcaaacactctgattcgccattagccgcaggtaaaccattaactcgcgcgacggacaacgcatcggttactgtaaaagaacaaaatgaacctgtggcacaggtttcacagtggaagcgttatgattcccggacacctgttaatctggcgacgcgtatggcgctcgatgcttttaacgtcgcactggcaaaagatctacgcgttaatattcgtgaacaggcatctggggcatacagcgtttcttctcgcctctcggttgatcctcaggctaaagatatcagtcatttgctggcttttacttgtcaaccagaacgacatgatgaacagttaacgttagcgaatgaagtgatggttaagcgtttgactaaggggatcagtgagcaagaactgaacgaataccagcaaaacgttcagcgcagcctcgatatccaacagcgtagcgttcaacaattagcgaacactattataaatagtcttattcaatatgacgatcctgcagcatggactgagcaggagcaattgttgaaacaaatgacggtagagaatgttaacactgccgttaaacaatatctttctcatccggtaaatacttataccggagtattattgccaaaataa

SEQ ID NO: 476794 - DNA, 210 bp, Shigella flexneri; identical to SEQ ID NO: 475253

SEQ ID NO: 476795 - DNA, 684 bp, Shigella flexneri
atgtcaatcaaactacgcggtggcacgtggcactgcgatttcgtcgcgccagatggatcaagagttagacgctctcttgaaacatcggacaaaaggcaagcgcaagaacttcacgatcgtctgaaagcagaagcgtggagagtaaaaaatctcggggaatcgccgaaaaagctattcaaggaagcctgcatacggtggctgcgtgagaaatcggataagaagtccattgatgatgacaagagcattatatcgttctggatgttgcacttcagagaaaccattctctctgacataacaacagaaaaaataatggaggcggtagacgggatggaaaaccgccgccatcgcctgaactgggaaatgagccgggacaggtgtttgcggcttggcaagccagtgccggagtataaaccaaagctggcaagcaaaggaacgaagacgcggcatctggcaatacttcgcgctattctcaatatggctgttgaatggggatggcttgacagggcgcccaaaatatcaacaccacgcgttaagaatggacgaatcagatggcttacagaggaggaatcgaagcgcctgtttgcagaaattgctcctcatttcttccctgtggtcatgtttgcaatcacgacaggccttcgccgttccaacgttacagaccttgatgaggtgtactggcaatag

SEQ ID NO: 476796 - DNA, 345 bp, Shigella flexneri
atgtcagatttggctatgaaggttttgaaatggcaatcgactggcgatgttggcatcagtagcgcaactcttgcctcaatcgcatgtggcctgaaaaagaatatctatggtcatcacttcggcgctccccatgacgcagccgatttcagacgatgcgttgcacttgttgagcagattccagaaatcagagattcattcggcaaggttgcaaagcgcgttccggcattcaaaggcatcctcaacgaatgggattccctcgttgctctgttgaagtctgaaatgaagatacacggaaacaaagcaccagagacttacagaagaatcagcgagctacgcaaggactaa

SEQ ID NO: 476797 - DNA, 168 bp, Shigella flexneri
atgcacttccgagtcacaggtgaatggaatggagagccattcaacagagttatcgaagcagagaacatcaacgactgctatgaccactggatgatatgggcgcagatagcacatgcagaagtaaccaatattcgaattgaagaactgaaagaacaccaatccgcctga

SEQ ID NO: 476798 - DNA, 534 bp, Shigella flexneri
atgagcactatcacaagagaatggctgcagcaggctatcaacgattatgaaagcgttcgtgatgagcttcctttcgggcttgatgattaccaggggaatatcctggctgccctgcgtatcgcactggcatcgctggaagcagagccggtggcgtggaaggtaacattcacgcaaattgaccgtgaatataacacgttcactggtatgtattctgacaaagcagaagtcgaacggtgggtgcggctgcataaagcatgtaattttcgggcagatataacaccgctttataccgcccagcaagtgccggtaactccggatggttggataagctgtagtgagcggatgccggaaattagacaaacagttattggatggaatggatatgcagttagacaatgcgtatatacaaggaatgaatatgccaagacacagaaaggcagagagccaaggtttgaaaccttaactggtatatggcatggagtaacccactggatgcctctaccagaaccgcctcaggaggttaaccgtggctaa

SEQ ID NO: 476799 - DNA, 735 bp, Shigella flexneri
gtgagccagattgattatcaggcactgcgtgaaaaggcagagaaagcaacgtgtggggcgtggtcgctcgaatatggagagggccaatttgatggtgatgatgcgctaattcatcgagaagttgctggatatattcccatttgcagaattgaaggagcgcatcctgaaagcggtttcgatgaagatttccaaatggaacagcaggccaatgctgaattcatcgcagcagccagtccagctaccgtgctggcattactggatgaacgggaaagaaaccagcaatacatcaaatcacgcgaccaggagaacgaggatattgcgcttacggttgggaggctgcgcgttgagctggaaggcaaagacagcaaaatagccaatcttaccgccgaacgcgatgctcttcgtgaaggtgagatgggcgacgctaggcatagcaacacacgggccgcagctgatatctacttccaactggtcgaggaatgcgaaattcctgctggcggatctctggtcgagtacgttgacgatatgcgcgagaagctggaagccgcagagaagcgcattgctgagctggagttgcgggaggttgtgcttccgcaatgctatagcatgttgcatcgcgtcgattttgacaagccttaccacactgaaatggtttacaggcagcatcaggttcttgaggcactgcacaacgctggaataaacgtcaccgaagcaggtaaaggagaggcatcatga

SEQ ID NO: 476800 - DNA, 246 bp, Shigella flexneri
gtgagtaattcagcacgactacagcttggtttttcaccgctatcaaaaactatcatgctggcaaaaatgcgcgatgttgaaggtggacgtatgcgcgttggcaatgatccaggtcgtgatgttaccaatgaggctgctcaattggtgtggcgactggtcatggctgaaggtggtgagatcgcttgggagttggatgatggttctcgcatggtgttgaaggcagaaaagcaggggggcaaccagtga

SEQ ID NO: 476801 - DNA, 294 bp, Shigella flexneri
atgccagcgcctctatatggtgcggacgacgcgcgccgctgttccggcaattccgtatcggaggtgctggataaattcaggaaaaactacgacctgataatgtcgctaccgcaggaaacgaaagaggaaaagggatttcgccactgtatatggcttgcagagaaagaagaacgcgagcgaatttaccagacatcaatccgaccattccgcaaagccacatacacccacttccctgaaattgacccgcgcctgcgtaattaccgctcacgctatggcgctatcagtaatgactga

SEQ ID NO: 476802 - DNA, 507 bp, Shigella flexneri
atggcaagcagaggcgtaaataaggtgattatccttggtcgggtaggacaagacccggaagtccgatactcatcatcaggaacagcgttcgctaacctgacaatagccacatcagaacaatggcgagataaaaatactggcgagcaaaaggaattgactgaatggcatcgtgttgctgtatccgggaaactggctgaggtcgtggggcagtatgtgaaaaaaggtgatcagatttatttcgagggaatgctgagaaccagaaagtggaaagaccagtcagggcaagaccgttacacaaccgaggttcatgtcggaattaatggcgtgatgcaaatgcttggcggcattggcgacagcaaacaacaagcagccagcaggcaatcacagaagccacagcagcaatcatcaccagcacaacacaacgaacctcctatggattttgacgacgatataccctttgcaccagtaactctccccttccctcgtcacgctattcacgcaatttaa

SEQ ID NO: 476803 - DNA, 708 bp, Shigella flexneri
atggatttgaataaattcgatgagccattcagccctgaagatatcgaatggcgaatacagcaaagcggtaaaacacgcgatggaaaagtgtgggctatggtgctggcttatgtcacgaacagggcaatcatgaaacgcctggacgatgtttgcggcaaagcaggatggcgcaatgaataccgcgatattcccaacaacggcggcgttgaatgcggcatatcaatcaagattgattccgaatgggtaaccaaatgggatgctgctgaaaacacgcaggtagaagccgtcaaaggtggtcgttccggtgcaatgaagcgcgctgccgttcagtggggaatcggtcggtatctgtataaccttgaggaaggtttcgcacaaacatctctcgataaaaagcagggatggcacagggcaaaactcaaggatggaacaggattttactggctccctccatcgctgccgggatgggcaatcccagcatcagataacaaaccatcaccagaaaataccaaccagaaatctccatcggttgactgcgagcaaatcctgaaagacttcagcgattatgcgtcaacagaaactgacaagaaaaaactcatcgagcgttatcagcgtgactggcaattaatggctggcaacgaggaggcgcaggctaaatgcgttcaggtaatgaacatcagagttaacgaactaaaacaggtggcataa

SEQ ID NO: 476804 - DNA, 159 bp, Shigella flexneri
atgagttttacagataactggtcagacgaagaattcattcgtcagatgaaagaattaatcggtaacgaaggagatatgcatgtcacttgcaaccacagtgaaggagagcaagttacagagacgcatgtacacgcagaaagctctctggtatcgccataa

SEQ ID NO: 476805 - DNA, 153 bp, Shigella flexneri
atgcgcaatgaaatagccatcaatcaccagatgcttcgtgctgcacagaacaaagcagtaatagccagatttattggtgattcaaaaatgtggcttgaagcaaataaagcgatgaaatcagctatcaaccttccgtggtatcgcaggaaatga

SEQ ID NO: 476806 - DNA, 132 bp, Shigella flexneri
atgatttacgcaatcgcgggaggcgctcgcatgggtgccttccaactaaatgaatctttacttgagcgaatcacccgtaaattacgtgacggatggaaaagagttgaggtcttattatgcgcaatgaaatag

SEQ ID NO: 476807 - DNA, 969 bp, Shigella flexneri
atgagtgaagtaacagatttagttgttattgaaaaagcaaatgcaatgactgtatttaagtctgccgaccagattgaagaaattctccaaaaggttgaacgtgaagttatgtcctttgtgcctgatatcacaacggcaaagggcagaaaggagatcgcttctctggcgtataaagttgcgcagacgaaaacatatctcgatggtcttggcaaagaccttgttgctgaactgaaggaaattccaaagctaattgatgccaaccgcaagacagtgcgtgatcgccttgatgaactgaaagccaaggcgcgccagcctcttactgattatgaggaggagcaggcgcggattaaagccgaagaagaagctaaggcagcagctgaagctctcgcaaagcaaattgagtctgaccatgaaatagcgattttgatggatcgcgaatttgaccgccaaagagaagaggcaagactcaaagcggagcaggaaaagcgagagcatgaagaacgcttaaaaagagaagctgaagagaaagtcagagcagaagccgaagcaaaggcaaaagccgaaattgaagcagcagcaaggcgagaagcagaagctaaggccgctgcggaacgagcagagcgtgaacgcattgaagccgagcaacgagcacagcgcgaagcaaaagaggcggcggaacgagctgaaagagaaaagcatgcggcaattgaagcagaacgcagaaaagcacaggaggaggctgaacgaatccgtcgcgaggctgaagcaaaagagcaagccagaatagcagaagaaaaaagaatcaaggacgaagaagagcgtagagcaaaagataaagctcaccggaaagaagtaaataacaaaatacttgttgaccttatcaaggttggtgcatcagaagatgttgctaaaaatatcataacagccatcgtaaaaggcgaagtattcgcaacaaaaataacctactaa

SEQ ID NO: 476808 - DNA, 201 bp, Shigella flexneri
atgtgcgagttttatgaagcagatatcaaacgcccagaaatggcaagtgatgcgacattacgtgattacttcgcggcaaaggctatgcaagcaatgattagcaatccatcgattatcgataatgattctgatggagctgttaattatgcagcaagcgctgcatataagtttgcagacgcaatgctcaaagctcgcgaataa

SEQ ID NO: 476809 - DNA, 297 bp, Shigella flexneri
atggaatttaaaggtactgaaggtaagtgggaaataatgatggatggcgatgagattaaaatcatccaggcagactcacttgaaaatggcgcaggctggcgttcgtatattgcaatctgtgaggaagttcaatgtattgaagatgccaatctaatagcggcagcacctgaccttctcgaagcacttcagttattacttaagcaatccaaaaatagaacaacgacaacatatccagaatggtatggagctgttaataaaggtcttgcagcaatcagcaaggctctgggagatgaatga

SEQ ID NO: 476810 - DNA, 624 bp, Shigella flexneri
atgtcatcaatccgcttaactacgagaatgaaagaggaaatcgctcgtaacgctttaattaagtctggggttttcactgaacttgaagaagtaacaaagttaaagaaccagcttgcacttgacgccagagttattgcgtttggcggtaaaaagaaaactgaggaagtggatcagttatcatccaagttggtagctataagtgaagaacttgaaaagatgggatgttcattttactcatacgaatttcgttctacttcaatttatctgactgtatctggcagaagggttggatggcattcatatgggaaagacggcaatggcgaagatatatttctccctactccaaccaaagataaatgcatgtttgatgcagaacacaaaataacaaaaaggtttgatgaaatctgcgcattgcaacaaaaacttgaagccaagaaaaaggatatcgaatcaaatgtatgggctgctttgaactcagtcacaacagttaagcgacttattgaagtttggcctgaaagcaaagaattgctaccaaaagaagcagataaagcaagtacagcacttcctgctttacgggtagaagatttgaataagatgattggacttccttccgaggtcgcatag

SEQ ID NO: 476811 - DNA, 195 bp, Shigella flexneri
atgactattgatacaaatcaatggtgtggacaattcaagcgatgcaatggatgcaaactgcaatcggaatgcatggttaagcctgaagaaatgtttcctgtaatggaagatgggaaatatgtcgataaatgggcaatacaaactacggcaatgattgccagagaacttggtaaacagaacaacaaggctgcctga

SEQ ID NO: 476812 - DNA, 273 bp, Shigella flexneri
atggcagtagtcattacatatctggctgacgataacgccagaaatcgccgcagagcacgcagacaggctcaacgtgaacaggcaatgcaagagcagcgactggcacgaaaaattgcgctaaagctctctggttgcgtcagagcagataaagcagcatcactcggaagccttcgctgcaagaaggcagatgaatgcagtggaagtatttgcctgccaaacgtagccatttacgcggcaggctaccggaaatcaaaacaactgacagcgaggtaa

SEQ ID NO: 476813 - DNA, 1524 bp, Shigella flexneri
atgaaacccactttatatactgctactggtgagtgcgttacgccaagccgtgaactgggcaaaggcggtgaaggcgcggtttatgatatcaatgagtttgtcgatagcgtcgccaagatttatcacacgccgccacccgccttaaaacaggacaaacttgcctttatggctgcgacagctgacgcgcaattgttgaattatgtcgcctggccgcaggcaacgcttcacggtggacgaggcggaaaagttatcggttttatgatgccaaaagtttctggtaaagaaccgattcatatgatctatagcccggcacatcgtcgtcaacgttaccctcattgtgcgtgggattttctactctatgttgcgcgcaatattgcttcatcttttgctacggttcacgagcacgggcatgtcgtgggtgacgtaaaccagaacagttttatggtaggtcgcgacagcaaagtggtgttgattgatagcgactcctttcagattaacgccaatggcacactgcatttatgcgaagtcggcgtgtcgcattttacgccgccagagctacaaaccttgtcgtcatttgtcggctttgaacgcacagaaaatcacggtaattttggccttgcgttgctgatttttcacgtcttgtttggtggccggcatccttattctggtgtgccgcttatctctgatgcgggtaatgcgctggagacggatattacccatttccgttatgcctacgcgtcagataatcagcgacgtggtttaaaaccgccgccacgatcgattccgctatcgatgttaccgagtgatgttgaagccatgtttcagcaggcattcacggaaagtggcgtggcaaccgggcgtccgacggctaaagcgtgggtagcggcacttgattctctgcgccaacagttaaagaaatgtcccgtttcggcaatgcatgtttatcccgctcatttgaccgactgcccgtggtgtacgctggataatcaaggcgttatctattttattgatctcggcgaagaggtcattaccaccggcggggattttgtgctggcaaaagtctgggcgatggtgatggcgtcagtagcaccgccagcattgcaactgccattacccgatcatttccaaccgactggcaggccgcttcctttaggcctgttacggcgcgaatacatcattctgcttgagatcgcactgtcagcattatcgctgctgctttgcggccttcaggcagaaccgcgttatattattttggttcctgtgctggcggctatctggattattggcagtctgacaagcaaagcgtacaaagcagaagttcagcaacgccgtgaggcatttaatcgtgcgaaaatggactatgaccatttagtccgccagatccagcaggtaggcggcctggaaggttttatcgccaaacggacgatgctcgaaaaaatgaaggacgaaattctcgggttaccggaagaagagaaactcgctctggcagcacttcatgacactgcaagggaacggcagaagtag

SEQ ID NO: 476814 - DNA, 123 bp, Shigella flexneri
atgcagcgtgggcgtttttgcctgactggtggttttcgcgatatgtatatcgcgaaaaataatcgcatgttttacgccttgctgattgcaatttcggcacaaagcgtgggggttttgcgttaa

SEQ ID NO: 476815 - DNA, 501 bp, Shigella flexneri
atgagtaagagacgtcacgaggtagtaactcgggagcgccttatggaggttctcgattacaataaagaaacaggaattttcacttggaaaaagaaattaagcgccagaggtgctgttgggaaagttgctggcacaatttcttatggatataacgcaattaatattgatggcgtaagatattttgcacatagacttgcctggctgtatgtatatggcgaatggcccaaacaagagattgaccacattgatagaaacagaagaaataacgcaatctcaaaccttagggatgtcagcagagtcgtaaatgcattaaatgtcggacctcgaaatagcaatgctggaatcaagggggtaactttctgtcaagccagaaatcaatggcaagctcagataaatgtctcaggtaaaaacataacccttgggagattcaacaccattgatgaagcggctatagcttataaggcagcaaacatggttgctgaccatctgttgagtaggtga

SEQ ID NO: 476816 - DNA, 834 bp, Shigella flexneri; identical to SEQ ID NO: 476238

SEQ ID NO: 476817 - DNA, 384 bp, Shigella flexneri
ttggtacgccagcccaacggcggtactcgcaaacttccctgctaccaaattacccgcggcggcttcgccttccttgctatgggcttcactggtaaacgtaccgcccggttcaaagaggcatacatcaatgcctttaaccagatggagaggagcttatcaggagctggtgcggctgacatgtcatctgtcgcacaaaacgccagaggcgtatacctgcatttgcgtgaaatccatcaaatctggacaagccagctttacccaatgcttaaggccgttgaatctccgctggctggcaaactgtacgaccgtgtaggtgatgctgtttttggtgctgcacttgttgattccaggctgaatggttctgacaaggaggtgcgcccatga

SEQ ID NO: 476818 - DNA, 600 bp, Shigella flexneri
gtgataactgaacgtcggaacgtattgctacaaggcgctggctggttattgttgctggccccgtttttcttcttcacctatggatctcttaatcagttcaccgcggttcaggaccttaacagccatgatatccccagtcaggtattcggttgggaaacggcgatcccttttcttccctggactattgttccttactggagtctggatcttttatatggattttcgctgttcgtttgtagctcgacattcgaacaacgccgacttgtccaccggcttattctggcaacggtaatggcctgctgcggtttttttctctacccgctgaagtttagttttatccgtcctgaagtgagtggggtgacaggatggctactttggcgtcactttcgtcagcatctggctgtgaggtggcgtaaagtctgtggcggatggtttttactcatcgccatttcgacgctgacgacatggcagcatcattttattgatgtcatcacagggctggcggtaggtatgttgattgactggatggtgcccgtcgaccgtcgttggaattatcagaaacttgatcaacgtcgaatcaaaatagcactgccatattga

SEQ ID NO: 476819 - DNA, 846 bp, Shigella flexneri
atgacattcggtcgcttgtgggaaaaattcctcgccagcgcctattacagtgacctcagtccaagaacacaaaaagattatctgcaacatcaaaaaaagttgcttgccgtattcggtaaggtgccggcagattccataaaaccagaacacatccgtcgatacatggacaagagaggggaacagagtaaaacgcaagccaaccatgaaaaaagcagtatgtcccgcgtttacagttgggggtatgagcgagggtacgtgaaggctaacccatgtgcaggtgtaagtaaattcaaggccaaaaaccgcgaacgatatgtaaccgacaaagaataccaggcagtattaagcgttgcacctcttcctgtttttatcgcaatggaaattgcctatctgtgtgcagcgagggtttccgatgtgttatcgctgaaatgggagcagattggaaacgacgggatctttatccagcaagggaaaacaggaaaaaaacagataaaagcatggagtccacgattacaggcggcgatcgaaaaagcaaaacagttaccaacatccgcctatgtaatcagtaatcaatacggcaaccgatatatgtacaaaggctttaacgaaatgtgggtagaagcaagaaatcgcgcaggcaaaatttcaggtattttaaccgacttcacctttcatgatctgaaggcgaaaggaatttcagactatgaaggaagcagtcgggataagcaacttttctctggtcacaaaaccgaggggcaagtgctaatctatgacaggaaggttaaagtttcaccgacacttgatgtcccgttacctgaaaatattccaagaaaatattccaagtaa

SEQ ID NO: 476820 - DNA, 207 bp, Shigella flexneri; identical to SEQ ID NO: 475744

SEQ ID NO: 476821 - DNA, 372 bp, Shigella flexneri
gtgctggatgcactggagcaggcgttatgggcccgtcgaccgtccggcacggtccatcacagtgataaaggttctcagtatgtatcgctggcctacacacagcggcttaaggaagccggattactggcatcaacaggaagtacaggcgactcgtatgacaacgcgatggcggagagcatcaatggtctttacaaagcggaggtaatacaccgtaagagctggaaaaaccgtgcagaagtggaactggccacactaacgtgggtggactggtataacaatcgacgattgctggaaaggctgggtcacatccctccggcagaagcagaaaaagcttattatgcttccatcggaaacgatgatctggcagcctga

SEQ ID NO: 476822 - DNA, 834 bp, Shigella flexneri; identical to SEQ ID NO: 476088

SEQ ID NO: 476823 - DNA, 1401 bp, Shigella flexneri; identical to SEQ ID NO: 474418

SEQ ID NO: 476824 - DNA, 960 bp, Shigella flexneri; identical to SEQ ID NO: 474419

SEQ ID NO: 476825 - DNA, 216 bp, Shigella flexneri; identical to SEQ ID NO: 474400

SEQ ID NO: 476826 - DNA, 1842 bp, Shigella flexneri; identical to SEQ ID NO: 476278

SEQ ID NO: 476827 - DNA, 477 bp, Shigella flexneri
ttggcagcattaccctcaggcggcaacattgattcgctggtgaaatcgttcctcggcaccaaacagcacggcattatcgagttttgcctgctggtgttctctaacttagctgttgccagttcgttctttggtgtcacgctggggttgttcgattatctggcggacctgtttaagattgataactcccacggcgggcgtttcaaaaccgtgctgttaaccttcctgccacctgcgttgttgtatctgatcttcccgaacggctttatttacgggatcggcggtgccgggctgtgcgccaccatctgggcggtcattattcccgcagtgcttgcaatcaaagctcgcaagaagtttcccaatcagatgttcacggtctggggcggcaatcttattccggcgattgtcattctctttggtataaccgtgattttgtgctggttcggcaacgtctttaacgtgttacctaaatttggctaa

SEQ ID NO: 476828 - DNA, 186 bp, Shigella flexneri; identical to SEQ ID NO: 462789

SEQ ID NO: 476829 - DNA, 366 bp, Shigella flexneri; identical to SEQ ID NO: 462994

SEQ ID NO: 476830 - DNA, 354 bp, Shigella flexneri; identical to SEQ ID NO: 466835

SEQ ID NO: 476831 - DNA, 327 bp, Shigella flexneri; identical to SEQ ID NO: 466843

SEQ ID NO: 476832 - DNA, 267 bp, Shigella flexneri; identical to SEQ ID NO: 462029

SEQ ID NO: 476833 - DNA, 849 bp, Shigella flexneri; identical to SEQ ID NO: 474529

SEQ ID NO: 476834 - DNA, 156 bp, Shigella flexneri; identical to SEQ ID NO: 7036

SEQ ID NO: 476835 - DNA, 327 bp, Shigella flexneri
atgactaaaaatactcgtttttcccccgaagtccgtcaacgggcagtccgtatggttctggaaagtcagggcgaatatgactcacaatgggcgacaatttgttccattgctccaaagattggctgtacgccggagactctacgtgtctggggtcgccagcatgagcgggataccgggggcggtgatggagggctcaccaccgctgaacgtcagcgtctgaaagagccggagcgtgaaaatcgtgaactgcgccgcagtaacgatatccttcgccaggcttccgcttattttgcgaaggcggagttcgaccgcctctggaaaaaatga

SEQ ID NO: 476836 - DNA, 354 bp, Shigella flexneri; identical to SEQ ID NO: 476372

SEQ ID NO: 476837 - DNA, 1188 bp, Shigella flexneri; identical to SEQ ID NO: 476303

SEQ ID NO: 476838 - DNA, 366 bp, Shigella flexneri
atggcccgttcagctaaaccccgtaaacgtaaacccgcctctcaaagaagcaaacttccccgctatgtcgtgaagcttcacgaagatgatttttttgacgaagaagacgcagaagttctgcgctttgatagttttgacgatgccgttgaatgctgcgcagacctgaatattccgttctttgtggatgcgggaaacaaaaagctggtcttctggtttgtacgtgttgatgacgaagggtatccggaaatcgcccgctgcacggagcgggaatttgcgaccattcttgccggtatcagcgccggcggtatgtactgcccggagtgtggcacggttcactggccggacggagtcgccccgcccttctga

SEQ ID NO: 476839 - DNA, 543 bp, Shigella flexneri; identical to SEQ ID NO: 474626

SEQ ID NO: 476840 - DNA, 639 bp, Shigella flexneri
gtggctggagtgcttgaggggagattatctggcggtactgcagcggaattttgtaattctgcggtggttgcgttgcaggctgctggcctggatgtctgtcgtgagtatccggtgccagagcgtggtgacggttgcggagggcggattgatatcgtcgtgactgacaggaacggtgtccggtgtgggatcgagcttgaccgaaattctccgcgacagaaatcactgctcaaaatcggtgctgttgaaaccgggatatgtgtcttgcggcgcagtgatatcgcaaggcacaccgagcagggaattctggttatcggtggggctgttcgccagaaaaaatttgacccgttgtcagttgatctgcccgactggttgccagaaacactctggcatgagtgggtccagttcaggcaggcattgcgaaaaccgattcgaacggagctgggcgctaacggggcgatacgggaactggaaaaattccgtcagcagggttttacacctgagcaggtgattcgacacagcatcgccaatgaataccagggtctgttcgcgccgaaaggtgttcggcctgagacgttgctccgacaggttaacaccgtctcgttgccggacagtgcgatcccgctaggcttcagggggtaa

SEQ ID NO: 476841 - DNA, 477 bp, Shigella flexneri; identical to SEQ ID NO: 5326

SEQ ID NO: 476842 - DNA, 993 bp, Shigella flexneri
atgattcaaccaggtgctggctttaataaaggtgccgcgagacttggacatcttcgcgccgttcaccgtcacatagccgtgaacaaacaggttggtcggcttgcggaagttgctgccttccagcatggcaggccagaacaggctgtggaagtaaacgatatctttaccgatgaagtggtacagctcggcggtggagtctttcttccagtattcatcgaagctggtagtgtcgccgcgcttgtcgcacagattcttgaaggaacccatgtagccaatcggtgcgtccagccagacgtagaaatatttacccggcgcgttcggaatttcaaaaccgaagtaaggtgcgtcgcgggagatatcccactgttgcagaccagattcaaaccactcctgcattttgtttgccacctgctcctgcaacgcaccgctgcgggtccatgcctgcaacatttcgctgaaagagggcagatcaaagaagaagtgttcagaatcacgcattaccggggtagcaccagaaaccaccgatttcggctcgatcagttcagtcgggctgtaggtcgcgccgcaaacttcacagttatcgccgtattgatctggcgctttacatttcgggcaggtgcctttcacaaaacgatccggcaggaacatgcctttttccgggtcgtacaactgagagatagtgcgatttttaataaaaccgttctctttcaggcgagtatagataagctcagacaactgacggttctcttcgctgtgcgtcgagtgatagttgtcatagctgatgttaaagcctgcgaaatcagtctggtgttcctgactcatttcgccaatcatctgctccggtgtgataccaagttgctgtgctttcagcatgatcggcgtaccgtgggcatcgtcggcacagatgaaattaacctcgtggccgcgcattcgctggtaacgaacccagacatcagcctggatgtgctccagcatatggccgaggtggattga

SEQ ID NO: 476843 - DNA, 546 bp, Shigella flexneri; identical to SEQ ID NO: 475459

SEQ ID NO: 476844 - DNA, 273 bp, Shigella flexneri; identical to SEQ ID NO: 474495

SEQ ID NO: 476845 - DNA, 303 bp, Shigella flexneri; identical to SEQ ID NO: 473532

SEQ ID NO: 476846 - DNA, 132 bp, Shigella flexneri
atggacgaaaccgagtttcagcaggtttataaatctgtactgaatgtgctgtggaactggattctgttccgtaaattttcctctccggaacaagtcgaaaatgtggccgcgcagctgctggagtttgcgtaa

SEQ ID NO: 476847 - DNA, 327 bp, Shigella flexneri
atgactaaaaatactcgtttttctcccgaagtccgtcaacgggcagtccgtatggttctggaaagtcagggcgaatatgactcacaatgggcgacaatttgttccattgctccaaagattggctgtacgccggagactctgcgtgtctggggtcgccagcatgagcgggataccgggggcggtgatggagggctcaccaccgctgaacgtcagcgtctgaaagagccggagcgtgaaaatcgtgaactgcgccgcagtaacgatatccttcgccaggcttccgcttattttgcgaaggcggagttcgaccgcctctggaaaaaatga

SEQ ID NO: 476848 - DNA, 303 bp, Shigella flexneri; identical to SEQ ID NO: 473532

SEQ ID NO: 476849 - DNA, 327 bp, Shigella flexneri
atgactaaaaatactcgtttttcccccgaagtccgtcaacgggcagtccgtatggttctggaaagtcagggcgaatatgactcacaatgggcgacaatttgttccattgccccaaagattggctgtacgccggagactctgcgtgtctggggtcgccagcatgagcgggataccgggggcggtgatggagggctcaccaccgctgaacgtcagcgtctgaaagagccggagcgtgaaaatcgtgaactgcgccgcagtaacgatatccttcgccaggcttccgcttattttgcgaaggcggagttcgaccgcctctggaaaaaatga

SEQ ID NO: 476850 - DNA, 303 bp, Shigella flexneri; identical to SEQ ID NO: 473532

SEQ ID NO: 476851 - DNA, 327 bp, Shigella flexneri; identical to SEQ ID NO: 475920

SEQ ID NO: 476852 - DNA, 327 bp, Shigella flexneri
atgactaaaaatactcgtttttcccccgaagtccgtcaacgggcagtccgtatggttctggaaagtcagggcgaatatgactcacaatgggcgacaatttgttccattgctccaaagattggctgtacgccggagactctgcgtgtctgggttcgccagcatgagcgggataccgggggcggtgatggagggctcaccaccgctgaacgtcagcgtctgaaagagccggaacgtgaaaatcgtgaactgcgccgcagtaacgatatccttcgccaggcttccgcttattttgcgaaggcggagttcgaccgcctctggaaaaaatga

SEQ ID NO: 476853 - DNA, 597 bp, Shigella flexneri
atgggcatcaacctgttccgcgtgctgatgacttacctgaagccggtactgccgaaactgaccgagcgtgcagaagccttcctcaatacggaactgacctgggatggtatccagcaaccgctgctgggccacaaagtgaatccgttcaaggcgctgtataaccgcatcgatatgaaacaggttgaagctctggtggaagcctctaaagaagaagtgaaagccactaccgcgccagttactggcccactggcagatgatccgattcaggaaaccatcacctttgacgacttcgccaaagttgacctgcgcgtggcgctgatcgaaaacgcagagtttgttgaaggttctgacaaactgctgcgcctgacgctggatctcggcggtgaaaaacgcaatgtcttctccggtattcgttctgcttacccggatccgcaggcactgattggtcgtcacaccattatggtggctaacctggcaccacgtaaaatgcgcttcggtatctctgaaggcatggtgatggctgccggtcctggcgggaaagatattttcctgctaagcccggatgccggtgctaaaccgggtcatcaggtgaaataa

SEQ ID NO: 476854 - DNA, 204 bp, Shigella flexneri; identical to SEQ ID NO: 471690

SEQ ID NO: 476855 - DNA, 645 bp, Shigella flexneri; identical to SEQ ID NO: 474660

SEQ ID NO: 476856 - DNA, 735 bp, Shigella flexneri
atggtgcagaaaggcattgccggaacttactgcaaaacgccgtttgctgattcctatgcgtttatcagcaatccggcaacaggtgcgccgtctgtatatatcatcggctccggtcaggtatcaccaatcgccagcgcgagcattgagaaaatactacgctcctacactgctgatgaactggctgatggcgtgatggaatcgttgcggtttgatgcgcatgagttactgattatccaccttccgcgccatgttctcgtgtacgacgcatcttcaagcgccaatggtccgcaatggtgtgtgctgaaaacaggtctgtatgacgatgtgtaccgcgctatcgacttcatttacgaaggcaatcagataacgtgcggcgataagctggagtccgtgaccgggaaattgcaattcgacatcagcagccagtacgacaagcaacaggaacatcttctgtttactccgctgttcaaagcggataacgccagagtgttcgaccttgaggttgaatcgtcaactggcgttgctcagtacgctgaccgcctttttctctctgcaaccactgacggcataaattacggtcgtgagcagatgattgagcagaatgaaccgttcgtttacgacaaacgtgttttgtggaagcgagtcgggcgcatcaggaaaaatgtcggcttcaaattgcgcattatcacgaagtcaccagtcactctgtctggcgctcagataaggattgagtaa

SEQ ID NO: 476857 - DNA, 735 bp, Shigella flexneri
atggtgcagaaaggcattgccggaacttactgcaaaacgccattcgctgattcgtatgcgtttatcagcaatccggcaacgggtgcgccgtctgtgtatatcatcgactccggtcaggtgtcaccaattgtcagcgcgagcattgagaaaatcctccgctcctacactgctgatgaactggctgatggtgtgatggaatcgctgcgatttgatgctcatgagttgctgattatccaccttccgcgtcacgtcctcgtgtacgacgcatcttcaagcgccaatggcccacaatggtgtgtgctgaaaacaggtctgtatgacgatgtgtaccgcgctatcgacttcgtttacgaaggcaatcagataacgtgcggcgataagctggaatctgttaccgggaaactgcaattcgatatcagcagccagtacgacaagcaacaggaacacctgctgtttactccactcttcaaagcggataacgccagagtgttcgaccttgaggttgaatcgtcaactggcgttgcgcagtacgccgaccgcctttttctctctgcaaccactgactgcatcaattacgggcgtgagcagatgattgagcagaatgaaccgttcgtttacgacaagcgtgttttgtggaagcgagtagggcgcatcaggaaaaatgtcggcttcaaattgcgcgttatcacgaagtcacctgtcactctgtctggcgctcagataaggattgagtaa

SEQ ID NO: 476858 - DNA, 438 bp, Shigella flexneri
gtgctgaaaacaggtctgtatgacgatgtgtaccgcgctatcgacttcgtttacgaaggcaatcagataacgtgcggcgataagctggaatctgttaccgggaaactgcaattcgatatcagcagccagtacgacaagcaacaggaacacctgctgtttactccactcttcaaagcggataacgccagagtgttcgaccttgaggttgaatcgtcaactggcgttgcgcagtacgccgaccgcctttttctctctgcaaccactgactgcatcaattacgggcgtgagcagatgattgagcagaatgaaccgttcgtttacgacaagcgtgttttgtggaagcgagtagggcgcatcaggaaaaatgtcggcttcaaattgcgcgttatcacgaagtcacctgtcactctgtctggcgctcagataaggattgagtaa

SEQ ID NO: 476859 - DNA, 438 bp, Shigella flexneri
gtgctgaaaacaggtctgtatgacgatgtgtaccgcgctatcgacttcatttacgaaggcaatcagataacgtgcggcgataagctggagtccgtgaccgggaaattgcaattcgacatcagcagccagtacgacaagcaacaggaacatcttctgtttactccgctgttcaaagcggataacgccagagtgttcgaccttgaggttgaatcgtcaactggcgttgctcagtacgctgaccgcctttttctctctgcaaccactgacggcataaattacggtcgtgagcagatgattgagcagaatgaaccgttcgtttacgacaaacgtgttttgtggaagcgagtcgggcgcatcaggaaaaatgtcggcttcaaattgcgcattatcacgaagtcaccagtcactctgtctggcgctcagataaggattgagtaa

SEQ ID NO: 476860 - DNA, 303 bp, Shigella flexneri; identical to SEQ ID NO: 473532

SEQ ID NO: 476861 - DNA, 513 bp, Shigella flexneri
atgttccgcctcgaaattctggaggatattgcccgggataaagtcagaactctccattttgtggatgagatagaagtctacctggccttccagaccatgctcgcagagaaacttcagctctccactgccgtgaaggaaatgcgtttctatggcgtgtcgggagtgacagcaaatgacctccgcactgccgaagccatggtcagaagccgtgaagagaatgaatttacggactggttctccctctggggaccatggcatgctgtactgaagcgtacggaagctgaccgctgggcgcaggcagaagagcagaaatatgagatgctggagaatgagtaccctcagagggtggctgaccggctgaaagcatcaggtctgagcggtgatgcggatgcggagagggaagccggtgcacaggtgatgcgtgagactgaacagcagatttaccgtcagctgactgacgaggtactggccctgcgattgtctgaaaacggctcacaactgcaccattcataa

SEQ ID NO: 476862 - DNA, 501 bp, Shigella flexneri
atgaacctgacaacgaagggtgatttagttcttgcggcattacgtaagctcggtgtggcatcaaatgccacgttaaccgatgtcgaaccgcagtccatggaagatggcgtcaacgaccttgaaatgatgatggctgaatggcttggcggtgatgtgtcacctggtatcaacgttggctacatttttgctgatgcagatgtcgctccagatccgggagatgagcacggattatcaaataacgctataaatgccgtcattttcaaccttgcctgccgcattgctccagattatgcgctggaagcgtcagcaaaacttataacgactgccagatacgggaaagagcgactcgtcaaactgtctgcaatggacagagcaaaagccgctaaatgtaagtcaggttatccaaaccgtatgcctgttggtagcggtaatcagttggcgaagtggaacggttggaattacttccatcggaaggaaccttgcgataacgggagcgaataa

SEQ ID NO: 476863 - DNA, 501 bp, Shigella flexneri
atgaacctgacaacgaagggtgatttagttcttgcggcattacgtaagctcggtgttgcatcaaatgccacgttaaccgatgtcgaaccgcagtctatggaagacggcgtcaacgaccttgaaatgatgatggctgaatggcttggcggtgatgcgtcacctggtatcaacgttggctacatttttgctgatgcagatgttgctccggatccgggtgatgagcacggtttatcaaataacgctatcaatgccgtcattttcaaccttgcctgccgaattgctccagattatgcgctggaagcgtctgcaaaacttatagccactgccagatacgggaaagagcgactcgtcaaactgtctgcaatggacagggcaaaagcagctaaatgtaagtccggttatccaaaccgtatgcctgttggtagtggtaaccagttggcgaagtggaatggttggaattacttccaccgaaaggaaccttgcgataacgggagcgaataa

SEQ ID NO: 476864 - DNA, 315 bp, Shigella flexneri
atgaattggcaggcgtcggattacctgattgttgcttgttggatcgttgtcttcgtactgcgtgaccagacgccatgcaccaacgccggactctatctgctcacgaacgccaacgttaacggcaatttttgccgtattatggcgcatatcagtacgatacatccccatcaatacatcggctgcatcaggattagcgccgtctttgggtcggaagagaacgtcgacagggttccggcgcatctctgcgaccagtttcctgccccccgggcgaacaacatcgaattgtccgcgatattgcagggtagtgtagtttga

SEQ ID NO: 476865 - DNA, 309 bp, Shigella flexneri
atgatgttgcaggagcatgcgacatggcctgatggcggtaacgctgttgagccaggcatcactgaattgcgcgacatgatgctcgatggtcgcttcaaagtattcaatacctgtgagccattctttgaggagttccgcctctatcaccgtgatgaaaacgggaagatcgtcaagcttaacgacgacgttctctcagccgttcgctatgcatacatgatgcgccgcttcgcaaaaatgatgcgcgacatcaaaaaaccaaaagagaaaaagataccagccccaatcaggcccatcgcacggagaacttaa

SEQ ID NO: 476866 - DNA, 288 bp, Shigella flexneri; identical to SEQ ID NO: 474636

SEQ ID NO: 476867 - DNA, 654 bp, Shigella flexneri
atgggacgctggcttgctggcaggctcatgaaagagctggggctggtcagctgtcagcagccgactcaccggtataaacgtggtggtcatgaacatgttgctatccctaactaccttgaaaggcagttcgccgtgaccgagccaaatcaggtgtggtgcggtgatgtgacctatatctggacgggtaagcgctgggcgtacctcgccgttgttctcgacctgttcgcaagaaaaccagtgggctgggccatgtcgttctcgccggacagcaggctcaccatgaaagcgctggaaatggcatgggaaacccgtggtaagcccggcggggtgatgttccacagcgatcagggcagtcattatacgagcaggcagttccggcagttattgtggcgataccagatcagacagagtatgagccggcgcggaaactgctgggataacagcccaatggaacgcttcttcaggagtctgaagaacgaatggatgccggtggtgggttacgtaagcttcagcgaggcagctcacgccataacggactatatcgttggatattacagcgcactaagaccgcacgaatataacggtgggttacccccaaacgaatcggaaaatcgatactggaaaaactctaactcggtggccagtttttgttga

SEQ ID NO: 476868 - DNA, 138 bp, Shigella flexneri
atggtggctaacctggcaccacgtaaaatgcgcttcggtatctctgaaggcatggtgatggctgccggtcctggcgggaaagatattttcctgctaagcccggatgccggtgctaaaccgggtcatcaggtgaaataa

SEQ ID NO: 476869 - DNA, 204 bp, Shigella flexneri; identical to SEQ ID NO: 471690

SEQ ID NO: 476870 - DNA, 501 bp, Shigella flexneri
atgaacctgacaacgaagggtgatttagttcttgcggcattacgtaagctcggtgttgcatcaaatgccacgttaaccgatgtcgaaccgcagtccatggaagatggcgtcaacgaccttgaaatgatgatggctgaatggcttggcggtgatgtgtcacctggtatcaacgttggctacatttttgctgatgcagatgtcgctccagatccgggagatgagcacggattatcaaataacgctatcaatgccgtcattttcaaccttgcctgccgaattgctccagattatgcgctggaagcgtctgcaaaacttatagccactgccagatacgggaaagagcgactcgtcaaactgtctgcaatggacagagcaaaagccgctaaatgtaagtcaggttatccaaaccgtatgcctgttggtagcggtaatcagttggcgaagtggaacggttggaattacttccaccgaaaggaaccttgcgataacgggagcgaataa

SEQ ID NO: 476871 - DNA, 501 bp, Shigella flexneri
atgaacctgacaacgaagggtgatttagttcttgcggcattacgtaagctcggtgttgcatcaaatgccacgttaaccgatgtcgaaccgcagtccatggaagatggcgtcaacgaccttgaaatgatgatggctgaatggcttggcggtgatgtgtcacctggtatcaacgttggctacatttttgctgatgcagatgtcgctccagatccgggagatgagcacggattatcaaataacgctataaatgccgtcattttcaaccttgcctgccgcattgctccagattatgcgctggaagcgtcagcaaaacttataacgactgccagatacgggaaagagcgactcgtcaaactgtctgcaatggacagagcaaaagccgctaaatgtaagtcaggttatccaaaccgtatgcctgttggtagcggtaatcagttggcgaagtggaacggttggaattacttccatcggaaggaaccttgcgataacgggagcgaataa

SEQ ID NO: 476872 - DNA, 372 bp, Shigella flexneri; identical to SEQ ID NO: 467509

SEQ ID NO: 476873 - DNA, 288 bp, Shigella flexneri; identical to SEQ ID NO: 474636

SEQ ID NO: 476874 - DNA, 327 bp, Shigella flexneri; identical to SEQ ID NO: 471498

SEQ ID NO: 476875 - DNA, 438 bp, Shigella flexneri
gtgctgaaaacaggtctgtatgacgatgtgtaccgcgctatcgacttcgtttacgaaggcaatcagataacgtgcggcgataagctggagtccgtgaccgggaaattgcaattcgacatcagcagccagtacgacaagcaacaggaacatcttctgtttactccgctgttcaaagcggataacgccagagtgttcgaccttgaggttgaatcgtcaactggcgttgctcagtacgctgaccgcctttttctctctgcaaccactgacggcataaattacggtcgtgagcagatgattgagcagaatgaaccgttcgtttacgacaagcgtgttttgtggaagcgagtagggcgcatcaggaaaaatgtcggcttcaaattgcgcattatcacgaagtcaccagtcactctgtctggcgctcagataaggattgagtaa

SEQ ID NO: 476876 - DNA, 288 bp, Shigella flexneri
atggttgtgttcaacgagaacaaaaccctgctcttcaagttgtcgattgtcggcacgtggcccagcggaaccgccaacaggtcaatgcagctaaccttttccggctctgttcctgacacactggtcagcagtcgtaatgcggcgacaacaaccgacaacatcctgttagctacgttcttcagcgtggataaagacggctttcttgccacaaatggcagtacgttaaccattcagtcgaatggtgcggcgtttactgccacaaccatcaagataatcgcggagcagtga

SEQ ID NO: 476877 - DNA, 219 bp, Shigella flexneri; identical to SEQ ID NO: 476074

SEQ ID NO: 476878 - DNA, 225 bp, Shigella flexneri; identical to SEQ ID NO: 476353

SEQ ID NO: 476879 - DNA, 213 bp, Shigella flexneri
atgagaaacaaactctctttcgacttgcagttgagcgccagaaaagcggcaatcgctgaacggattgccgcccataaaattgcccgcagtaaagtgtcggtctttttaatggcgatgtccgctggcgtgtttatggcgatgtccgctggcgtgtttatggcgatcggatttactttttacctttccgttatcgccgatgccccgtcttcatag

SEQ ID NO: 476880 - DNA, 213 bp, Shigella flexneri
atgagcaacatcctgattatcaacggcgcgaaaaaattcgcccactccaatggtcaactgaacgacaccctgaccgaagtcgcggatggcacactgcgcgacctcgggcatgatgtccgcatcgttcgcgccgacagcgactacaatgtcaaagcggaagtacaaaactttctctgggctgatgtggtgatctggcagatgccaggctggtag

SEQ ID NO: 476881 - DNA, 480 bp, Shigella flexneri
atgcttcgcaactacggtctgacagtaattaagaacaccgaaaaaagacatcttctgattgattttcaacaacagaaagggaaaacatcacaaaaagcacctgtatctcctgacaaaacccctgcatctcctgtcaggacaccagtttcctctgacaagttacctcaaaaaccgctaacgcctgtcactgttccgcaaaaacagacagaaaaacttacctggaatcttaaaaaaggttcgacgctgcgggatggcctcaccgaatgggcgtcaagttcgccgtgtggtaattcaacctggaatcttgtatgggatactcctgtgaactacagaatagatgctcctcttattttccggggaaactttgaatctgcattaaaagatacgctgatgctttatctttcagcagataaaccgttatacgcattcaggaatattgcacaatgcgtaatcacaattaaagacacacaacaggagtaa

SEQ ID NO: 476882 - DNA, 438 bp, Shigella flexneri
atgggttggttcttcagcttgctcctgatattcctgtcaataggcagttactatctgacagataacaataaccaaaccatacagcgaatgaagttgcttcctgcaaaacaggaagcaattgaatttatccatttcgcaaatgttatcaatgactatctttataaatatccagacaaacgtaattcaggaggaacgttaacatctgagcaaatcggcataacccccgtttatgatattcatcatattatttacggtaagcgagtttatatctggtctgccgatacagaaggtctgatgtctgctttgcagcagcaaacaaaacattcagcaatgttaggaagagtaaaaaataggaagattgtcgataatcaggggaatgatatgggcgttcccgttccttcctccattccagaagaggctattgtactcattaactaa

SEQ ID NO: 476883 - DNA, 399 bp, Shigella flexneri
atgcaggataatgatgatgtcagcgagcttgatattgccactcgcgaagtccttatcttacgatgcaatcttattcagcttgcttctgaatatataaaaataaatcctcttaaaaacacccgaatctatacagatttaattcatcgttcagcagatgttatcaaaaatatcgaacaagataacatccagaataaacataattatctgtcacaggatgtaaaacatacgcttgttttatacgacctgtacaaatcagactttgaacaatgtccgggggcaaaatcccttatacctgtcagggaaaaaattgtctcgctgaaagaacttctttccggcgctaatgagctggacagtatcgttcgtcgcccccgcaggaaaaaacgttcttcacgaatttaa

SEQ ID NO: 476884 - DNA, 585 bp, Shigella flexneri
atgcagttatcagcggctgttctggctgcactgataagtcagtgtgcccctgatgtatcacccgatacgatgaatgccctgattatgactgaatcaggggctaatccatatgtaatagcgaatgtttctgacggaacaagtaagtattttaaagatgaaaaaggagctattgaatatgcagaaaaattaacagcagaaaataaaaggtttagtgcaggtctgacacagatatacagcaaaaatttcccatcactcaatctgactaataaaacagtttttgacccgtgtacaaatataaaagcaggagcggcagtcctgacggacaattatctgagacaaaaggagggtagtagtaatcaaaaaattctccgcgctttatctttgtattattcgggtaacgaatcaacaggatttattaaagaaaagaaatttaacaacacttcttatctggagcgagttattcgtaacgcgaataactatatcgtgccatcaatccgtgaaaaaactgatgaatcagaaataaaacccccgaatgatgaagagaaaacatcaccggactgggatgtttttggagattttaattaa

SEQ ID NO: 476885 - DNA, 291 bp, Shigella flexneri
atgaaagtcaaatcaactttgcagtattttatcctggcgtttttcctgtcactaaccgcctccgttgcctatgcaggtggactcgacaccgcaacaaataccatgacagaaattaagacatgggcatttagctttggtggtgtttgtgctttgtgttacctgatctataacgtcatcatggcattcatggagaagaaaagctggtctgatgtaggaatggcgcttgtctattgtgccctcgctggcggtgcactttacgccgggaactgggcgctggaactcttcaaataa

SEQ ID NO: 476886 - DNA, 285 bp, Shigella flexneri
atgacttataacgggtttaaccgtcctgcgttagttgctggtatacccttaatgttgttattgttcacggcttttttcgctgttctgacaggcttccccgctattttcctttggggtataaaagggataattattcctgttatatgtgcgctgtttctttttatagtaaaactggcctgtgaaaatgactcaaacgcactaagagtcatccgtttaaaccttatggggcttttgttaaaaatccgccacagagatttaattattggttattcatctgtcaggtaa

SEQ ID NO: 476887 - DNA, 2358 bp, Shigella flexneri
atgcacaaagtcaaattaaaaaacagtgacaatatggatgttgctcgtgaatatcccgattatcgcttccatgtaacagacagtattatctttacttctgacaggaaaatgctggcttcacttgttgtagcaggcattccatttgagacagagaacgataatgttcttacaaatttatttaacagcgttaaaaacttcctgattgggttaggaaaggaaggcgacctgtatttatggactcatcttatcaaaaaaagaataaccattgatggagaatggaattttgacaatgattttttaagcaggttttcaaaaaaataccttgctctgttcacatccagcgcattctataaatcaacatggtatctgacatttgggattccctacgatgatgttgataccggaatcgagcgcatgaatgaaatcacacaacaggcgcaaaaagcacttcagccatttaacgcttctgttttatcagttcacaaaacttatatcagtgaggtggcagactatctatcactattgctaaatgcagaacataacatgattcctttatcatccacccccttatcatccagtatttgtgattctgaatggtattttggtgctgatgttcttgaactgcgtaacaacgaatcggatagtaaaaaattcgcaacgaattatattttgaaggatttcccgatagaaacaacccccggacaatgggatttccttctcaagcaaccctatgaatttattcttactcaatcgtttatttttgaatcacccacaaaaaccctgaagaacattgattcgcaattaaacaaactgcaatcagctaatgatgcagccaaaacacaacaggaagaactcgaagctggtaaagaagcggtcgcagccggaattacgttgtttggttcactacactgcgcattaacggtattcggtgatacaccagatcaggccagaagcaatggtataaagctctctgctgagtttattacttcgggtaatggattccgcttcagtcgcgcctcactcgcatcaccttttgtttttttcagtcatatgccgctgaataaaaggcgtccactggatacccgaagaacaataaccaacctggcctgtctgatgtcttttcacaattattcctccgggaaaaaatcaggcaatcctattggtgatgggtccgccataatgcctttaaaaacggattcaggcagcgtttactggttcaatacacattacagcccaccggaaaaaaatgttaccggacaaaaaattgccggacacgcaatgtttcttggcgcaacaggcacagggaaaacaacatttgaagcaacagccagcggctttcttcaacgctttgaccctttaatgtttgttgtggattacaaccgttctaccgaactttttgtccgcgcatacggagggagctatttcacattgcaggaaggtatctataccggctgcaatccgtggcaactggcagaaggcccggaatcgcccgtctggcacagacttctcgcatttctgaaacgctggacacaggttctggcacgagacaaccagggcaacccctgttctgatgaacatggcattgaattaaacgctgccgtggaaagcattatgcgaatgcctgtcgaagaacgccggacagcccttcttctcgatatagtcagtcctgaacttcagacgcgtctcgccaaatggtgcgacaacggcgaatacgcctgggcggtggattccccccggaataccttcaatccactgcatcataaaaaggtgggatttgatacaaccgttgtcctggacacaaaaaacggtattcatcctgcctgtgaacctttactcgcggtcctgtttttctacaaagaaatcatgcaacgtggcggcaatctgatgctctccattattgaagagttctggatgccagcaaactttcctatgacgcaaagcatgattaaaagcgcactgaaagcggggcgcatgaaaggtgaaatgatgtggttaacatcacagtccccggaagacgccataaactgcgcaatttttgcggcgctggtacaacaaaccgcgacgaaaattctcctgcccaatcccgatgcaaaatgggaaggatataaagaaattgggcttactgaaaaagagtttgaaaaactcaaagagctggcgaaggactcaaggaccatgctcatcaagcaatctggctcttctgttttcgccaaaatggatttgtttggattcgatgagtttatgcccgtgctttctggctctgaaactggcctgtctatttttgatgagattattgctgaaaaaggagatgtagctcctgatatctggataccagaactcctgaaacgcctgaacggttaa

SEQ ID NO: 476888 - DNA, 735 bp, Shigella flexneri
atggaaaacacaaactattatgaacattcaaaaaaagaagcctccaaaaagaaatttgaagaaaagaacgaaaaaaaggattatttcaaggccatacgtgactttgagcgcagtgaaattgaaatcataaagaaaaaggcaaaaacatttaccattctcgccattggtgaatttgttgtaatttgcattcttggtttcgcaatagcctcccttgctccattaaaaaccgctgtaccgttccttgtgcgagtggataacagcactggatatactgatattgcccctcaattatctgatgctaaggaaagttatcaggatgttgagactaaatatttcctgtcaaaatatctcattaactatgaagcatacgactggcagactatccaggaacaggccgatacagtaaaaacaatgtcttcccaaaaggtgttttcagcttatgacaccatgattcgtgctaattcctcaccactgaacattctgaaaaacaactacaaaattaaggtccagattaattcagtaatccttctaaggaaggatatggcgcaggtgcgtttcaaaaaaatggtactggatttatctggtaaacccgcccccggatacagagcaacagagtggatttcgacgatttcttttgactgggataaagatatcaaaacagaaaaagagcgccttgtgaatccgctgggactgcaagttctgagctaccaacctgatccagaggttataaaatga

SEQ ID NO: 476889 - DNA, 771 bp, Shigella flexneri
atgatgcttaaacgcactactgcgatagttcttttgtcgatgctacaagtacctggtgctttagcagctatgtacggcacaccatcggaacgagacgggcgtattcagaccgtagattataacgagcaggatgtatttaatgtgcgcgtaaaagcaggcgcacaaacaacaattaagttcggacaagacgaaacaataaaagatgtcggaattggtgatccagaagcctggtcagtatcggtcagggacaacactctgtttctgcgtccaaaagcagaagaaccggatacaaacgttaccgttcagacaaataaacatatttatcctctctacctgatatcgaccacaaaacaacccacgtatattctgcgttttaattatccgaaaccaccgtcagctaccgtaatgactgaaaggccatttccatgcactgatggtggaataattaatggtcattatcaactcaagggggacaaatcaattttcccttatcaggtatgggataatggcgaatttacatgtatgagatggactaataaacaggaaattccggtcctttatcgtgttgatgccgatggaaatgaacatctggttaacggagacagaaataaaaacacaatggtttactatgacgtggctgaaaatctccgtttgcgcctgggtgatcaggttgcagatatcagaacatcatcaattgttaatcgtccgtggaataaaaaaggtacgtcaaacggaaaaacacgagtagagaagttcagttatgaaaaataa

SEQ ID NO: 476890 - DNA, 1140 bp, Shigella flexneri
atgaaaaataaagatgatgaaaaaaataatgacgcgggaaatcgcggaattatcgaagtaaaaggtaaagcagcgcccaaaaaaatattaatcctcatcatattactgattgccgcgttatttgtgatcattatcttgtttaaagttctttcacgagaacaggtcgttcagcaaacacctcttgagaagtctgacgagacactggtcacaaataccaacaatggcgtttcactgacaacaatgatgaaaaacatcgaagaaaaggaaaaactcgatgccgctaaccgcaggaaagcacaggaggagcaagaacagaaacaggcagacaatgccccgtcagcgccagcatcacaaaaggccgatcaaacagccgtcaatgtgatagccaacggcactccccaaaccgccagtggagatccaaaccaaccacaaccattgccaaaatccgtccgacaactgatgggcgacacaatggtgaagatcgacaatcaggaaccaggcgaaaaaaaccaggaaagagatgatttacagggcagtcagtacgcagacggaaaggtatcccctgtgctgaaccgccgatatctgttatctgcgggaacagcattatcctgtgcgctcaaaacgaaaatcgtaacctcttatcccggtatcacaatgtgtcagttaacacgagacgtctggtcggataacggcgaagtgcttcttgcccgtaaaggagcattactgatcggggagcagaataaagtcatgacacagggagtagcccgtgtgttcgttaactggacaacgctcaaagatgaaaatgtcaatgtgcgcattggcgcacttggcactgaaagtctgggcgcttccggccttcctgcatgggtcgataatcattttggtcagcgttttggtggtgcattgctgctgtcattacttggtgatggtttagatattctgaaaaacagcacgcaacaaacaggctcaaacagcaatatcacctacgaaaacacatctgacgcaacaaaagaaatggcaaaaacaacgctggacaatacgataaatattccccccacggcatatattaatcaggggactgtattgtctgttattgttccgcgaaatatcgacttttcatccgtatatgaacttcagtaa

SEQ ID NO: 476891 - DNA, 1056 bp, Shigella flexneri
atgaataacatcagagataccagtaatacatcacaaccacgagataacagtaaaaccgcaagacgatatctggatatgacgggtatccagtctgttcttaatattgaacatgtcacagaaatatctgtgaataaaccaggaacaatatggtttgaagggaaaaatggctgggaatctaaagatgcgccagacgcgacttttgataatttaatgacacttgccaaaactctgacgaacttatcaaagataaaaataccacttagccatgataatcccattgcatcggtagttcttcccggtggggaacgtggacaaatcatcattccacctgcaacagaaaataacagcgttgttatatctatccgtaagccatcattaacgcgctttactatagatgattatgtccgaacagggcgttttgataatgtcaggattgcgacgaaacacgaagccatcctgactgaacggcaacgctacctgtatgaattatcccggcgtccagatggtcaatctaaagctcaatttttaagagaggcagttaaagaccgtcttaattttttaatcgtaggtgggactggctccggtaagacaactatagcaaaggcaattgcagatatctttccacctgaacggcgttatataaccgttgaagatgtaccggaaatgtctctgccgctgcatccaaaccacatccggcttttctacaaaaaaaataccgttgaagcgaaggaaatcattgaagcgtgtatgcgattaaagccagatcacatctttcttgctgaacttaggggtaacgaagcatggagttatctggaggcgcttaatacagggcatgaaggctcaatcagtaccattcatgctaataatacttatgcctcattttcacgactggcaagtattgtaaaacaatctgatgttggtatgactgttgatatggacctcatcatgcgcacgataaaaacatcaattgatgtcattctttttttcaaccataccagaatgactgaactgtattacgaacccgaagaaaaaaatcgctttttgagcacaatgtaa

SEQ ID NO: 476892 - DNA, 1959 bp, Shigella flexneri
atggatgcaaaaaaaacgggggggttaattctcttcctgttactgcttcttgtgggtgtgcttatagcctcaaactatctcggtggatacacagcattaagatattcatccgttgatatgtctttgctcaagtgggatacattccattctgtaatctcaacattttctggcaacccacaatataaaaaactcgtttttatggcatggtttggattcagcgttccattaatattctttgccatattcatgttaattgtcgtgattgggattatgcctaaaaaagtcatctacggtgacgcccggctcgcaactgatatggacctgagtaaatcaggttttttcccggataaaaaatcaccttacaaacatccaccaatactcatcggtaaaatgttcaaggggagatacaaaaaacaatttatttatttcgccggacaacaatttttaattctttatgccccgacacgttctggtaaaggggtggggattgttatccccaactgcgtaaactatccaggaagtatggtcatactggatatcaaacttgaaaactggtttttatcagccggattcaggcaaaaagaattagggcaaaaatgctttctctttgcgcccgccggatacgcggaaactatcgaccaggccattaaaggacagatacgctctcaccgctggaatcctctggattgcgtcagtcgcagtgatttacttcgtgaaacggacctggcaaaaattgccgcaatccttatcccggcaagtgatgatcctatatggtctgattctgcacgcaacctttttgtcgggttagggctttacctgctggacaaggagcgttttcacctggaccagaaagccaaaggtcataatgcaccggacgtccttgtttccatcagcgccatactgaaaacgtcgattcccgataatggaaaagatctcgccgcatggatgggacaggaagttgaaaatcgtagctggattagcgataaaacaaaatcattcttctttgagttcatgtcagcaccagatcgcacaaggggaagtataaaaacgaacttttcatcaccactgaatatattcagcaaccctgttactgctgaagcgacgaatttcagtgattttgatatccgggatattcgtaaaaaacccatgtcaatttatcttggtctgacaccggatgccttaatcactcatgagaaaattgtaaaccttttcttctcattactggttaatgaaaactgtcgtgaactgccggaacataacccggacctgaaataccagtgccttattctcctggatgagtttacatcaatgggtaaatctgaagtcattgaacgcgctgttggttatacagctggttataaccttcgctttgtgttcattcttcagaatgaagggcaaggacaaaaaagcgatatgtacggtcaggaaggatggaccacatttactgaaaacagtggtgttgtgctttactatccgccgaaatcaaaaaattctctggctaaaaagatttcagaagagattggcgtgcgagatatgaaaatctcgaaacgttctgtttcgagcggtggaggaaacaccggaacctcccgcacacgaaatgatgaaataatagaacgtcctgttcttctccctgaagaaattgtgtctctccgggataagaagaataaagccagaaatattgcaatccgtgaaattataaccagtgaatttagccgaccatttattgccaacaaaataatctggtttgaagaaccagagtttaaacgccgcgtggatatcgcccgtaacaatcatgttgacattccaaacctgtttacacaagaagtcatggatgaaatagcaaaaattgcagaaatttatctccctaaagctggaggaaaaaaagtcatggttgccggaggcaatgtgattactaatccagaccttgataatcacgataaaacagacgtatctgaataa

SEQ ID NO: 476893 - DNA, 444 bp, Shigella flexneri
atgagaataaaacatttgaatatgataaatatgaatgtgaatatgaatatgatgaaagaagccattgatgttttgataaactctgaaaaacatattctgattataggcgaaactggaactggaaaatcaacacttttaacagaattgctaatcaatgacactgacgttaaacatttaaaacaacattatctttgcgatgaaaattttgatgattttgactttttatctgcacctgaaaaaacgttggttcttgatagtgtagccatcggtaacaacttacaggaatcaaaagttgttcagtttattgttcgatttattaaaacagccaggaaacgtggcaaacgtcttattgttgtcactactccttcagatggcggcgtgcagatacaaaaccttttcgacacagttatcattccagtaccggagttaattaaatatgaataa

SEQ ID NO: 476894 - DNA, 1644 bp, Shigella flexneri
atgaataaaaaattgctttgtttattaatatcctcttttttattatcaggctgtgcaaacttcaaaaaaatcaatgttaatgaacttgctgccgaaagagacgcacaaaaagcgactgaatacgcgaaaaaaattcgtaataacccggttatccaggattcaacaaaacaatggattaatacaacgccaattattgaaaagcaggtaaagcaatcagcgccgccctgcccgattgtgattaatactcgttcagatattgagctacgccagatcgcacaacgcatcacacaaacctgtcatatcccggtacgaatcagcgccgatgtctggacctatctgaacggtacaggcactggctcaacacaacaaatgacaggctcaattccagcacctgatgcaaatggaatggttcctctggcgtcagtaggcagtcagccagtaaaagtctcttctggcggtacatcactccctgaactgaatatctctgggcttcctgccctactgcaaaccgtatcttcacggctgggaatatcctggaaatacgataaaggtcgtatcacattcttctatctggaaacgcgctcattcccgattacatatatggacagcaatgtgacatacaactcaaaagttgtgagcggcacaatgtcttccagtggcagtaccggctctacaagttctggcggtatgactggcgacgcatcaaatacgcaaactacaaccgtggaaatgaaatcatcgctgtacaacgacctgaaaagcgaagtttcctcaatgctgacaccaggtacagggcgcatgtatctgtccacaggttcactgacagtaacagataccccggatgtactggacagcgttcaggagattgtgaacaagcgcaataatgaaatgagtcgtcaggttgtgctgaacgttgaaatcctgagtatcaagaaatcaagccaggaacaggcgggaatcgactggaacgcagtatttaatgatggtcatcttggtctgagtcttggtggctcatttggtaatgccgccgagaatgttattaccagtggtgtatccatcgtggacggtaagctggctggctcaaaagcatttctgaaagccctgtcgtcacaaggcagcgtcagtgtcgtaacgcaaaactccgctgtgactaaaaacctgacgcccgtccctatgcaaattgccaatcagcagggcttcattgaaggtgtcacaaccgattccaccgccaatgtgggatcatccacgtcactgaatgcggcaacaataacgaccggattcaatatgactctgcttccatacattcagccggattcacaaaacctgcaattgctgttctcaatgagtctgtctgacaaacctacttttgacgtgttcgaaagtggcggcagtaaagcacaaacaccgaatgtggatttgaagacgattaatcagactattgacctgaaatcaggccagacagtcattctgagtggattccagcaatcaaaccggaaaaccagtaagcaaggtgtaataaccccctccttctttggacttgggggtggcgttaacagcgaagacggcgacacgattctggtcgttttaattacaccaaatgtgcttaattccggctccagtgcagtaataaaaaatgtgaactaa

SEQ ID NO: 476895 - DNA, 1311 bp, Shigella flexneri
ttgtctgagaataatcagaataaccggaatttcacttcggttattaaaaacaagcgtgcttttttctccggtctggactggaaaactcttccttcagaagaaaagaatgcgcgtacattcgcaagaaaaaacgacgctgaatattttctctcctgtcagtatcaggattcagaaaatgaaaccaaaacgatggtggcatttatcagaaaagaggatcttcccacaggggcgtcctcattctggtcactggcactgatgataaaacccctcatcgaacctgacggatacgctatctgcgaactcggtgatctttatggctttgtttcctgcgtcaataacgttctcgtcaacgatgttgtaggtaacaaaagtcagatcatgagtgccctgacaacatttcttgagtttaatgaaacaccagaacccggctggaaactataccagcctgaatcatgggatatcagccaggcactcccctcactcactctgtctgcgttgattgacgtaaaaaaaccaccaaaagaggcggcgtttactcgcgtatcccgaaaacgtcagttcatgatttatggcggaagtgccattctggccatactgctctggaacgggatcaccatgtaccaggaataccgggaaaaagaagctgcggcagaagctgcacgtcttcgtctggcaaaagaaatggcagacaaacaggcaatacagattgccccaccgtggcaacatttacctgaaataaaaccatttattgataaatgcattgataaatgggatgctctgcccttatctatcgccggatggcgttttgaccttgctgaatgcagcacatccggtaatgacgggctgttacgcacatcatataaggaactgagcggcgttacggtcgaggacttcagcacacggatacgagaaatattccaggggacaaccacagcaacttttgtattgccagaaggcagcgccgggggattttctcttcctgtcagttttgacgtttcgcctgatccaattaccccggacacattgccacaggcaacagatattcaggaacgcctgacaacatttgcacaaaaaatgaggttaaaactcacctggcaggaaattgaaaacacaaaaacagatgaagaaggccgtccaataattctcccgtggaacgagtatgaattaatgattcagaccagcaccccgccttcaatacttttcgctaactttcatgaacctgccgttcgcttccagtatgcaggaataaaactggaagaaggaagactgaattatgagattaaaggtgcattctatgttaaaaataattaa

SEQ ID NO: 476896 - DNA, 516 bp, Shigella flexneri
atgagattaaaggtgcattctatgttaaaaataattaaaccagcgattatttctgtctgttttttcagttcacttgcttacgcaacagaatctgaaagcacgccaaaagaagaaataaaatattcatctccgacaattttacaggtagagcagattcaggctgaaacggtaatttacgaagcaaagctggcgcgtcagaaggctgtcagtgaattacgtaatcttgatttgaatggtgtagcgtccgcaacgccagcaataacgccctcttcagggtattcttctcttgcagataccgatataccagcgcaacgtgtagccgctaaatcacttcgtgttattgaaatatttggtacaccacaacaaatgtcagcacgaatttctctcctggacgggtcagtaactgatgtcaaggtcgggcaaagtattccaggtacttcttataaggtggcatcaatcactggtaatggcgtctggattcagaatggtacagagaaacgccagcttattctttaa

SEQ ID NO: 476897 - DNA, 1539 bp, Shigella flexneri
atgtttttttctgacgcagactatcccggaaaagatatttctgatgttgtatacgtcagtatatctgaaaaagacgataaacctgttcatgtttatatcgctgataacagtaaaggacagcgtgctgttcaggcttatattggcactctgaatgttaaatatcccggaaaggtaaatataacctggaccactcttgatgttatcgcatcccgctaccaggacagcgaaagaagctctgattcaaactcatcacaacacttaaacagcaaccaggaaaaggtcattagctacctggcgaaagcaaacaacctgggaagttccgatttgcacatcacacctggtcgggacggttccgagttcacttatgtcgaagcacgcgtgcatggggaactggaaattctggatgtcatcccgcgtaaagaagggctggaattgctgggtgctgcctattctggaatgagcgatgttatcaaaggtacgcagtttgacccggcaataccgcaggatgcacgtatcgcagagaattttctgaagcctgtaaatctttttggggcgcgctattcgcattatccgtgcgtgggtggtgtgtacgcggtcttccgcctgattaaagatgacagcaaggatattcccactttcgaagaacttggctacatgccacaacaaatccagacaatcaggcgaatgttacaacgcccggaaggaattatcgttttatccggcccgacagggtccggtaagtcaacgactctgagaacggcttcagaagcctatctgagcacgtttggtttcaaccataacgataatatgcgtctcccccgaaaacgccttttcaccattgaatcaccgccggagggccgcattcccggcgcaatacagacggcagtcagggattccgtcgatggctgggttgacgcgattaaatccgctatgcgacttgatccagacgcgatactgaacggcgaaattcgtgatcacgcatcggcattagcagcaatcaaagcctcgatgacaggccaccttctgctgacgaccttacacgccaacgatgccctgaatattattgagcgccttgaaatggagaatattcaggccaggctgattgcagatcctcttctgtttatcggtctgctgagtcaacggctggtacaaaaactctgtccttactgtaagcgcacttatgctgaaatggcagacaaactgagtacagaagaacggaaactcattgaggaaaattgcctgccggaacaggtccggctgcgcaatcttgacggttgcgagcactgttataaaggcgtaacgggaaggacggttatagcagaagtcgtctcacccgacgcacgtttttttcagttatatcgtcagtccgggcgtctggaagcaaaatcatactggcactatgaacttggaggaattacccgtaatcagcacttattacacctgattaatcatggcctggtagatccgctgtccgcacacttcatatcccccattgacgaagataaatactcaatgctcccggaggggacatggcgataa

SEQ ID NO: 476898 - DNA, 1110 bp, Shigella flexneri
atggcgataaaagatatatttgagaaactcaattcgatagaaattgatttctctggaatatcccactggctggcaaaatacacattcaggtattccagaataagtttatatgaagatttatctggaatgttaaatgatggcataaatgtaaagcgtgctcttacacacctgattgatgtagaaacagactacgggaagaaaactggttcttctgcaacctactatatttgttgtgagtgccttaatgcactgaataacacaggggcaatatcttcagcattaaaaaaatatataaaggaggatgaatatcaattaatatccagcggtgaaattcgcggcgaccttgccggaggattagttcaggccataaaaattgtcagaagtcgttctgaaatgacaatgactcttgttatgtcgatgatttatccatccgtcctgttttttggttgtctggtaaacatgtatatggtccacgataccataacacctgttttcctttctctcgcaccgaaagaacgctggacaacttctatgcgattactgacagatacgtctggtttcctgatagaaaacggaacgtatattctctgcttctgcatcgtactgtttttcctgatcagatattcgcttgcgcgttatacaggaccgggccgtcagtatcttgattacattcccccctggtcactttataaaacatttaatggtgtaagttttctcttcaacatggcctccatgttaagtattgatattcccgttgcaaaagcactggaaaggctggagaaaaacagcactcaaaacagatggctactcgaacgaataaaagaaatcaggagatatgttttacttggacagtcacttgcaatggcaatgaaaagttgcggttatgacttcccatcgaaattatgcattaacaaactattacttcattctgaaaatgctgacaatgcattgatgatgtctaactatgctgataaatggctggaggaagcaaaaggaaaagtcaaatcaacaggagtctggataacagtagtatccgcattaattgttttcgcatttattgtaatgatgattactgctctctacgatgtcagtaacgtcctgcaacactaa

SEQ ID NO: 476899 - DNA, 558 bp, Shigella flexneri
atgtcttctattaatgttttaaatatgcgttctgttttttcttctctttctgcacgccgtaaaaaagaacaggacaaaggggcaacactgatagaagtgttattggttgttggtgctattgttgtacttgcaacaggtgcatataaactctattcaatggtgcaatccaacattcaatcatccaatgaacaaaacaatgtcctgacagtgattgccaacatgaaatcactgaaattccaggggcgttatactgacagtaactatatttccactctgtataaacaaggattgttaccatccgatatgatcgcagattccactggcgcaagcgcgaaaaacccgtggggcggctccgttacaatcaccacctcttcggataaatactccttcaatgttgtagaggccaatgtcccacagaaaaactgcatggcaatggtaaacgccctgcgttcttccagcgcaatctccaaaattaacaacacttccacatcaaccgtcagtgcagcaactgtttgcgcatctgacagcaatacgctgaccttcagcactgattcctga

SEQ ID NO: 476900 - DNA, 483 bp, Shigella flexneri; identical to SEQ ID NO: 469845

SEQ ID NO: 476901 - DNA, 636 bp, Shigella flexneri
atgctaaacagcatatttaatacggcgatactttgctgtgcaaatatcgtctgtcaatgctacgcctacaatgaagttaaattccgtttaaataaacttaatgtatcttataaaaccggaacagagaaatattactgtctgatactgacaacgcttgccgttttgtatctttcattaaatcagctatcactgattcaatccataatagtgattgttttctatgctttccttacattaatggcctgtatagaccttctttcatttctactaccacgcctttataccgtgacatttatattctccggcctgttatatcagacatggaataacaatatattgtctggtttgttttgtgcaatgctgatgttcttcattatgctgtttgtaagactttactttgcatataaaaacggaacggaaagtttcggcatgggagatgtgctacttattgcaggaactggcgtatggtttccaacgcctgagattgcctgttcaattgtatttattgccgttatcggcgggattattttcttcactcttggcggattaaacaagcaaaaaaaatatattccatttggtccgtttctttgtggcggaatgtttgtttactcactcgtaccgggaatattattttga

SEQ ID NO: 476902 - DNA, 1254 bp, Shigella flexneri
atgaaaaagacagataaaggtgtatctctccttgaggtattacttgtcatcggcataatggtgatggttatccctaaagtttatgaaaacattgaaaaccatctgaataatgttcgctggcagaatgcagcagaacacgcaaatacctataacaccgctgttcgtaattatgttgctgacaatgcatcaacactacttgctggctctttacccaaaacaatcacgccagcaacactcattcagaaaggctatctgaaatctggtttttctgaatccaattttggacaaagctacattaccggtattgcaaagaacagcaaaacatcccgtctggaagccctgacctgtagtaatggcggtcagtccctgtcagaagccggaatgcgctcggtagcaagcatgattgaagggcttggcggctacatcaacagcagcaagcaggcgattggcgcgggtggcggctggtctgacacgccttcaaattacgggctgaactgcgcgaccgggcatattgcaatggcacttgttggcgctgatttacaggaaagcgaccgtttgtatcgttactccataaccaatcgtcccgaccttaacaggatgcatacggcgattgatatgaacagcaacaatctgaacaacgtcggcactttaaacggcaacgccgccgcgctctccggcgatatcagcgcacgtaacggtacgttctctggcgcaatttcaggaaatacagccacaaccaacggtgatatcacttcgaataatggctggctggtcacaaacaacagcaaaggctggatgaacagcacctatggtggcggctggtatatgtccgattcgtcctggttgcgcagcgtgaataataaagggatttatactggcggccaggtaaaaggtggaactgtacgcgctgatggacgcctctatacaggcgagtatttacaactcgaaggaacggcaacagcaggggcttcctgctcccctaacgggcttgtaggccgcgacagtacaggggcgatactttcgtgccaatccggtacgtggtctggtggcaataaagtgaactactccgcctgtaagtggtatcaatcatctgtagcaatgaatcacttcattggcgggaaaagtggaggatctatctactacaaacccattcaatgcccgaccggatttatcatgacaggtacacgcatgtatggcattggtgatggcgttgatgaggaacacgttgatgcttattgttgccccttcggttaa

SEQ ID NO: 476903 - DNA, 450 bp, Shigella flexneri
atgctcagatttcgggtgtttttcccgatattgtatgtactggtagtgaagttcatttttgtcgttgtccagataccggattggcacggaggccagtgccaatccggtgtgtggagaacttccggttcctctaacggtagttacagtaatcttggctcacacagaggatcattttcgggccgcaatacaggaagtgggacgctgtttgtttacgccagtggagggaatagtggttctgccgggggagattgtgctaacacatccagattgcagggatacgttgcaggggcattgattagcacaaatgcgagtaataacccatcttatgggaagacagcattcatctcttttgctgtccctgctggcgcaacttatcagatcacctcttatccggcccaaaactactcttgtggctcaggggtgttctcggtttatgcatatcagatgtag

SEQ ID NO: 476904 - DNA, 189 bp, Shigella flexneri
atgtttcgaaaaataaaaattcgcaaaatgactctcaaccgggcgctggacaaatacatgaagacagtatccatccacaagctacgaacactggcacaagccgcccagcgaggagaacgcgtccctactcctggcgaacttcctacaaacattgatgaacgggtaatgatttgtccattaacaaattag

SEQ ID NO: 476905 - DNA, 594 bp, Shigella flexneri
atgcacaaacaagaaattaataaacgtggcagaaagcgaataaaaataatgtgctatccgttacgcaaaaaaattagcgttagtttattaacaacatttatttttctgcttacagcttttcagtctgcaaatgcaagtggaataccttatacatttaaccagaaaattcttcaggggaaagttattcgcgttctcgatggcgacaccatagaaattaaaacactacccgcaaaaatggttgtgtatgaagttccgattcgagtccgattgctaaatatcgatgcccctgaaaagaaacaaccttttggacactggtcaacaaatcaacttaaagccctgctcgcaggacaatccgttaccgtctcttatacgcaaacagatcgctacgggcgagtcctgggacgagtggtgactgcgaacggcacggatgccagccgctttatgattcagtctggcgctgcatgggtatatgaacgtcacaactcggatgagtcattaccggctctgcaacaggaagcgcaggaacaaaaacgtggtttatgggctgatataaattcggttccaccgtgggaatggcgacataaacagaactga

SEQ ID NO: 476906 - DNA, 1263 bp, Shigella flexneri
atgggtaaattaactctggtagagcaggctttacggcttcacaaagaatattacggtgaagataattttggaactgtcgtaaaggattgtgattactatcctaaagtggcagagatttttataaacagaaagaaccgtaaaatttattcgaatctggatatcgaacctgttgcttcaaccgttgttcatacgggaagtagccctgttatggctaaagccgggagaattaaaaaacttatgttcaaagatggttctggtgcatacaggattcatcttggtcaaaatgaagttgttcatattattcgcttcattcttaactctaaagtcaggatggagtacgccgttgggactactaaaagtatgtcaatgctccacaatctttgcgaggcaggccgcgctaaattaaaccgctcattaccacgtaaaggtatctggaaacttgggtactatgatggtgtttattatcacggtaaggcaaaaaaggaggaaattgaaaatgctatgcgtttctcagttcatccaaaatttgacgagctggaaaacgactttaatcagttcttttctgatattgatttctatacccggtatggtcagtcaggtatgcgtaaagtgctctttactggccccccaggaacaggcaagacaactatcgcaaaagctttgggggcaaagtatcaggataagtatgtttttgtttatgccgacgattactttaaagatgtttgctacgctgctgctcagaagaaaatacccgtcattattatagctgaagaggttgatgaactttatcgggctgatgccggaacgttaagttttcttgatggagctgatacaccgcgaaatgtcgcaggaacatatgtgatcttttctacaaactatccaaaacgtatcgacccacgtattagaaaacgtccaggtcgaattgacaggataatctctgtaggtgctttcagaaccaaagccgctgccgcttgcgccaaaatgtacttaccagaagatgtagaaattgaccttaaagagcttggcgcagtgctggacagaacgactccggctgaaatcaaggaaattattaatatcgcaatcggaatgattcgcggaaccaaaaatgaattatcagtggatgtaataaaaaatgctcgtgcctttttgaaaggaacccttgatctgagcgtgcaggaagcagatgaagatatagaggaaagggaagagctttataaaaagaacggggcgcaacctgactatttaagttacctggaggattaa

SEQ ID NO: 476907 - DNA, 576 bp, Shigella flexneri
atgcaatatgcattgtttgatggatttgaacgaaagtttttgctggatgctcttgaatttggtgttctgaaagactggaaagaaaatccggtaaaagaacttcctgatattgatgaatctgctcaccccttccatgtctgttatggtggatatttattaaatcctggtgtttcagattcagatattagcagaaaaataaaagaccagacaggattctggctgtcagctattgatgatacccgcatggattgtcattcaatagcttattatgatattcacacactccctctgatttcgtgtggtcatcaaaagatagttccttttgccgcgttaataaaagctgatgaatgcatcatttcaaaaatttcttcgtattctggttttgctgtaacagcctttttgagaattaaagaccaggatattgcaactaatatacttaaccgtgagggaatttttgcctttaatggctgtgagcgcagattcagacaacctgtaagtgaagataactggcaacaggcagtatcagaagaacgcgctatccgttgtgccaaaagattaattcaatgtaaaggataa

SEQ ID NO: 476908 - DNA, 2157 bp, Shigella flexneri
atgaaactttttatcgcagaaaaacccgcagtagcgaatgatattgttaaggcgcttggtggcaattttacccgtcatgatggctggtttgaaagtgataatactattgtgactaactgttttggtcatattatcgaatcacagccccccgaaaactataatcctgaatacaaagagtggaagattgaaacactccctttgcgtctttatcccgtaaaataccagcctgtagaaagcgccgaaaaacaggttaaaacgattattgagcttatcaggcgtgctgatgtgaccgaaattattcatgctggcgatcctgatgacgaaggacagctacttgtcgatgaggtcctggaatatgcaggcaacacaaaacccgttaagcgcgttctgatcaacgacaacacccttccggcagtgaaaaaggcgctggcaaatcccaaaaataaccgtgacttcagaggactctatctcaaggctctggcgcgttctgtagccgacgcgatatacggtttatccatgacgcgtgcttatacgatcccggcacgggctaaaggctataaagggacactttcggtcgggcgtgttcagacgcctattcttggcctgatagtaaatcgcacccgtgccaacaagaatcataaatccagtttctactacaccatgaccgggcattttcaacgcggcgttgatgttatcagggcgaactggaaacctggtgagttcgcaccactgacagaccgtaaattacttgataaggcgtgggcgaatggaacagcggcttcccttgcaggaaaaccagcgacagttgaagcagcagcaacagacgataaaaaaacggctgcgccattgccctttaacctggtccggcttcagcagtacatgaacaagaagttcaaaatgacggcacaacaaacgctggatatcacacagcagctacgtgaaaaatacaaagcaattacttacaaccgttcagattgctcatatctttctgatgaacaattcagcgaagcaccacaggttctcgatgccctgaagtcggtgtttgatcagccaatggatattgatacgacacgtaaaagcaaggcatttaacagcgcaaaagtaacagcgcatacagccatcatcccaaccgttagcgtaccggacgtaaacgcactgagcaccgacgaacgcaatgtttacctggcaattgcacaacactatcttgtccagttcatgcctgaaaaggcatatcaggaagtatccgtcgccattcagtgtggtgatgagtcgttttatgcccgtgccaggaaaactacagacagcggatttgaagcgtttcttggtgtggaaaatgccggggacgatgaagcagaagtcgaaaatgatgattccgattttgatcttctctgtaaaattcgcacaggagaaacagtgacgacaaaagaagtggttgtgaatgagaagaaaacaacgccaccgccattattcaccgaagccactttacttgccgcgcttgttcgtgtcgcagattttgtcactgatccagtgattaaaaagttactgaaggagaaagatcgggataaaaaagacgaacatggcggtattggtacgccagctacgcgggcttccatattggaaacactgaaaaaacggaactatatcaccctggaaaaaggaaaacttattccgacagataccgggtatgcgcttattgatgctctgccggatatagctgttaatccagatatgacggcattatgggcggaaaaacagacactcattgaaaacggagaaatgaccatcgaacagttcgttgacgaactgtacaatgatctgataccgatgatcagtaatgcgaacagtgctgaaataaaagtttcccccagcgcgccgtctggtcagtcacaacgcctgtcctctccttgtccttcctgtggtaaacagattgttatcaggccaaaaagctattcctgtacaggatgtgaatttaaaatctggaatgagttttctggcaagaaaatcacccaggcacaggccgaaaaacttattaaatcaggaaaaaccgatttgattaagggatttaaaaagaaaagcggtggaacgtatgatgcagttcttgtccttgaagataagaaaacagggaagctgggttttccggcaagggctaagaagtga

SEQ ID NO: 476909 - DNA, 207 bp, Shigella flexneri
atggtgaatggtttgttgcttttctctattagtgtattagtttttttagtgataatcctgatgttacatttgaaaacagccagtcttctttctgaatgctctgaatatcgcacgaaatgtgataatctctatcatctatgccagatgcaagagaaagagttagaacatctacgtgcactcattgatgcgcataacatagattattag

SEQ ID NO: 476910 - DNA, 339 bp, Shigella flexneri
atgaaatttattattttaaaaaaggataaagatagcacaattgccagaaacgactctgttttccctgttaacaatttctttgtcgttttaactaccgtgtcttccgtggctaactctttcggaatagtgtcttccctggctaaatctatcggaatattttttcccacgggcaatgttattgagacgtgttttttcggtatgttttcactattactggctgctttcagttttgtaagtacaatggggctggcggacgcagtcccccccattaaaaatgtgtttccgcttttgtttttcgttcttgtcttaatcactaattataatatttacttccgataa

SEQ ID NO: 476911 - DNA, 207 bp, Shigella flexneri
atgaaaacaaaacaagactggctctttcagttaagacgttgctcaacactcgacacacttgaaaagattattgaaaaaaaccaaaactgcctccccccttctgagcttgagtcgtttaatgccgcagccgatcacaggcttgcggaactcacaatgaataaactctacgataaagtccctccatccgtctggaaatatgtatattag

SEQ ID NO: 476912 - DNA, 375 bp, Shigella flexneri
atgcttatatataaccaaactttgggatacttcgccataccttgcataattctttttatgctctcgtgtttatcagcggtatggtccgcactaacggaaaatgaaaagacatttaatataagtggtattttagctgtcttatgtttttccggcattattacttcaataatgataccaacctataacgatgaggatatcaaagcaggtgaagcattagctgcatgtaaaatcgtagaggaaaatgcgtataacggattatttagcgacaatgtaaataaaattgattgcgacggtattataaagaacattcctgtaaacacatataacaaactaatgtacgtctataataaaaataaattcagagcgcaggaatga

SEQ ID NO: 476913 - DNA, 213 bp, Shigella flexneri
atgctcacccattttttgtttgtaccctatatcagcccctggcaaggattgctttttcttactgtagcagtaataaccattgcagccggatgtattttcatctacgaaaacagaacgcatttctcatgggctgatgcggttatggttctggtttattgtggtctggcagtttttttaggtgtttgcggtatacgggcacttgggcttatctga

SEQ ID NO: 476914 - DNA, 363 bp, Shigella flexneri
atgatcactctttttctgttcttatcactattgatactcctgataaggatattctctgccagactaataattccggcagtgggcgtgtttctgccagtatcatcactctggatgggatttcatatgctcacacaaaatgaatcctgtctggataacatcgcctgtgttgctcccccatttggtcagttcagtacccttataggatggtttttgattgcggaatcaatattaaccgcatgtgctggcgtatattttctccgtaaaaataaaaaacgctggtcacgtcatgatacagtcatgtttctttttgcaagtggcctggcaattttcagtacgtggatgctggaacaccaatgggtttga

SEQ ID NO: 476915 - DNA, 441 bp, Shigella flexneri
atgaaagaatacgaaaaagcggctttaatatattccttaaaggaaagcaatacattagttcttcggattatactcatctctattttatttggcggggtgatttcaggcgcgatatacttatataacttagcgatctcgttgtttgattcaaacccgacgtctgtgcaattcaccgtttgcggagtaggctgttttattgctctattacttcaatggatatctaatgttgatgcaaattacagagaaagaattggggagcaaccaagtacaataaaaaacattgtacaatatttatttgcagccattattatcattagtttcattacaatggcattaacagccttattagtcttaaaagactcgtccaacatatggctcaacattacttttattgcattattactgtccttttttgtagctgttatttctgtttggggttga

SEQ ID NO: 476916 - DNA, 3762 bp, Shigella flexneri
atgattgtcagatatggtggtggtaatgacggtattgttgattacctgataaatggtcgcaaagcagaacgtcagtacacacgtgatgaacttgatcatcgtgttgttcttgatggtgatctccagactacagataagattatcaattctattgaagacaacaaacaggaccgttatttgcacattacgttgtcttttcatgaaagtcacgtatcaaatgaaatgttaaaggcggttgtggatgattataaaaaattattgatgaatgcttatcatcctgaagaatattctttctatgctgaagcacatttgccaaaaatccggcatattcaggataatagtacaggagagttaattgaaagaaagcctcatattcacattgtcattccaaaggttaatctagttacaggagataaacttgatcctgttggccttatagggaaaggtcatactatcgaacagctagatgcaatacaggagcatattaataataaatataatcttgccagcccgaaggactttccgagaaaaaatagcgattatagtgttattttaaagagagtaaaagcagatcttgatgtagagcgtaattctgcatttaagaatgaattgaattatcgaattgaaaaagaaaaagtaagtgattatgctgtattcaaacagattgttgcagaatatggtgaggttaggataagaaatgaaggaaaggccagtgaatatattgctgttaagttaccgggagataaaaagttcactaatctgaaaagcccgttgtttcgtaaaaactatattgaagagggaaagttgactcttcaaaaacctacgcctaagcaaatagaaaaacgtctcaatacctgggtaaacaaaaccagtcacgagattaaacatgtttttctcaacgccagcgttcgtaaggactatacaagtttatctgaagcagagcagattgaatttctgaaagagaggataaaagaatatgactcaagagaaaaacttaacgaaagaaattctcagcaaacgtcaggacgagcgggaggttacaagtcgtgtcctaaaaagtttgccagaatccgtcaatctgaagcaacagtcggattgtcacgtatgccccaacgcggtatggtttacggaatcaatggattcacaagacccgactctgtcagtgtattgtcagatatttcgcagcgtgatctggcaaagcaattaccgcaaagagaacatcctggtcaggatgtgcgacgggattatgatagacaattcacagagtcaggaataaaaagtcttgaacgctcttcttttttgtgtgaaacgatgtttcagactctgaatgaggcggcagagaaaaacgaaattacaacgatggcagaaattcgcagaaatattgatcctgtcaggtttctgtcttctgccgccgagcgttttaatattattccagcgcagcataaaatcagaacagcaaaggacggttccccccggttttctgtggggaatcgtaatatgaacgcatctgattttctgacaaagcatattaatcttgcctggaaagatgcgaaatcctttctgcttgaggtttattcacagcagttagaaaacacgccatatacgcgctatccaacctacagacgccttacgcatcatgaagcccgtgagcgtcttaactcactgaatttatcggaaaaaacattacgaaatactatcaggtttgagcgtggcaagctgtataatgatctgcgagagatgagacgcgagttgaagttaataccacgtgaacagcgtgatattgccgtgggtgtgattgtttacaaaaaactaaccacacttgagcgtctttctgaactcgacacagaggggcgacacattattcgtcaatatcatgctgactggcataaggataaagatgaaatgaaagcccttgaacgtctcaaaagctatctcaacttcgatgaaatcaacgccatttctgctgacgaacccgaactttcgcttcagaaagcggtggattcccagcgccgcttagaagaggcgaaaaagattaacaccaaactaaaagatcttgtgatggataagcaggattccaggattgtttatcgcgatcaggaatcggaaaagcctgtctttaccgacaaagggaactttgtcgttgcgggtaaaaatccctcaaaagaagagatcggaataatgcttgagtattccagggaaaagtttggtggtgtactcaaacttaccggctctgaagatttcaaaaaaatgtgcgctgaagttgccgcagagcaggacatgaagattattttacgcccggagcagtatcaacagatgatgctggaattaaaagcagaacttcagggtaataagtttgagcaggtggaaacacaggaaaatagccaggagtccgaatccagaatagagaaaggtgatgcattgaaggaacaggccaccgaacaggaacaggctacagaacaggcgcaggctacagaacaggcacaggccacagaacaggcgcaggctacagagcaggcgcaggctacagagcaggcacaggccacagagcaggcacaggacacagagcaggcacaggccacagagcaggcacaggccacagagcaagcacagatcgcagagcaggccacatcttcatatgatccaggtgttattaccagggcaaatatcctggattcacagatgcttagtaaaggcacaaatggtgaatttggctatttgaaatctctggatagcgatgaaaatgagatttgggaagtgctggggcatgtacctggagacagcgatgatatctttagtgttgccagttttgataatgaaaacgacgcaaaagaattttgcaaaattgttaatgagttaggtatagacagaacacaggctttgattcaggagcagctttcttctcaacaggagcaggctgctgtgcaggagacgtaccaggaatcaccagaagagatactcgccagtatttcagctaacgagcatatgatctccgggcttgaaaacttcctggttaaagaccgttctcagttcagttcctgcaatggggatatcgttgtggaggcggaaattaccaggggggaaggtggtctttatcaccttgcggtcgctggtaagcatggcttagagcgtggtgatgcagttgccagagtggatgttacggagcagcaattcgccgcgatcactggaaaaacaccttctgaagttttaacgggggaccaaacatcggctcgtgttccggtaattacaggtatccatttcagtacaagggctattgaaaatgtgaataaactggaacaacagaaggattatgtctatttctcaacacatgaaggtctgaatgctgaaataaaagatttcagctctctcaaggatgctattgagtggggccgggttgaatgcgagctacatgatctcaataagcgcgatactgtcatttatcgcgtcgagtctgaacatatttctcaggggattgacgctgtaatgaaaaatgctgaacgcgtggagcgtcatgaaattgagaaagcacagggacgggattgcacgccggaagacggcaagattcttgaggcaattgatcgctttgaggacaagttcagaggggaaggactgaagttcgaaagggagaaggccgaatccgatttgcttaatcacggattcactcgtgaaatggcagaagatgctcttggaaaacaatttgtccaggccagagaagatcatcaggaatcgcagcagcagcgtgacgattcacaggacatgcactaa

SEQ ID NO: 476917 - DNA, 342 bp, Shigella flexneri; identical to SEQ ID NO: 469794

SEQ ID NO: 476918 - DNA, 402 bp, Shigella flexneri
atgaaaaagatcgagagtttattatctccaatatgcgaggctataaacgaaacaaaatcgaaatcaaaacaagctgtcttcaatatgtatttgcaaaatatacttgaagcaaagaaatattatacatgggagcaaatagctgattacataaacaacaacaccaagacagaactagcccaaaagacttatataaacatgacagagagggctaaaaaaagacaaaaatgctctgaaccaaaagaacaggcaaaaaccatagatgtaattgatcagaatgaagctaaagacgatgaaccgagagggggggtaaaaggttttttttcaaacattagtgagagcaaaaaagaaatagagcacgatccaagtgctacgaatgaaaaattcataaataaatatctttaa

SEQ ID NO: 476919 - DNA, 753 bp, Shigella flexneri
atgaaaaactcaatcaatttcatccttcagggtaaaggtggtgttggaaaatcatttgcgaccgcaatactggcacaatactttattgatgaaaatcacatggataatatcgtagtcggtgacacagacccggttaatacaactacggtaaaagtaaaaagattaaatgcagatttgatacaaatcactgaaaacagcaaagtaatacaatccaaattcgatccaatgttcgaatcaatgctgaccaatagtcagaatacctttgttattgacaatggcgcatctacatttttaccgttaattcagtatttcaatgataactgtgttatggacatgtttgaagatgtagaacaagacgtttatatccatactgttatcgttggtggacaagctcttgcggataccttgcagggatttgaagaactgaaagaactggttaaaggaagtaaggtaaaacttattgtctggataaatgaatttcagggtattccagcacttgaaaatatcccattaatagaaactaaattcattgaaaaaaacaaggatgtaatcgctggcgttgtggttattcaggacagaaaaagtgatgcctttgcctctgacatcaaagagctaacagaaaaatcactaacactgaaagaagctcttgagtccgaccattttggattaatggctaaatcacgattaaaacgagtcttcaatgacatttacaaacaattagatagcatctatgacgatgaacacggtgaataa

SEQ ID NO: 476920 - DNA, 732 bp, Shigella flexneri
atgacgatgaacacggtgaataatatgagtacagttaatcagccagaattaaaacagcctgaaaaggctgtttccagtgaagatattgataattttattgttgatgtattcaaggagacagggcataaaatatcaaaagatgatccagttatttcattaatttttctgaaccaaaagatacaggaaaaattcagcaatgagttacaagctaacttcacagccctgtctgagggcttcagacaggtcgtttcatctgtagaaaatgactatattcaaagattcaagaatattgttgagacgtgcggcgatctggataatgaaataaaagaaaaagtagaagagggaaaaaacgatctaaaagaaacaagtgttgaggtaaaagaaaaattaacagatgatattattgaactcatatctggaattaaacgcaaccaggaaaaaaacaacaaattatatgaagaaaagttgaattcattatctaaggctgtaaagcccttcagtacaagaacagccattgcaatttgtgctctgtgcacattatgcctgtctgcggcattttctggcgcaacctggtatgttgcacaacatgaaaaggaggcaagtctgcgcttctatgcaagagcatttcttgatatgaaaaaaataactgaagagagcatgagaaaattaccaaaatcagaccagcaaaatataaaactcaaactagaagaaattgattcaagaaaaccataa

SEQ ID NO: 476921 - DNA, 594 bp, Shigella flexneri
atgaccacttttaccaacgacgacaaggaactaattaaagaaatccgagagcgaatcggcagcctggacgtgagagacaatattgaattttgcggcgaagcttcgcaaaggaggcaaccagtgagcaagattgactatcaggcactgcgagaggcggcagaggtcgcgaaggagaagacgacgtggcagaacctacaggcttttcatgctgcggctacgccggaggttgtactggcattgcttgatgtattggacgcatcgctggaagcagatccagttatgttctgtatatcaggacaaaatgtagattcagaagaacatgtatcaaccagcaaagcggttgttgatgcctgggttgaagaatggaatcaggttgacagaactcctggcgagccactgtacaaaactgtgccactctaccatcaccccgccttgccagcgtcggtagtgcctgaaggactggttaaagcggtgcgtttttatgagcaggtaaaaaatgagaatccgccagttgggactggtgcgtggaaagacgctgttgactgggtactcgaagaggcttgtcaggctgtaaatacatgcatcaaaggatga

SEQ ID NO: 476922 - DNA, 204 bp, Shigella flexneri; identical to SEQ ID NO: 469799

SEQ ID NO: 476923 - DNA, 516 bp, Shigella flexneri; identical to SEQ ID NO: 15395

SEQ ID NO: 476924 - DNA, 321 bp, Shigella flexneri; identical to SEQ ID NO: 469801

SEQ ID NO: 476925 - DNA, 438 bp, Shigella flexneri
atgttcttttctgttggtgtcgaaacaccgaaagatgatcatacagcatacggtatcaccgttccggtttttgattgctttgattttggatgtgtttctgctgctgattctcaggcagaaatacccgcaatggcgcgtgaagcgatattggcaatcgtggaagagatggtaataagcggtgctcattctgttgatgatattcatgatgaagggtgtttgacttattccgccaacccaaattataaccactgtgatagctggtttgtaattgatgttgatttgtcagaaattgagggcaaacaacaacgtattaatatttcattgcctgatgtcttgattcgtcgtattgatggatatgtgagagaaagtggtggcgtatacaaagatcgtagccattttctggctcaggcggcacgtcatgaacttgcatataaataa

SEQ ID NO: 476926 - DNA, 183 bp, Shigella flexneri; identical to SEQ ID NO: 22625

SEQ ID NO: 476927 - DNA, 444 bp, Shigella flexneri
atggctcaaccaaccccagaaaagatactggcaatcatagatgatcatgatcgcgcacaaaaaaaacaacgcaacaaaaacctcttaatttatttatgtctctgcttagcaattattggagtggtcgcgtattcctttatatcaaaatttcgtcttgatggtgtagccgtccttacagtgcttttgggcgtgtccgcaatcgcattttttctacattatgtggaatcagggaaaggccagattcttagtagtgaccgcatattgtccatactcgataaaaccaaagattaccctgcaattcgacgtaaagttgttaatcgcttgctctccggttcaaaactcacgggtaaagatgaagagtacatattcagtgaattgaaaaaggctgaacaaagcaacgaacgtgaaaagagattgcaagcaattaaagagtatacatcgtaa

SEQ ID NO: 476928 - DNA, 243 bp, Shigella flexneri
atgactattgaaaatacaccggaaaacataaagaaattacgtaaaaaaattggccttacccagacagagtgcggtgagatttttggcgtaggcttaagtacatggcagaaaaaagaagctaaaacccacaaccagcttaatttatcgaaaggtgaatttgagtacctgttattacttgcaggggagcaccctgaatacgtcctgcataaaaaagctgaatcccgctcaccggaggaaccgtga

SEQ ID NO: 476929 - DNA, 255 bp, Shigella flexneri; identical to SEQ ID NO: 21654

SEQ ID NO: 476930 - DNA, 330 bp, Shigella flexneri; identical to SEQ ID NO: 25578

SEQ ID NO: 476931 - DNA, 666 bp, Shigella flexneri
atggggagagcattacttgtcgcatcagataaaggcggtgtaggaaaaagcaccacagcaacaaacctggcttcttatctggtaaataattcacgaacggtcatcattctgaagaccgataaaaacaatgatattcttagctggaacgaaaaaagaaagcaaaatggcttattaccggttcctgtttatgaagagtatggcgatgtatcagaagtcattaagcgcctgaaaaaaatatgtgaagtgctgatcattgactgtccagggcatgacagcaaggaatttcgcagcgccttaactgtagctgacactctgcttactctcgttaagccgtcttcagatttcgaagcagaaacgctgactcatgtaacagaaaaagttcgcacagctcaacagatcaatccagacctgcaaccctgggtacttttcacgagaattaacacgacaaaaccacgccacagaaaagcagcgattgatctcgacaagttactccgggagaacccggtgtggatacagccacttcgtacacgtatttcagatttagatatttttgaagcggcctgtaatgaaggcgctggcgttcatgatgtacgtcgcgcatccagcctttctacagctaaagcacaaatagagcttttggcgcaagagttaggcatcaatccctaa

SEQ ID NO: 476932 - DNA, 285 bp, Shigella flexneri; identical to SEQ ID NO: 403805

SEQ ID NO: 476933 - DNA, 573 bp, Shigella flexneri
atgcagccaaaaaaaacacccgtgattgtggtcaaaaaacgccgcgttctggtcatgccagaaaatcctgtggtgaatgaaaagccgcaggaagtacaaaaatcagcagttaatgaaaacaagaaagtacagaagaaagatgctgtagcagagaaaacacgtaaaaagcagcctcagccctggtatttgaaaaaacaaatcacttttcccccaaaatatccgaaagaatattttgaaaagtgtttcaataaagttcgtgctgtttttcctgaactatggacagacgaaaaaaagaacttgcccctgaaaagcgggattctccaggatgttgagaaatacctggcggataacccggatgtggatctgacgattgaagagtggaattgtgcggttcaggtgatgacgttccggtggcaatatcttcagaattgtactgtaccaggcgcaacacgttacgacctttacgggaaacctgctggtacagtaaaaaaagcacacgcaacttatgcgcaactggttctcgatgcccgtaagaaagccagcgagaagaaacaattaaaacgtaagggataa

SEQ ID NO: 476934 - DNA, 216 bp, Shigella flexneri; identical to SEQ ID NO: 469806

SEQ ID NO: 476935 - DNA, 162 bp, Shigella flexneri; identical to SEQ ID NO: 22640

SEQ ID NO: 476936 - DNA, 1029 bp, Shigella flexneri
gtgcagcttgctgtgattagcaaacgtcactggtctgaactatcaccggaagagcaggtccgtttctggcaggactacgaagcgggtattgaaagctcattcctggtcctccaggaaaacaaaggcggaacaacaaaacgtcgccggggtgaacattccactaagccaaagtgtgagaatccagcctggttccgtcccgacaactataaggcgctgggcggacagttgggccacgcttacaatcgtctcgttaaaaaagacccggtcactggtcagaacacactcagaatgcacatgtcgttgcatccattttatgtactgaaacgtcagagtgtcggtcgcaaatataaattccgaccggaaaaacagcggctgcttgacgcaatatgggttgtacttgtgagtttttgtgatcgtggattgcacactgtcggcatgtctgtctcccgcctggcagaagaaataagcccaaaagacagtaagggagacgtgattcctgaaaccgcagtcacagtatcgcgcctttcccgtctgctggcagagcaggtttcctttggcacgttgggaacgtcagaaaagacgatatgggatcgtgaatcccgccagcgactgccgaaatacgtctggatcaccgaaactggctggaaaatgctgggagttgatctggtgaaacttcaggaacagcaacgtaagcgccttgcagaaagtgaaatccgtctgcaattgattaaagaaagcgttatccgcgagggcgaagaaatctctgttcactcggctcgtaaacgctggtatgcgcagcgttctctcgatgccatcaagtcccgacgtaagaaagcagcggagcgcaaacgtgctaatcgcctggcaaaactgccgtatgatgaacagcgaaacgaaattgcgcggtttattctgaagcgtatgccgccggacgaagcgtactggtgcactaaagaaagattagagcaactggtagccagagatctacgtcagcttgaactggctctgacagcttcgccaccccactag

SEQ ID NO: 476937 - DNA, 333 bp, Shigella flexneri
atgtcagcccccgctaatctgcgctccctggaaaagacgagattacgggggttttctttatctgaaatttacgttctcgaacaaaatttcagcacctcgttttctgcatttacaaatcgcggaaaacttgcctgcaaatttagcagcatgggcgcaatcgatcaacgatgttcaagcctggctcgtttcctttttgattcagcacacatctctgacagcttcaaaatcgttttcagaacagctagtgaagccccttctttactgacgttccccatacaaaaccttacaaaatcagaaattcagaattttgtatattcaaaaaagtttttttga

SEQ ID NO: 476938 - DNA, 453 bp, Shigella flexneri
atggcgcgtaagttaaaaattaatcctgtcattcctgaatgtgtggcagatttgaaaggatatccactctatatcatcgttgcttattggggattaagaaataataaaacgctcacaacaacggatgttagccgtaatttccttattacacagcaacaatcttatgatgtgcttacctacatttaccaggaagcacagaagcagataacagcaactaaacgaacactatttaacgagcacaaaagaagaattagtgcgttcaggattcttgatattgacaaaggcatattgcgcaccccaaaaaaagagattgcatatgccagctacgacaatataccaactgtcacaatgaaaagtacccgttgtgagatccaggatagttttacagaactgcgccgctggatgtgttcaagaaagacaggtgatcgagtggaggtatttttgaatgcctaa

SEQ ID NO: 476939 - DNA, 216 bp, Shigella flexneri; identical to SEQ ID NO: 403811

SEQ ID NO: 476940 - DNA, 177 bp, Shigella flexneri; identical to SEQ ID NO: 403812

SEQ ID NO: 476941 - DNA, 978 bp, Shigella flexneri
atgattgacgctataattacgccaatagttacatctattccgttactcttattaattttagtcgcgctgatattcgttaaatctgccgtcaaaatcgtgccgcaaggtaatgcctggacagtggaacgctttggtaaatatacccatacgctttcccccggtcttcacttcctgatcccgtttatggaccgcataggtcaacggatcaacatgatggaaaccgtcctggatattcctaaacaggaagttatttcgaaagacaatgcaaacgtaactatcgatgctgtttgttttatccaggtcattgatgcagcgaaggcagcttatgaagtcgataatcttgcatcagctatttcaaatcttgtcatgaccaatatccgaactgtcgttggtggaatgaatctcgacgatatgctttctcaacgtgacagcatcaattctaagctgttaacggttgtcgattatgcaactgatccgtggggaattaaggtcacacgtattgaaattcgggatgttaaaccaccagaagaactgactaaggcgatgaacgcgcaaatgaaagcggaacgtactaagcgtgcccagattctggaagctgaaggtatacgccagtcacaaattctgaaggcggaaggagaaaaacagtctcaaatactgaaagcggaaggggaacggcaatcagcgtttcttcagtctgaagcacgcgaacgtcaggcagaagcggaagctcgcgcaacaaaactggtgtcggatgcaatcgctgaaggtgacgttcagtctgttaattactttattgcgcaaaaatacactgaagcactccaggcaattggcacagcatcaaacagtaaactggtgatgatgccgcttgattcaagtagcctggtgagttcggttgcaggtatcagtgaactgctaaaaaacgtatcacaggatactcccaaagttgatatgaaacaggctcaacaatatttgtcttaa

SEQ ID NO: 476942 - DNA, 300 bp, Shigella flexneri
atgaaaacttatgggttcatccttcttattttacatataatccctatgggggcatggagctttcttctttttattacaaaagatgagaacaaaggagaaaaaatactaaaccacatcgcatcaatatttccattatggctgaacttcggaggggtgatgatagcgatggctctgctgcccctgttaatatggagttttaatggcatattctttggcttctttctgctaatttatgcatttggcgtttataactaccttcatcttctttattcaatttctcccttttatcatggagattag

SEQ ID NO: 476943 - DNA, 444 bp, Shigella flexneri
atgttatggtttacactgtttcttctgtgtattgcacttgaaattataaccggaacaggatggttactcttaatcagtcttggtgcattatcaagcgccattgtgggcttttttcttccgatatcacaagaagccaatatatgcttctttgcatcaatcagcatactggcgtcgataattaagttcctctatgacaaaaaacataagaaattagatactctcctggtgaacacagggcattcacgttttaaaggaaaagaatttactctcagtgacgatattgtgaacggcaaggggcaattacttattggtgatacattctggcctgttgagacgttacacaatgaaaactaccctgcgggaacaagagttattgttacagacatgcaaggaataactcttaaagtaatgaccatcgaagacaagagtgaaaacaaggaataa

SEQ ID NO: 476944 - DNA, 171 bp, Shigella flexneri; identical to SEQ ID NO: 22646

SEQ ID NO: 476945 - DNA, 696 bp, Shigella flexneri
atgcgaaacgcaaatgaaggaatttctcttgcagctattgtagctaaagaaacaacaacaggtaaatggaatggtactggtgggggtattggtttaggtactggtggtattggcttattcatcggaggtgtttctggttctaaacaagagcagacacaaagggcaaaaaactttgaatcgcctaaagaggaagaatacagtctattaaatgtatacggttcgataataaaagttctcgtttttggcgtgctatttggtttatctgcccgtttatttacatttttatcagacactgtttctgattttgctgaaccagtaacaaccaccacagccacaggaaagattcaatctattctggatggcatggcagaaatggtaagcattttaggcaccgttgtcccttttttagtaattattttaggcaccgttatcccttttttagtaattatcatagcaatgatctggtttctgtttttcagcagcaaacgagaaaaagaagagttaactcgagttgaacgtgaagctgctaaaacaaaactccgtatagatgtctatcaccgtttacgttacgttgaaagcgatcatgtcgtttttgacccgattacaggccgggaggttccggcagaacgggcgtgtattaataaacttattgaggcacttgttgatgaaagcaacgacatctcaaaaagaaattga

SEQ ID NO: 476946 - DNA, 216 bp, Shigella flexneri
atgagtgcttttattaagctggcatctgttctggcgttatttattagcccggttgtggttgcaatagcaggagaacaatctcactgtacaaaaatcaacgaataccctttcatcgtcactcaatgcgacgacggaactgtgacagtggtgaatgtgataaataaccgtgtatctgtgtgccgtaaaggggaatcatgcaaagaaataaaattataa

SEQ ID NO: 476947 - DNA, 303 bp, Shigella flexneri
atgactcaagcaaaagctaatctgagaaaacttcgccgtgcacgttatgtcccccctcgaacagtaaagaaaagcatagcgaatacagaacgtgtcgtttcaaaagcaattaccggctgtggtgtcttccgtgatataccacaagtaaaaatcaatctcatcgaaacaaggaaaattttacaaatcgaactggctttatccattgctaacttatctgaggcgaatccaattgagatacgaaaaaaaatcaaaagcattgaccgacaattatcttcaacctcaaaaatcagaactacattatga

SEQ ID NO: 476948 - DNA, 258 bp, Shigella flexneri
atgaaaaaaaacgacgatttaatcactttaccatctcataacagccacgctctcgattacatcattaaaaaagcgtttacaccacgtaaaaccaaaacatctacagcgacccacaacgtttatagttacaataaagaagaatccacattaaatttccaaaaaattggagaagcaatttttttcggtgcagacctggtaattaagctgaagccaaatattagtgcctctggtgaactcttcatctgccagaaggactaa

SEQ ID NO: 476949 - DNA, 996 bp, Shigella flexneri
atgaatgttgtttcattatttcttgagaaagtaacaaccgctgttgaatccacggcggcgacgaacgccgctaaggttgcacaggcaatatctcctgtattctttgccgccatagccttatacgtcatttatctaatatatgaaatcacgtattcccagcgtgacgtcatcatgagcgaggtcacaaaaaacatcggtgcattcgccctggttggtgcattcacttattcagcaccttattacagtgagtttgtgattccgtttgtcatgcacgcaggctccgacctttctgctgctgtaacgggtaattcaagctctgcaaccagtgttgataatttgtggaatatgctttcagtaacgttaaatgattttaagaataatgagttagatactctggagtggtatagcttcacagatcaactatacatatatctaatttggggggttggatatgttggcgggctgctgcttatttattacaccactgtatttctaactctatcaacattcatggttggcattctcttatccgccggaatattatttatctgtttttctctatttgcttcgacaagaaatatgtttagcgcatgggtaggtagctgtttaaattatatattgctaaatcttttttatagtatatcgttcagcttcgtcatcagctttgtagagcaaacagtcccatcaagcggaaatataactctcacaacagtagtttatttctttatggtgactgttatatctatattccttgttgagcaagtaggtactctctgctcaactcttactggcggggtaggtataaatggccttacatcagccgctaatggctttggaggtaaggttgcatccggttttatgcgagcatcaggactccgatctttcactaatggttttgccagcaaaatgccaaatccattctttaatgcaggaagtcgttctgcatcagcattagttcagggattaaaccgtggaagtaaacttaaagcggggtga

SEQ ID NO: 476950 - DNA, 642 bp, Shigella flexneri
atgaaagataaagtattatcatttctctttgctggaataattaccataacatcaccatcaatctttgcatctggtattccagtagtagacgttgcagcaatagctaaaacagttgaagaagggctaaatcgtgctgctgaagcggcaagacagcttgagcaactcaagcaacaatatgaacagaccataagatacgctgaagaacagaagaaaagactcgaaggcttcactgatttcagcaatggctttgatagcgcatccagctatatgaaggattctctatcaacaataacaaatagtgcaaaatcagatcttagctctttgcgatcgcaatatgacttatcaagcaacgttgcagagacgcaacaaaaatatgatgcgatcctggctaagatcaaattctatgaaaatttcaacaatgaaatgcaggaaagggctaagagattaaccacgttacagaaggagttcgcgtcagcagatactccgcaaaaaaaagctgacttatctaaccaattgaatacagaaaaattgacaatggagctacaattgaagcaatatgatattgctgaacggcaactagagaatgagcggaaagctcaatatgaaacatatgttcgccaaaagagaagagatttaagctga

SEQ ID NO: 476951 - DNA, 255 bp, Shigella flexneri; identical to SEQ ID NO: 25980

SEQ ID NO: 476952 - DNA, 792 bp, Shigella flexneri; identical to SEQ ID NO: 469822

SEQ ID NO: 476953 - DNA, 636 bp, Shigella flexneri
atgaaatccatcattttatcgatggttgccgccaccgcattactgtcaggctgcgcggatagcaaaacacaaccagtacctgagtcaccgttaacctcaaatgaccaccagataacgttgaaaattgataccgtgcgaacagacctgccggacagttctcctgtttgtttgaatggtatgaatatatacgaaagtctgagcgagcggcatccaggcttgtttgccaaaaatcagaacgtgattttccgtagtgcattctttgatgacggtcaggcgatatcctccgaaacaatccgcaaaataatgcagagtaccccgtgcgttgaatcacaaacaacatctgccggaagctgggaacctgccacggaactgatcccccgtcaggcaatatccggtgacactacactggctgaaaaagatcggactgctggcttcacaatgcggatagcaccggagattgagcgtggaaatttccacctgctactcacaaccactgacccgatacggaaactgactgtcaagcagaatattttactcaaaccggaccagccccttatcgtgagtggttttactggagttaatgctgatagccaaagtgagaaccggattgtcatcattacgccacacgtgcgttga

SEQ ID NO: 476954 - DNA, 252 bp, Shigella flexneri
atgagctaccaaattctgactacgacagcagccagtattactgacctgaaaaaaaatcctatgggaactgtagccgaaggagaaggggatgccgtcgcaatcctgaaccgaaatgaaccagcgttctactgtgtcccaccagaactttatgcctactaccgggaactcgctgaagacgctgaactcaacgcaattgctgatgaaagaatgaaaaatccagacattgtaagggttaacctggatgatttatga

SEQ ID NO: 476955 - DNA, 282 bp, Shigella flexneri; identical to SEQ ID NO: 38201

SEQ ID NO: 476956 - DNA, 834 bp, Shigella flexneri
atggtctgccagatggaactgaccagccatctgctgacggctgcagccttcggcacgatgaagaacagcgaaaatgagcttgctgagcaacttataggacaaaccggcgataacactctgacgttaatggataaaggttattactcactgggactgttaaatggctggagcctggcgggagaacaccgccactggatgatacctctcagaaagggagcgcaatatgaagagctcagaaaactgagtaaaggcgatcatctggtgaagctgaaaaccagcccgcaggcacgaaaaaagtggccgggactgggaaatgaagtgacagcccgcctgctgaccgtgacgcgcaaaggaaaagtctgccatctgctgacgtcgatgacggacgccatgcgcttccccggaggagaaatggcggatctgtacagtaatcgctgggaaatcgaactgggatacagggagataaaacagacgatgcaactgagcaggctgacgctgagaagtaaaaagccggagcttgtggagcaagagctgtggggtgtcttactggcttataatctggtgagatatcagatgattaaaatggcggaacatctgaaaggttactggccgaatcaactgagtttctcagaatcatgcggaatggtgatgagaatgctgatgacattgcagggcgcttcaccgggacgtataccggagctgatgcgcgatcttgcaagtatgggacaacttgtgaaattaccgacgagaagggaaagggccttcccgagagtggtaaaggagaggccctggaaataccccacagctccgaaaaagagccagtcagttgcttaa

SEQ ID NO: 476957 - DNA, 834 bp, Shigella flexneri; identical to SEQ ID NO: 476088

SEQ ID NO: 476958 - DNA, 237 bp, Shigella flexneri
atgatctacaaaagcattgcggagcggttaagaattcgacttaattccgcggatttcacgctaaacagccttcttcccggtgaaaaaaagctggcggaagagtttgcggtatcgcggatgactatccgtaaagccattgacctgctggtagcgtgggggctggtggtccgccgccacggcagcggcacttacctggtgcgcaaagatgtgctgcatcaaaccgccagcctgacctga

SEQ ID NO: 476959 - DNA, 1617 bp, Shigella flexneri; identical to SEQ ID NO: 471384

SEQ ID NO: 476960 - DNA, 1716 bp, Shigella flexneri
atgaattcgttacaaatcttgagttttgtcggttttacgctgctggtggcggtgatcacctggtggaaggttcgcaaaacagataccggatcgcaacaaggctattttcttgccggacgttcactaaaagcgccggttattgccgcttcgttaatgttaaccaacctttccacggaacaactggttggtctttccgggcaggcctacaaaagcggcatgtcggtgatgggctgggaagtgacttcagcggtgacgctgatcttcctcgcgctaatctttttaccgcgctatctgaagcgcggcattgccaccatccccgattttctggaggaacgttatgataaaacgacgcgtattatcatcgacttctgcttcctcattgccaccggcgtctgctttctgccgattgttctctactccggcgcgttggcgctcaacagcctgtttcacgtcggggaatcgctacagatttctcacggtgcggctatctggctactggtaattttgcttggtctggcgggaattttgtatgcggtgatcggcggactgcgcgcaatggcagtggcggactccatcaacggtattgggctggttatcggcgggttgatggtgccggtatttggcctgatcgcgataggcaagggcagctttatgcagggcattgagcaaattaccaccgttcacgccgagaaattaaactcagtcggtggcccgaccgatcccttgccgattggcgcggcatttaccggtttaattctggtgaacaccttttactggtgtacaaatcagggcatcgtgcaacgcacgctggcgtcaaaaagcctggcggaagggcaaaagggggcgctgttaacggcggtgctgaaaatgctcgacccgctggtactggtgctgccagggttgattgcgtttcatctgtatcaggatctaccgaaagccgacatggcctacccgacgctggtcaataacgttctgccagtgccactggagggtttcttcggcgcggtgttatttggtgcggtgatcagtaccttcaacggctttctgaatagcgccagtacattattcagtatgggtatttaccgtcgcatcattaaccagaatgccgagccgcagcagctggtcaccgtcgggcgcaaatttggtttctttatcgctatcgtttcggttttggtagcgccgtggatcgcgaacgcgccgcaggggctgtatagctggatgaaacagctcaacggcatttacaacgtgccgctggttaccatcatcattatgggctttttctttccgcgcatcccggcgctggcggcaaaagtggcgatggggattggcataatcagctacatcaccatcaactatctggtgaagttcgacttccatttcctctatgtgctggcctgtacgttctgcatcaacgtggtcgtgatgctggtgatcggttttatcaaaccgcgcgccacgccgttcaccttcaaagatgcgtttgcggtggacatgaaaccgtggaaaaacgtcaagatcgcgtcaattggtatcctgttcgcgatgattggcgtctatgtcgggctggctgaattcggcggctacggtacgcgctggttagcgatgatcagttatttcatcgctgccgtagtgattgtctacctgatttttgacagctggtggcatcgtcacgacccagccgtaacctttactcccgacgcgaaggatagcctatga

SEQ ID NO: 476961 - DNA, 3387 bp, Shigella flexneri
atggaagaggcattctgggcggcaagacagggtgatgccctgctgcatacgtcgtttatggcagatgtgctgggggcggtgctggaggtggccgcaaatgtcgttattgatgccctcattgtcggcacaacctcgttactggcgacgtcagtggggatcacgatggggtgcacggccgtcgtgctgaccggttttgtggcgggtgtggcgatggtgtacaccggcgtgacagaaaaggtcagcgaagcctgttcagccctcgcaaatatgcttttcccgcctcagattgaaggttacatcctcaccggctctggtgacacatggatcaacagcaaacctgccgcgcgggcagcggcgactgcggcatcgcggcaggacatagaggcgcaggaagcgcaggcgaaggcagaacaggaagaagcgcagcgtcaggaggatgccagaacgttccgggatgtggccggggaatatctggaaatggcgggggccatagccctggcggttaacccggtgacagggcctgtgctgatgtcccgggctctgcacgaccagctcagtacggaagaagggcgttctgaaatggtggatggcgtgacacattttgtgtcggaactatggcagcccactgtggccagtgcggccccgggatccaccccgacccctgacgataaaatcgactgccataaacatccttcctcactgacgcagtttctcgcacaaaaaaaagccgcctttctggatgaccccctgggaacggcccttaacctgctgaatccgggcggtatgctggaaaccgcctttcagggagtgaatgcggttattggcagcatcagtaatctgttcaaaggcgatgacgagccgcccgcagcggaatatatcgcggaaggcgcgcgggatgtgcgtatcaacagccagccggcgacacgcagcggggcacgctgtacctgcgaggccagggtggtgaatgagccggggaacggggcgtttgtgtcaccggatgtgcgcattggcggtccgttactggtggtcagggatatcagaagcggcaggtcgcagataaccctggtggcaaccgtggcgctgatgtttcttcgcccgggcaaaatgctttctaaaatcgcctgttttgctgccagtgtcgggatgagcatgctgacgcagaaggccaccagtgcccttccgcatccggtcaatgccgccaccggggccaaatacctggccgatgacgatgacttcgatttcagtctgccgggccactttccgctggactggcagcgcgtgtacagcagtcgtgacgaacgtacggaaggaatgtttggtcagggctggagtgtaatgtatgaagtcagcctcgtgtgcacaccgggtagcgcagacgaaaactgcatgacctttgtgtcgggcatggggcgacgcttggatatggaagccgtactgccggggggcgggttttacagccccggtgaagggctggcggtaaggcgtggtgagcaggggcactggcttatcagcagcgatgacgggcagtgttttctgtttgaggctgacccgcaccacccgcagcgccagcggctgaaaatgctgggcgaccgtaacagcaactgtctgaatctgtactacgacgaccggggccgcattgtggaaatcagcggcgaacagcagcgtccgtgcatccgtctgtattacgaactggcggcgcatccccggcgggtgacacagatttatcagcatttccctgagactgcacctttactgctgcgtcgttacagctatgacgaggccggccacctgaacggcgtgtacgacagcacggggcacctgctgcgtgagtttgcttacgacgaaaaccactgcatgacgctgcaccgccagccgggcggcgaagggtattattaccagtggggctggtatgaaggtccggatgacgcggcatggcgggtgacggggcaccacacggacagcggtgaacagtaccggctggcgtgggacctggcgcagcgcaggctgtgcgtgacggacggactggggcgcacacgttatcaccagtgggatgcgcagaatcaggtgacggcgtaccaggacgaagccggacaggtgacgaccttccgctggagcgacgaagaacgactgttgctggggatgaccgaccctcagggcggcaaatggcgctatgtgtatgacctgcaggggcatatcacggagacgcacgacccgctggggcgggtggagcaggcgcagtggcacccggtgtggcaccagccggaaacggaggtggacgcggcgggaaacctgctggggaggcgcgcgggggaaagggccacggcagaaaacagcgtggtgccgttcaaccggctgatgtcttaccgtggtgtgcactaccgttatgacgaatttggccgtgcggtggaaaaggagggccggagcggaacgcagagttaccgttatgatgcggaacaccggatggtggaagtgacgacagcgcgggggacataccggtatgtgtacgatgcactggggaggcggacggaaaaacagcacatcagccctgacggtaagccgtacaaccggacaaaatttttatgggacggaatgcggctggcgcaggagagcaggccggagggaacaggcagcctgtacatctacagggaccaggggagttatgaaccgctggcgcgggtggataaggcgggcaaagagggcccgaaccggatactgtattttcacacggatgtgaacggcgcgccggaagagatgacggacagcgacgggaaaatcgtgtgggagacggggtatcaggtctggggtaacacgatacaggagaaggaccacggcggggtggagcagaacctgcgctaccagggacagtacctcgacagggaaacggggctgcactacaatctgcacaggtactatgatccggatgtcgggcggttcatggtaactgacccgatagggttgagaggcggtttaaatctctacagttatgcacctaatcctctaaaatatgctgatccacttggattaactccatgtgctgttagtaaccaaaaagcgaatcgtttattagatagtagtgaaaccaaagttactgttaggtctagaagtgacgctgaacaattgtttatggatagatatttaggtcataattataaaaatatgacaggtgagtcaggccccagcactaagaacttaatggaatatcttactgaaaataaaacaaaagcaggttcatatcattgggatgatataaaagatccttctgtaacaaaaccttcatatagagtgtcaggtcatggaccaggaaatcctgatggtgatttaccacatttacaagttcatcaacatggtggaagtgttagacatatatttttcccgtgggagacataa

SEQ ID NO: 476962 - DNA, 834 bp, Shigella flexneri; identical to SEQ ID NO: 476228

SEQ ID NO: 476963 - DNA, 2190 bp, Shigella flexneri
atgctttacaaaggcgacaccctgtaccttgactggctggaagatggcattgccgaactggtatttgatgccccaggttcagttaataaactcgacactgcgaccgtcgccagcctcggcgaggccatcggcgtgctggaacagcaatcagatctaaaagggctgctgctgcgttcgaacaaagcagcctttatcgtcggtgctgatatcaccgaatttttgtccctgttcctcgttcctgaagaacagttaagtcagtggctgcactttgccaatagcgtgtttaatcgcctggaagatctgccggtgccgaccattgctgccgtcaacggctatgcgctgggtggtggctgcgaatgcgtgctggcgaccgattatcgtctggcgacgccggatctgcgcatcggtctgccggaaaccaaactgggcatcatgccgggctttggcggttctgtacgtatgccacgtatgctgggcgctgacagtgcactggaaatcattgccgccggtaaagatgtcggcgcggatcaggcgctgaaaatcggtctggtggatggcgtagtcaaagcagaaaaactgattgaaggggcgatggcgattttacgccaggccattaacggcgacctcgactggaaagcgaaacgtcagccgaagcaggaaccgctaaaactgagcaagattgaagccaccatgagcttcaccatcgctaaaggaatggtcgcgcaaacggcggggaaacattatccggcccccatcaccgcagtaaaaaccattgaagctgcggcccgttttggtcgtgaagaagccttaaatctggaaaacaaaagttttgtcccgctggcgcataccaacgaagctcgcgcactggtcggcattttccttaacgatcaatatgtaaaaggcaaagcgaagaaactcaccaaagacgttgaaaccccgaaacaggctgctgtgctgggcgcaggcatcatgggtggcggtatcgcttaccagtccgcgtggaaaggcgtgccggttgtcatgaaagatatcaacgacaagtcgttaaccctcggcatgaccgaagccgcgaaactgctgaacaagcagcttgagcgcggcaaaatcgatggtctgaaactggctggcgtgatctccacgatccacccaacgctcgactacgccggatttgaccgcgtggatattgtggtagaagcggttgttgaaaacccgaaagtgaaaaaagccgtactggcagaaaccgaacaaaaagtacgccaggataccgtgctggcgtctaacacttcaaccattcctatcagcgaactggccaacgcgctggaacgcccggaaaacttctgcgggatgcacttctttaacccggtccaccgaatgccgttggtagaaattattcgcggcgagaaaagctccgacgaaaccatcgcgaaagttgtcgcctgggcgagcaagatgggcaagacgccgattgtggttaacgactgccccggcttctttgttaaccgcgtgctgttcccgtatttcgccggtttcagccagctgctgcgcgacggcgcggatttccgcaagatcgacaaagtgatggaaaaacagtttggctggccgatgggcccggcatatctgctggacgttgtgggcattgataccgcgcatcacgctcaggctgtcatggcagcaggcttcccgcagcggatgcagaaagattaccgcgatgccatcgacgcgctgtttgatgccaaccgctttggtcagaagaacggcctcggtttctggcgttataaagaagacagcaaaggtaagccgaagaaagaagaagacgccgccgttgaagacctgctggcagaagtgagccaaccgaagcgcgatttcagcgaagaagagattatcgcccgcatgatgatcccgatggtcaacgaagtggtgcgctgtctggaagagggcattatcgccactccggcggaagcggatatggcgctggtctacggcctgggcttccctccgttccacggcggcgcgttccgctggctggacaccctcggtagcgcaaaatacctcgatatggcacagcaatatcagcacctcggcccgctgtatgaagtgccggaaggtctgcgtaataaagcgcgtcataacgaaccgtactatcctccggttgagccagcccgtccggttggcgacctgaaaacggcttaa

SEQ ID NO: 476964 - DNA, 921 bp, Shigella flexneri
atgctttattacgttatcaaacgattactggggttgattccgacgctgtttatcgtctcggtgctggtgtttttatttgtccacatgctgcccggcgatccggcgcgattgattgccgggcccgaagctgatgcgcaggttatagaactggtgcgtcagcagctggggttggatcagccgctgtatcaccagttctggcactatatcagcaatgctgtgcagggggattttggcctgtcgatggtgtcgcgtcgtccggttgccgatgagattgccagccgctttatgccaacgctatggctgaccataaccagtatggtctgggcggtgatatttggtatggcggcgggaattatcgccgccgtctggcgtaatcgttggccggatcgattgagtatgaccattgcggtgtcggggatctcgtttccggcatttgcgctggggatgtttttaattcaggtattctccgttgaactgggctggctgcctactgtgggagcagacagttggcagcactacattttaccctccctgacgctcggcgcggcagtggccgccgtgatggcgcgctttacccgtgcgtcatttgtcgacgttttaagcgaagattatatgcgtaccgcgagggcgaaaggggtgagcgaaacctgggttgtcctcaaacacgggctacgcaacgcgatgatcccggtagtgaccatgatgggcttacagtttggctttttgctcggtggttctatcgtggtggagaaagttttcaactggcccggacttggacgcttactcgttgactctgtagaaatgcgcgattacccggtgattcaggcggaaattctgcttttctcgctggaatttattcttatcaacttagtggtggatgtgctttacgccgccattaacccggctatcaggtacaagtaa

SEQ ID NO: 476965 - DNA, 747 bp, Shigella flexneri
atgagccaaattcacaaacacaccattcctgccaacatcgcagaccgttgcctgataaaccctcagcagtacgaggcgatgtatcaacaatctattaacgtacctgataccttctggggcgaacagggaaaaattctcgactggatcaaaccgtaccagaaggtgaaaaatacctcctttgcccccggtaatgtgtccattaaatggtacgaggacggcacgctgaatctggcggcaaactgccttgaccgccatctgcaagaaaacggcgatcgcaccgccatcatctgggaaggcgacgacgccagccagagcaaacatatcagctataaagagctgcaccgcgacgtctgccgcttcgccaataccctgctcgagctgggcattaaaaaaggtgatgtggtggcgatttatatgccgatggtgccggaagccgcggttgcgatgctggcctgcgcccgcattggcgcgatgcattcggtgattttcggcggcttctcgccggaagccgttgccgggcgcattattgattccaactcacgactggtgatcacttccgacgaaggcgtgcgcgccgggcgtagtattccgctgaagaaaaacgttgatgacgcactaaaaaacccgaacgtcaccagcgtagagcatgtggtggtactgaagcgtactggcggaaacatcgactggcaggaagggcgcgacctgtggtggcacgacctggttgagcaagccagcgatcagcactag

SEQ ID NO: 476966 - DNA, 1848 bp, Shigella flexneri
atgtatagaactcatcgacaacacagcctgttaagctctggtggagtgccatcgtttattggtgggctggtggtgtttgtgtcggcagcgttcaatgcacaagctgaaacctggttcgatcctgcttttttcaaagatgatccctcaatggtggccgatttgtctcgtttcgaaaaaggacaaaaaataacgccaggggtttatcgtgtcgatattgttctgaatcagacaattgtagatacgcgcaacgtcaattttgttgagataacgccagagaaggggattgccgcctgtttgacgactgaaagcctggatgcaatgggtgttaatactgatgcgtttccggcttttaaacaactggacaaacaagtgtgtgtgccattggcggagattattccggatgccagcgtaacgtttaatgtgaataaactccgtctggaaatttcagtaccgcaaatcgccatcaaaagtaatgcccgtggttatgtcccccctgaacgttgggatgaagggatcaacgcgctattactgggatattcgtttagcggggctaacagtattcatagcagcgcagacagtgattctggcgacagctattttctgaatttaaacagtggcgttaatttaggcccatggagattacgcaacaattcaacatggagtcgcagtagtggccaaaccgcagaatggaagaatctcagcagctatttgcagcgggcggttattccactaaaaggcgaactgaccgtaggtgatgattatactgcaggcgattttttcgatagtgtcagctttcgtggtgtgcagctggcgtcagatgacaacatgctgccagacagcctgaaagggtttgcgcctgtggtgcgtggtatcgccaaaagcaatgcccagataacgattaagcaaaatggttacaccatttaccaaacttatgtatcgcctggtgcttttgaaattagtgatctctattccacgtcgtcgagcggtgatttgttagttgaaatcaaagaagcggacggcagcgtcaatagctacagcgtaccgttttccagcgtgccattactccagcgtcaggggcgaatcaaatacgcggtgacactggcgaaatacagaaccaatagtaatgaacagcaggagagcaaatttgcccagaccacgttgcagtggggcggaccgtggggaacgacatggtatggtggtggacaatatgctgaatattaccgtgccgccatgtttggtctgggatttaaccttggcgatttcggagcaatttcgttcgatgcgacccaggcgaagagtacgctggcagaccaaagcgaacataaaggtcagtcatatcgttttctgtatgccaaaacgctcaaccaattgggcactaattttcaattgatgggctatcgctattcgacgtcgggtttctacaccctttccgacaccatgtataaacatatggatggctacgaatttaatgacggtgatgatgaagatacgccgatgtggtcgcgttattacaatttgttttacaccaaacgtggcaaactgcaggtcaatatctcccagcaattaggcgagtacggttcgttttatttaagtggtagccagcaaacttactggcataccgatcaacaggatcggctattacagtttggctacaacacgcaaattaaagatctctcgctgggggtttcctggaactacagtaagtcccgtggtcaacctgatgctgatcaggtgtttgcactaaatttttccctgccgctcaatctgttgctccccagaagtaatgatagctataccaggaaaaaaaattacgcctggatgacctctaacaccagtatcgataactaa

SEQ ID NO: 476967 - DNA, 834 bp, Shigella flexneri; identical to SEQ ID NO: 476091

SEQ ID NO: 476968 - DNA, 498 bp, Shigella flexneri
atgacaaatctaaaaaagcgcgagcgagcgaaaaccaatgcatcgttaatctctatggtgcaacgcttttcagatatcaccatcatgtttgccgggctatggctggtttgcgaagtcagcggactgtcattcctctacatgcacctgttggtggcgctgattacgctggtggtgttccagatgctgggcggcatcaccgatttttatcgctcatggcgcggtgttcgggcagcgacagaatttgccctgttgctacaaaactggaccttaagcgtgattttcagcgccggactggtggcgttcaacaatgatttcgacacgcaactgaaaatctggctggcgtggtatgggctgaccagcatcggactggtggtttgccgttcatgtattcgcattggggcgggctggctgcgtaatcatggctacaacaagcggatggtcgccgtagcgggggatttagccgccggacaaatgctgatggagagtttccgtaattag

SEQ ID NO: 476969 - DNA, 588 bp, Shigella flexneri
atgacagtaagtaatatcataagtccggtcatggtgtattttgatcgatttatagtgtcaaatattatgggggcagataaagttgcattttattctgcaccagcggaggttattctaaaattaggaataatacctgcagcaatcgggagggcagtgtttccaaggttaagtaacatcaaagactttaaagaatttaaacgtaatgtaaataaatcattgcttttaatgtttctaatctgtttgccggtgataatcataggcttgttatattcagggcttgtattgaaaatatggtttggtgagaattatcaaattaattcctttaatatattaaatgtgttattgatcggttttttcttcaatgcgctggcaatgataccattctctgcaatccaggcattaggaaaatctaaaattactgctttgattcattgtgctgaattggttccttatttagcccttttgtattttatggtcgaaaaatatgggttactgggtgccgcaatatcctggagcatacgtgtaattttagatgctctgttattacaatggctttatactagaatgtgttctgtatatgaaaactaa

SEQ ID NO: 476970 - DNA, 843 bp, Shigella flexneri
atggtctgccagatggaactgaccagccatctgctgacggctgcagccttcggcacgatgaagaacagcgaaaatgagcttgctgagcaacttatagaacaaaccggcgataacactctgacgttaatggataaaggttattactcactgggactgttaaatggctggagcctggcgggagaacaccgccactggatgatacctctcagaaagggagcgcaatatgaagagctcagaaaactgggtaaaggcgatcatctggtgaagctgaaaaccagcccgcaggcacgaaaaaagtggccgggactgggaaatgaagtgacagcccgcctgctgaccgtgacgcgcaaaggaaaagtctgccatctgctgacgtcgatgacggacgccatgcgcttccccggaggagaaatggcggatctgtacagtaatcgctgggaaatcgaactgggatacagggagataaaacagacgatgcaactgagcaggctgacgctgagaagtaaaaagccggagcttgtggagcaagagctgtggggtgtcttactggcttataatctggtgagatatcagatgattaaaatggcggaacatctgaaaggttactggccgaatcaactgagtttctcagaatcatgcggaatggtgatgagaatgctgatgacattgcagggcgcttcaccgggacgtataccggagctgatgcgcgatcttgcaagtatgggacaacttgtgaaattaccgacgagaaggggaagggccttcccgagagtggtaaaggagaggccctggaaataccccacagccccgaaaaagagtaatgccagtcagttgcttaactga

SEQ ID NO: 476971 - DNA, 2481 bp, Shigella flexneri; identical to SEQ ID NO: 471684

SEQ ID NO: 476972 - DNA, 867 bp, Shigella flexneri
atgaaaatcaccatttccggtactggctatgtaggcttgtcaaacgggcttctaatcgcacaaaatcatgaggttgtggcattagatattttaccgtcacgcgttgctatgctgaatgatcggatatctcctattgttgataaggaaattcagcagtttttgcaatcagataaaatacactttaatgccacattagataaaaatgaagcctaccgggatgctgattatgtcatcatcgccactccaaccgactatgatcctaaaactaattatttcaatacatccagtgtagaatcagtaattaaagacgtagttgagataaatccttatgcggttatggtcatcaaatcaacggttcccgttggttttaccgcagcgatgcataagaaatatcgtactgaaaatattattttctctccggaattcctccgcgaaggtaaagccctttacgataatctccatccgtcacgtattgtcatcggtgagcgttcagaacgcgcagaacgttttgctgcgttgttacaggaaggcgcgattaagcaaaatatcccgaccctgtttaccgactccactgaagcagaagcgattaaacttttcgctaatacctatctggcgatgcgcgtagcatactttaatgaactggatagttatgcagaaagtttaggtctgaatactcgccagattatcgaaggcgtttgtctcgatccgcgtattggcaaccattacaacaatccgtcgtttggttatggtggttattgtctgccgaaagataccaagcagttactggcgaactaccagtctgtgccgaataacctgatctcggcaattgtcgatgcaaaccgcaagtggtgggtatttatcgtctga

SEQ ID NO: 476973 - DNA, 207 bp, Shigella flexneri; identical to SEQ ID NO: 476087

SEQ ID NO: 476974 - DNA, 354 bp, Shigella flexneri
atgccactgctggataagctgcgtgagcagtacgggggcggaccgctatgcagcgaactgcatattgccccgtcaacgtattaccactgtcagcaacagcgacatcatccggataaacgcagtgcccgtgcgcagcgcgatgactggctgaagaaagagatacagcgcgtatacgatgaaaatcacaaggtatacggtgtaaagtctggcgtcagttgttacgggaatgtatcagagtggccagatgcactgtggcacgtctcatggcggttatgggacttgccggtgttctccggggtaaaaaggtccgtacgaccatcagccggaaagccgttgccgcaggcgaccgcgtaa

SEQ ID NO: 476975 - DNA, 1455 bp, Shigella flexneri
atgaccaatattaatacagcttgtgtaaaaaataatgccagttatcaacttaataacgcattacctaacaaagaaaccatctccagcaatttttgtgaacgactagaacaatggggtaataaatcggttaataatggtgaagaaagagcaattgccgtggagcgaattaaagaagcttacaattcgaacatggcatctcttgatttgtcatatcttgatttgagtgaattaccgcctatcccctcgacagttaatacgttaaatctggaaaacaattgtctaacttgtcttgacttagctgacaatgccagtctcgttaatatcaacctcagcgttaataaaattaacacgataacctttccaaaaggttataaactgaaatttcttaatcttgattataacaagctagcatcgctggatgtctcccggcaagaatctctgattgagttaagtgcccatcacaatatgatcactgaccttatattacacaatcatcccaggatgaaaacaatcactttaaacgacaaccatattgcacatttaaacgccaaaaacactacaaaactggaatatttaaacttaagcaataacaatttactgccaaccaatgacattgatcaactaatatcatcaaaacatctttggcatgtattagttaacggcatcaacaatgatccacttgcacaaatgcagtactggactgcagtaagaaatataattgatgacactaatgaagtgaccattgatttatcaggacttaatttaaccactcaaccaccagggctgcaaaacttcacctctatcaatcttgataataaccaactcacacattttgatgcaaccaactacgatagactcgtaaagctaagtctgaatagtaatgctcttgagtcaataaattttcctcaaggcagaaatgtaagtattacacatatatctatgaataataatgctctcagaaatattgatatagataggctttcatcagttacttattttagtgcggcacataatcaactagagtttgtgcaattagaatcttgcgaatggctgcaatacctgaatctcagccataatcaattaactgatattgttgcaggtaataaaaatgaactcttactgctggatctatcccataataaactaacaagtttacacaatgtcttatttcccaacttgaatacgttacttattaacaacaatttgctttctgaaattaaaatattctatagcaacttccgcaatgttcagacattaaacgctgctaacaaccagttgaaatatataaatcttgatttcctgacttatcttccatctatcaaaagtttaagactggacaataataaaataacccacattgatactaataatacatccgatattggaactttattccccataataaaacagagcaaaaacttaaattttttaaatgtttctgggaagaacaattga

SEQ ID NO: 476976 - DNA, 207 bp, Shigella flexneri; identical to SEQ ID NO: 476087

SEQ ID NO: 476977 - DNA, 207 bp, Shigella flexneri; identical to SEQ ID NO: 24440

SEQ ID NO: 476978 - DNA, 789 bp, Shigella flexneri; identical to SEQ ID NO: 476477

SEQ ID NO: 476979 - DNA, 294 bp, Shigella flexneri
gtggcgcacgtcttcggtgaacgcactctggccacactggagcgtcttctgagcctgctgtcggcctttgaggtcgtggtatggatgacggatggctggccgctgtatgaatcacgcctgaagggaaagctgcacgttatcagcaagcgttacactcagcgcattgagcgacataatctgaatctgagacaacatctggcaaggctggtacggaagtcactgtcgttctcaaaatcggtggagctgcatgacaaggtcatcgggcattatctgaacataaaacactatcagtaa

SEQ ID NO: 476980 - DNA, 627 bp, Shigella flexneri
ttgccgtctgcggggattgtgtggcgaagggctgcgccaactctgcgtatccgtgacccgcataaagatgaaaagatggcagcaatccataaagcactggacgaatgcagcgcagagcatccggtcttttatgaagatgaagtggatatccatcttcatcccaaaatcggtgcggactggcaactgcgcggacagcaaaaacgggtggtcacgccgggacagaatgaaaaatattatctggccggagcgctgcacagcgggacaggtaaagtcagctatgtgggcggcaacagcaaaagttcggcgctgttcatcagcctgctgaagcggcttaaagcgacataccgtcgtgcgaaaaccatcacgctgatcgtggacaactacattatccacaaaagccgggaaacacagagctggctgaaggagaacccgaagttcaggggcatttatcagccggtttactcgccatgggtgaatcatgttgaacggctatggcaggcacttcacgacacaataacgcgtaatcatcagtgccgctcaatgtggcaactgttgaaaaaagttcgccattttatggaaaccgtcagcccattccccggaggcaaacatgggctggcaaaagtgtag

SEQ ID NO: 476981 - DNA, 315 bp, Shigella flexneri
atgccactgctggataagctgcgtgagcagtacggggtcggaccgctatgcagcgaactgcatattgccccgtcaacgtattaccactgtcagcaacagcgacatcatccggataaacgcagtgcccgtgcgcagcgcgatgactggctgaagaaagagatacagcgcgtatacgatgaaaatcacaaggtatacggtgtaaagtctggcgtcagttgttacgggaaggtatcagagtggccagatgcactgtggcacgtctcatggcggttatgggacttgccggtgttctccggggtaaaaaggtccgtatga

SEQ ID NO: 476982 - DNA, 219 bp, Shigella flexneri; identical to SEQ ID NO: 473975

SEQ ID NO: 476983 - DNA, 465 bp, Shigella flexneri
atgaaccattatccgtcagtcacttcactggagacgccggaagctcgttgccgaagcggtgttccaccgctcccagcatgtcgccaacgggagagcatctacggtctgattgaactgtttattcaaattgtccaccgtctgtcagtacgctctgaacgtcggctggttaaaacactgctcgctgattttcagagggttcacggtaaaacagcacttttattccggattgcggaagcggctctgaataatccggatgggctggttaaagaggttgtgtaccatctgcatattgttgaaccagatcgcagcggtaagagaagttcatcatacttggcgcagttacgcgatgtttctgctagaggtgatgccgtaaagaacggcagaacattaccggaacaagatagcggtctacctgcactggtatcagacccggggcttccccggatgatctccacggtactttag

SEQ ID NO: 476984 - DNA, 582 bp, Shigella flexneri; identical to SEQ ID NO: 473786

SEQ ID NO: 476985 - DNA, 834 bp, Shigella flexneri; identical to SEQ ID NO: 476091

SEQ ID NO: 476986 - DNA, 219 bp, Shigella flexneri; identical to SEQ ID NO: 13129

SEQ ID NO: 476987 - DNA, 4119 bp, Shigella flexneri; identical to SEQ ID NO: 476457

SEQ ID NO: 476988 - DNA, 3054 bp, Shigella flexneri
atgacctggggcgagcaaaccgacgtaccggaatctgccgactggtataactccagctacatcatcgcttgggggtctaacgtaccgcagacacgtacgccggacgcccacttctttaccgaagtacgctacaaaggcactaaaaccatcgccattacccctgactactctgaagtggccaaattgtgcgaccagtggctggcaccgaaacaaggcactgatagcgccctggcgatggcaatggggcatgtgattttaaaagagtttcatctcgataatcccagcgactactttatcaactactgccgccgctacagcgacatgccgatgctggtaatgctggagcctcgcgacgatggtagctacgttcccgggcgcatgatccgcgcatctgacctggtggatggactgggcgaaagcaacaatccgcagtggaaaaccgtagcagttaataccgcaggtgaattggtagtgccgaacggttcgattggtttccgctggggagaaaaaggcaaatggaatctggaatccattgccgccggtacggaaaccgaattgtcgttaaccctgctcggtcaacatgacgctgttgcaggcgtggccttcccctactttggcggcattgaaaatccgcattttcgcagcgtaaaacacaatccggtgctggtgcgccaattgcccgttaaaaacctgacgttagtcgatggcaacacctgtccggtggtcagcgtttatgatttggtactggcgaattacggcctcgatcgcgggctggaagatgaaaacagcgcgaaagattacgctgaaatcaaaccgtacaccccagcctggggtgagcaaattaccggcgtaccgcgccagtatattgaaaccatcgcccgcgaatttgccgataccgcccataaaacgcatgggcgctcaatgattatcctcggcgcaggtgttaaccactggtatcacatggacatgaactaccgcgggatgatcaatatgctgatcttctgcggttgtgtcgggcaaagcggtggcggctgggcacactatgtcggccaggaaaaactgcgcccacaaaccggctggttgccactggcctttgcgctcgactggaaccgaccaccgcgccagatgaacagcacctcgtttttctacaatcattccagccaatggcgctatgaaaaagtctctgctcaggagttactttcaccgctcgccgatgccagtaagtacagcggtcatctgattgatttcaacgttcgcgccgaacgtatgggctggctaccttctgcgccgcagctggggcgtaacccgctcgggattaaagctgaagccgacaaggccggattatcccccacagaatttaccgcccaggcgctgaaatcgggcgatttacgtatggcctgcgaacaaccagatagcggcagcaatcatccgcgtaatttgtttgtctggcgctctaacctgcttggctcctccggcaaaggccacgagtatatacagaagtatctgctggggaccgaaagcgggattcagggcgaggaactcggtgccagcgacgggatcaaaccggaagaagtcgagtggcaaactgcggcgattgaaggcaagctcgacctgctggtgacgctcgacttccgcatgtccagtacctgcctgttctccgatatcgttctgcccaccgccacctggtatgaaaaagacgatatgaacacctcggatatgcatccatttattcatccgctttctgcggcggtcgatccggcctgggaatcacgcagcgactgggaaatctacaaaggtattgccaaagcattttcgcaagtgtgcgtgggccatcttggcaaagaaaccgacgtggtattacaaccactgctgcatgactctccggcagagctctcacagccgtgtgaagtgctcgactggcgcaaaggcgaatgcgatctgatcccgggtaaaaccgcgccgaatattgtggcggtggagcgcgactaccctgctacgtatgaacgctttacctcgctcgggccattgatggacaaacttggcaatggcggtaaagggatttcgtggaatacccaggatgaaatcgatttcctcggcaaactcaattacaccaagcgtgatggcccggcacaggggcgtccgctgattgacaccgccattgacgcttcagaagtgattctggcactggcaccggaaaccaacggtcatgttgcagtcaaagcgtggcaggcgctgggcgagatcaccgggcgcgaacatacccatctggcgctgcacaaagaggacgagaagattcgctttcgcgatattcaggcgcagccgcgtaaaattatctccagccccacatggtccggtctggaaagcgatcacgtatcctataacgcgggatacaccaacgttcatgagttaattccgtggcgcacgctgtcgggacgccagcagctctatcaggatcatccgtggatgcgtgcttttggtgaaagcctggtggcttatcgcccgcctatcgacacccgtagcgtcagtgagatgcgccagataccgccaaacggcttccaggaaaaagcacttaacttcctgacgccgcaccagaaatggggcattcactcaacctacagtgaaaacctgctaatgctgacgctctctcgcggtggaccgattgtctggatcagcgaaacagatgcccgagaactgaccattgtcgataacgactgggtggaagtatttaacgccaacggcgcgctgactgcccgcgcggtggtcagccaacgtgtaccgccgggcatgaccatgatgtatcacgcccaggaacgcattatgaatattcctggttcggaagtaactggcatgcgcggcggcattcataactcggtcacccgcgtttgcccgaaaccgacgcatatgattggcggttacgcgcagctggcctggggctttaactactacggcaccgtcggttcgaaccgcgacgaattcatcatgatccgcaagatgaagaacgttaactggctggatgatgaaggtcgcgatcaggtacaggaggcgaaaaaatga

SEQ ID NO: 476989 - DNA, 1389 bp, Shigella flexneri
atggcactgcaaaatgagaaaaatagtcgttatcttttacgcgactggaaaccagaaaatccggccttctgggaaaataaaggaaaacatattgctcgaagaaacctctggatatcagtcagttgtctacttcttgccttctgtgtctggatgctatttagcgcagttaccgttaatctcaataaaatcggttttaattttactaccgatcaactctttttattaaccgcattaccctccgtttctggcgcattattgcgtgttccctactcctttatggtgcctatattcggtggacgccgatggccggtttttagtactgcaatcctgattattccttgcgtctggctcggaattgccgtgcaaaatccgaatactccttttgggatatttatcgttatcgctttgctatgcggttttgcaggtgcaaactttgcttcgagcatgggcaatatcagtttcttctttccaaaagccaaacaagggagcgctcttgggattaatggcggattaggaaacttaggtgtaagtgtaatgcagctggttgcaccgctggtcatttttgtacctgtatttgcctttctcggcgtcaatggcgtaccgcaggccgacggttcggtgatgtcgctggcgaatgccgcatggatttgggtaccgctactggcgattgccacgatcgccgcctggtcagggatgaatgatatcgccagttcacgcgcctcaattgccgaccagctccctgtcttacaacgcctgcatctctggctgctgagcctgctttaccttgccaccttcggttcgtttatcggtttttctgcgggttttgccatgctggcaaaaacccagttcccggatgtgaatattctgcgcctggcgttctttggcccatttattggtgccatcgcgcggtcggttggtggtgctatttccgataaattcggcggcgtgcgggtgacgttgatcaactttatttttatggcgattttcagtgccctgctgttccttaccttaccgggcacaggctccggtaatttcatcgccttttacgccgtatttatggggctgtttctgaccgcgggtctgggaagtggttctactttccagatgatcgccgtcatctttcgccagataaccatttatcgggtgaagatgaaaggcggtagtgatgagcaagctcagagagaagccgtcaccgaaacggcggcaacgctgggctttatctcagccattggcgcagtgggcggcttttttattccgcaggcatttggcatgtcgctcaatatgaccggctctccggtcggcgcgatgaaagtgtttttaatcttctacatcgtttgtgtgctgctgacctggctggtttatggtcggcggaagttcagccaaaaataa

SEQ ID NO: 476990 - DNA, 270 bp, Shigella flexneri
gtgccgacacaaggtgcggaatcgccctggggcggcgcacaactgacgtttatcgcccgccgcgatgttacgccacagccaccacaaacgccgcaagccttactggagtttgctaaagccaatcccggcacggttacttatccgcgcccaccggactttaccggcacggcgtttcttgaacagttgctgattatgctgacgccagatcccgccgcattaaaagaagcgccggacgatgcgactttcgcccgtgtcactgcgcccttgtag

SEQ ID NO: 476991 - DNA, 264 bp, Shigella flexneri
gtggcgcagatcgcccgtgaaaacggaatcaacgataacctgctcttcaactggcgccatcaataccggaaaggtggcctgctgccttccggaaaaaatatgcctgcactgcttcccgtgacgttaacgccggagccggataataaaatcccggctccggcacaggaaccagagcagataaatacaccgtccgacagtctgtgctgtgagctggttctgccggccggaactctcaggcttaaaggtaaactgacgccggggtga

SEQ ID NO: 476992 - DNA, 207 bp, Shigella flexneri
atggaacgcctcttcaggagtctgaagaacgaatggatgccggtggtgggttacgtaagcttcagcgaggcagctcacgccataacggactatatcgttggatattacagtgcactaagaccgcacgaatataacggtgggttacccccaaacgaatcggaaaatcgatactggaaaaactctaactcggtggccagtttttgttga

SEQ ID NO: 476993 - DNA, 690 bp, Shigella flexneri
atgttcggaaaattatcacttgatgcagtcccgttccatgaacctatcgtcatggttacgatcgctggcattattttgggaggtctggcgctcgttggcctgatcacttacttcggtaagtggacctacctgtggaaagagtggctgacctccgtcgaccataaacgcctcggtatcatgtatatcatcgtggcgattgtgatgttgctgcgtggttttgctgacgccattatgatgcgtagccagcaggctcttgcctcggcgggtgaagcgggcttcctgccacctcaccactacgatcagatcttcaccgcgcacggcgtgattatgatcttcttcgtggcgatgcctttcgttatcggtctgatgaacctggtggttccgctgcagatcggcgcgcgtgacgttgcgttcccgttcctcaacaacttaagcttctggtttactgttgttggcgtgattctggttaacgtttctctcggcgtgggcgaatttgcgcagaccggctggctggcctatccaccgctatcgggaatagagtacagtccgggagtcggtgttgattactggatatggagtctccagctatccggtataggtacgacgcttaccggtatcaacttcttcgttaccattctgaagatgcgcgcaccgggcatgaccatgttcaagataccagtatttacctag

SEQ ID NO: 476994 - DNA, 483 bp, Shigella flexneri
gtgataaagccatttttaatgacggttgcaatattaacctcttgctgtgctcaggcgaaaatactaacaaatgaggagattgtttcacgatttattagtaacgttaaaacatctgcagataatgacgttgacttggatacagatggattcagacaactgaggatatcgtgcccatccccttctgccagcggtgcgattatattgagaaaagcttcttatgaattcggcaaaagtataggtgtatttgattttgcaaacaatgcatcaccagcgacgatgacatttttgatcccaatatataaagatgatgattttgattcagatactgttggttttacatttgcgttcaagatgccaagaggccagttttttgtagatgtaaaagaaaacgggaatatcagagctggagttaatgttaatggcgagtcgggagtgacctacgaaaattgcaaattgaatatgaaagatattaatgatgattaa

SEQ ID NO: 476995 - DNA, 267 bp, Shigella flexneri; identical to SEQ ID NO: 462029

SEQ ID NO: 476996 - DNA, 834 bp, Shigella flexneri
atggtctgccagatggaactgaccagccatctgctgacggctgcagccttcggcacgatgaagaacagcgaaaatgagcttgctgagcaacttatagaacaaaccggcgataacactctgacgttaatggataaaggttattactcactgggactgttaaatgcctggagcctggcgggagaacaccgccactggatgatacctctcagaaagggagcgcaatatgaagagctcagaaaactgggtaaaggcgatcatctggtgaagctgaaaaccagcccgcaggcacgaaaaaagtggccgggactgggaaatgaagtgacagcccgcctgctgaccgtgacgcgcaaaggaaaagtctgccatctgctgacgtcgatgacggacgccatgcgcttccccggaggagaaatggcggatctgtacagtcatcgctgggaaatcgaactgggatacagggagataaaacagacgatgcaactgagcaggctgacgctgagaagtaaaaagccggagcttgtggagcaagagctgtggggtgtcttactggcttataatctggtgagatatcagatgattaaaatggcggaacatctgaaaggttactggccgaatcaactgagtttctcagaatcatgcggaatggtgatgagaatgctgatgacattgcagggcgcttcaccgggacgtataccggagctgatgagcgatcttgcaagtatgggacaacttgtgaaattaccgacgagaaggggaagggccttcccgagagtggtaaaggagaggccctggaaataccccacagccccgaaaaagagccagtcagttgcttaa

SEQ ID NO: 476997 - DNA, 1812 bp, Shigella flexneri; identical to SEQ ID NO: 474377

SEQ ID NO: 476998 - DNA, 363 bp, Shigella flexneri; identical to SEQ ID NO: 476531

SEQ ID NO: 476999 - DNA, 930 bp, Shigella flexneri; identical to SEQ ID NO: 476530

SEQ ID NO: 477000 - DNA, 267 bp, Shigella flexneri; identical to SEQ ID NO: 462029

SEQ ID NO: 477001 - DNA, 354 bp, Shigella flexneri; identical to SEQ ID NO: 466835

SEQ ID NO: 477002 - DNA, 1098 bp, Shigella flexneri; identical to SEQ ID NO: 475447

SEQ ID NO: 477003 - DNA, 321 bp, Shigella flexneri
gtgtccgttaaactcaggctacctcagagcgcttatccgatttttgatcgtattgaagaaatggcatgggctcgtcactaccagcagatcgttcgtgaagaaaaagaaacggaactggcggacgacctggaaaaaggtctgcctcagcacctgtttgaatcgctctgcatcgaccatttgcaacgccacggtgccaataaacaggcaatcagccacgcatttgatgatgatgttgagtttcaggagcgcatggcagaacacatccggtacatggctgaaaccattgcccaccaccaggttgatattgatttggaggactaa

SEQ ID NO: 477004 - DNA, 141 bp, Shigella flexneri
atgggttaccgcacggtggctgaactggaatctgaaattctgcaactgcgtaaggcgttaaatgaagctcgccttgagcgcgatatattaaaaaaagcaacagcgtattttgcacaggagtcgctgaaaaatacgcgttaa

SEQ ID NO: 477005 - DNA, 834 bp, Shigella flexneri
atggtctgccagatggaactgaccagccatctgctgacggctgcagccttcggcacgatgaagaacagcgaaaatgagcttgctgagcaacttatagaacaaaccggcgataacactctgacgttaatggataaaggttattactcactgggactgttaaatggctggagcctggcgggagaacaccgccactggatgatacctctcagaaagggagcgcaatatgaagagctcagaaaactgggtaaaggcgatcatctggtgaagctgaaaaccagcccgcaggcacgaaaaaagtggccgggactgggaaatgaagtgacagcccgcctgctgaccgtgacgcgcaaaggaaaagtctgccatctgctgacgtcgatgacggacgccatgcgcttccccggaggagaaatggcggatctgtacagtcatcgctgggaaatcgaactgggatacagggagataaaacagacgatgcaactgagcaggctgacgctgagaagtaaaaagccggagcttgtggagcaagaactgtggggtgtcttactggcttataatctggtgagatatcagatgattaaaatggcggaacatctgaaaggttactggccgaatcaactgagtttctcagaatcatgcggaatggtgatgagaatgctgatgacattgcagggcgcttcaccgggacgtataccggagctgatgagcgatcttgcaagtatgggacaacttgtgaaattaccgacgagaaggggaagggccttcccgagagtggtaaaggagaggccctggaaataccccacagccccgaaaaagagccagtcagttgcttaa

SEQ ID NO: 477006 - DNA, 633 bp, Shigella flexneri; identical to SEQ ID NO: 474478

SEQ ID NO: 477007 - DNA, 1860 bp, Shigella flexneri
atgaggccaagtgaacttagcgacctgctttgggcgcaggttgacagggtggctccgcacctgttgccaaacggcaagatagaggggcatgagtgggttgccggtaacgtcaacggtgacaagggaaacagccttaaggtcaaccttatcggcaagaaaaaatgggctgatttcgctgagggagacggcggtgacatgcttgatttgtggatggcatgtcgtggaattaacctgcatcaggctatgcaggaagcgaaagcatttctcggtatcaaggatgacgatcaccatttcgatgccagacgtgagaagaaattctccagacctgatcgtaagaaaatcgcccgctacgttaccagaacagaatcccatcttgagtacctgcaatcgcgtggcatatcgccagaagtcgtaaagcgctacgaggttgtcagcggcaaggtgtggaatggagaacgagaactggatgctctggtgcttccgtacaaacgcgatggtgagttgttgcaggtcaagcgaatcagcactgagcgcccggacgggaagaaagtcattatggcagaaggtgattgcgaaccttgcctgttcggatggcaggctctggacgctggcgtgagggtggttgtgctttgcgaaggcgaaattgattgtatgagctatgcgcaatacggcatctcggcgttatccgtgccgtttggtggcgggaaaggcgctaagcaacagtggattgagtttgagtatcacaacctcgacaggtttgaggaaatattcatctcgatggacgttgatgatgttggtcgtgaagccgcaagggaaatcgtaagccgactcggtgaacatcgttgccgtcttgttactctgccgtacaaagacatcaacgaatgcctgatgaacggtgttaccgaggatgaaatctggcagtacatcggcacggcatcctacttcgatcctgaagaactctacagtgcgcgagagttttaccaggacactatcaacgctttctacggcaagcagcagtatctgtttaatccaccgtgggaatctctggcagataaattccagttccgtgaggcagagttgacgctggtcaatggtgtgcacggtcacggaaaggcatgcccactgaatgagcctattcttttagctgatgggacatggactactcacgggaatgtaaaaattggcgatcaggtggcgtcagtagacggcaatccgtcaactgtcactgggatattcccgcagggtgttagagatgtttaccgagtcacatttgaagatggtcgttatgttgattgcgcaggcgatcacctatgggaggtcactagtcgtggattcacgaaaggcgagaaacgccgcgtgatagataccttcgggttgaagcggttgagtgaaacgaagaggcacaaaaatggcgttaggattcctgaaataactggtgactttggcgaccactcagagccattagcatgggttatcggctcccttctcggggatggtagtcttagcaatgggagcgtgaagttttcaaacgtcgagccatacatgatcgagcgtatgaaggctgaactgcctgattacaacttctctggagatggtaaggactggctgatatcaacggcgcgtggtcaggtaaatccactcatggagaccctgcgaggttatggactaatggggtgcacagaaaaaaacaaattcatccctcgtgtgtttttttccgcaaataaatcaacgcgtataggcatgctgtgtggtctgcttgaaacggatgggtatgtcgagaaggatggaacgcttgttttttcctcagcaagtgaagaactgcgcaatgaagtggtcaacaaaaactggccaccgagttag

SEQ ID NO: 477008 - DNA, 273 bp, Shigella flexneri; identical to SEQ ID NO: 474417

SEQ ID NO: 477009 - DNA, 1872 bp, Shigella flexneri
atgcataatgtaaataatactcaagcgccaacattcttatataaggcaacttcaccatcatcaacagaatacagcgagttaaaaagcaaaatatccgatatccatagttcgcaaacttctctaaaaacaccagcatcagtgtctgaaaaagaaaactttgcaacgtcttttaatcagaaatgtcttgattttttattttcttcctcagggaaagaagatgtgttaagaagcatttattccaactcaatgaatgcgtatgccaaaagcgagattctcgaattttcaaatgttttgtactccttagtacatcaaaatggtcttaattttgaaaacgaaaagggacttcaaaaaattgtcgcacagtattcggaactaattataaaagataaattatcccaagattctgcctttggaccatggtcggcaaagaataagaaactccatcaattacgacaaaacattgagcacagacttgcactattagcacaacaacacacatctggtgaagctttatcattgggacaaaaactcctcaatactgaagtatcatcatttatcaagaataatattcttgctgaattaaagttaagtaatgaaactgtttcatctctcaaactagatgatttagttgacgcacaggcaaaacttgcctttgatagtttgcgcaatcaacgtaaaaatactattgatagtaaaggatttggtataggtaaactgtcaagagacttaaatacagtagccgtgtttcctgagctgttgagaaaagtccttaatgatattttagaagatataaaagattcgcatcctatccaagatggcctccctacacctcccgaagatatgccagatggcggaccaacccccggagccaatgagaaaacatcccaacctgtaattcactatcatatagtttttgacaacagagtatatgacaatagctatcacgagaacccagaaaatgatgcacagtctcctacttctcagacaaacgatctattatcccgtaacggaaactcattactaaatccacaaagagcactagttcaaaaagtaacttccgttctaccacactctatatcagatactgtccagacatttgcaaataattcagctttagaaaaggctttcaaccatactccagataattcggatggaataggttcagacctgttaactacgagtagtcaagaaagatctgcaaataactctctttctcggggacacaggcctctgaacatacagaactcttcaaccaccccccctctccacccggaaggagtgacaagcagtaatgataactcatcagatacaactaaaagtagcgcttctctttctcatagagtagcttcgcaaatcaataaattcaactcaaacactgattcaaaagtacttcagactgattttttatcaagaaatggagacacatatttaacacgggaaacgatatttgaagcttcaaaaaaagtaacaaactccctaagtaatcttatatctctcattggaactaaatcaggaacacaagaacgagagttacaggaaaaatcaaaggacattacaaaatccacaacagaacatagaataaacaacaaattaaaagttacagatgcaaatataagaaactacgtaacagaaaccaacgcagatacaattgataaaaatcatgcgatctatgaaaaggcaaaagaagtatctagcgccctcagcaaggtattgtcaaaaattgacgatacctctgcagaattacttacagatgatatatctgatttaaaaaataacaatgatattacagctgaaaacaataatatatataaagcagcaaaagatgtaaccacttccctatcaaaagtattaaagaatatcaataaggattaa

SEQ ID NO: 477010 - DNA, 327 bp, Shigella flexneri; identical to SEQ ID NO: 466843

SEQ ID NO: 477011 - DNA, 354 bp, Shigella flexneri; identical to SEQ ID NO: 466835

SEQ ID NO: 477012 - DNA, 354 bp, Shigella flexneri; identical to SEQ ID NO: 476545

SEQ ID NO: 477013 - DNA, 327 bp, Shigella flexneri
atgactaaaaatactcgtttttcccccgaagtccgtcaacgggcagtccgtatggttctggaaagtcagggcgaatatgactcacaatgggcgacaatttgttccattgccccaaagattggctgtacgccggagactctgcgtgtctgggttcgccagcatgagcgggataccgggggcgatgatggagggctcaccaccgctgaacgtcagcgtctgaaagagccggagcgtgaaaatcgtgaactgcgccgcagtaacgatatccttcgccaggcttccgcttattttgcgaaggcggagttcgaccgcctctggaaaaaatga

SEQ ID NO: 477014 - DNA, 483 bp, Shigella flexneri
atgaagcgtgaagaaatcgctgatctgatggcgtttgtcgtcgttgcagaggagcgtagcttcactcgcgcagcagcccgcctgagcatggtgcagtcagctttaagccagatagtgcgccgtatagaagaacgattgggattgcggcttctgacgcgaaccacgcgcagcgttgtacccactgaagcgggcgagcatcttttgtctgttcttggccctatattgcatgacatagattctgccctgacatccctgagcgatctgcagaaccgcccatccgggacaatacgtattactactgtagaacatgcagcaaaaacgatattgttaccagccatgcgcacattcctgaaatcgcatcctgaaattgatattcagcttaccattgattatggtttgaccgatgtcgtttctgaacgttttgatgcaggcgtcctgaggtgtactggcaatagcggatactaccatttgttctttttttaa

SEQ ID NO: 477015 - DNA, 600 bp, Shigella flexneri; identical to SEQ ID NO: 19015

SEQ ID NO: 477016 - DNA, 354 bp, Shigella flexneri; identical to SEQ ID NO: 476545

SEQ ID NO: 477017 - DNA, 231 bp, Shigella flexneri; identical to SEQ ID NO: 129443

SEQ ID NO: 477018 - DNA, 354 bp, Shigella flexneri
atgccactgctggataagctgcgtgagcagtacgggggcggaccgctatgcagcgaactgcatattgccccgtcaacgtattaccactgtcagcaacagcgacatcatccggataaatgcagtgcccgtgcgcagcgcgatgactggctgaagaaagagatacagcgcgtatacgatgaaaatcacaaggtatacggtgtaaagtctggcgtcagttgttacgggaaggtatcagagtggccagatgcactgtggcacgtctcatggcggttatgggacttgccggtgttctccggggtaaaaaggtccgtacgaccatcagccggaaagccgttgccgcaggcgaccgcgtaa

SEQ ID NO: 477019 - DNA, 279 bp, Shigella flexneri; identical to SEQ ID NO: 127146

SEQ ID NO: 477020 - DNA, 675 bp, Shigella flexneri; identical to SEQ ID NO: 475417

SEQ ID NO: 477021 - DNA, 675 bp, Shigella flexneri; identical to SEQ ID NO: 472105

SEQ ID NO: 477022 - DNA, 315 bp, Shigella flexneri
atgccactgctggataagctgcgtgagcagtacggggtcggaccgctatgcagcgaactgcatattgccccgtcaacgtattaccactgtcagcaacagcgacatcatccggataaacgcagtgcccgtgcgcagcgcgatgactggctgaagaaagagatacagcgcgtatacgatgaaaatcacaaggtatacggtgtaaagtctggcgtctgttgttacgggaaggtatcagagtggccagatgcactgtggcacgtctcatggcggttatgggacttgccggtgttctccggggtaaaaaggtccgtatga
